United States Patent Application Publication US 2014/0259212 A1 - sequence listing, part 24

SEQ ID NO: 77734 - DNA, 1245 bp, Zea mays
  CDS (1)..(1245)
atggcaggaatggcacccgagggttctcagtttgatgctaagcactatgattctaaaatgcaggagctgctgagcactggtgagactgaggagttcttcacttcatatgatgaagtttttgaaagttttgatgacatgggccttcaagagaatcttctgagaggcatttatgcatatggttttgagaaaccatctgcaattcagcagagaggaattgttcccttctgcaaggggcttgatgtcattcagcaagcacaatctggtacaggaaagacagcaaccttctgttctgggatcttgcagcagcttgactatggtctggttgaatgccaggccctggttcttgctcccacccgtgagcttgcacagcaaattgagaaagtcatgcgcgcacttggtgactaccttggtgttaaggtccatgcatgtgtgggaggaacatccgtccgtgaggaccaaaggattcttggcagtggtgtgcatgttgttgttggtacacctggtcgtgtgtttgatatgctgcgcagacagtccctccgccctgataacatcaagatgtttgttctagatgaagctgatgaaatgctttctcgtggtttcaaggatcagatttatgacatcttccagcttctgccatccaagattcaggttggagtcttctctgctaccatgccacctgaggcccttgagattacccgcaagttcatgaacaaaccagtgagaattcttgtgaagagagatgagctgacccttgagggtatcaagcagttctatgtgaatgtggacaaggaagactggaagctggacacactgtgtgacctgtatgagaccctggccattacccagagtgtcatctttgtcaacacccgccgcaaggtggactggctcactgacaagatgaggagcagggaccacaccgtttctgccactcatggtgacatggaccagaacactagagacatcatcatgagggagttccggtctggctcctcccgtgtgctcatcaccaccgacctgcttgctcgtggtattgatgttcagcaggtgtccctggtcatcaactatgatctccccacccagccagagaattacctgcatcgcattggtcgtagtggtcgtttcggtaggaagggtgttgccatcaactttgtgacccgcgacgacgagcggatgctgttcgacatccagaagttctacaacgtgttgattgaggagctgcctgccaacgtcgctgaccttctgtga

SEQ ID NO: 77735 - protein, 414 aa, Zea mays
MAGMAPEGSQFDAKHYDSKMQELLSTGETEEFFTSYDEVFESFDDMGLQENLLRGIYAYGFEKPSAIQQRGIVPFCKGLDVIQQAQSGTGKTATFCSGILQQLDYGLVECQALVLAPTRELAQQIEKVMRALGDYLGVKVHACVGGTSVREDQRILGSGVHVVVGTPGRVFDMLRRQSLRPDNIKMFVLDEADEMLSRGFKDQIYDIFQLLPSKIQVGVFSATMPPEALEITRKFMNKPVRILVKRDELTLEGIKQFYVNVDKEDWKLDTLCDLYETLAITQSVIFVNTRRKVDWLTDKMRSRDHTVSATHGDMDQNTRDIIMREFRSGSSRVLITTDLLARGIDVQQVSLVINYDLPTQPENYLHRIGRSGRFGRKGVAINFVTRDDERMLFDIQKFYNVLIEELPANVADLL

SEQ ID NO: 77736 - DNA, 1245 bp, Zea mays
  CDS (1)..(1245)
atggcaggaatggcacctgagggttctcagttcgatgctaagcactatgattctaagatgcaggagctgctgagcaccggtgagactgaggagttcttcacttcatatgatgaagtttttgagagttttgatgatatgggcctccaagagaatcttctgagaggcatttatgcttatggttttgagaagccatctgcaattcagcagagaggaattgttcccttctgcaagggtcttgatgtcattcagcaagcacaatctggtacaggaaagacagcaaccttctgttctgggatcttgcagcagctggactatggcctggttgaatgccaggccctggtccttgctcccacccgtgagcttgcacagcaaatcgagaaagtcatgcgcgcgcttggtgattaccttggtgttaaggtccatgcatgtgtgggaggaacatccgtccgtgaggaccaaaggattcttggcagtggtgtgcatgttgttgttggtacacctggtcgtgtgtttgatatgctgcgcagacagtccctccgccctgataacatcaagatgtttgttctagatgaagctgatgaaatgctttctcgtggtttcaaggatcagatttacgacatcttccagcttctcccagccaagattcaggttggagtcttctctgctaccatgccccctgaggcccttgagattacccgcaagttcatgaacaagccagtgagaatcctcgtgaagagagatgagctgactcttgagggtatcaagcagttctatgtgaatgtggataaggaagactggaagctggacacactgtgtgacctgtacgagacccttgccatcacccagagtgtcatctttgtcaacacccgccgcaaggtggactggctcactgacaagatgaggagcagggaccacactgtttctgccactcatggtgacatggaccagaacactagagacatcatcatgagggaattccggtctggctcctcccgtgtgctcatcaccaccgacctgcttgctcgtggtattgatgttcagcaggtgtccctggtcatcaactatgatctccccacccagccagagaattacctgcatcgcattggtcgtagtggtcgtttcggtaggaagggtgttgccatcaactttgtgacccgcgacgacgagcggatgctgttcgacatccagaagttctacaacgtgttgattgaggagctgcctgccaacgtcgctgaccttctgtga

SEQ ID NO: 77737 - protein, 414 aa, Zea mays; identical to SEQ ID NO: 66061

SEQ ID NO: 77738 - DNA, 1284 bp, Zea mays; identical to SEQ ID NO: 66200
  CDS (1)..(1284)

SEQ ID NO: 77739 - protein, 427 aa, Zea mays; identical to SEQ ID NO: 66201

SEQ ID NO: 77740 - DNA, 1500 bp, Zea mays; identical to SEQ ID NO: 66192
  CDS (1)..(1500)

SEQ ID NO: 77741 - protein, 499 aa, Zea mays; identical to SEQ ID NO: 66193

SEQ ID NO: 77742 - DNA, 1521 bp, Zea mays
  CDS (1)..(1521)
atgggccgcaatcttccagccgagcaagtggaagcacccaggagcagcaagatggacaagaagagaaagaaggacaagaagcggaagctggcagccgaggccgaggaggaggcggcggtgacggcgacagtggagaccgtgaagagcagcaagaagaagcgggtggagaatgaacccggcgcaggagcagtggaggcggagaacggcgctgagaagaccgtggcggtgaccgggaagggttcggaggaccctaagtacgcgccgctacggtcgttctccgctgccgagctgccgtctcaggtgctcgaatgctgcagcgcgttcgcgcggccgtcacctatccaggcacacgcctggccgttcctcctcgacggccgggacttcatcggcatcgccgccaccggatccggaaagacaatcgcctttggcgtgccggcgctgatgcacatcaggaagaaggtaggggggaaagcagggaagaaggctgtgccacggtgcctcgtgctatcaccaacgagggagctcgctcagcagatttcagatgtacttagtgaggctggtgcaccatgtgggataaaatcagtctgtctttatggtggaactaaaaaggaaccccaaatatctgcccttaaatctggagtggatatagtcataggaactcctggtcgtatgaaagaccttattgaaatgggtgtttgctgtcttaatgaggtttcgtttgtggttctagatgaagcagataggatgctggatttgggtttcgaacctgaagtcagggcaattttgagccaaacatcatctgtacgccagatggttatgttcagtgcaacatggcctcttgctgtccacaaattagcccaggagtttatggatccaaatccgataaaggttgttattggatcagaagaccttgctgctaaccatgacgtgatgcaaattgttgaagtattggatgatagaacaagggattcaagattacttgccttgcttgacaaataccatcaagcacaaagggttttggtttttgtgctgtacaagaaagaagctgcacgagtggaaacaatgcttcagagaaggggatggaaggctgtttcagtccatggcgacaaggctcagcatgatagaacaaaagctttatctttatttaaagaagggaaatgcccattaatgattgctacagatgtcgcttcacgtggacttgatattcctgatgttgaagtagtgattaactatagttaccctttgaccactgaggactacgtccacaggataggaaggactggtcgtgctggcaagaaaggtgttgcacatacctttttcactcaagctaacaaggcacttgctggtgaacttgtgaatgttctgcgggaggctgatcaggttgttcctccagcccttatgaaatttggcacacatgtcaagaaaaaggaatctaagatatacggatctcatttcaaggaaattacagcagatgctcctaaatctacgaagatcacatttggcgattccgatgaggactga

SEQ ID NO: 77743 - protein, 506 aa, Zea mays
MGRNLPAEQVEAPRSSKMDKKRKKDKKRKLAAEAEEEAAVTATVETVKSSKKKRVENEPGAGAVEAENGAEKTVAVTGKGSEDPKYAPLRSFSAAELPSQVLECCSAFARPSPIQAHAWPFLLDGRDFIGIAATGSGKTIAFGVPALMHIRKKVGGKAGKKAVPRCLVLSPTRELAQQISDVLSEAGAPCGIKSVCLYGGTKKEPQISALKSGVDIVIGTPGRMKDLIEMGVCCLNEVSFVVLDEADRMLDLGFEPEVRAILSQTSSVRQMVMFSATWPLAVHKLAQEFMDPNPIKVVIGSEDLAANHDVMQIVEVLDDRTRDSRLLALLDKYHQAQRVLVFVLYKKEAARVETMLQRRGWKAVSVHGDKAQHDRTKALSLFKEGKCPLMIATDVASRGLDIPDVEVVINYSYPLTTEDYVHRIGRTGRAGKKGVAHTFFTQANKALAGELVNVLREADQVVPPALMKFGTHVKKKESKIYGSHFKEITADAPKSTKITFGDSDED

SEQ ID NO: 77744 - DNA, 2124 bp, Zea mays; identical to SEQ ID NO: 66202
  CDS (1)..(2124)

SEQ ID NO: 77745 - protein, 707 aa, Zea mays; identical to SEQ ID NO: 66203

SEQ ID NO: 77746 - DNA, 1845 bp, Zea mays; identical to SEQ ID NO: 66204
  CDS (1)..(1845)

SEQ ID NO: 77747 - protein, 614 aa, Zea mays; identical to SEQ ID NO: 66205

SEQ ID NO: 77748 - DNA, 2397 bp, Zea mays; identical to SEQ ID NO: 66206
  CDS (1)..(2397)

SEQ ID NO: 77749 - protein, 798 aa, Zea mays; identical to SEQ ID NO: 66207

SEQ ID NO: 77750 - DNA, 1998 bp, Zea mays; identical to SEQ ID NO: 66208
  CDS (1)..(1998)

SEQ ID NO: 77751 - protein, 665 aa, Zea mays; identical to SEQ ID NO: 66209

SEQ ID NO: 77752 - DNA, 2205 bp, Zea mays; identical to SEQ ID NO: 66210
  CDS (1)..(2205)

SEQ ID NO: 77753 - protein, 734 aa, Zea mays; identical to SEQ ID NO: 66211

SEQ ID NO: 77754 - DNA, 1944 bp, Zea mays; identical to SEQ ID NO: 66212
  CDS (1)..(1944)

SEQ ID NO: 77755 - protein, 647 aa, Zea mays; identical to SEQ ID NO: 66213

SEQ ID NO: 77756 - DNA, 1584 bp, Zea mays; identical to SEQ ID NO: 66214
  CDS (1)..(1584)

SEQ ID NO: 77757 - protein, 527 aa, Zea mays; identical to SEQ ID NO: 66215

SEQ ID NO: 77758 - DNA, 1527 bp, Zea mays; identical to SEQ ID NO: 66216
  CDS (1)..(1527)

SEQ ID NO: 77759 - protein, 508 aa, Zea mays; identical to SEQ ID NO: 66217

SEQ ID NO: 77760 - DNA, 25 bp, Artificial sequence
  primer
atgaccgctttttctaccctgaatg

SEQ ID NO: 77761 - DNA, 24 bp, Artificial sequence
  primer
ttattttaataaccgcacccggca

SEQ ID NO: 77762 - protein, 442 aa, Artificial sequence
  consensus sequence
  Variant (2)..(5): Xaa in position 2 to 5 is any amino acid
  Variant (7)..(8): Xaa in position 7 to 8 is any amino acid
  Variant (9)..(10): Xaa in position 9 to 10 is any or no amino acid
  Variant (12)..(12): Xaa in position 12 is any amino acid
  Variant (13)..(14): Xaa in position 13 to 14 is any or no amino acid
  Variant (16)..(19): Xaa in position 16 to 19 is any amino acid
  Variant (21)..(21): Xaa in position 21 is any amino acid
  Variant (24)..(24): Xaa in position 24 is any amino acid
  Variant (28)..(29): Xaa in position 28 to 29 is any amino acid
  Variant (31)..(50): Xaa in position 31 to 50 is any amino acid
  Variant (51)..(77): Xaa in position 51 to 77 is any or no amino acid
  Variant (84)..(84): Xaa in position 84 is any amino acid
  Variant (86)..(102): Xaa in position 86 to 102 is any amino acid
  Variant (103)..(112): Xaa in position 103 to 112 is any or no amino acid
  Variant (115)..(132): Xaa in position 115 to 132 is any amino acid
  Variant (133)..(138): Xaa in position 133 to 138 is any or no amino acid
  Variant (143)..(144): Xaa in position 143 to 144 is any amino acid
  Variant (146)..(159): Xaa in position 146 to 159 is any amino acid
  Variant (160)..(165): Xaa in position 160 to 165 is any or no amino acid
  Variant (172)..(172): Xaa in position 172 is any amino acid
  Variant (175)..(175): Xaa in position 175 is any amino acid
  Variant (176)..(176): Xaa in position 176 is any or no amino acid
  Variant (178)..(178): Xaa in position 178 is any amino acid
  Variant (179)..(180): Xaa in position 179 to 180 is any or no amino acid
  Variant (182)..(195): Xaa in position 182 to 195 is any amino acid
  Variant (196)..(221): Xaa in position 196 to 221 is any or no amino acid
  Variant (223)..(225): Xaa in position 223 to 225 is any amino acid
  Variant (230)..(247): Xaa in position 230 to 247 is any amino acid
  Variant (248)..(275): Xaa in position 248 to 275 is any or no amino acid
  Variant (277)..(297): Xaa in position 277 to 297 is any amino acid
  Variant (298)..(329): Xaa in position 298 to 329 is any or no amino acid
  Variant (331)..(342): Xaa in position 331 to 342 is any amino acid
  Variant (343)..(343): Xaa in position 343 is any or no amino acid
  Variant (345)..(351): Xaa in position 345 to 351 is any amino acid
  Variant (352)..(359): Xaa in position 352 to 359 is any or no amino acid
  Variant (362)..(364): Xaa in position 362 to 364 is any amino acid
  Variant (366)..(367): Xaa in position 366 to 367 is any amino acid
  Variant (369)..(373): Xaa in position 369 to 373 is any amino acid
  Variant (374)..(374): Xaa in position 374 is any or no amino acid
  Variant (376)..(382): Xaa in position 376 to 382 is any amino acid
  Variant (383)..(386): Xaa in position 383 to 386 is any or no amino acid
  Variant (388)..(388): Xaa in position 388 is any amino acid
  Variant (392)..(392): Xaa in position 392 is any amino acid
  Variant (397)..(397): Xaa in position 397 is any amino acid
  Variant (399)..(403): Xaa in position 399 to 403 is any amino acid
  Variant (404)..(404): Xaa in position 404 is any or no amino acid
  Variant (406)..(406): Xaa in position 406 is any amino acid
  Variant (408)..(410): Xaa in position 408 to 410 is any amino acid
  Variant (412)..(416): Xaa in position 412 to 416 is any amino acid
  Variant (417)..(424): Xaa in position 417 to 424 is any or no amino acid
  Variant (426)..(426): Xaa in position 426 is any amino acid
  Variant (429)..(429): Xaa in position 429 is any amino acid
  Variant (432)..(432): Xaa in position 432 is any amino acid
  Variant (435)..(435): Xaa in position 435 is any amino acid
  Variant (437)..(438): Xaa in position 437 to 438 is any amino acid
  Variant (439)..(439): Xaa in position 439 is any or no amino acid
  Variant (441)..(441): Xaa in position 441 is any amino acid
QXXXXPXXXXGXXXDXXXXAXTGXGKTXXFXXXXXXXXXXXXXXXXXXXXXXXXXXXXXXXXXXXXXXXXXXXXXXXPTRELAXQXXXXXXXXXXXXXXXXXXXXXXXXXXXGGXXXXXXXXXXXXXXXXXXXXXXXXTPGRXXDXXXXXXXXXXXXXXXXXXXXVLDEADXMLXXGXXXFXXXXXXXXXXXXXXXXXXXXXXXXXXXXXXXXXXXXXXXXQXXXFSATXXXXXXXXXXXXXXXXXXXXXXXXXXXXXXXXXXXXXXXXXXXXXXQXXXXXXXXXXXXXXXXXXXXXXXXXXXXXXXXXXXXXXXXXXXXXXXXXXXXXFXXXXXXXXXXXXXLXXXXXXXXXXXXXXXHGXXXQXXRXXXXXXFXXXXXXXXXXXLXATDXAARGXDXXXXXXVXNXXXPXXXXXXXXXXXXXYXHRXGRXGRXGXXXGXA

SEQ ID NO: 77763 - protein, 20 aa, Artificial sequence
  protein pattern
  Variant (2)..(2): Xaa in position 2 is Ile, Leu or Val
  Variant (3)..(5): Xaa in position 3 to 5 is any amino acid
  Variant (6)..(6): Xaa in position 6 is Ala, Gly or Ser
  Variant (7)..(7): Xaa in position 7 is any amino acid
  Variant (8)..(8): Xaa in position 8 is Asn, Ser or Thr
  Variant (10)..(10): Xaa in position 10 is any amino acid
  Variant (14)..(14): Xaa in position 14 is any or no amino acid
  Variant (16)..(16): Xaa in position 16 is any or no amino acid
  Variant (18)..(19): Xaa in position 18 to 19 is any amino acid
  Variant (20)..(20): Xaa in position 20 is Ala, Gly, Pro or Ser
DXXXXXXXGXGKTXAXFXXX

SEQ ID NO: 77764 - protein, 11 aa, Artificial sequence
  protein pattern
  Variant (5)..(5): Xaa in position 5 is Asp, Glu, Gln or Arg
  Variant (7)..(7): Xaa in position 7 is Phe, Ile, Leu, Met or Val
  Variant (8)..(9): Xaa in position 8 to 9 is any amino acid
DEADXMXXXGF

SEQ ID NO: 77765 - protein, 12 aa, Artificial sequence
  protein pattern
  Variant (2)..(2): Xaa in position 2 is Ile or Val
  Variant (3)..(3): Xaa in position 3 is Ala, Cys, Ser or Thr
  Variant (4)..(4): Xaa in position 4 is Ser or Thr
  Variant (6)..(6): Xaa in position 6 is Ile, Leu or Val
  Variant (7)..(7): Xaa in position 7 is any amino acid
  Variant (8)..(8): Xaa in position 8 is Ala, Gly, Ser or Thr
  Variant (11)..(11): Xaa in position 11 is Phe, Ile or Leu
LXXXDXXXRGXD

SEQ ID NO: 77766 - protein, 12 aa, Artificial sequence
  protein pattern
  Variant (2)..(2): Xaa in position 2 is any amino acid
  Variant (3)..(4): Xaa in position 3 to 4 is any or no amino acid
  Variant (10)..(10): Xaa in position 10 is Ala or Ser
  Variant (11)..(11): Xaa in position 11 is any amino acid
LXXXPTRELXXQ

SEQ ID NO: 77767 - protein, 11 aa, Artificial sequence
  protein pattern
  Variant (2)..(2): Xaa in position 2 is any amino acid
  Variant (3)..(4): Xaa in position 3 to 4 is any or no amino acid
  Variant (9)..(9): Xaa in position 9 is Ile, Leu, Met or Val
  Variant (10)..(10): Xaa in position 10 is any amino acid
VXXXTPGRXXD

SEQ ID NO: 77768 - DNA, 195 bp, Escherichia coli
  CDS (1)..(195): transl_table=11
atgagatatgacaatgttaaaccatgtccattttgtggttgtccatcagtaacggtgaaagccatttcaggatattaccgagcgaagtgtaacggatgcgaatcccgaaccggttatggtggaagtgaaaaagaagcactcgaaagatggaataaacgaaccactggaaataataatggaggtgttcatgtataa

SEQ ID NO: 77769 - protein, 64 aa, Escherichia coli
MRYDNVKPCPFCGCPSVTVKAISGYYRAKCNGCESRTGYGGSEKEALERWNKRTTGNNNGGVHV

SEQ ID NO: 77770 - DNA, 195 bp, Salmonella enterica subsp. enterica serovar Typhi str. CT18
  CDS (1)..(195): transl_table=11
atgcggtatgaaaaagtcaaaccatgtccgttttgtggttgtccatcagtaacggtgaaagccatttcaggatattaccgcgcaaagtgtaacggatgcgaatcccgaaccggctatagtggaagtgaaaaagaagcactcgaaagatggaataaacgaactactggaaataataatggaggtgttcatgtataa

SEQ ID NO: 77771 - protein, 64 aa, Salmonella enterica subsp. enterica serovar Typhi str. CT18
MRYEKVKPCPFCGCPSVTVKAISGYYRAKCNGCESRTGYSGSEKEALERWNKRTTGNNNGGVHV

SEQ ID NO: 77772 - DNA, 26 bp, Artificial sequence
  primer
atgagatatgacaatgttaaaccatg

SEQ ID NO: 77773 - DNA, 27 bp, Artificial sequence
  primer
ttatacatgaacacctccattattatt

SEQ ID NO: 77774 - DNA, 1725 bp, Escherichia coli
  CDS (1)..(1725): transl_table=11
atggatattcaaaaaagagtgagtgacatggaaccaaaaacaaaaaaacagcgttcgctttatatcccttacgctggccctgtactgctggaatttccgttgttgaataaaggcagtgccttcagcatggaagaacgccgtaacttcaacctgctggggttactgccggaagtggtcgaaaccatcgaagaacaagcggaacgagcatggatccagtatcagggattcaaaaccgaaatcgacaaacacatctacctgcgtaacatccaggacactaacgaaaccctcttctaccgtctggtaaacaatcatcttgatgagatgatgcctgttatttataccccaaccgtcggcgcagcctgtgagcgtttttctgagatctaccgccgttcacgcggcgtgtttatctcttaccagaaccggcacaatatggacgatattctgcaaaacgtgccgaaccataatattaaagtgattgtggtgactgacggtgaacgcattctggggcttggtgaccagggcatcggcgggatgggcattccgatcggtaaactgtcgctctataccgcctgtggcggcatcagcccggcgtatacccttccggtggtgctggatgtcggaacgaacaaccaacagctgcttaacgatccgctgtatatgggctggcgtaatccgcgtatcactgacgacgaatactatgaattcgttgatgaatttatccaggctgtgaaacaacgctggccagacgtgctgttgcagtttgaagactttgctcaaaaaaatgcgatgccgttacttaaccgctatcgcaatgaaatttgttcttttaacgatgacattcagggcactgcggcggtaacagtcggcacactgatcgcagcaagccgcgcggcaggtggtcagttaagcgagaaaaaaatcgtcttccttggcgcaggttcagcgggatgcggcattgccgaaatgatcatctcccagacccagcgcgaaggattaagcgaggaagcggcgcggcagaaagtctttatggtcgatcgctttggcttgctgactgacaagatgccgaacctgctgcctttccagaccaaactggtgcagaagcgcgaaaacctcagtgactgggataccgacagcgatgtgctgtcactgctggatgtggtgcgcaatgtaaaaccagatattctgattggcgtctcaggacagaccgggctgtttacggaagagatcatccgtgagatgcataaacactgtccgcgtccgatcgtgatgccgctgtctaacccgacgtcacgcgtggaagccacaccgcaggacattatcgcctggaccgaaggtaacgcgctggtcgccacgggcagcccgtttaatccagtggtatggaaagataaaatctaccctatcgcccagtgtaacaacgcctttattttcccgggcatcggcctgggtgttattgcttccggcgcgtcacgtatcaccgatgagatgctgatgtcggcaagtgaaacgctggcgcagtattcaccattggtgctgaacggcgaaggtatggtactgccggaactgaaagatattcagaaagtctcccgcgcaattgcgtttgcggttggcaaaatggcgcagcagcaaggcgtggcggtgaaaacctctgccgaagccctgcaacaggccattgacgataatttctggcaagccgaataccgcgactaccgccgtacctccatctaa

SEQ ID NO: 77775 - protein, 574 aa, Escherichia coli
MDIQKRVSDMEPKTKKQRSLYIPYAGPVLLEFPLLNKGSAFSMEERRNFNLLGLLPEVVETIEEQAERAWIQYQGFKTEIDKHIYLRNIQDTNETLFYRLVNNHLDEMMPVIYTPTVGAACERFSEIYRRSRGVFISYQNRHNMDDILQNVPNHNIKVIVVTDGERILGLGDQGIGGMGIPIGKLSLYTACGGISPAYTLPVVLDVGTNNQQLLNDPLYMGWRNPRITDDEYYEFVDEFIQAVKQRWPDVLLQFEDFAQKNAMPLLNRYRNEICSFNDDIQGTAAVTVGTLIAASRAAGGQLSEKKIVFLGAGSAGCGIAEMIISQTQREGLSEEAARQKVFMVDRFGLLTDKMPNLLPFQTKLVQKRENLSDWDTDSDVLSLLDVVRNVKPDILIGVSGQTGLFTEEIIREMHKHCPRPIVMPLSNPTSRVEATPQDIIAWTEGNALVATGSPFNPVVWKDKIYPIAQCNNAFIFPGIGLGVIASGASRITDEMLMSASETLAQYSPLVLNGEGMVLPELKDIQKVSRAIAFAVGKMAQQQGVAVKTSAEALQQAIDDNFWQAEYRDYRRTSI

SEQ ID NO: 77776 - DNA, 2454 bp, Oryza sativa
  CDS (268)..(2130)
gcccgacaacgcctccaccggtaggagccgcgtcctccgcgcgcgagcgcgagttatcctcaccacccaccgctcgtcgcctccactccgatcgccgccgcgcggcaggggagggggggagggtatcctcaccgccggtgccctcaccgcggcgacccttcaaaatcccccaggacgccgggaggggatcggctccgactccgtccgagcacgcgccaccgccaccgccaccgccattgtgggccctcgatcccggggcggcgcgcgatgtggcgtcacgcggcgcggcggtcgtcggcgcagatccggcggagcggggtcatgtcgtcgtcgtcgtcgccggcggcccccgctgccgcggccggcgccgcggtgcccggcccctgcatcgtccacaagcgcggcaccgacatcctccacgacccatggttcaacaaggacacggcgttccccatgacggagcgggatcgccttggcctccgcggcctcctcccgccgcgggtcatgtcgttcgagcagcagtacgaccgcttcataaactcgttcaggtcgctggagcacaacacccggggagagcccgacaccatcgtcgcgctggccaagtggaggatcctcaacaggctgcacgaccggaacgagacgctgtactacagagttctaattgacaatatcaaggatttcgcgccgataatatacactccgactgttgggttggtctgcgagaattacagtggcttgttcaggcgcccccgtgggatgtatttcagcgccaaggataagggggagatgatgtcgatgatttacaactggccagccgagaaggttgacatgatagttgtgactgatgggagccgtattctaggtctaggtgatcttggagttcagggcataggtatacctatcggtaaacttgatgtttatgttgccgctgctggtatcaatccacaaaaggttcttccaattatgcttgacgttggaacaaataacacaaagcttctagaagacaagctatatttaggactgaggcaacctaggctggaaggagaagaatacttgtctgttgtagatgaattcatggaagctgttcatgcacgttggccgaaagcagttgtgcagtttgaagacttccaaatgaaatgggcctttgaaactcttcagaggtatcggaaccgattttgtatgttcaatgatgacgtgcaggggacagcaggagttgctctagctggcctacttggagctgtgagagcacaaggtcgacccctctctgattttactaagcagaagatagttgtggtgggagctggaagtgctgggataggtgtgcttaatatggctaaacaggcgatgctaaggatgccagggataaacaggagcggggaagggcataatcaattctgggttctggacaaagatggacttattaccaaatccagaaagggcctggatcctgtagttgctcgctatgccagaggttttggtcctgaagaggtgcaagatctccatgagggggctagtcttgttgaagtggtcaggaaagtgaagcctcatgtgcttttaggactttctggagttgggggcatatttaatgaggaggttctcaaggctatgaaagaatccgattcccctcgtcctgcaatttttgcaatgtccaacccaactactaaagccgaatgtactcctgaagatgtattcaaatatgttggagacaatgcagtatttgccagtggaagccctttcagtaatgtcactttaggcaatggtagacaagggtacgctaatcaagcaaacaatatgtatctgtttcctggtatcggtttaggagcccttctttcaggtgctcggcatattacagatggcatgctccaatcagcagctgagtgccttgcgtcatacatcacagacgatgaaattcgaaaaggcatcctctttccatcaatctcaagtatcaggcacatcaccgcacgtgtcggcgccgcagtcgtccgtgccgctgttgatgaagatctggccgaggggcgttgtgatgtagacgctagggacctcaagagcatgactgaggcggacacagtcgactttgtggctcggaagatgtggtaccctatttacagccccctcgtgaacgataagtgaagctcgatgaagtgaaaaatctgacgttgcatgaaccagatgtagcacctgaacaactatcagtcacatatttgttcagacttattttttttgttgctattttcatttagctgcgctactggagggtaattcagcagataccgatgcccacgtctatggctatgttatcacgccacgccatttttttgttctgttttgacagcttccgtcatcaaacgttgctcaatttcaagattagttgagctacataaatttacatctcgtgctttactacattctactaatatattttttttggatattgatctatcactctatccctgc

SEQ ID NO: 77777 - protein, 620 aa, Oryza sativa
MWRHAARRSSAQIRRSGVMSSSSSPAAPAAAAGAAVPGPCIVHKRGTDILHDPWFNKDTAFPMTERDRLGLRGLLPPRVMSFEQQYDRFINSFRSLEHNTRGEPDTIVALAKWRILNRLHDRNETLYYRVLIDNIKDFAPIIYTPTVGLVCENYSGLFRRPRGMYFSAKDKGEMMSMIYNWPAEKVDMIVVTDGSRILGLGDLGVQGIGIPIGKLDVYVAAAGINPQKVLPIMLDVGTNNTKLLEDKLYLGLRQPRLEGEEYLSVVDEFMEAVHARWPKAVVQFEDFQMKWAFETLQRYRNRFCMFNDDVQGTAGVALAGLLGAVRAQGRPLSDFTKQKIVVVGAGSAGIGVLNMAKQAMLRMPGINRSGEGHNQFWVLDKDGLITKSRKGLDPVVARYARGFGPEEVQDLHEGASLVEVVRKVKPHVLLGLSGVGGIFNEEVLKAMKESDSPRPAIFAMSNPTTKAECTPEDVFKYVGDNAVFASGSPFSNVTLGNGRQGYANQANNMYLFPGIGLGALLSGARHITDGMLQSAAECLASYITDDEIRKGILFPSISSIRHITARVGAAVVRAAVDEDLAEGRCDVDARDLKSMTEADTVDFVARKMWYPIYSPLVNDK

SEQ ID NO: 77778 - DNA, 2154 bp, Glycine max
  CDS (91)..(1860)
ggctacatctgttttccgctgcttgtttgtgcctgcgtagttacaaagtaaaaagagggaggactaggacaaaagttgttggcagtcatcatgtcgagcgcttcgttgaaggagatgaggaacggtggtgaggattatagcaatggtcatggtggtggtggtgtgagggacttgtatggagaggattgtgccactgaggaccagcttatcactccatggactttctctgtggccagtggatgcagtttactgagagatccacgctacaacaaagggctggcctttaccgagggagagagagatgctcattacttgcgtggccttttgcctccagctatcttcaatcaagaacttcaggaaaagaggttgatgcacaatcttcgccagtatgaggttcctctgcataggtacatggcaatgatggatcttcaggagagaaatgaaaggctgttttacaagcttctgatcaataatgttgaggaactgcttcctgttgtttacactccaacggttggagaagcatgccagaaatacggaagcatttttaggcgtcctcagggtctatatataagtttgaaggagaaaggcaagatccttgaagtactgaaaaactggccagaaaagagtattcaagttattgttgtgactgatggtgagcgcatattaggacttggagatcttggttgccagggaatgggaattcctgttgggaaacgtcctctttatacagctttaggagttgaccgcccgtcatcttgcttgccaataaccattgatgttggcacaaacaatgagaagttgctgaatgatgagttctacattgggcttaaacaaaagcgggcaactgggcaggaatatgcggagcttctagaggagttcatgcacgcagttaagcagaattatggggagaaagttctcatacagtttgaggatttcgccaatcataatgcatttgatctgctggaaaaatacagctcatctcatcttgtttttaacgatgatatacagggtacagcatctgtggtattagcaggattgcttgcatccctgaaattagttggtggaaccttagttgaccataccttcttattcctgggtgctggagaggctggaactggtatagctgagctgatagctcttgagatttcaaagcagactaaagctccagtggaagagacccgcaagaagatctggctcgtggactcaaagggacttattgttagctctcgtttggaatcacttcagcagttcaaaaagccttgggcccatgagcatgaacctgttaagagtcttctggatgctgtcaaggcaatcaagccaaccgttttgattggatcatctggagcagggaagacatttactaaggaggtggttgaaaccatggcatccttgaatgagaaaccacttattcttgctctctccaacccaacttcacaatctgagtgcacagctgaagaagcttatacatggagcaagggtaaagcaatctttgctagtggaagcccatttgatcctgttgaatatgaaggaaaactttttgttcctggacaggctaacaatgcttacatatttcctggttttggcttgggtttgatcatctctggtgcaattcgtgtgcgtgatgagatgctcttggcagcctctgaagctttggctgcacaagtatcacaggaaaactatgataagggactgatttaccctccattctcaaacatcagaaagatatcagcccacattgctgctaaagtcgcggctaaggcatatgatcttggtctggcttctcatctgcctcgacctaaggatcttgtcaaatatgcagaaagttgcatgtacagcccaggctaccgaagctaccgttgagttttttgaatattgtgaggtctacaccctacagtgatacacaatgagattcttcttaggagcagatttattttattgcttgttagctttgttgtataaggccaatatgaactttgaaaagttgcttattctttcaaggtttttatttgtattaaggaggaatattattatttatatttaaattccaatttattctgaacgaaatatgatttttgtagtaaaaaaaaaaagtcattgagggccctttgccccgaatatttcataactgcagtaggaagaaacctgttttttaat

SEQ ID NO: 77779 - protein, 589 aa, Glycine max
MSSASLKEMRNGGEDYSNGHGGGGVRDLYGEDCATEDQLITPWTFSVASGCSLLRDPRYNKGLAFTEGERDAHYLRGLLPPAIFNQELQEKRLMHNLRQYEVPLHRYMAMMDLQERNERLFYKLLINNVEELLPVVYTPTVGEACQKYGSIFRRPQGLYISLKEKGKILEVLKNWPEKSIQVIVVTDGERILGLGDLGCQGMGIPVGKRPLYTALGVDRPSSCLPITIDVGTNNEKLLNDEFYIGLKQKRATGQEYAELLEEFMHAVKQNYGEKVLIQFEDFANHNAFDLLEKYSSSHLVFNDDIQGTASVVLAGLLASLKLVGGTLVDHTFLFLGAGEAGTGIAELIALEISKQTKAPVEETRKKIWLVDSKGLIVSSRLESLQQFKKPWAHEHEPVKSLLDAVKAIKPTVLIGSSGAGKTFTKEVVETMASLNEKPLILALSNPTSQSECTAEEAYTWSKGKAIFASGSPFDPVEYEGKLFVPGQANNAYIFPGFGLGLIISGAIRVRDEMLLAASEALAAQVSQENYDKGLIYPPFSNIRKISAHIAAKVAAKAYDLGLASHLPRPKDLVKYAESCMYSPGYRSYR

SEQ ID NO: 77780 - DNA, 2387 bp, Glycine max
  CDS (216)..(2030)
cggaattcccgggtcgacccacgctttccgaatttttaattttctcgggaaaaatgtggttccacctaagaaaacgacactagcattgcatagcaatagttgatttttctccagaaaattaagaagctcaacttagtagtggtaagaagtaataacgcgcgcacacacacatacacaaagacagtgacagtggtgttgaattttcctcaaagaggatgtggaaactcgtgcgatatgccgccgcctccaacctcgcccgatcgcggcggttctccgccgcgattcctggtccgtgcattgttcacaagcgcggtgccgacatactccatgacccctggttcaacaaggatacagggtttcctttgactgaaagggataggttggggcttcggggcctcttacctcctcgtgttatatcctttgagcagcaatatgatcgctttatgaattcattccgatctttggagaataatactcaggggcaaccagataaagttgtttccttggcaaaatggaggatcttaaatagactgcatgataggaatgagactttgtactacagagttcttattgataatattaaagagtttgctccaataatatatactcctacagttggattagtgtgtcaaaattattcagggttatttaggcgtccacgtggaatgtattttagtgccaaagataaaggagagatgatgtcaatgatctataactggccagctcacgaggtagacatgattgtcttaacagatggaagtcgaattcttggcttaggtgaccttggagttcagggaattggaatccccataggaaaacttgatgtgtatgttgctgctgctggtatcaacccacaaagaatacttccagttatgctggatgttggtaccaacaatcaaaagttacttgaagatcgcctttatttaggacttcgacaaccaaggttggaaggtgaagagtatctatcaattatagatgaattcatggaagctgttcatgctcgatggcccaaggctattgtgcagtttgaggattttcaaatgaagtgggcttttgaaaccctgaaaagatatcagaaaaagttttgcatgtttaatgatgatatacagggcactgcaggtgttgcacttgctggactattgggaactgtaagagcccaaggccggccattgactgattttgtgaaccaaaagatagttgtggttggagctgggagtgcaggacttggggttctaaaaatggccatccaagcagttgcaaagatatctgggtgcagtgaattagctgccaaaagccaattctatttgattgataaagatggtctagttacaacagagaggaacaatctagacccagctgcagctccatttgctaaaaatccaagagacatagaagggcttactgagggtgctagtataattgaagtggttaagaagattaggccacatgtgctccttggtttgtctggcgttggtggtattttcaatgaggaggtgcttaaggcaatgagagaatctgtttcaacaaaacctgctatctttgccatgtctaaccccaccatgaatgctgagtgcactgctattgatgcttttaagcatgctggggaaaatatggtgtttgcaagtggaagccctttcgaaaacgtagatcttggtaatggaattgtgggtcatgtaaatcaagcaaacaacatgtacctcttcccaggaattggtttgggaacccttctgtcaggtgctcaccttataacagatggaatgttgcaggcagctgctgaatgccttgcttcatacatggccgaggaagatatcttaaaaggaattttatatccatccgttgatagcatacgagatgttacggcagaggttggggctgctgtgcttcgagcagcagttgaagaagaactggcagaaggaaatggtgatgtggggcccaaagaactttcccatatgtcgaaagatgagactgtggagtatgtgcgaagcaatatgtggtatcctgtgtattctcctctcgttcatgaaaaatgatattctgactatatgttcaattttttgggggacctgtgaaattcacatctcaaattgctgcagccaagccttttatttttatttttatctatggtgtctaatccaatgttcttaattcatgcttattactagcaacgctgagtatcggatggcaaacaaaaaaaagggaaatatatgtctcctttcattttggccgggaattattgtattagttttgaatctattaaggtcagtctagtgttgacgagtttaagtaatttatatgggatcttaagtttgttgttgtacactaaaaaatagtattgaaatttgactttttaaagttcggcatatattatactggagacatttgataat

SEQ ID NO: 77781 - protein, 604 aa, Glycine max; identical to SEQ ID NO: 6022

SEQ ID NO: 77782 - DNA, 2005 bp, Oryza sativa
  CDS (1)..(1722)
atggcgggggtggccaccggtggcgtggaggacgcctacggcgaggaccgcgccaccgaggaccagcccatcacgccgtgggccgtctgcgtcgccagcggtcactctctgctgagggatccacggcacaacaaggggctatcattcacggagaaagagcgagacgcccactacctgcggggtttgctgcctccagtcgtgctctcccaagaacttcaggagaagaggcttctgcaaaatgtgcggcagtttcaggttcctctgcaacgttacatggctctgatggaccttcaggagaggaatgagaggcttttctacaagctcctgatcgacaacgttgaggaattgctccccgttgtgtacacgccgacggtgggcgaggcttgccagaagtacgggtcaatctttagacgaccacagggtctgtacatcagtcttaaagagaaggggagaatattggagttactgaggaactggccagagaagagcattcaggttattgttgttactgatggtgagcgcattttaggtctcggggatcttggttgccagggtatgggaatccctgtgggaaagcttgcactatacacagcccttggaggtgtccggccttctgcttgcttacctatcaccattgatgtgggaacaaacaatgaggatttactgaaggacgagttctacattggattaagacaaaaacgagccactggccaggaatatagtgatcttctggatgaattcatggctgctattaagcagaactatggacagaaggtgctagtccagtttgaagacttcgcaaattacaatgcatttacccttcttgagaagtaccgtgcaaacaatcttgtcttcaatgatgatattcagggaacggctgctgtagtgcttgcaggcctcattgctgctcagaaatttgtcagtgggactttagctgatcacacattcttattctttggcgcaggagaggctggtacaggcattgctgaactagtggctctcgagatatcaaatcagtccaaagttccagtggaagatgctcgcaaaaagatctggctacttgattcaaaggggttgattgtcagttcacgtaaagattctcttcagccctttaagaagcgatatgcccatgagcatgaaccagtcaaagatctactggatgctgttaaggttatcaaaccgactgcattgataggttcagctggtgtgggtcaaagtttcacaaaagaggtgattgaggctatgagttcaattaatgagagaccaatcatcctcgcactatccaatccaacatcacaatctgaatgtactgctgaacaggcatattcatggagtaagggccgtgcaatatttgggagtggaagtccatttgatccagttaaatacaatgacaagcttttcgtgcctgcacaggcaaacaatgcatatatattcccaggatttggcctaggcgtagtgatttcaggagcgataagggtgaaagatgaaatgatccttgctgctgctgaaggcttagctgaccaggtgaccccagagcatgttgacaaaggccttatttatccacccttttcctgcatcaggaagatatcagccaacatcgcagcccgcgttgctgcaaaagcctatgaccttggattggctagccatctccctcgcccaaaagacttggtgaagtacgctgagagctgcatgtacagccccatttaccgttcttatagatgaagtgatgctcaccttagtgtacagcttcatttggctacagcatgctgtcttgtattacagtaataatttgcggttggacctatatcgtacggcagtagcattttatccctgaactgtgcttgtacatatttgccctgtcatcatgtaataaataacccaagtctgctattgcagaatttggttcagtatgattttactttgtatatggcattgctcgtacgattgcaacaaaggtgtatacactatccacacacggatgaacatgtttgtttttgcatttttt

SEQ ID NO: 77783 - protein, 573 aa, Oryza sativa
MAGVATGGVEDAYGEDRATEDQPITPWAVCVASGHSLLRDPRHNKGLSFTEKERDAHYLRGLLPPVVLSQELQEKRLLQNVRQFQVPLQRYMALMDLQERNERLFYKLLIDNVEELLPVVYTPTVGEACQKYGSIFRRPQGLYISLKEKGRILELLRNWPEKSIQVIVVTDGERILGLGDLGCQGMGIPVGKLALYTALGGVRPSACLPITIDVGTNNEDLLKDEFYIGLRQKRATGQEYSDLLDEFMAAIKQNYGQKVLVQFEDFANYNAFTLLEKYRANNLVFNDDIQGTAAVVLAGLIAAQKFVSGTLADHTFLFFGAGEAGTGIAELVALEISNQSKVPVEDARKKIWLLDSKGLIVSSRKDSLQPFKKRYAHEHEPVKDLLDAVKVIKPTALIGSAGVGQSFTKEVIEAMSSINERPIILALSNPTSQSECTAEQAYSWSKGRAIFGSGSPFDPVKYNDKLFVPAQANNAYIFPGFGLGVVISGAIRVKDEMILAAAEGLADQVTPEHVDKGLIYPPFSCIRKISANIAARVAAKAYDLGLASHLPRPKDLVKYAESCMYSPIYRSYR

SEQ ID NO: 77784 - DNA, 2349 bp, Sorghum bicolor
  CDS (159)..(1940)
ccggactaaccacgccatcacttcttccgttaactgcattctccgcgcggcagtggcagcgggagggaggaccagcagcggccgcggcgacctggtggtggtgcgccggcagcggcaggaggtgggtttcggcggcttcggcctcagcgaagggcgagatggagagcacgctcaaggggatacgcggcagcgacgcgccgtgcgtgctggacatggacgacgcggccaccgtggcgggcggcgtcgaggacacctacggcgaggaccgcgccaccgaggagcagctcgtcacgccatggaccgtctccgtcgccagcggttacaatttgctgagggatccccgttacaacaagggacttgcgttcacagagagggagcgtgagacgcactacctccgtggccttctgccaccagctattgtatctcaggagctccaggagagaaagatcatgaataatatccgacaataccagttgcctttgcagcgctacatggccctcatggacctccaggaagggaatgagaggcttttctacaagctgcttattgacaatgtggaggagttacttcctatcgtctacacaccaactgtaggcgaggcctgccaaaagtatggatccatttttagtcgtcctcagggtctttatatcagtttgaaggagaagggaaagatccttgaggtgctgaagaactggccagagaggagcattcaagttattgttgttactgatggtgaacggattttggggcttggagatctcggatgccagggaatggggattcctgttggtaaactttccctttacactgccctgggaggagttcgtccatctgcttgcttgccaatcacattggatgttggtacaaataatgaggagctgcttaatgacgaattttacattggcttgagacaaagaagagccacgggccaggagtacactgattttctgcaagaatttatgagtgctgtgaaacaaaactatggggaaaaagtgctcattcagtttgaggattttgccaaccataatgcttttgatctccttgcaagatatggcaccactcaccttgtattcaatgatgatattcagggaacagcttctgtggttcttgctgggcttattgcagcccaaacactacttggtggttcattggcagatcacacttaccttttcctgggtgctggagaggctgggacaggtatcgctgaactaatagctcttgagatctcacgtcagacgaaagctcctatagaggagtgccgcaagaaaatctggcttgttgattcaaagggtttgattgtcagtacacgaaagggctcccggcaacacttcaagaaaccatgggcccatgagcataaaccagtcaacaacctcttagatgctgttaacgctatcaaaccaacagtgttgattggcacatccgggaaggggcaaactttcacaaaagacgttattgaagcgatctcctcatttaacgagagaccaatcattcttgccctttcgaacccaacgtcgcaatctgaatgcacagctgagcaagcttacacatggagcaagggccaagcagtgtttgcaactgggagtccatttgatcctgtggagtacaatggcaagatacatgttcccggacaggcaaacaatgcctatatcttcccagggtttggccttggtgtggtgatgtctggggctatccgcgttcatgatgacatgcttctggcagcatcggaggctctggcccagcaggtcacagaagaaaattttgaaaaggggctcatttatcctcccttctcaaacatcaggaagatctctgcccacattgcagccaacgttgcagcgaaggcatatgaacttggtttggcaagtaggcgccctcggccaaaggacctggtgaaatttgcagagagctgcatgtacagccccatttaccgcaactaccgctgaatgcgaatcaactccagttatgtacaatcagtagccttgcatcaactgcaagatttcctaagaatacaacttggttcagtcttccatgcttcaatacggctacctctaagctttctagcatagttgtttcacgtcctgttctgcccctatgtattccgcagtgtttatcttttgcgatgtgatgtaaaatagccccggttaggcttttggatcctagtcaatcatggcactgctgccgtccttccggagaaggataaatttggaataaagtttgaatcgacgattcctccgtcggtactgcgtctacgttcacctcgacgttttttgcttgacacttgctattgttttcagcgagtgcttggttgtatgcgtgtttgttggtaacaccaggaaagattcgtcccccctt

SEQ ID NO: 77785 - protein, 593 aa, Sorghum bicolor
MESTLKGIRGSDAPCVLDMDDAATVAGGVEDTYGEDRATEEQLVTPWTVSVASGYNLLRDPRYNKGLAFTERERETHYLRGLLPPAIVSQELQERKIMNNIRQYQLPLQRYMALMDLQEGNERLFYKLLIDNVEELLPIVYTPTVGEACQKYGSIFSRPQGLYISLKEKGKILEVLKNWPERSIQVIVVTDGERILGLGDLGCQGMGIPVGKLSLYTALGGVRPSACLPITLDVGTNNEELLNDEFYIGLRQRRATGQEYTDFLQEFMSAVKQNYGEKVLIQFEDFANHNAFDLLARYGTTHLVFNDDIQGTASVVLAGLIAAQTLLGGSLADHTYLFLGAGEAGTGIAELIALEISRQTKAPIEECRKKIWLVDSKGLIVSTRKGSRQHFKKPWAHEHKPVNNLLDAVNAIKPTVLIGTSGKGQTFTKDVIEAISSFNERPIILALSNPTSQSECTAEQAYTWSKGQAVFATGSPFDPVEYNGKIHVPGQANNAYIFPGFGLGVVMSGAIRVHDDMLLAASEALAQQVTEENFEKGLIYPPFSNIRKISAHIAANVAAKAYELGLASRRPRPKDLVKFAESCMYSPIYRNYR

SEQ ID NO: 77786 - DNA, 2177 bp, Zea mays
  CDS (212)..(1924)
aaaaaacccgcccggccgcccgtggagactactcggcgtctggagcgctataaatcccccttggggacccccgggccggccgggacatccgtcttcctcctgtaaccagatctgaacccgcggcgacagaaacaaacgctcgctcgctcgttcgttgtccgttcattgtcttcgccggcgccgagggaccctgagagggcaggcgggcgagatggcgggcggcggcgttgaggacgtgtacggcgaggaccgcgctaccgaggagcagctgatcacgccgtgggccttctccgtcgcaagcggctacaccctgctgcgcgacccgcggcacaacaagggcctggccttctcggaggcggagcgcgacgcgcactacctccggggcctgctgccgccggcgctggcgtcgcaggagctgcaggagaagaagctcatgcagaacctgcgccggtacgagcagccgctgcaccgctacatcgccatgatggacctgcaggagcgcaacgagaggctcttctacaagctcctcatcgacaacgtcgaggagctgctccccgtcgtctacacgcccaccgtcggcgaggcatgccagaagtacggcagcatctaccgccgcccgcaggggctgtacatcagcctcagggacaagggcaagatcctcgaggtgctcaagaactggcccgagaggagcatccaggtcatcgtcgtcaccgacggcgagcgcatcctcggcctcggtgatctcggttgccaggggatgggaattcccgttggcaagctctccctctacactgccctcggaggtgttcgcccgtcagcttgcctgcccatcacaattgatgtcggcaccaacaacgaggccttgctcaaggacgagttctacatcggcctccgccagaggcgtgccaccggcgaggagtaccatgaacttcttgaagagttcatgactgccgtcaagcaaaactacggcgagaaggtcctcacccagttcgaagacttcgccaaccacaacgcctttgacctgctcgagaagtacagggagagccatctcgtcttcaacgacgatatccagggaacagcctccgttgtcctcgctggcctcctggcggcgctcaaggtggtcggcgggacacttgcggaccacacttacctgttcctcggcgccggcgaggccgggactggcattgctgagctcattgctctcgagatgtccaaacatactgggtctccgatcgaagagtgccgcccgaagatctggctgatggactccaagggcctgatcgtggcgtcacggaaggactcgctgcaggcgttcaagaagccatgggcgcacgagcacgagcccgtggcgaccctgctggaggccgtgcagtccctgaagccgacggtgctgatcggcacctcgggcaagggcggcaccttcaccaaggaggtggtggaggcgatggcgtcccagaacgagaagccggtcatcttcgcgctgtcgaacccgacctcgcactcggagtgcacggcggagcaggcctacacctggaccaagggccgcgcggtgttcgcgagcggcagccccttcgacagcgtggagctggacggcaaggtgctggtgccggggcagtccaacaacgcctacatcttcccggggttcggcctcggcgtcgtcatctccggcgccatccgcgtccgcgacgacatgctgctggccgcctcggaggcgctggcggagcaggtcaccgaggagcacttcgccaaggggctcatcttcccgcccttcaccaacatccgcgccatctccgcgcgcatcgccgccaaggtggccgccaaggcctacgagctcggcctcgccagccgcctgccacgccccgacgatctcgtcaagtacgctgagagctgcatgtacacccccatctaccgcagctaccggtaaggaccatggccggggcggcggcctgagcaaaaggaaaggaaacgggtaaattatgagtcagtgagtgaataaagggtcgatgtgatatttgttgcagctagaggagtgagtttacacatactttcatttctatacaatgtatttctgtgtaccgtatacggcataccataccacactactacatactcgtcagagaaaaaaaaaaagggaagccccccccgcggtgctgaaaaaaaaaaaaaaaaaagcggcc

SEQ ID NO: 77787 - protein, 570 aa, Zea mays; identical to SEQ ID NO: 6020

SEQ ID NO: 77788 - DNA, 2666 bp, Zea mays
  CDS (169)..(2103)
aattcggcacgaggcgagccctctcgcttcccttttatacccctcgccacgcgcattgccctctccactgccagctccggtccgaagagggagggaggaggacgcccgttgccactgccgcgccgctcccgcctccctctctccatccgccgagctcgagaagccaccatgatctccgcgcgcaccgccgcagcttcccccgcttccctgtggaagcggggaggacgaagcgagggcggcggcagttgcgacggatgtcggacttacaggaacactttgcggagggccgcagcagcgaaggtgcgtgccttgccgtcgagggcggtggaggcggtcaaaatgggctccgccgcggaggtggagcaggaggaggcggaggtagccgcggccgcggccggcgtcgtcgtcgaggaccactacggcgaggacagcgccaccgaggagctgcccatcatgccctgggccttctccgtcgcaagcggttacaccctcttgagggatccacatcacaacaagggtcttgctttcatggagaaggagagggatgcacaccacttgcgggggctgcttcctcctgcagttgtgcctcaagaactccaaattaagaagatcatgcacaacctgcggcagtaccaggtccctttgcagcgctatatggccatgatggaccttcaggagaggaacgagaggcttttctacaagcttttaattgataacgtggaggagctgcttcctgtggtttatacaccaactgtaggtgaggcctgccagaagtatgggtccatctttcgacaaccacagggtctgtatgtcagcttgagggacaaggggaaggtcctagaagttctaaggaactggccacataggaacattcaagttatctgtgttactgatggtgagcgaatcttgggacttggagatttgggttctcagggaatgggaattcctgtaggcaaacttgctctatacactgctcttggaggagttcgtccatcagcttgtttgcctatcacaatcgatgttggcacaaataatgagaaactgcttaatgatgagttttacattggactccggcaaaaacgtgcaactggcgaggagtatcatgagcttatggaagagttcatggctgctgttaagcaaatctatggcgagaaagtcctcattcagtttgaggacttcgcgaatcataatgcttttaatttgcttgcaaaatatagcaagagccatcttgttttcaatgatgacatccagggcacagcatcagtggtccttgcaggtttgttagcggcactcaaggtggttggtgggaccttggcagagcacacttatttattccttggtgctggggaggctggaactggtattgcagaactcattgctcttgagatttcaaaacagacgtcggctccaattgaagagtgccgcaagaagatttgggtggggggggggggggggttgattgttgactctcgtaaaaactccgttcagtcattcaaaaaaccttgggcacatgagcatgagcccttgacaactttgtacgatgctgttcagtccatcaaacctacagttctgattgggacgtctggagttggaagaacattcacaaaagaagttgttgaggccatggcttccttcaatgagaggcctatcatcttttcactgtcaaatccaacctctcattctgaatgtactgctgaagaagcatataactggactcagggtcgtgtaatatttgccagtggcagtccatttggccctgtggagtacgatgggaaggtttttgtacctggacagtcgaacaacgcctacattttccctggatttggcctcggtcttgttatctctggagccatccgtgtccacgaggacatgcttcttgccgcctcggaagcactagctgctcaggccacacaggagaacttcgacaagggatcaatcttcccgcccttcaccaacattagaaagatctctgcgcgcattgccgcagccgtggctgcaaaagcttatgaactcggtttggcgacccgtctgcctcccccaagggacctggtgaaatatgcacagagctgcatgtacactcctgtctaccgtaactaccggtagtgctgctgggatcaattctgcagtaataaaatatgtcgacgcagatgatcctgcaatgttgtagtttattttttcatttgttggccctgctgctgaccacctttgtggctgctagacactgtacctgtctatgcatatatgatactggaacatttggcgcgctgtgggcgtccctgtcatgaaaaaaaaaaaaactacaacattgcaggatcatctgcgtcgacatattttattactgcagaattgatcccagcagcactaccggtagttacggtagacaggagtgtacatgcagctctgtgcatatttcaccaggtccttgggggaggcagacgggtcgtcgtcgtccacctcggcgtcgccgccctcggccgtgacaacggaggagacgtagctggccacctcggagctcatggcgccgccgccagccacacgtgcccggaacttgcagcggcagctgtagcaggtgacctgcagcagcgtggcgtccacctgccgcacggcgtggtcccgtagtgcgtgcgcgcggcccagctccgcctgcgcctgctgccgcatgcgcc

SEQ ID NO: 77789 - protein, 644 aa, Zea mays
MISARTAAASPASLWKRGGRSEGGGSCDGCRTYRNTLRRAAAAKVRALPSRAVEAVKMGSAAEVEQEEAEVAAAAAGVVVEDHYGEDSATEELPIMPWAFSVASGYTLLRDPHHNKGLAFMEKERDAHHLRGLLPPAVVPQELQIKKIMHNLRQYQVPLQRYMAMMDLQERNERLFYKLLIDNVEELLPVVYTPTVGEACQKYGSIFRQPQGLYVSLRDKGKVLEVLRNWPHRNIQVICVTDGERILGLGDLGSQGMGIPVGKLALYTALGGVRPSACLPITIDVGTNNEKLLNDEFYIGLRQKRATGEEYHELMEEFMAAVKQIYGEKVLIQFEDFANHNAFNLLAKYSKSHLVFNDDIQGTASVVLAGLLAALKVVGGTLAEHTYLFLGAGEAGTGIAELIALEISKQTSAPIEECRKKIWVGGGGGLIVDSRKNSVQSFKKPWAHEHEPLTTLYDAVQSIKPTVLIGTSGVGRTFTKEVVEAMASFNERPIIFSLSNPTSHSECTAEEAYNWTQGRVIFASGSPFGPVEYDGKVFVPGQSNNAYIFPGFGLGLVISGAIRVHEDMLLAASEALAAQATQENFDKGSIFPPFTNIRKISARIAAAVAAKAYELGLATRLPPPRDLVKYAQSCMYTPVYRNYR

SEQ ID NO: 77790 - DNA, 2560 bp, Zea mays
  CDS (124)..(2034)
tcccccccctctccacactgccaactcgctccgaagagggaggaggacgacgccggttgccactgccactgccgcgccgcgccgctcccgtctcccctccctccgcgggaactcgacgccaccatgctgtccacgcgcaccgccgccgtcgccgcctccgcgtcccccgcctccccgtggaagctgggaggacggagcgagggcggcgccagctgcgacggatgccggacctacaggaacaccctgcggaggagggccgcgcccgccaaggtgcgcgccttgccgcccaggcgggtggacgcggtcgcgatggtctccaacgcggagacggagacggagaaggagcaggaggaggcggcggccgccagcgaggagctgcccgtcatgccctgggccacctccgtcgcaagcggttacacccttttgagggatccacaccacaacaagggtcttgctttcacagaggaggaaagggatggacactacttgcgtggactgcttcctccggcagtactatctcaggaactccaaattaagaagttcatgaacaccctgcggcagtaccagacccctttgcagcggtatatagctatgatgaaccttcaggaaacggacgagaggcttttctacaagcttttaattgataatgtggtggagctgcttccttttgtttacacaccaactgtaggtgaggcctgccagaagtatgggtccatctttggacgaccacagggtctgtatgtcagcctgaaggacaaggggaaggtcctagaagttctaaggaactggccacataggaacattcaagttatctgtgttactgatggtgagcgaatcttgggacttggagatttgggttgtcagggaatgggaattcctgtaggcaaacttgctctatacactgctcttggaggagttgacccatcagtttgcttgcctatcacaattgatgttggtacaaataacgagaaactgcttaatgatgagttctacattggactccgccaaaaacgtgcgaccggcgaggagtatgatgagcttattgaagagttcatggctgctgttaagcagttctatggtgagaaagtcctcattcagtttgaggactttgccaatcataatgcctttgatttgcttgaaaaatatagcaagagccatcttgttttcaatgatgatatccagggcacagcatcagtggtccttgcaggtttgttagcagcactcaagatggttggtgggaccctggcagagcagacttatttgttccttggtgctggggaggctggaactggtattgcagaacttattgctcttgagatttcgaaacagacgaatgctccaattgaagagtgccgcaagaaggtttggctggtggactcaaagggtttgattgttgactctcgtaaaggctcccttcagccattcaagaaaccttgggcgcatgagcacgagcccttgaaaaccttgtatgatgctgttcagtccatcaaacctacagttctgatcgggacatctggagttggaagaacattcacaaaagaaatcattgaggccatgtcttccttcaacgagaggcctatcatcttttcactgtcaaacccaacctcgcattctgaatgcactgctgaacaagcatatacatggagtcagggccgttcaatctttgccagtggcagtccatttgcccccgtggagtacgaaggaaagacttttgtgcctgggcagtcgaacaatgcctacattttccctggactcggcctcggtcttgtgatctctggagccgtccgtgtccacgaggacatgcttctcgccgcctcgaaagcgctagctgatcaggccacacaggacaacttcgagaagggctccatcttcccacccttcaccagcatcagaaagatctctgcgcacatcgctgcagccgtggctgcaaaagcctacgagctcggtctggcgacccgtctgcctccccccagcgacctggtgaaatatgcagagaactgcatgtacactcccgtctaccgcaactaccggtagtgctgcggggatcaattttgcagtaataaaaaatctactatcaacgcggatggtactctgttgtttatagtccctgctgctaaccacccttgttgctggtgctgctggagaggcattgtacctgtccatgcatatatgatatatatatgttgtaacgttgtgaaagcaaacaatcttgggtaccaatgtttgttaaaaaaaaaaaaaaaaaaaaaaaaaaaaaaaaaaaaaaaaaaaaaaaaaaaaaaaaaaaaaaaaaaaaaaaaaaaaaaaaaaaaaaaagggggggccgctttgggggtcccaagtttaggtacgggggcttgggccgccatgcctctcctaaggggccccctaatttcatttcccgggcgggggttttccacggtggtaattgggaaacccctggggttccccattttattcgctttgaggaaaatccccttttcccaacttgggttatttgcgaaggggcccgccccgttggcctttcccaaaatttggcccctgaaattggcaattgggg

SEQ ID NO: 77791 - protein, 636 aa, Zea mays
MLSTRTAAVAASASPASPWKLGGRSEGGASCDGCRTYRNTLRRRAAPAKVRALPPRRVDAVAMVSNAETETEKEQEEAAAASEELPVMPWATSVASGYTLLRDPHHNKGLAFTEEERDGHYLRGLLPPAVLSQELQIKKFMNTLRQYQTPLQRYIAMMNLQETDERLFYKLLIDNVVELLPFVYTPTVGEACQKYGSIFGRPQGLYVSLKDKGKVLEVLRNWPHRNIQVICVTDGERILGLGDLGCQGMGIPVGKLALYTALGGVDPSVCLPITIDVGTNNEKLLNDEFYIGLRQKRATGEEYDELIEEFMAAVKQFYGEKVLIQFEDFANHNAFDLLEKYSKSHLVFNDDIQGTASVVLAGLLAALKMVGGTLAEQTYLFLGAGEAGTGIAELIALEISKQTNAPIEECRKKVWLVDSKGLIVDSRKGSLQPFKKPWAHEHEPLKTLYDAVQSIKPTVLIGTSGVGRTFTKEIIEAMSSFNERPIIFSLSNPTSHSECTAEQAYTWSQGRSIFASGSPFAPVEYEGKTFVPGQSNNAYIFPGLGLGLVISGAVRVHEDMLLAASKALADQATQDNFEKGSIFPPFTSIRKISAHIAAAVAAKAYELGLATRLPPPSDLVKYAENCMYTPVYRNYR

SEQ ID NO: 77792 - DNA, 2386 bp, Zea mays
  CDS (163)..(2019)
atctcctgccctcccgcgggtgcccgcaccgcgtggcgacgcctccccttcaaatctcccgggcctccgcgccgccggccggcaccaccgcaccgcaccgtctcggacgcggctgcagctccgagcattggattccgaccaactgaccgagcggcgtgtcagatgatctcgccggcgatgtgtcgttcggcgccgcggcgggccgcgcaggtccggcgcctcctgtcgtcggccgcgcccccggcgcacgccggcgctgccgtgcctgggccctgcatcgtgcacaagcgcggcaacgacatcctccacgatccgtggtacaacaaggatacggcgttccccatgacggagcgcgaccgcctcggtctccgcggcttgctcccgccgcgggtcatgtccttcgagcagcagtacgagcgatttataaactctttccggtcgctggagcacaatacccgcggcgagcctgactccatcgtcgcgctggccaaatggaggatcctcaacaggttgcacgaccggaacgagacattgtactacagggtgctaattgacaatatcaaggattttgccccgataatatacactcccactgttggcttggtctgtgaaaattacagcggtctgttcagacgaccccgtgggatgtatttcagtgcaaaggataagggggagatgatgtcaatgatttacaactggccagcagagaaggttgacatgatagttgtgactgatgggagtcgcattctaggcttaggtgaccttggtgttcagggcataggtatacctattggtaaactggatgtttatgttgcagctgctggtattaacccacagaaggttcttccaataatgcttgatgtgggaacaaataatgaaaagcttctggaggacaagctatatttaggactgaggcaacctcggctggaaggagaagaatacttggctgttgtagatgaattcatggaggctgtccatgcacgttggcctaaagcagttgtgcagtttgaagacttccaaatgaaatgggcctttgagactcttcagaggtatcggaaccgattttgcatgttcaatgatgacgtacaggggacagctggagttgctctagcaggcctacttggtgctgttagagcacagggccgtcctctccaggattttacgaatcaaaagatagtcgttgtgggagctggaagtgctgggataggtgtgcttagcatggctaaacaggcaatgttaaggatgcctgggatccacagaaccggggaagggcataatcaattctgggttctggacaaagatggccttattacgaaagctaggaaggacctggattctgcagtggcgcgttttgccagaggctttggtcctgatgaggtcccagatctctatgagggggctagtcttgttgaagtggtcaagaaagttaagccccatgtgcttttaggactatctggagttgggggcatatttaatgaggaggttctcaaagctatgaaagaatccgattcccctcggcctgcagtttttgcaatgtccaaccctactactaaagctgaatgcactcccgatgatgtattcaagcatgttggagataaagcgatatttgctagtggaagcccttttagtaatgtttctttaggaaatggtaaatctggttatgctaatcaagcaaacaacatgtatctatttcctgggattggtttaggtgcccttctttcaggtgcccggcatgtttcagatggcatgcttcaagcagcagctgagtgcctggcatcatacatcacagacgacgaaattcgaaaaggaatcctcttcccttcggtctccagtattaggcacatcaccgcacgtgtcggcgcagcagtcgtccgtgccgctgttgctgaagacctggctgaggggtgctgtgatgtgggtcctagggagcttgggagtatgtcagagtcggaagcagtggactacgtcgctcggaagatgtggtaccctatttacagccctcttgtgagcgacaaataataaatccgaagatctcgatgcctgcgcagaagcagatgttccattgaaggaatgtatcggatttgatatttttcttaaccatctctaaattagctgctcatctagaaagcatttcggcagagattggtgcccacgcatatggctaatgtatggctacattcatttgctctagacatgatttcgtcaccaggggacactcagttttgaaccgttgagcttcatactgccacgggaaccgtatttttcatcattattgtaatataaggcgccggagtttctgtcctgaaaataagcatgagatcagaagcgatatgatatcctttttaaaaaaaaaacaaaaaaactcgacggggggcccggtacccaa

SEQ ID NO: 77793 - protein, 618 aa, Zea mays; identical to SEQ ID NO: 6028

SEQ ID NO: 77794 - DNA, 2414 bp, Arabidopsis thaliana
  CDS (1)..(2208)
atggtagttgcattttcgcttgaaattgtctgtccttttgctagtttgagtcacaattttcaattgaaaagaaataagagagagagatttagagcgtgtgagggagataggaagagagaaagtgagcgagagacgatcacggccgcgctgaaatccacgaccacggccgcgctgaaatccacgaccacggccgctctgaagaagaagactctctccgtctcctcccttctcctcctccgtctaagagacaaggcatccccagacgccatgatctctctcactccctcgttgtttctgaacaagacggttgttcctggatgttccacacgcctctctctgcgccagcctagaactataattactcctcctgcttccttgagagtcttttcctctctcggatctaaccaggatcccaccggcagcgttttgattgagaccactgccacttcatcctcctctctcgagacctccgccgccgacattgttcccaaatccaccgtatctggtggagttcaggatgtctacggcgaggatgccgccaccgaggacatgcctatcactccttggtctctctctgtcgccagtgggtatacgttgttgcgtgatccacatcacaacaaaggccttgcctttagccacagagagcgtgacgctcactatctacgcggcctcctcccccccactgttatctcacaagatcttcaggttaaaaaaattatgcacactcttcgtcagtatcaagttcccttgcagaagtatatggctatgatggatctccaggagaccaacgagaggctgttttacaaacttctcattgatcacgtcgaggagttgctacccgttatctacactccaacggttggggaagcctgccagaagtatggtagcattttcctgcgtccacaggggctttttatcagcttgaaagaaaaaggtaagattcatgaagtgctgaggaactggcctgagaagaacatccaggtcattgttgtcactgatggggagcgcattttagggttaggagatcttggatgtcagggaatgggaatacctgttgggaaactttctctctacacagcccttggaggtgtccggccatctgcctgtctgcccgtaacaatcgatgttgggacaaacaacgaaaagctattgaacgatgagttctacatagggctccgccaaaggagagctacaggagaggaatactccgaacttatgcatgaattcatgacagcagtcaagcagaactatggggagaaagtcgttattcagtttgaagactttgccaaccataatgcttttgatctgttagctaagtatggtacaacacatcttgttttcaatgacgatattcagggcacagcatcagttgtgcttgctggacttatcgctgctcttagatttgtggggggatccttgtcagaccacagattcctcttcctcggggctggagaggctggcactggaatagctgaactaattgctcttgagatttcaaagaagtcccatattccattggaagaggctcggaagaatatttggctcgtggattcaaagggattgattgtcagttcccggaaagaatccattcaacatttcaaaaagccctgggctcatgaccatgaaccaataagggaacttgttgatgccgtcaaggcaatcaagccgacagttctgatcggaacatcaggtgtaggtcaaacattcactcaagacgtggtggaaaccatggcaaagctaaatgagaaacccatcattctttctctttcgaacccaacttctcagtcagaatgtacggcagaagaggcctatacgtggagtcagggacgggcgatctttgcaagtggaagcccatttgcgccagtagagtatgagggaaagacgtttgtgcctggacaggcaaacaacgcatacatcttccctgggtttggactcgggctaataatgtcagggacgatccgtgtccatgatgacatgcttctggcagcatcagaagctttggctgaggaactgatggaggaacactatgagaaggggatgatataccctcccttcaggaatatcagaaaaatctcagctcgtattgcagctaaggtggctgccaaggcctacgaactgggactggccacgaggttgcctcagcccaaggagctggagcagtgtgctgagagcagcatgtacagcccttcgtatcgaagctaccgctgaggataagcttaatctaatttgttatgtctcatacgactcttatggccatttctctcctctcctattcgttcaccttccacttcccgtgagatttttgtttgtttgtttgtcagcatctttaaaatcttgtgttgtaatcactgtttcccttgttgtttctttttaagtccgtaataatcctcctatggaaattgtttctctgggcc

SEQ ID NO: 77795 - protein, 735 aa, Arabidopsis thaliana
MVVAFSLEIVCPFASLSHNFQLKRNKRERFRACEGDRKRESERETITAALKSTTTAALKSTTTAALKKKTLSVSSLLLLRLRDKASPDAMISLTPSLFLNKTVVPGCSTRLSLRQPRTIITPPASLRVFSSLGSNQDPTGSVLIETTATSSSSLETSAADIVPKSTVSGGVQDVYGEDAATEDMPITPWSLSVASGYTLLRDPHHNKGLAFSHRERDAHYLRGLLPPTVISQDLQVKKIMHTLRQYQVPLQKYMAMMDLQETNERLFYKLLIDHVEELLPVIYTPTVGEACQKYGSIFLRPQGLFISLKEKGKIHEVLRNWPEKNIQVIVVTDGERILGLGDLGCQGMGIPVGKLSLYTALGGVRPSACLPVTIDVGTNNEKLLNDEFYIGLRQRRATGEEYSELMHEFMTAVKQNYGEKVVIQFEDFANHNAFDLLAKYGTTHLVFNDDIQGTASVVLAGLIAALRFVGGSLSDHRFLFLGAGEAGTGIAELIALEISKKSHIPLEEARKNIWLVDSKGLIVSSRKESIQHFKKPWAHDHEPIRELVDAVKAIKPTVLIGTSGVGQTFTQDVVETMAKLNEKPIILSLSNPTSQSECTAEEAYTWSQGRAIFASGSPFAPVEYEGKTFVPGQANNAYIFPGFGLGLIMSGTIRVHDDMLLAASEALAEELMEEHYEKGMIYPPFRNIRKISARIAAKVAAKAYELGLATRLPQPKELEQCAESSMYSPSYRSYR

SEQ ID NO: 77796 - DNA, 2131 bp, Arabidopsis thaliana
  CDS (473)..(2131)
gaggttctgaagaagaagactctctcccagcagatttagagcgtgtgagggagataggaagagagaaagtgagcgagagacgatcacggccgcgctgaaatccacgaccacggccgctctgaagaagaagactctctccgtctcctcccttctcctcctccgtctaagagacaaggcatccccagacgccatgatctctctcactccctcgttgtttctgaacaagacggttgttcctggatgttccacacgcctctctctgcgccagcctagaactataattactcctcctgcttccttgagagtcttttcctctctcggatctaaccaggatcccaccggcagcgttttgattgagaccactgccacttcatcctcctctctcgagacctccgccgccgacattgttcccaaatccaccgtatctggtggagttcaggatgtctacggcgaggatgccgccaccgaggacatgcctatcactccttggtctctctctgtcgccagtgggtatacgttgttgcgtgatccacatcacaacaaaggccttgcctttagccacagagagcgtgacgctcactatctacgcggcctcctcccccccactgttatctcacaagatcttcaggttaaaaaaattatgcacactcttcgtcagtatcaagttcccttgcagaagtatatggctatgatggatctccaggagaccaacgagaggctgttttacaaacttctcattgatcacgtcgaggagttgctacccgttatctacactccaacggttggggaagcctgccagaagtatggtagcattttcctgcgtccacaggggctttttatcagcttgaaagaaaaaggtaagattcatgaagtgctgaggaactggcctgagaagaacatccaggtcattgttgtcactgatggggagcgcattttagggttaggagatcttggatgtcagggaatgggaatacctgttgggaaactttctctctacacagcccttggaggtgtccggccatctgcctgtctgcccgtaacaatcgatgttgggacaaacaacgaaaagctattgaacgatgagttctacatagggctccgccaaaggagagctacaggagaggaatactccgaacttatgcatgaattcatgacagcagtcaagcagaactatggggagaaagtcgttattcagtttgaagactttgccaaccataatgcttttgatctgttagctaagtatggtacaacacatcttgttttcaatgacgatattcagggcacagcatcagttgtgcttgctggacttatcgctgctcttagatttgtggggggatccttgtcagaccacagattcctcttcctcggggctggagaggctggcactggaatagctgaactaattgctcttgagatttcaaagaagtcccatattccattggaagaggctcggaagaatatttggctcgtggattcaaagggattgattgtcagttcccggaaagaatccattcaacatttcaaaaagccctgggctcatgaccatgaaccaataagggaacttgttgatgccgtcaaggcaatcaagccgacagttctgatcggaacatcaggtgtaggtcaaacattcactcaagacgtggtggaaaccatggcaaagctaaatgagaaacccatcattctttctctttcgaacccaacttctcagtcagaatgtacggcagaagaggcctatacgtggagtcagggacgggcgatctttgcaagtggaagcccatttgcgccagtagagtatgagggaaagacgtttgtgcctggacaggcaaacaacgcatacatcttccctgggtttggactcgggctaataatgtcagggacgatccgtgtccatgatgacatgcttctggcagcatcagaagctttggctgaggaactgatggaggaacactatgagaaggggatgatataccctcccttcaggaatatcagaaaaatctcagctcgtattgcagctaaggtggctgccaaggcctacgaactgggactggccacgaggttgcctcagcccaaggagctggagcagtgtgctgagagcagcatgtacagcccttcgtatcgaagctaccgctga

SEQ ID NO: 77797 - protein, 552 aa, Arabidopsis thaliana
MPITPWSLSVASGYTLLRDPHHNKGLAFSHRERDAHYLRGLLPPTVISQDLQVKKIMHTLRQYQVPLQKYMAMMDLQETNERLFYKLLIDHVEELLPVIYTPTVGEACQKYGSIFLRPQGLFISLKEKGKIHEVLRNWPEKNIQVIVVTDGERILGLGDLGCQGMGIPVGKLSLYTALGGVRPSACLPVTIDVGTNNEKLLNDEFYIGLRQRRATGEEYSELMHEFMTAVKQNYGEKVVIQFEDFANHNAFDLLAKYGTTHLVFNDDIQGTASVVLAGLIAALRFVGGSLSDHRFLFLGAGEAGTGIAELIALEISKKSHIPLEEARKNIWLVDSKGLIVSSRKESIQHFKKPWAHDHEPIRELVDAVKAIKPTVLIGTSGVGQTFTQDVVETMAKLNEKPIILSLSNPTSQSECTAEEAYTWSQGRAIFASGSPFAPVEYEGKTFVPGQANNAYIFPGFGLGLIMSGTIRVHDDMLLAASEALAEELMEEHYEKGMIYPPFRNIRKISARIAAKVAAKAYELGLATRLPQPKELEQCAESSMYSPSYRSYR

SEQ ID NO: 77798 - DNA, 2199 bp, Arabidopsis thaliana
  CDS (80)..(1900)
gagaagaggaggagaacacaaatccaattcacactggaaactgttgggtcggatcctgagtgatatttcgagaccgatgatgtggaagaacattgctgggttgtcgaaggcagcggcagcggcaagaacacacggatctcggcggtgcttttccacagcgattcctggtccttgcatcgtccacaagcgtggtgctgatattcttcacgatccatggttcaataaggacacaggttttcctttgactgagagagatagattagggatacgaggcttgcttcctcctcgtgttatgacctgtgtacagcaatgtgatcgtttcattgagtcgtttcgttcgctagagaacaacacaaaaggagagcctgaaaacgttgttgcattagctaaatggaggatgttgaatagattgcatgaccgtaatgagactttgtactaccgagttcttattgataacatcaaagattttgcccccattatatacactcctacggttggacttgtttgtcagaactattctggtttgtatagaagaccaagaggaatgtacttcagcgccaaagacaaaggagagatgatgtctatgatttataactggcctgctccgcaggtagatatgattgtcatcactgatggtagccgtattttgggcttaggagaccttggagtacagggaattgggattcctattggaaagctcgacatgtatgtcgctgctgcaggaatcaatccacagagagttttgccaattatgttggatgtaggcacaaataatgaaaagctcctacagaatgatctctatttaggagtcagacaacctaggttggaaggagaggagtaccttgagattattgatgaatttatggaagctgcatttacacgttggccaaaggccgtcgtacagttcgaagatttccaagcgaaatgggctttcggaacattggaaagatatcggaagaaattttgcatgttcaatgatgatgtccagggaactgctggtgttgcactggctggactattgggaactgtaagagctcaaggtcggccgatatccgactttgtgaaccaaaagattgttgtggtgggagctggaagtgctgggcttggtgtaactaagatggcagtacaggcagttgccagaatggcaggtatcagcgagagtgaagcaacaaaaaacttttacctgatagataaagatggtcttgtcaccacggagaggacaaaacttgacccaggagctgtactttttgccaaaaatccagctgagatacgcgagggagcaagtatcgttgaagtggtgaagaaagtgaggccacatgttcttcttggtttatctggagttggtggtatctttaatgaagaagttctcaaggcgatgcgagaatctgactcatgcaagcctgccatttttgccatgtcgaatcccactttgaatgccgagtgcactgctgctgatgctttcaaacacgccggaggaaacattgtctttgcaagtggaagtccatttgagaacgttgaacttgagaatggtaaagtaggacatgtgaatcaggctaacaacatgtatttattcccggggatcgggctagggactcttctctctggtgcacgtatcgtaactgatggaatgctacaagcagcttctgaatgccttgcgtcctacatgaccgatgaagaagtccaaaaaggcatcctttacccttcaatcaacaacatccgacacataacagctgaagtcggggcagctgttctacgagctgcggtgactgatgacattgcagaaggacatggtgatgttggtcccaaagatctcagccacatgtctaaggaggatacagtgaattacattacacgcaacatgtggttccctgtttacagccctctcgttcacgagaaatagacaacaactctatataactcttctcaggtttcatagaaagccaaaagacaaaaaatcttcgcttcatcttttatttgtgatcaacattctttttttcttcaaaatgtgatatgttttaagaaaaacaatgccaaaaagagggcttaagaacaagaacagggttagttctaggtcaacctgtacttttcctttttttttttggacatttttccaacttcttacgattatttctgatgataatgattacaactttatatactgttttggcaataataagccaataatgatatctttcttct

SEQ ID NO: 77799 - protein, 606 aa, Arabidopsis thaliana
MWKNIAGLSKAAAAARTHGSRRCFSTAIPGPCIVHKRGADILHDPWFNKDTGFPLTERDRLGIRGLLPPRVMTCVQQCDRFIESFRSLENNTKGEPENVVALAKWRMLNRLHDRNETLYYRVLIDNIKDFAPIIYTPTVGLVCQNYSGLYRRPRGMYFSAKDKGEMMSMIYNWPAPQVDMIVITDGSRILGLGDLGVQGIGIPIGKLDMYVAAAGINPQRVLPIMLDVGTNNEKLLQNDLYLGVRQPRLEGEEYLEIIDEFMEAAFTRWPKAVVQFEDFQAKWAFGTLERYRKKFCMFNDDVQGTAGVALAGLLGTVRAQGRPISDFVNQKIVVVGAGSAGLGVTKMAVQAVARMAGISESEATKNFYLIDKDGLVTTERTKLDPGAVLFAKNPAEIREGASIVEVVKKVRPHVLLGLSGVGGIFNEEVLKAMRESDSCKPAIFAMSNPTLNAECTAADAFKHAGGNIVFASGSPFENVELENGKVGHVNQANNMYLFPGIGLGTLLSGARIVTDGMLQAASECLASYMTDEEVQKGILYPSINNIRHITAEVGAAVLRAAVTDDIAEGHGDVGPKDLSHMSKEDTVNYITRNMWFPVYSPLVHEK

SEQ ID NO: 77800 - DNA, 2368 bp, Zea mays subsp. mays
  CDS (75)..(2069)
caatcgcgcgggcgcagacagtcggcttccaccaaccacgttgccagcaggcagcggcagcctccacttgctccatgtctccatccaaccctcttccgccgccgggcgagacgcgcgtcggctgctcgttgccctcaccagtcacccctcaggccatgggcgggggccccgctcgtcatgtggccatgcgcgcccttcgcgctcgcttcctctcgcggcagcgggagggaggaccagcggcagcgtcgacctggtggtggtgcgcttcgggttcggcgaagggcgacatggagagcacgctcaaggggatacgcggcagcgatgcgccgtgcgttctggacctggacgacgcggccaccgtggcgggcggcgtcgaggacacctacggcgaggatcgcgccaccgaggagcagctcgtcacgccctggaccgtctccgtcgccagcggttacaatctgcttagggatccccgttacaacaagggacttgcgttcacagagagggaacgtgagacgcactacctccgtggccttctgccaccagctattgtatcccaggagctccaggagagaaagatcatgaataatattcgacaataccagttgcctttgcagcgctacatggcactcatggatctccaggaagggaacgagaggcttttctacaagttgctcattgacaacgtcgaggagttacttccaatcgtgtacactccaaccgttggcgaggcctgccaaaagtatggatccatatttagtcgccctcagggtctttatattagtttgaaggagaagggaaagatccttgaggtgttgaagaactggccagagaggagcattcaggttatagttgttactgatggtgaacgtattttggggcttggagatctcggatgccaggggatggggattcctgttggtaaactttccctttacactgccctgggaggagttcgtccatctgcttgcttgccgatcacattggatgttggtacaaataacgaggaactgcttaatgacgaattttacattggcttgagacaaagaagagccactggccaggagtacactgattttctgcaagaatttatgagtgctgtgaaacaaaactatggggagaaagttcttattcagtttgaggattttgccaaccataatgcttttgatcttcttgcaagatatggcaccactcaccttgtattcaatgatgatattcagggaacagcttctgtggttcttgctgggcttattgcagcacaaacattacttggtggttcattggcagatcacacttaccttttccttggtgctggagaggctgggacaggtatcgctgaacttatagctcttgagatctcacgtcagacgaaagctcctatagaggagtgccgcaagaaaatctggcttgttgattcaaagggcttgattgtcagtacacgaaaggagtcccttcaacacttcaagaaaccatgggctcatgagcataaaccactcagcaacctcttagatgctgttaatgctatcaaaccaacagtgttgattggcacatccgggaaggggcaaactttcacaaaagacgttgttgaagcaatctcctcatttaacgagagaccaatcattcttgccctatcgaacccaacatcacaatctgaatgcacagctgagcaagcttacacatggagcaagggacaagcagtgtttgcgactgggagtccatttgatcctgtggagtacaatggcaagatacatgttcccggacaggcaaacaatgcctatatcttcccagggtttggcctcggcgtggtgatgtctggagctatccgcgttcatgacgacatgcttctggcagcatcggaggctctggcccagcaggtcacagaagaaaattttgagaaggggctgatttatcctcccttctcaaacatcaggaagatctctgcccacattgcagccagcgttgcagcaaaggcatatgaacttggtttggcaagtaggcgccctcggccaaaggacctggtgaaatatgcagagagttgcatgtacagccccatctaccgcaactaccgttgaattcggatcaactccagttatgtgcaaatcagcagcagctattccgcagcgtttatctcttgcgatgtcatgtaaatcagctccggttagccttttggatgctagtcagtcatggtgctggtgccgtccttccggacaaggataaatttggaataaagtttgagtcgacgattcctccctcggtactgcgtgttcacctgaacgtttttttgcttcacgcagttgctgttgttttcaacaagtgcttggttgtatgcgtgaaggtaagtaggtaacaccaggaaaggttcttctttttt

SEQ ID NO: 77801 - protein, 664 aa, Zea mays subsp. mays
MSPSNPLPPPGETRVGCSLPSPVTPQAMGGGPARHVAMRALRARFLSRQREGGPAAASTWWWCASGSAKGDMESTLKGIRGSDAPCVLDLDDAATVAGGVEDTYGEDRATEEQLVTPWTVSVASGYNLLRDPRYNKGLAFTERERETHYLRGLLPPAIVSQELQERKIMNNIRQYQLPLQRYMALMDLQEGNERLFYKLLIDNVEELLPIVYTPTVGEACQKYGSIFSRPQGLYISLKEKGKILEVLKNWPERSIQVIVVTDGERILGLGDLGCQGMGIPVGKLSLYTALGGVRPSACLPITLDVGTNNEELLNDEFYIGLRQRRATGQEYTDFLQEFMSAVKQNYGEKVLIQFEDFANHNAFDLLARYGTTHLVFNDDIQGTASVVLAGLIAAQTLLGGSLADHTYLFLGAGEAGTGIAELIALEISRQTKAPIEECRKKIWLVDSKGLIVSTRKESLQHFKKPWAHEHKPLSNLLDAVNAIKPTVLIGTSGKGQTFTKDVVEAISSFNERPIILALSNPTSQSECTAEQAYTWSKGQAVFATGSPFDPVEYNGKIHVPGQANNAYIFPGFGLGVVMSGAIRVHDDMLLAASEALAQQVTEENFEKGLIYPPFSNIRKISAHIAASVAAKAYELGLASRRPRPKDLVKYAESCMYSPIYRNYR

SEQ ID NO: 77802 - DNA, 2368 bp, Zea mays subsp. mays; identical to SEQ ID NO: 77800
  CDS (156)..(2069)

SEQ ID NO: 77803 - protein, 637 aa, Zea mays subsp. mays
MGGGPARHVAMRALRARFLSRQREGGPAAASTWWWCASGSAKGDMESTLKGIRGSDAPCVLDLDDAATVAGGVEDTYGEDRATEEQLVTPWTVSVASGYNLLRDPRYNKGLAFTERERETHYLRGLLPPAIVSQELQERKIMNNIRQYQLPLQRYMALMDLQEGNERLFYKLLIDNVEELLPIVYTPTVGEACQKYGSIFSRPQGLYISLKEKGKILEVLKNWPERSIQVIVVTDGERILGLGDLGCQGMGIPVGKLSLYTALGGVRPSACLPITLDVGTNNEELLNDEFYIGLRQRRATGQEYTDFLQEFMSAVKQNYGEKVLIQFEDFANHNAFDLLARYGTTHLVFNDDIQGTASVVLAGLIAAQTLLGGSLADHTYLFLGAGEAGTGIAELIALEISRQTKAPIEECRKKIWLVDSKGLIVSTRKESLQHFKKPWAHEHKPLSNLLDAVNAIKPTVLIGTSGKGQTFTKDVVEAISSFNERPIILALSNPTSQSECTAEQAYTWSKGQAVFATGSPFDPVEYNGKIHVPGQANNAYIFPGFGLGVVMSGAIRVHDDMLLAASEALAQQVTEENFEKGLIYPPFSNIRKISAHIAASVAAKAYELGLASRRPRPKDLVKYAESCMYSPIYRNYR

SEQ ID NO: 77804 - DNA, 2368 bp, Zea mays subsp. mays; identical to SEQ ID NO: 77800
  CDS (186)..(2069)

SEQ ID NO: 77805 - protein, 627 aa, Zea mays subsp. mays
MRALRARFLSRQREGGPAAASTWWWCASGSAKGDMESTLKGIRGSDAPCVLDLDDAATVAGGVEDTYGEDRATEEQLVTPWTVSVASGYNLLRDPRYNKGLAFTERERETHYLRGLLPPAIVSQELQERKIMNNIRQYQLPLQRYMALMDLQEGNERLFYKLLIDNVEELLPIVYTPTVGEACQKYGSIFSRPQGLYISLKEKGKILEVLKNWPERSIQVIVVTDGERILGLGDLGCQGMGIPVGKLSLYTALGGVRPSACLPITLDVGTNNEELLNDEFYIGLRQRRATGQEYTDFLQEFMSAVKQNYGEKVLIQFEDFANHNAFDLLARYGTTHLVFNDDIQGTASVVLAGLIAAQTLLGGSLADHTYLFLGAGEAGTGIAELIALEISRQTKAPIEECRKKIWLVDSKGLIVSTRKESLQHFKKPWAHEHKPLSNLLDAVNAIKPTVLIGTSGKGQTFTKDVVEAISSFNERPIILALSNPTSQSECTAEQAYTWSKGQAVFATGSPFDPVEYNGKIHVPGQANNAYIFPGFGLGVVMSGAIRVHDDMLLAASEALAQQVTEENFEKGLIYPPFSNIRKISAHIAASVAAKAYELGLASRRPRPKDLVKYAESCMYSPIYRNYR

SEQ ID NO: 77806 - DNA, 2211 bp, Zea mays subsp. mays
  CDS (57)..(1991)
actgccgcgccgctcccgcctccctcttctccatccgacgagctcgagaagccaccatgatctccgcgcgcaccgccgcagcttcccccgcctccctgtggaagcggggaggacaaagtgagggcggcggcagttgcgacggatgtcggacctacaggaacactttgcggagggccgcagcagcgaaggtgcgtgccttgccgtcgagggcggtggaggcggtcaaaatgggctccgccgcggaggtggagcaggaggaggcggaggtagccgcggccgcggacggcgtcgtcgtcgaggaccactacggcgaggacagcgccaccgaggagctgcccatcatgccctgggccttctccgtcgcaagcggttacaccctcttgagggatccacatcacaacaagggtcttgctttcacggagaaggagagggatgcacaccacttgcgtgggctgcttcctcctgcagttgttcctcaagaactccaaattaagaagatcatgcacaacctgcggcagtaccaggtccctttgcagcgctatatggccatgatggaccttcaggagaggaacgagaggcttttctacaagcttttaattgataacgtggaggagctgcttcctgtggtttatacaccaactgtaggtgaggcctgccagaagtatgggtccatctttcgacaaccacagggtctgtatgtcagcttgagggacaaagggaaggtcctagaagttctaaggaactggccacataggaacattcaagttatctgtgttactgatggtgagcgaatcttgggacttggagatttgggttctcagggaatgggaattcctgtaggcaaacttgctctatacactgctcttggaggagttcgtccatcagcttgtttgcctatcacaatcgatgttggcacaaataatgagaaactgcttaatgatgagttttacattggactccggcaaaaacgtgcaactggcgaggagtatcatgagcttatggaagagttcatggctgctgttaagcaaatctacggcgagaaagtcctcattcagtttgaggacttcgcgaatcataatgcttttaatttgcttgcaaaatatagcaagagccatcttgttttcaatgatgacatccagggcacagcatcagtggtccttgcaggtttgttagcagcactcaaggtggttggtgggaccttggcagagcacacttatttattccttggtgctggggagggtggaactggtattgcagaactcattgctcttgagatttcaaaacagacgtcggctccaattgaagagtgccgcaagaagatttggttggtggactcaaagggtttgattgttgactctcgtaaaaactccgttcagtcattcaaaaaaccttgggcacatgagcatgagggcttgacaactttgtacgatgctgttcagtgcatcaaacctacagttctgattgggacgtctggagttggaagaacattcacaaaagaagttgttgaggccatggcttccttcaatgagaggcctatcatcttttcactgtcaaatccaacctctcattctgaatgtactgctgaagaagcatataactggactcagggtcgtgtaatatttgccagtggcagtccatttgaccctgtggagtacgatgggaaggtttttgtacctggacagtcgaacaacgcctacattttccctggatttggcctcggtcttgttatctctggagccatccgtgtccacgaggacatgcttcttgccgcctcggaagcactagctgctcaggccacacaggagaacttcgacaagggatcaatcttcccgcccttcaccaacattagaaagatctctgcgcgcattgcccgagccgtggctgcaaaagcttatgaactcggtttggcgacccgtctgcctcccccaagggacctggtgaaatatgcacagagctgcatgtacactcctgtctaccgtaactaccggtagtgctgctgggatcaattctgcagtaataaaatatgtcgacgcagatgatcctgcaatgttgtagtttattttttcatttgttggccctgctgctgaccacctttgtggctgctagacactgtacctgtctatgcatatatgatactggaacatttggcgcgctgtgggcgtccctgtcatgagatcaattgcagaaataaaatgcaatttagatttgagc

SEQ ID NO: 77807 - protein, 644 aa, Zea mays subsp. mays; identical to SEQ ID NO: 5948

SEQ ID NO: 77808 - DNA, 2211 bp, Zea mays subsp. mays; identical to SEQ ID NO: 77806
  CDS (228)..(1991)

SEQ ID NO: 77809 - protein, 587 aa, Zea mays subsp. mays
MGSAAEVEQEEAEVAAAADGVVVEDHYGEDSATEELPIMPWAFSVASGYTLLRDPHHNKGLAFTEKERDAHHLRGLLPPAVVPQELQIKKIMHNLRQYQVPLQRYMAMMDLQERNERLFYKLLIDNVEELLPVVYTPTVGEACQKYGSIFRQPQGLYVSLRDKGKVLEVLRNWPHRNIQVICVTDGERILGLGDLGSQGMGIPVGKLALYTALGGVRPSACLPITIDVGTNNEKLLNDEFYIGLRQKRATGEEYHELMEEFMAAVKQIYGEKVLIQFEDFANHNAFNLLAKYSKSHLVFNDDIQGTASVVLAGLLAALKVVGGTLAEHTYLFLGAGEGGTGIAELIALEISKQTSAPIEECRKKIWLVDSKGLIVDSRKNSVQSFKKPWAHEHEGLTTLYDAVQCIKPTVLIGTSGVGRTFTKEVVEAMASFNERPIIFSLSNPTSHSECTAEEAYNWTQGRVIFASGSPFDPVEYDGKVFVPGQSNNAYIFPGFGLGLVISGAIRVHEDMLLAASEALAAQATQENFDKGSIFPPFTNIRKISARIARAVAAKAYELGLATRLPPPRDLVKYAQSCMYTPVYRNYR

SEQ ID NO: 77810 - DNA, 1813 bp, Arabidopsis thaliana
  CDS (1)..(1767)
atgggcaccaatcagactcagatctccgatgaatatgttaccggtaacagttccggtgtaggtgggggaatctctgatgtatacggtgaagatagtgccacgttggatcaacttgtcactccttgggttacctctgtcgcaagtgggtatacattgatgcgtgatccacgttacaataaaggacttgcttttactgataaagagagagatgctcattacataactggtcttcttcctcctgtagttttatctcaagatgttcaggagaggaaagtgatgcataatcttcgtcagtatacggttcctttgcaacgttacatggctctcatggatcttcaggaaaggaatgagagattgttttataagcttttgattgataatgtggaggagttgcttccggttgtgtatacaccgacggttggtgaggcttgccaaaagtatgggagcatttataggaggccacaaggtctttacatcagcttgaaagagaagggaaagattcttgaagtattgaagaattggccacagagagggattcaagttattgttgttaccgatggtgagcggattctcggtcttggagatcttggttgccagggaatgggaatccctgttgggaagctttctctttacacagctttgggaggaatccgtccatcggcttgccttccaataaccattgatgtgggtacaaacaatgagaagctgttgaataatgagttttacattggccttaaacagaagagggcaaatggcgaggaatatgcagagtttttgcaggagtttatgtgtgctgttaaacaaaactatggagagaaagtgttggtgcagtttgaagattttgcaaaccaccatgcgtttgagcttctctctaagtactgctcaagtcatctcgttttcaatgatgatatccaaggaactgcatctgtggtgcttgccgggcttattgcggctcagaaagtacttggtaaaagcctagctgaccatacctttttgttcttgggtgctggagaggctggaaccggaatcgctgagctaattgctcttaaaatttcgaaagagactggaaaaccaatcgatgagacccggaagaagatttggcttgtggactccaagggactgattgttagcgaacgcaaagaatcgcttcaacatttcaagcagccatgggcgcatgaccacaagcctgtcaaggagctcttggcagctgttaatgcaatcaagccaactgttcttattggaacctctggtgtgggtaagactttcacaaaggaagtagtggaggccatggctaccttgaacgagaaaccattgattcttgcactctcaaacccaacttctcaagccgagtgcacggcggaagaagcttacacatggaccaagggtcgtgcaatctttgcaagtggaagcccgtttgaccctgttcagtatgatggcaaaaaattcacgcctggccaggcaaacaactgttacattttccctggtctcggtcttggtttgatcatgtccggtgccattcgtgtccgtgatgacatgcttctagcagcttcggaagcgctggcctcccaagtgacggaagagaattttgcgaacggactgatctatccgccttttgcaaacatcagaaagatctctgctaacattgcagccagtgtgggagccaaaacctacgaactcggactggcatcgaatctgcctcgtcctaaggacctcgtaaagatggcagagagctgcatgtacagtcctgtctacagaaacttccgttaaaacattctttttaacattttgggctcagcttttactttttgctttt

SEQ ID NO: 77811 - protein, 588 aa, Arabidopsis thaliana; identical to SEQ ID NO: 5574

SEQ ID NO: 77812 - DNA, 2162 bp, Arabidopsis thaliana
  CDS (126)..(1997)
aaagaaaaaaatgagaatcttcaaataaaaaaaaaagaagagactacggagagtcaaaaacagtgagagctttctttcatcttcagccagatcggagcaatcttctccatagattccgtgaaacgatgggaatagccaataagctccggctaagttcatcatctctcagccgaatcctccaccggagaatactttactcatccgctgtcagatctttcaccacatcggaaggtcaccgtcccaccatcgttcataaacaaggtctcgatatcctccatgatccttggttcaacaaggggactgcgtttacgatgacggagagaaatcgtttagatcttagaggtcttcttcctcctaatgttatggactctgagcaacagatttttcgttttatgactgacctgaagagattagaggagcaagctagagatggaccttctgatcctaatgctttggctaaatggcggattcttaatcggttacatgaccgaaatgagactatgtactataaggttttgattaacaatattgaggagtatgcgccgatagtgtatactcctacggtaggtcttgtctgccagaactacagtgggttgtttaggaggccaaggggaatgtattttagtgctgaagatcgtggtgaaatgatgtccatggtttacaactggccagctgagcaggttgatatgattgttgttaccgatggaagccggattttgggtcttggagatctaggtgttcatggaattggaattgctgtagggaagcttgatttatatgttgccgcagctggaataaatcctcaacgggtactacctgtcatgattgatgttggaacaaacaatgaaaaactacgcaacgaccccatgtacttgggtctgcaacaacgtcgtttagaggatgacgactatatagatgttattgatgaatttatggaggcagtgtatactcggtggccacatgttattgtgcagtttgaggatttccagagcaagtgggctttcaaattattgcagaggtatagatgcacctaccgaatgttcaatgatgatgtccaggggacagcaggggttgctatcgctggtcttcttggagcagttagagcacaggggcgacctatgattgatttcccaaagatgaagatcgttgttgctggcgcgggaagtgcgggaattggtgttctaaatgctgcgaggaagacaatggcacgaatgttgggaaatactgaaactgcgtttgatagtgcacaaagtcaattttgggtggttgatgcgcagggtcttatcaccgaaggccgggaaaatattgacccagaggctcagccttttgctaggaagactaaagaaatggagcgtcagggattaaaagaaggagcaactcttgtggaagtggttcgtgaagttaaacctgatgtgcttcttggtttatcagcagttggagggttattctcaaaagaggttttagaagcaatgaaaggttcaacctcgacaaggcctgctatatttgcaatgtcaaaccccacaaaaaatgctgaatgcacgcctcaagatgcattttcgatattaggcgaaaatatgatttttgcgagtggaagcccattcaagaatgtggaatttggaaatggtcatgtaggacattgcaaccagggaaacaacatgtatctatttccaggtattggacttggcactcttttatctggtgctcccattgtctccgacgggatgcttcaggccgcatccgagtgcctagcagcatacatgagcgaagaagaagtgctagaggggattatataccctccaatatcaaggatacgagacataacaaaaagaatagcagctgcggtgattaaggaagcgattgaggaggatttggttgaaggatatagagaaatggacgctcgagagatccaaaagctggatgaggaggggctgatggagtatgtggaaaacaacatgtggaatccagagtacccgactttggtctacaaggatgactaagtttggttcccaaaatgaataagtctactttctcttatttatatgtaaaaatttataattggggttgctttatacccaatcaaattcatagctactgctttctcttgttcttatgtaaaaaaaaaaaaaatatataattgggttgtttgttatccaatcagattc

SEQ ID NO: 77813 - protein, 623 aa, Arabidopsis thaliana
MGIANKLRLSSSSLSRILHRRILYSSAVRSFTTSEGHRPTIVHKQGLDILHDPWFNKGTAFTMTERNRLDLRGLLPPNVMDSEQQIFRFMTDLKRLEEQARDGPSDPNALAKWRILNRLHDRNETMYYKVLINNIEEYAPIVYTPTVGLVCQNYSGLFRRPRGMYFSAEDRGEMMSMVYNWPAEQVDMIVVTDGSRILGLGDLGVHGIGIAVGKLDLYVAAAGINPQRVLPVMIDVGTNNEKLRNDPMYLGLQQRRLEDDDYIDVIDEFMEAVYTRWPHVIVQFEDFQSKWAFKLLQRYRCTYRMFNDDVQGTAGVAIAGLLGAVRAQGRPMIDFPKMKIVVAGAGSAGIGVLNAARKTMARMLGNTETAFDSAQSQFWVVDAQGLITEGRENIDPEAQPFARKTKEMERQGLKEGATLVEVVREVKPDVLLGLSAVGGLFSKEVLEAMKGSTSTRPAIFAMSNPTKNAECTPQDAFSILGENMIFASGSPFKNVEFGNGHVGHCNQGNNMYLFPGIGLGTLLSGAPIVSDGMLQAASECLAAYMSEEEVLEGIIYPPISRIRDITKRIAAAVIKEAIEEDLVEGYREMDAREIQKLDEEGLMEYVENNMWNPEYPTLVYKDD

SEQ ID NO: 77814 - DNA, 2110 bp, Arabidopsis thaliana
  CDS (159)..(1925)
gggtctcattttcctctggcctatataaatccactatcctccacttctgtctttcatcatcattccacataaacaaaatatcttcttgctcattattcatcatcaatctactactccgtaaactttgcttcctctgtttgtattagctcagaagagatatgggaagtactccgactgatttacccggtgaggatgtcgccgataacagatccggcgtcggcggtggtatttctgacgtctacggtgaggattccgccaccttggaccagcttgtcaccccttgggttacctctgtcgctagtggctacacattgatgcgtgatccgagatacaacaagggacttgcgtttactgataaagaaagagatgctcattacttaactggtcttcttccccctgtgattttgagtcaggatgttcaggagaggaaggtgatgcacaatctccgtcagtacactgttcctctgcagcgttacatggccctgatggatcttcaggaaaggaacgagaggttgttctacaagcttttgattgataacgttgaggagttgcttccagttgtgtacacaccaacagttggtgaggcttgccagaagtatgggagcattttcaggaagccacagggtctctacatcagtttgaacgagaagggcaagattcttgaagttttgaagaactggccccagagaggaatccaagttattgttgttactgatggtgagcggattctcggtctgggagatcttggttgccagggaatgggaattccagtggggaaactttctctttacaccgctttgggaggaatccgtccatcagcttgtcttccaatcaccattgatgtgggtacaaacaatgagaagttgctaaatgatgaattctacatcggtcttaaacagcgaagagcaactggccaggaatatgctgaattcctgcacgaattcatgtgcgctgtaaagcagaactatggagagaaagtgttggttcagtttgaagattttgcaaaccacaatgcgtttgaccttttgtctaagtacagtgatagccatcttgtcttcaatgacgatatccagggtactgcatccgtggtgcttgctgggcttattgccgctcagaaggtgcttggtaaaaaactggctgaccataccttcctgttcttgggtgccggagaggctggaaccggtatcgctgagctaattgctcttaagatttcgaaagagactggagctcccatcactgagacccggaagaagatttggcttgtggactccaagggactgattgttagctcacgcaaagaatctcttcagcacttcaagcagccatgggcacatgagcacaaacctgtgaaggacctcattggtgctgttaatgcaatcaagccaaccgttctcattggaacatccggtgtgggtcagactttcacaaaagaagttgtcgaggccatggctaccaacaacgagaaaccgttgattcttgctctctcaaaccctacttctcaagctgagtgtactgctgaacaggcttacacatggaccaagggtcgtgcaatctttggaagtggaagcccatttgatcctgttgtgtacgatggcaaaacctacttgcctggccaggcaaacaattgctacattttccctggtctgggtcttggtttgatcatgtctggggcaattcgtgtccgtgatgacatgctcctcgcagcttctgaagcattggccgcacaagtgacagaagagcattacgccaatggtctgatctacccgccattctcaaacatcagagagatctctgctaacattgcagcctgtgtcgccgccaaaacctatgacctcggattggcgtcgaacctgccacgtgcaaaggatcttgtcaagtttgcagagagcagcatgtacagccctgtgtacagaaactaccgttaaaaaagttttgttgaagaaacctgcagattatactattcacaacccttgatagtttcttaaggcttgtatttaagttttttgtttgtttgtttgttgtttgttttctcttctacattatgatgctgtttgtgaactctctctctgtctttgctgataaataataaattgttactaatataatctac

SEQ ID NO: 77815 - protein, 588 aa, Arabidopsis thaliana
MGSTPTDLPGEDVADNRSGVGGGISDVYGEDSATLDQLVTPWVTSVASGYTLMRDPRYNKGLAFTDKERDAHYLTGLLPPVILSQDVQERKVMHNLRQYTVPLQRYMALMDLQERNERLFYKLLIDNVEELLPVVYTPTVGEACQKYGSIFRKPQGLYISLNEKGKILEVLKNWPQRGIQVIVVTDGERILGLGDLGCQGMGIPVGKLSLYTALGGIRPSACLPITIDVGTNNEKLLNDEFYIGLKQRRATGQEYAEFLHEFMCAVKQNYGEKVLVQFEDFANHNAFDLLSKYSDSHLVFNDDIQGTASVVLAGLIAAQKVLGKKLADHTFLFLGAGEAGTGIAELIALKISKETGAPITETRKKIWLVDSKGLIVSSRKESLQHFKQPWAHEHKPVKDLIGAVNAIKPTVLIGTSGVGQTFTKEVVEAMATNNEKPLILALSNPTSQAECTAEQAYTWTKGRAIFGSGSPFDPVVYDGKTYLPGQANNCYIFPGLGLGLIMSGAIRVRDDMLLAASEALAAQVTEEHYANGLIYPPFSNIREISANIAACVAAKTYDLGLASNLPRAKDLVKFAESSMYSPVYRNYR

SEQ ID NO: 77816 - DNA, 2147 bp, Triticum aestivum
  CDS (128)..(1840)
acaccatccaccacatcccatcccaggagattaaaaaaggacaagagctcgattcaaatccgatcctgcgttacgtatcgcgcttcttccgtccgtgtgttcgttccgaggccaggagtttgaggagatggcgggcggcggtgtcgaggacgtctacggcgaggacagggccaccgaggagcagctcatcacgccatggtcattctccgtcgcaagtgggcaccagcttctgagggacccccggcacaacaaggggctggccttctccgaggcggagcgcgacgcgcactacctccggggcctgcttcccccggccatcgtctcccaggagcaccaggagaagaagatcatgcacaacctccgcagttacaccgtccccctgcaccgctacgtcgccatgatggacctccaggagaggaacgagaggctcttctacaagctcctcatcgacaacgtcgaggagctgctccccgtcgtctacacgcccgtcgtcggcgaggcctgccagaagtacggcagcatctaccgccgcccgcaggggctctacatcagcctcaaggacaagggcaaggtgctcgaggtgctcaagaactggcctgagaggagcatccaggtcatcgtcgtcaccgacggcgagcgcattttggggctcggagatctgggttgccagggtatggggattccggttggcaaactgtctctgtacaccgccctcggaggagttcgcccatcagcttgcctgccaattacgatcgatgttggcaccaacaatgagacattgctgaacgacgagtactacatcgggctccgtcaacggcgtgctaccggcgaggaataccatgagcttcttcaagagttcatgaatgcagtgaagcagaactacggcgagaaagtcctggtccagtttgaggactttgccaaccacaatgcattcgatttgctcgcaaagtacagcaagagccatctcgtcttcaacgatgatattcagggcacagcatcagtggtcctcgcaggcctcttggcggccctgaggatgatcggtggaggccttgtggatcagacttacctcttccttggtgctggagaggctggaactggcattgcagaactcattgctcttgagatgtcgaaacacactgaactcccggtggacgactgccgcaagaagatctggctggtggactccaagggtctgcttgtcgagtctagaaaagagtctctgcagcacttcaagaagccgttcgctcatgagcacgaagaactcaagaccctgctggaggccgtccagtccatcaagccaaccgtgctgatcggaacctccggcgtcgggaagaccttcacccaggaagtgatcgaggccatggcctccttcaacgagaaacccgtcatcttctcgctgtcgaacccgacgtcccactcggagtgcacggccgaggaggcctacacctggagcaagggcacggcggtgttcgcgagcggcagcccgttcgaccccgtggagtacgaggggaagacgttcgtgcccgggcagtccaacaacgcctacgtgttccccggcttcggcctcggcgtcgtcatctccggcgccatccgcgtccacgacgacatgctcctcgccgcctcggaggcgctggcggaggaggcgacccaggagaacttcgacaaggggctcatcttcccgcccttcaccaacatccgcaagatctcggccagcatcgccgccaaggtggccgccaaggcctacgacctgggcctggccagccggctgccgcggcccgacgacctggtcaagtacgccgagagctgcatgtacaccccgctctaccgcagctacaggtgagcgtggcgggcagttttgcggccagcacggacggagtcaatcaataaaatcaatctccttcccccgtatgccaaccagctcaactcaaagcttcagcgacgcaacctaaaacataggctttctttccttctgtgtccgtctatgcgtatgtgtactcttgtgctcttctactttgctttactttgtactgtaatgtactgttaacgggagcacggcacgcacctgtctatccgtgtcgaggtgcgtcgtcgtcgtcgtcgtcgattcttttgtcagattgagttaaacgagtgtaatagtttgattg

SEQ ID NO: 77817 - protein, 570 aa, Triticum aestivum
MAGGGVEDVYGEDRATEEQLITPWSFSVASGHQLLRDPRHNKGLAFSEAERDAHYLRGLLPPAIVSQEHQEKKIMHNLRSYTVPLHRYVAMMDLQERNERLFYKLLIDNVEELLPVVYTPVVGEACQKYGSIYRRPQGLYISLKDKGKVLEVLKNWPERSIQVIVVTDGERILGLGDLGCQGMGIPVGKLSLYTALGGVRPSACLPITIDVGTNNETLLNDEYYIGLRQRRATGEEYHELLQEFMNAVKQNYGEKVLVQFEDFANHNAFDLLAKYSKSHLVFNDDIQGTASVVLAGLLAALRMIGGGLVDQTYLFLGAGEAGTGIAELIALEMSKHTELPVDDCRKKIWLVDSKGLLVESRKESLQHFKKPFAHEHEELKTLLEAVQSIKPTVLIGTSGVGKTFTQEVIEAMASFNEKPVIFSLSNPTSHSECTAEEAYTWSKGTAVFASGSPFDPVEYEGKTFVPGQSNNAYVFPGFGLGVVISGAIRVHDDMLLAASEALAEEATQENFDKGLIFPPFTNIRKISASIAAKVAAKAYDLGLASRLPRPDDLVKYAESCMYTPLYRSYR

SEQ ID NO: 77818 - DNA, 2296 bp, Triticum aestivum
  CDS (113)..(1957)
ctcccttcgcctccgagaagctcggtctcacctcacgcaccaccaacgcggcggcgttctcccctccaccgtgccgaccgaccccgagcggcgccgcggctgacccagcgcgatgtggcgccatgcagcggcccggcggtcggcgcagatccggcggctcctttccacgtccgccccctcggcgggcgccgtgcgcggcccctgcatcgtgcacaagcgcggcaccgacatcctccacgacccctggtacaacaaggacacggcgttccccctcacggagcgggaccgcctcggcctccggggcctgctcccgccgcgggtcatgtcgttcgagcagcagtacgagcgcttcataaactcgtaccattcgctggagcacaacacgcagggggagcccgattccgtggtctcgctggccaagtggaggatccttaacaggctgcacgaccggaacgagacgttgtactacagggtgctaattgacaatatcaaggatttcgcgcccataatatacacccctactgtcggcttggtctgcgaaaactacagcgggctgttcaggcgtccccgcgggatgtacttcagtgcaaaggataaaggggagatgatgtcgatgatttacaactggccagcagagaaggttgacatgatagttgtgactgacgggagtcgcattctaggtttaggtgatcttggagttcaaggcataggtatacctattggtaaacttgatgtttatgttgcagctgctggtatcaacccacagaaggttctcccaataatgcttgatgtgggaacaaataatgaagaactccttgaagacaagctatatttaggattgaggcaacctaggttggaaggagaggaatacttagctgttgtagatgagttcatggaagctgttcatgcacgctggccgaaagcaattgtgcagtttgaagacttccaaatgaaatgggcatttgaaactcttcagaggtatcggagccgattttgcatgttcaatgatgacgtgcaggggacagcaggagttgctctagctggtctacttggagctgttagagcacaaggtcgaccgctcgcagattttactaagcagaagatagttgtggtgggagctggaagtgctgggataggtgtgcttaacatggctaaacatgcaatgttaaggatgccagggacccataaaattggagaactgggtgaaggacacaatcaattctgggttctggacaaagatggccttattaccaaaagtagaaaagatctggatccagctgttgctcgttttgctagaggttatggtcctgaagaggtcgaagatctccatgagggggctagtcttgttgaagtggtcaagaaagtgaagcctcatgtccttttaggactatctggagttggcgggatatttaacgaggaggttctcaaggctatgaaagaatctgactccccctgccctgcaatttttgcaatgtccaacccaactactaaagctgaatgtacgcctgaagatgtattcaagcatgttggagaaaatgcagtatttgccagtggaagccctttcagcaatgttactttaagcaatggtagaaaaggctatgctaatcaagcaaacaacatgtatctgtttcctgggattggtttaggagcccttctgtcaggtgctcggcatatttcggatggcatgctccatgctgcagctgagtgccttgcttcatacatcacagatgatgcgattcgaaaaggaatcctctttccttcaatttcaagtatcaggcacatcaccgcacgtgtcggcgctgcagtcgcccgtgctgccgttgatgaagatctggccgagggatgctctgacttggatcctcgggacctcaggagcatgtcagagtcggatacggtggattacgtggctcggaagatgtggtaccctgtttacagcccactcgtcaacgacaaatagtgttcgacgaagcacacccgaagagacgtatcaggcacatacatttgttctgatcagtgaatacttcgctatttcggtttagctgctctacttgggagtatttcagcagatactgctgccacgtctactggctatattgttgcctcatttgtttacgttgacaggttcatcaaacattgctcaattttgggacccgttgagctacagttatgtcccatgtggtaggacttgaataaatgtcagatgttggcagtctgtctcctgcatcgtcgttgttggcgtatgtctcttgcatcgccaggtaatacgagattgcaaaccgattttgtgttccaaaac

SEQ ID NO: 77819 - protein, 614 aa, Triticum aestivum
MWRHAAARRSAQIRRLLSTSAPSAGAVRGPCIVHKRGTDILHDPWYNKDTAFPLTERDRLGLRGLLPPRVMSFEQQYERFINSYHSLEHNTQGEPDSVVSLAKWRILNRLHDRNETLYYRVLIDNIKDFAPIIYTPTVGLVCENYSGLFRRPRGMYFSAKDKGEMMSMIYNWPAEKVDMIVVTDGSRILGLGDLGVQGIGIPIGKLDVYVAAAGINPQKVLPIMLDVGTNNEELLEDKLYLGLRQPRLEGEEYLAVVDEFMEAVHARWPKAIVQFEDFQMKWAFETLQRYRSRFCMFNDDVQGTAGVALAGLLGAVRAQGRPLADFTKQKIVVVGAGSAGIGVLNMAKHAMLRMPGTHKIGELGEGHNQFWVLDKDGLITKSRKDLDPAVARFARGYGPEEVEDLHEGASLVEVVKKVKPHVLLGLSGVGGIFNEEVLKAMKESDSPCPAIFAMSNPTTKAECTPEDVFKHVGENAVFASGSPFSNVTLSNGRKGYANQANNMYLFPGIGLGALLSGARHISDGMLHAAAECLASYITDDAIRKGILFPSISSIRHITARVGAAVARAAVDEDLAEGCSDLDPRDLRSMSESDTVDYVARKMWYPVYSPLVNDK

SEQ ID NO: 77820 - DNA, 2002 bp, Arabidopsis thaliana
  CDS (51)..(1796)
acttcttttcgctttttgtttttgggattgttttcattgatcctttcaagatggagaaagtgaccaactcagacttgaaatcctctgttgatggtggcgttgttgatgtgtatggagaagattcagccaccattgagcacaacataactccttggtctctctctgtttctagtggatattcattgctgagagatcctcgctacaacaaaggacttgctttcactgagaaagagagagacactcattacttgcgtggtcttctccctccagttgttcttgatcaaaagcttcaggagaagaggctgttgaacaatatccgacaatatcaattcccattacaaaagtacatggctctgacagaacttcaggaaagaaacgagagactgttttacaagctattgatagataatgttgaggagctacttcctattgtttatactccaactgttggtgaagcttgtcagaaatttggaagtattttcaggcgacctcagggtttattcatcagtttaaaagacaagggaaagattctagatgtgttaaagaactggcctgaaaggaacatacaggttattgttgttactgacggtgaaaggattttaggattaggagatcttggatgtcaggggatgggtataccggttggtaagttggcgttatattcagcacttggaggtgttcgtccttcagcgtgtttacctgtcaccattgatgtgggaacaaacaatgagaaactgttgaatgatgagttctacataggactcaggcaaaagagagcaacgggacaggaatatagtgaactcttgaatgaattcatgagtgctgtgaaacagaactatggtgaaaaagttcttattcagtttgaagattttgctaatcataatgcctttgagttgcttgcaaaatacagcgatactcatctcgtcttcaacgatgatatacaggggacagcatcagttgttttagcaggattagtttccgcacagaagttaacgaatagcccacttgcagagcataccttcctctttcttggtgctggtgaagctggaactggaatagcagaactcatagctctctatatgtcaaaacagatgaatgcttcggtagaggaaagccgcaagaaaatctggcttgttgattccaagggattgattgttaactcccgcaaagattcacttcaagactttaagaaaccatgggctcatgaacatgaaccagtcaaagacctcttaggtgctatcaaggcaataaaaccgactgttctgattggatcttctggcgttggacggtcttttacaaaagaagtgatagaagccatgtcctccattaatgagagaccactgataatggctctctctaaccccacaacacaatctgaatgtacagccgaagaagcttatacttggagtaagggccgtgccatttttgctagtggaagcccttttgatccagttgagtatgaaggaaaggtgtttgtatctacacaggcgaacaatgcgtacatattcccgggctttggacttggtttggttatctctggagcaatacgggtacatgacgatatgcttctagctgctgctgaggcattagctggacaagtaagcaaagagaactatgagaaaggaatgatatatccttcattctcttccatccggaaaatatcagctcagattgcagccaatgtagcaactaaggcgtatgaactaggattggcagggcggcttccacggccgaaagatattgtcaaatgtgcagagagtagcatgtacagccccacataccgtctctaccgttgaaagttgaaactcaagagtctatactttgtgtgcttctcatcctttgttcagttattcccatgtctttctgtaatttccagtattaaattagtctttcaagttgagatttcaaacacatgccaagatctctcatttaactttgcaactctgaaagttaaagactatatgaagtgaatttgtttaatagaaaacgatgaaaatgttat

SEQ ID NO: 77821 - protein, 581 aa, Arabidopsis thaliana; identical to SEQ ID NO: 5572

SEQ ID NO: 77822 - DNA, 1746 bp, Arabidopsis thaliana
  CDS (1)..(1746)
atggagaaagtgaccaactcagacttgaaatcctctgttgatggtggcgttgttgatgtgtatggagaagattcagccaccattgagcacaacataactccttggtctctctctgtttctagtggatattcattgctgagagatcctcgctacaacaaaggacttgctttcactgagaaagagagagacactcattacttgcgtggtcttctccctccagttgttcttgatcaaaagcttcaggagaagaggctgttgaacaatatccgacaatatcaattcccattacaaaagtacatggctctgacagaacttcaggaaagaaacgagagactgttttacgagctattgatagataatgttgaggagctacttcctattgtttatactccaactgttggtgaagcttgtcagaaatttggaagtattttcaggcgacctcagggtttattcatcagtttaaaagacaagggaaagattctagatgtgttaaagaactggcctgaaaggaacatacaggttattgttgttactgacggtgaaaggattttaggattaggagatcttggatgtcaggggatgggtataccggttggtaagttggcgttatattcagcacttggaggtgttcgtccttcagcgtgtttacctgtcaccattgatgtgggaacaaacaatgagaaactgttgaatgatgagttctacataggactcaggcaaaagagagcaacgggacaggaatatagtgaactcttgaatgaattcatgagtgctgtgaaacagaactatggtgaaaaagttcttattcagtttgaagattttgctaatcataatgcctttgagttgcttgcaaaatacagcgatactcatctcgtcttcaacgatgatatacaggggacagcatcagttgttttagcaggattagtttccgcacagaagttaacgaatagcccacttgcagagcataccttcctctttcttggtgctggtgaagctggaactggaatagcagaactcatagctctctatatgtcaaaacagatgaatgcttcggtagaggaaagccgcaagaaaatctggcttgttgattccaagggattgattgttaactcccgcaaagattcacttcaagactttaagaaaccatgggctcatgaacatgaaccagtcaaagacctcttaggtgctatcaaggcaataaaaccgactgttctgattggatcttctggcgttggacggtcttttacaaaagaagtgatagaagccatgtcctccattaatgagagaccactgataatggctctctctaaccccacaacacaatctgaatgtacagccgaagaagcttatacttggagtaagggccgtgccatttttgctagtggaagcccttttgatccagttgagtatgaaggaaaggtgtttgtatctacacaggcgaacaatgcgtacatattcccgggctttggacttggtttggttatctctggagcaatacgggtacatgacgatatgcttctagctgctgctgaggcattagctggacaagtaagcaaagagaactatgagaaaggaatgatatatccttcattctcttccatccggaaaatatcagctcagattgcagccaatgtagcaactaaggcgtatgaactaggattggcagggcggcttccacggccgaaagatattgtcaaatgtgcagagagtagcatgtacagccccacataccgtctctaccgttga

SEQ ID NO: 77823 - protein, 581 aa, Arabidopsis thaliana
MEKVTNSDLKSSVDGGVVDVYGEDSATIEHNITPWSLSVSSGYSLLRDPRYNKGLAFTEKERDTHYLRGLLPPVVLDQKLQEKRLLNNIRQYQFPLQKYMALTELQERNERLFYELLIDNVEELLPIVYTPTVGEACQKFGSIFRRPQGLFISLKDKGKILDVLKNWPERNIQVIVVTDGERILGLGDLGCQGMGIPVGKLALYSALGGVRPSACLPVTIDVGTNNEKLLNDEFYIGLRQKRATGQEYSELLNEFMSAVKQNYGEKVLIQFEDFANHNAFELLAKYSDTHLVFNDDIQGTASVVLAGLVSAQKLTNSPLAEHTFLFLGAGEAGTGIAELIALYMSKQMNASVEESRKKIWLVDSKGLIVNSRKDSLQDFKKPWAHEHEPVKDLLGAIKAIKPTVLIGSSGVGRSFTKEVIEAMSSINERPLIMALSNPTTQSECTAEEAYTWSKGRAIFASGSPFDPVEYEGKVFVSTQANNAYIFPGFGLGLVISGAIRVHDDMLLAAAEALAGQVSKENYEKGMIYPSFSSIRKISAQIAANVATKAYELGLAGRLPRPKDIVKCAESSMYSPTYRLYR

SEQ ID NO: 77824 - DNA, 2430 bp, Oryza sativa
  CDS (194)..(2110)
ggccgccgacggcctcgtccacgtcacgtgtgccgcgccaccctccgcaacgcaacccccttccttttttataccggcctcctccctcccattacccccctcacgcgctcgcttcctcttccccccagccatcggcgacgcgaggacgcgacgcgccccaccaaccaccaccgcctccgccgacctcgccgccatgctgtccgcgcgcgccgccgccaccgccgccgccgccgccgcctccccgctgtggaagcgcggcgagggtggcagcagcgggagcgggagcggatgcacgagctgcagggaggtgcggaggagggccgcggtgagggtccgtacgccggtgccgaggagggtggaggcggtcgcgatggagtccgcggcggagaccgagaagaaggaggaggttgcggcggccggcggcggggttgaggacatggctaccgaggaggtgcccgtcacgccatgggccttctccgtcgcgagtggttacacccttttgagggatccacatcacaacaagggccttgcctttagtgagaaggagcgggatgctcattacttacgtggccttcttcctccggcagttgtgtctcaggatcttcaagtgaagaagatcatgcataatcttcgccagtacagtgtacctttgcagcgttacatggccatgatggatctccaggagaggaacgagaggctcttctacaagcttttgattgataatgtggaggagcttctccctgtggtgtatacaccaacagtaggtgaggcctgccagaagtatgggagcatatttagacaaccacagggtctctatgtcagcttgaaggacaagggaaaggttcttgatgtgctaaggaactggccagagagaaacattcaagttattgttgttactgatggtgagcgcattttggggcttggagatttgggttgtcagggaatgggtattcctgttggtaaactttctctgtacactgcccttggaggagttcgcccgtcagcttgtttacctatcacgattgatgttggtacaaacaatgagcaattgttgaatgatgaattctacattgggctccggcaaaggcgtgctactggcaaggagtaccatgagctcatggaagaatttatgagtgccgttaagcaaatctatggtgagaaagttctgatacagtttgaggacttcgccaatcacaacgcatttgatttgcttgcaaaatacagcaagagtcatcttgttttcaatgatgatatccagggaacagcatctgtggtccttgcaggtcttttatcatcactaaaggtggttggtggaaccctggctgaacacacttatttgttccttggtgctggtgaggctggaactggtattgcagaactcattgctcttgagatttcaaaacagacaaaggctccaattgaggagtgccgcaagaaggtttggctgctggattcaaaggggttgatcgttaactcacgaaaagaatccctccaggcatttaaaaagccttgggcacatgagcatgaacctgtaacgacactgttagatgctgtccagtccatcaaacctactgtgctgattggaacatccggagttggcaaaacttttactaaagaagttattgaggccatggcttcctttaacgagcgacccgtcattttctctctggcaaaccccacatcacactctgagtgtactgctgaagaagcatataattggagccagggtcgtgcagtatttgccagcggcagtccgtttgaccctgtggagtacaatggaaagatacatgtgccaggccagtcgaacaatgcctacattttccctggattcggcctcggtgtcgtaatctctggagctgtccgtgttcacgaggatatgcttctagctgcctcggaaacactagctgatcaggccactcaggagaactttgagaagggatcgatcttcccgcccttcacaaacatcagaaagatttctgctcgcattgccgcaaccgtggctgcaaaagcctatgaacttggactggcgacccggctgcctcaacccagggatctggagaaatacgcagagagctgcatgtacacccccgtataccgcagctaccggtaacgccgcggaggtcaaattttgcagtaataaaacctaccaatgcagtaggggataatgctatgttgtgttgccattgtcgccgttggccgttgctgctgcaaggcattgtatctgtctatataaatcacctgttgtaacgttatggaagcaatctccatgtgtaccaccagtgtttcattctttgatcgttataaagagtgcaataagaacatagttttagctcccattgtaatgggcagcataaaaaaaaaaaaaaaaaaaaaaaaaaaaaaaaaaaaaaaaaaaaaaaaaaaaaaaaaaaaaaaaaaaaaaaaaaaaaa

SEQ ID NO: 77825 - protein, 638 aa, Oryza sativa
MLSARAAATAAAAAASPLWKRGEGGSSGSGSGCTSCREVRRRAAVRVRTPVPRRVEAVAMESAAETEKKEEVAAAGGGVEDMATEEVPVTPWAFSVASGYTLLRDPHHNKGLAFSEKERDAHYLRGLLPPAVVSQDLQVKKIMHNLRQYSVPLQRYMAMMDLQERNERLFYKLLIDNVEELLPVVYTPTVGEACQKYGSIFRQPQGLYVSLKDKGKVLDVLRNWPERNIQVIVVTDGERILGLGDLGCQGMGIPVGKLSLYTALGGVRPSACLPITIDVGTNNEQLLNDEFYIGLRQRRATGKEYHELMEEFMSAVKQIYGEKVLIQFEDFANHNAFDLLAKYSKSHLVFNDDIQGTASVVLAGLLSSLKVVGGTLAEHTYLFLGAGEAGTGIAELIALEISKQTKAPIEECRKKVWLLDSKGLIVNSRKESLQAFKKPWAHEHEPVTTLLDAVQSIKPTVLIGTSGVGKTFTKEVIEAMASFNERPVIFSLANPTSHSECTAEEAYNWSQGRAVFASGSPFDPVEYNGKIHVPGQSNNAYIFPGFGLGVVISGAVRVHEDMLLAASETLADQATQENFEKGSIFPPFTNIRKISARIAATVAAKAYELGLATRLPQPRDLEKYAESCMYTPVYRSYR

SEQ ID NO: 77826 - DNA, 1803 bp, Drosophila melanogaster
  CDS (1)..(1803)
atggaatttcgccggctgcatccattgctgcgccttgcatcccgtcctcttctgagttccagcaggcggttcagcgtttatgatgacgaaatggaacaaataacaagacctgactggcatgttgttatgaatggaaagtacaataagggccttgcgttcaccattaaggaacggcaacgtttgggcatcatgggattgatgccctgctccgtgcgctccatggatgaccagatgaatgcggccctggcgaattttgaggcgagacccacagatatcgcccgctttacatacttgagtgctgtccaccatcgacaccggcgactgtactaccggttcatcaaggagaacatcgagaaatcgctacccattgtttatacaccaacggtgggcgatgtggtggccacctatggactgaacttccagcaggccatcagcctgttcatcagcattcacgacaagggccacatccgggatcttatgcacaactgggtggacgagggcgttaaggccatctgtgtgacggatggcggaagggtactgggtctcggggacatgggtgccaatgcgatgggcattagtttgggcaaaatgatcctatatacggctttgggtagcattccgccgagcacactaatgcccgtttgcctcgacgtgggtaccgataatcaggccctgctgcaggatcccctttatgttggggcacgaataccgcgggtcaagggaccggaatacgatgaactggtggatgaatttatggagtcggcggttaaatgcttcggaaacaacaccttcatccacttcgaggactttgccactccaaatgccttgaagttcttggaaaaataccagtacaagtactgttgcttcaacgatgatattcagggaacgggagccactggcctggccgcgttcatcaatgtggaacgcatcactggccgtaaattggaggacaccgtatttctcttcgtaggagctgggagtgcggcattgggtatcgccaatatgctggccatggaactggaggtacgcggcattcctgccgaggaggcaactaaaaatatctacttgatggatgtcaatggtattttgacaccggagtcacctaatccaccggagatgggtaaaatatttataaagtccatggagcccatgaaggatatgatggccgtgctgaagaagcttaagccatccgtacttgttggagcaactggtgtgggtggaattttcaatgaagaagtactgaaaaccatggcgaaaaatcacgaacgtcctgcagtttttcccctctcgaatccaactgccaactcggaatgcaccgccgagcaggcttttacacacactgagggtcgcgtgctcttcggatccggatcgccctttccaccagtggtcatcaatggcaaaagatatcgccccgctcaggccaacaactgtctgacttttccgggcatcgcattggccgccattacggccaaggcccggtatctgccaaacgaagtattttccgttgtgtcgcacgagctggccaggaatacaccgcaggaactacttgacgaaggcactctgtttccgcccatcaaggatgcacataatgtggccttcaatgtgggcgttgccatgactcagtatctaattgataatgatctttcaaatgtttacccaaagcccgatgatatctgtgagtttgtcaagagaagtctgtataagttcgattacagaaattccctgccaactacgtgggactatcccgtggaaccgccaacaccgaaacccaaaaccaaacccaaaacgaagccgaaggaataa

SEQ ID NO: 77827 - protein, 600 aa, Drosophila melanogaster
MEFRRLHPLLRLASRPLLSSSRRFSVYDDEMEQITRPDWHVVMNGKYNKGLAFTIKERQRLGIMGLMPCSVRSMDDQMNAALANFEARPTDIARFTYLSAVHHRHRRLYYRFIKENIEKSLPIVYTPTVGDVVATYGLNFQQAISLFISIHDKGHIRDLMHNWVDEGVKAICVTDGGRVLGLGDMGANAMGISLGKMILYTALGSIPPSTLMPVCLDVGTDNQALLQDPLYVGARIPRVKGPEYDELVDEFMESAVKCFGNNTFIHFEDFATPNALKFLEKYQYKYCCFNDDIQGTGATGLAAFINVERITGRKLEDTVFLFVGAGSAALGIANMLAMELEVRGIPAEEATKNIYLMDVNGILTPESPNPPEMGKIFIKSMEPMKDMMAVLKKLKPSVLVGATGVGGIFNEEVLKTMAKNHERPAVFPLSNPTANSECTAEQAFTHTEGRVLFGSGSPFPPVVINGKRYRPAQANNCLTFPGIALAAITAKARYLPNEVFSVVSHELARNTPQELLDEGTLFPPIKDAHNVAFNVGVAMTQYLIDNDLSNVYPKPDDICEFVKRSLYKFDYRNSLPTTWDYPVEPPTPKPKTKPKTKPKE

SEQ ID NO: 77828 - DNA, 1746 bp, Drosophila melanogaster
  CDS (1)..(1746)
atgagtttcttcaggttattgaactttggcattacacgaggatcttcgatatcgaagacacatcaatcaaattgcgagtgtagtccaaatttaattaaaattcgtccgtcttcatcccacgacacaatcagggttcccatagaagtggtgttttccgacaagtgcaataaggccttggccttcacgttggaggaacgccagcgtttgtgtatccatggactcatgccggcctgcgttcgaacgtacgatgagcagatgttggccatcgagtccaactttcactccttcgaatcgaatgtgggcagatatcgttatttgcgggctctgcgccagggttacgagagactgtactttcaattcgtatcgaagaacgtccacgcggtgctgcccattatctacacgcccactgtgggcttggcctgcactgtatacggcatgttgtatcgcggcatgaccggaatacacattaccaaacatgatcgaggacacatgaagcagatcctgtccaactggccgatgcggagatcggtgaaagccatctgtgtgaccgacggccaacgtatcctgggattaggtgacctgggagccaatggcatgggcatagcagtgggaaaaatggaactgtacacagccctggccggaattccgccgagtatgttattgccaatttgcctggatgtgggcacaaataacaaatcgctacacgaggatcccctgtacatcggtctaagggatgagcgtttaaagggcgatgagtacgtgtgctttgtggatgagttcatggaggcagtcgtatccacctttggagatcaaacgctcatccacttcgaggactttgcgacacccaatgcttttatgtttctgaataggtatcagcattgctactgccatttcaatgacgacattcagggcactgccgctgttggtttgggtggattgcttggcatccagaggatcaccaagaagccgctggaggagcatgtcattgtcttcgccggagcgggaagcgctgccatgggcatcgcctatttgcttaaaatggagctgatgtccaggggtctctccgaggctgatgctgccaaaaatatatatttttacgatcaagacggtgtcttgaccacagctaggaagagcataccggatattctatgcgttttcgccaagaacatgaaggaaactaagtccctggagacgttggtcgaacaagtgaagccctcaattattatgggtgccacctcggcaccaggacttttcactgagaaaataatacgcacaatggcagcgagtcacgaacgtcctggcatctttgccttctccaatcccaccatcaaatctgagtgcactgccgaacaggcgtacaaattctcagatggaaaggctatatattcggcaggatctccttttccgcccgtggagttcaatggcaaaaggctaactcctggtcaagctaacaactgttttgcttttcccgctttggttttggccaccatgactgttttggccactcgaatgccagacgagatattccttttggccgcccacgagctcgctgaatttccaaccaatgaggagatgcaaagcggacgtatctatcctctggtgaagcaggccaatgaagttgcctacaaaataggcgtgaaagtggccaagtatctgatagaaaacggtgagagcctacacttacatatatgcgcatattattatctttctaattggttaattaaggttatgctaagcgcaatttag

SEQ ID NO: 77829 - protein, 581 aa, Drosophila melanogaster
MSFFRLLNFGITRGSSISKTHQSNCECSPNLIKIRPSSSHDTIRVPIEVVFSDKCNKALAFTLEERQRLCIHGLMPACVRTYDEQMLAIESNFHSFESNVGRYRYLRALRQGYERLYFQFVSKNVHAVLPIIYTPTVGLACTVYGMLYRGMTGIHITKHDRGHMKQILSNWPMRRSVKAICVTDGQRILGLGDLGANGMGIAVGKMELYTALAGIPPSMLLPICLDVGTNNKSLHEDPLYIGLRDERLKGDEYVCFVDEFMEAVVSTFGDQTLIHFEDFATPNAFMFLNRYQHCYCHFNDDIQGTAAVGLGGLLGIQRITKKPLEEHVIVFAGAGSAAMGIAYLLKMELMSRGLSEADAAKNIYFYDQDGVLTTARKSIPDILCVFAKNMKETKSLETLVEQVKPSIIMGATSAPGLFTEKIIRTMAASHERPGIFAFSNPTIKSECTAEQAYKFSDGKAIYSAGSPFPPVEFNGKRLTPGQANNCFAFPALVLATMTVLATRMPDEIFLLAAHELAEFPTNEEMQSGRIYPLVKQANEVAYKIGVKVAKYLIENGESLHLHICAYYYLSNWLIKVMLSAI

SEQ ID NO: 77830 - DNA, 1833 bp, Drosophila melanogaster
  CDS (1)..(1833)
atgagtttcttcaggttattgaactttggcattacacgaggatcttcgatatcgaagacacatcaatcaaattgcgagtgtagtccaaatttaattaaaattcgtccgtcttcatcccacgacacaatcagggttcccatagaagtggtgttttccgacaagtgcaataaggccttggccttcacgttggaggaacgccagcgtttgtgtatccatggactcatgccggcctgcgttcgaacgtacgatgagcagatgttggccatcgagtccaactttcactccttcgaatcgaatgtgggcagatatcgttatttgcgggctctgcgccagggttacgagagactgtactttcaattcgtatcgaagaacgtccacgcggtgctgcccattatctacacgcccactgtgggcttggcctgcactgtatacggcatgttgtatcgcggcatgaccggaatacacattaccaaacatgatcgaggacacatgaagcagatcctgtccaactggccgatgcggagatcggtgaaagccatctgtgtgaccgacggccaacgtatcctgggattaggtgacctgggagccaatggcatgggcatagcagtgggaaaaatggaactgtacacagccctggccggaattccgccgagtatgttattgccaatttgcctggatgtgggcacaaataacaaatcgctacacgaggatcccctgtacatcggtctaagggatgagcgtttaaagggcgatgagtacgtgtgctttgtggatgagttcatggaggcagtcgtatccacctttggagatcaaacgctcatccacttcgaggactttgcgacacccaatgcttttatgtttctgaataggtatcagcattgctactgccatttcaatgacgacattcagggcactgccgctgttggtttgggtggattgcttggcatccagaggatcaccaagaagccgctggaggagcatgtcattgtcttcgccggagcgggaagcgctgccatgggcatcgcctatttgcttaaaatggagctgatgtccaggggtctctccgaggctgatgctgccaaaaatatatatttttacgatcaagacggtgtcttgaccacagctaggaagagcataccggatattctatgcgttttcgccaagaacatgaaggaaactaagtccctggagacgttggtcgaacaagtgaagccctcaattattatgggtgccacctcggcaccaggacttttcactgagaaaataatacgcacaatggcagcgagtcacgaacgtcctggcatctttgccttctccaatcccaccatcaaatctgagtgcactgccgaacaggcgtacaaattctcagatggaaaggctatatattcggcaggatctccttttccgcccgtggagttcaatggcaaaaggctaactcctggtcaagctaacaactgttttgcttttcccgctttggttttggccaccatgactgttttggccactcgaatgccagacgagatattccttttggccgcccacgagctcgctgaatttccaaccaatgaggagatgcaaagcggacgtatctatcctctggtgaagcaggccaatgaagttgcctacaaaataggcgtgaaagtggccaagtatctgatagaaaacggttatgctaagcgcaatttagaaccggaagatgttgaggagtatatcgaaaagaatagctataaactgacctatggaagctcgctggctgagacttgggcgtatccaaaaatgaaaccgcatccaagtacagccggccatgaaaataaacatcaaaagaaaaagtag

SEQ ID NO: 77831 - protein, 610 aa, Drosophila melanogaster
MSFFRLLNFGITRGSSISKTHQSNCECSPNLIKIRPSSSHDTIRVPIEVVFSDKCNKALAFTLEERQRLCIHGLMPACVRTYDEQMLAIESNFHSFESNVGRYRYLRALRQGYERLYFQFVSKNVHAVLPIIYTPTVGLACTVYGMLYRGMTGIHITKHDRGHMKQILSNWPMRRSVKAICVTDGQRILGLGDLGANGMGIAVGKMELYTALAGIPPSMLLPICLDVGTNNKSLHEDPLYIGLRDERLKGDEYVCFVDEFMEAVVSTFGDQTLIHFEDFATPNAFMFLNRYQHCYCHFNDDIQGTAAVGLGGLLGIQRITKKPLEEHVIVFAGAGSAAMGIAYLLKMELMSRGLSEADAAKNIYFYDQDGVLTTARKSIPDILCVFAKNMKETKSLETLVEQVKPSIIMGATSAPGLFTEKIIRTMAASHERPGIFAFSNPTIKSECTAEQAYKFSDGKAIYSAGSPFPPVEFNGKRLTPGQANNCFAFPALVLATMTVLATRMPDEIFLLAAHELAEFPTNEEMQSGRIYPLVKQANEVAYKIGVKVAKYLIENGYAKRNLEPEDVEEYIEKNSYKLTYGSSLAETWAYPKMKPHPSTAGHENKHQKKK

SEQ ID NO: 77832 - DNA, 1758 bp, Oryza sativa (japonica cultivar-group)
  CDS (1)..(1758)
atggcggggcgaggagaggggaacggcgctgcgacgatggcgggggtggccaccggtggcgtggaggacgcctacggcgaggaccgcgccaccgaggaccagcccatcacgccgtgggccgtctgcgtcgccagcggtcactctctgctgagggatccacggcacaacaaggggctatcattcacggagaaagagcgagacgcccactacctgcggggtttgctgcctccagtcgtgctctcccaagaacttcaggagaagaggcttctgcaaaatgtgcggcagtttcaggttcctctgcaacgttacatggctctgatggaccttcaggagaggaatgagaggcttttctacaagctcctgatcgacaacgttgaggaattgctccccgttgtgtacacgccgacggtgggcgaggcttgccagaagtacgggtcaatctttagacgaccacagggtctgtacatcagtcttaaagagaaggggagaatattggagttactgaggaactggccagagaagagcattcaggttattgttgttactgatggtgagcgcattttaggtctcggggatcttggttgccagggtatgggaatccctgtgggaaagcttgcactatacacagcccttggaggtgtccggccttctgcttgcttacctatcaccattgatgtgggaacaaacaatgaggatttactgaaggacgagttctacattggattaagacaaaaacgagccactggccaggaatatagtgatcttctggatgaattcatggctgctattaagcagaactatggacagaaggtgctagtccagtttgaagacttcgcaaattacaatgcatttacccttcttgagaagtaccgtgcaaacaatcttgtcttcaatgatgatattcagggaacggctgctgtagtgcttgcaggcctcattgctgctcagaaatttgtcagtgggactttagctgatcacacattcttattctttggcgcaggagaggctggtacaggcattgctgaactagtggctctcgagatatcaaatcagtccaaagttccagtggaagatgctcgcaaaaagatctggctacttgattcaaaggggttgattgtcagttcacgtaaagattctcttcagccctttaagaagcgatatgcccatgagcatgaaccagtcaaagatctactggatgctgttaaggttatcaaaccgactgcattgataggttcagctggtgtgggtcaaagtttcacaaaagaggtgattgaggctatgagttcaattaatgagagaccaatcatcctcgcactatccaatccaacatcacaatctgaatgtactgctgaacaggcatattcatggagtaagggccgtgcaatatttgggagtggaagtccatttgatccagttaaatacaatgacaagcttttcgtgcctgcacaggcaaacaatgcatatatattcccaggatttggcctaggcgtagtgatttcaggagcgataagggtgaaagatgaaatgatccttgctgctgctgaaggcttagctgaccaggtgaccccagagcatgttgacaaaggccttatttatccacccttttcctgcatcaggaagatatcagccaacatcgcagcccgcgttgctgcaaaagcctatgaccttggattggctagccatctccctcgcccaaaagacttggtgaagtacgctgagagctgcatgtacagccccatttaccgttcttatagatga

SEQ ID NO: 77833 - protein, 585 aa, Oryza sativa (japonica cultivar-group)
MAGRGEGNGAATMAGVATGGVEDAYGEDRATEDQPITPWAVCVASGHSLLRDPRHNKGLSFTEKERDAHYLRGLLPPVVLSQELQEKRLLQNVRQFQVPLQRYMALMDLQERNERLFYKLLIDNVEELLPVVYTPTVGEACQKYGSIFRRPQGLYISLKEKGRILELLRNWPEKSIQVIVVTDGERILGLGDLGCQGMGIPVGKLALYTALGGVRPSACLPITIDVGTNNEDLLKDEFYIGLRQKRATGQEYSDLLDEFMAAIKQNYGQKVLVQFEDFANYNAFTLLEKYRANNLVFNDDIQGTAAVVLAGLIAAQKFVSGTLADHTFLFFGAGEAGTGIAELVALEISNQSKVPVEDARKKIWLLDSKGLIVSSRKDSLQPFKKRYAHEHEPVKDLLDAVKVIKPTALIGSAGVGQSFTKEVIEAMSSINERPIILALSNPTSQSECTAEQAYSWSKGRAIFGSGSPFDPVKYNDKLFVPAQANNAYIFPGFGLGVVISGAIRVKDEMILAAAEGLADQVTPEHVDKGLIYPPFSCIRKISANIAARVAAKAYDLGLASHLPRPKDLVKYAESCMYSPIYRSYR

SEQ ID NO: 77834 - DNA, 1839 bp, Bombyx mori; identical to SEQ ID NO: 5563
  CDS (1)..(1839)

SEQ ID NO: 77835 - protein, 612 aa, Bombyx mori; identical to SEQ ID NO: 5564

SEQ ID NO: 77836 - DNA, 1941 bp, Arabidopsis thaliana; identical to SEQ ID NO: 5569
  CDS (1)..(1941)

SEQ ID NO: 77837 - protein, 646 aa, Arabidopsis thaliana; identical to SEQ ID NO: 5570

SEQ ID NO: 77838 - DNA, 1824 bp, Arabidopsis thaliana
  CDS (1)..(1824)
atgatgtggaagaacattgctgggttgtcgaaggcagcggcagcggcaagaacacacggatctcggcggtgcttttccacagcgattcctggtccttgcatcgtccacaagcgtggtgctgatattcttcacgatccatggttcaataaggacacaggttttcctttgactgagagagatagattagggatacgaggcttgcttcctcctcgtgttatgacctgtgtacagcaatgtgatcgtttcattgagtcgtttcgttcgctagagaacaacacaaaaggagagcctgaaaacgttgttgcattagctaaatggaggatgttgaatagattgcatgaccgtaatgagactttgtactaccgagttcttattgataacatcaaagattttgcccccattatatacactcctacggttggacttgtttgtcagaactattctggtttgtatagaagaccaagaggaatgtacttcagcgccaaagacaaaggagagatgatgtctatgatttataactggcctgctccgcaggtagatatgattgtcatcactgatggtagccgtattttgggcttaggagaccttggagtacagggaattgggattcctattggaaagctcgacatgtatgtcgctgctgcaggaatcaatccacagagagttttgccaattatgttggatgtaggcacaaataatgaaaagctcctacagaatgatctctatttaggagtcagacaacctaggttggaaggagaggagtaccttgagattattgatgaatttatggaagctgcatttacacgttggccaaaggccgtcgtacagttcgaagatttccaagcgaaatgggctttcggaacattggaaagatatcggaagaaattttgcatgttcaatgatgatgtccagggaactgctggtgttgcactggctggactattgggaactgtaagagctcaaggtcggccgatatccgactttgtgaaccaaaagattgttgtggtgggagctggaagtgctgggcttggtgtaactaagatggcagtacaggcagttgccagaatggcaggtatcagcgagagtgaagcaacaaaaaacttttacctgatagataaagatggtcttgtcaccacggagaggacaaaacttgacccaggagctgtactttttgccaaaaatccagctgagatacgcgagggagcaagtatcgttgaagtggtgaagaaagtgaggccacatgttcttcttggtttatctggagttggtggtatctttaatgaagaagttctcaaggcgatgcgagaatctgactcatgcaagcctgccatttttgccatgtcgaatcccactttgaatgccgagtgcactgctgctgatgctttcaaacacgccggaggaaacattgtctttgcaagtggaagtccatttgagaacgttgaacttgagaatggtaaagtaggacatgtgaatcaggctaacaacatgtatttattcccggggatcgggctagggactcttctctctggtgcacgtatcgtaactgatggaatgctacaagcagcttctgaatgccttgcgtcctacatgaccgatgaagaagtccaaaaaggcatcctttacccttcaatcaacaacatccgacacataacagctgaagtcggggcagctgttctacgagctgcggtgactgatgacattgcagaaggacatggtgatgttggtcccaaagatctcagccacatgtctaaggaggatacagtgaattacattacacgcaacatgtggttccctgtttacagccctctcgttcacgagaaatag

SEQ ID NO: 77839 - protein, 607 aa, Arabidopsis thaliana
MMWKNIAGLSKAAAAARTHGSRRCFSTAIPGPCIVHKRGADILHDPWFNKDTGFPLTERDRLGIRGLLPPRVMTCVQQCDRFIESFRSLENNTKGEPENVVALAKWRMLNRLHDRNETLYYRVLIDNIKDFAPIIYTPTVGLVCQNYSGLYRRPRGMYFSAKDKGEMMSMIYNWPAPQVDMIVITDGSRILGLGDLGVQGIGIPIGKLDMYVAAAGINPQRVLPIMLDVGTNNEKLLQNDLYLGVRQPRLEGEEYLEIIDEFMEAAFTRWPKAVVQFEDFQAKWAFGTLERYRKKFCMFNDDVQGTAGVALAGLLGTVRAQGRPISDFVNQKIVVVGAGSAGLGVTKMAVQAVARMAGISESEATKNFYLIDKDGLVTTERTKLDPGAVLFAKNPAEIREGASIVEVVKKVRPHVLLGLSGVGGIFNEEVLKAMRESDSCKPAIFAMSNPTLNAECTAADAFKHAGGNIVFASGSPFENVELENGKVGHVNQANNMYLFPGIGLGTLLSGARIVTDGMLQAASECLASYMTDEEVQKGILYPSINNIRHITAEVGAAVLRAAVTDDIAEGHGDVGPKDLSHMSKEDTVNYITRNMWFPVYSPLVHEK

SEQ ID NO: 77840 - DNA, 1743 bp, Deinococcus radiodurans R1
  CDS (1)..(1743): transl_table=11
ttgcccccaggagaagaccccatgagccacaagaccctgcccctgaccgaccactacgacgtgaagcgcggcgaagacggccaccgctacctgcgcccgctggtgcgcggcttcaacctcacccgcattccgctgctcaacaagggcaccgccttcaccgccgaggagcgcgaagcccacggtctcgacggcctgctcgcgccgcaggtggacagtctggaagtgctcatcgagcgcgcctaccgcgagttctccaagcgcggcgcggcgctggaaaaacacgtctacctgcgcaacctgcaagaccgcaacgaggtgctgttctacgcgttgctctcccatcacgtcgaggaaatgctgcccatcgtctatacccccacggtgggcgacgcggtcaagaagttcagccagatctaccgctacccgcgcggcctgacgctcagcacccgcaccatcgagcgtgccgagcaggccctcgccaacgtgccgctcaacgacgtgcggattatcgtggcgaccgattcgagcgcgattctgggcatcggcgaccagggcttcggcggcatggcgatcagcatcggcaagctcagcctctacaccgtggcgggcggcgtggggccggacaagacgctgcccgtcgaactcgacgtgggcacgggccgcgccgacctgcgcgaagacccccactacctcggtgtcaagcacgagcggctgaccggcgaggaatatttcgcctttatcgacaagtttgtcgaggcgaccattcagcgctaccccaaggcgattattcagtgggaagacttttccaaggacgcggccttcgaggtgctcgcccgctaccgcaaggtcgtcccgagcttcaacgatgacattcaggggacaggtgcggtggtgctcgccggggtgctcaacgcctgccgcatcaagggcgaggcgctcaaagaccaagtggtcgtcgtccacggcgctggggcgggcggggccggggtcgccgccgctatccgcgaggggatgcaccgcgaagggctgtcccccgacgagattgcccgccgcgtcttcgtcctcgactcgcgcgggctgctcaccgacgaccgctccatggaagcctacaagcaggcgctggcgacgccccgcgccctggtgagcggctggagcggcaccgacctgctgggcgtggtgcgcgaagccaaagcaaccgtgctgctcggtctctccggtgtccccggcaccttcgacgaggacatcgtgaaggccgcgctcgccaacacgccgcgcccgttggtctttccgctgtccaaccccaccgcgcactccgaggcgctccccgaagacatcctgcgctggacggacggcgcggccatcgtcgccaccggcagccctttcgcgccggtcgagcacggcgggcagacgcacgaaatcgggcagggcaacaacgccttcatctttcctggcctcggctttggcgccattctggcccgcgtgcgcgagatcaccgacgagatggtcaccgaggccgcctacgcgctcgccgactacactcaggcgcaccatccgggccgcacctacccgccggtcaacgaactgtcgcaggcgagcgtgcaggtggcggtggcggtcatcaagcaggccatcaaggacggcgtcgccaccgaattcagcgtgcggcgtctgagcgacggcgaactgcgggccttcgtggagcgcaagttttgggaacccaagtttttgccctaccactcgtga

SEQ ID NO: 77841 - protein, 580 aa, Deinococcus radiodurans R1
MPPGEDPMSHKTLPLTDHYDVKRGEDGHRYLRPLVRGFNLTRIPLLNKGTAFTAEEREAHGLDGLLAPQVDSLEVLIERAYREFSKRGAALEKHVYLRNLQDRNEVLFYALLSHHVEEMLPIVYTPTVGDAVKKFSQIYRYPRGLTLSTRTIERAEQALANVPLNDVRIIVATDSSAILGIGDQGFGGMAISIGKLSLYTVAGGVGPDKTLPVELDVGTGRADLREDPHYLGVKHERLTGEEYFAFIDKFVEATIQRYPKAIIQWEDFSKDAAFEVLARYRKVVPSFNDDIQGTGAVVLAGVLNACRIKGEALKDQVVVVHGAGAGGAGVAAAIREGMHREGLSPDEIARRVFVLDSRGLLTDDRSMEAYKQALATPRALVSGWSGTDLLGVVREAKATVLLGLSGVPGTFDEDIVKAALANTPRPLVFPLSNPTAHSEALPEDILRWTDGAAIVATGSPFAPVEHGGQTHEIGQGNNAFIFPGLGFGAILARVREITDEMVTEAAYALADYTQAHHPGRTYPPVNELSQASVQVAVAVIKQAIKDGVATEFSVRRLSDGELRAFVERKFWEPKFLPYHS

SEQ ID NO: 77842 - DNA, 1737 bp, Deinococcus radiodurans R1
  CDS (1)..(1737): transl_table=11
atgcccaagtcgccccccgtgtcccgctactacgatgtcaaacgcgacgagcagggccagcgttacatcgaggtcaaagtcaccggcctcgccctgctgcaaaacccgctgctgaacaagaccaccggctttacccccgaggagcgccgtgaactgggactcgaagggctgattccgccgcacatcagctcgttcgaggagcagaagcaccgcacctacctgcgctacctcgaagcgccgaccgaccttgcccggcacgagtacctgcgggcgctgcaagaccgcaacgaggtgctgtattacgcgattctggaagaccacctcgaagaaatgctgccgatcatctataccccaacggtgggcgaggcggtcaagctgtactccaacaattaccgctacccgcgcggctttacggtcagcaccaacgacatcgagcgggtcgaggaaatgctcgacaacgtgacggtgaacgacgtgcggatgatcgtcgccaccgattcgagcgcgattctcgggattggcgaccaggggttcggcggcatggccatcagcatcggcaagctctcgctgtacacggcggcgggcggcgtggggccggacaagacgctgccggtcgaactcgacgtgggcaccaaccggcaggacctgatcgacgaccctctctatctcggcgtgcatcaccgccgctggcaggggcagcagtacgacgagttcgtggacgccttcgtggaggcggtctcggcccgttatcccaaggcgattattcagtgggaggatttctcgcgcggaacggctttccgggtgctggagcgctaccgcaaagtggtgccgagcttcaacgacgacattcagggcaccggggcgatggcgctcgctgggctgctgcgggcgagccgcatgaaaggcgaattcctgaccgagcaggtgttcgtggtggtcggcgcgggcgcagcgggcatcggcgtggcaagcgccattcggcaagggctggaagccgagggactagcgccggaagaagcggggcggcgggtgtacgtggtggaccgctacggcctgctgatggaagggcagcccgacctggagccgcagcagatgcccttcgtgcgccgccggggagacctggagggctggacgttcgggggcgagtaccccacgctgcacgaggtgcttgttcatgcccgcgccaccgccctcctgggctttaccggggtgccgggcctgttccggcaggaagacatcgaagcgatgctggcgcacacgccccggcccatcgtctttccgctgtccaacccgtcgagccatgtcgaggcgcgccccagcgatatcgtggcgtggacgcgcggcggcgctatcgtggcgaccggcagcccctttcccgacgtgccctacgacaacgagcggattccggtggggcagggcaacaacgcttttatcttccccggtctggggttcggggcggtggtcagccgcgcccgcgaaatcaccgacaatatggtgatggccgctgccctgacgctggcggaatacaccacgcagcaccacccccacctcgtgtacccgccgatcagcgagctgcgggaactgagcattcacgttgccgtgcgggtggcggagcaagcgattcaggacggggtgtgcgccgagcggcgggtccgcaacatggaccgtgaacagctcgcagcgctcatccgcgagcgggcgtggctgccccggcccctgcctctgcggcgggaatag

SEQ ID NO: 77843 - protein, 578 aa, Deinococcus radiodurans R1
MPKSPPVSRYYDVKRDEQGQRYIEVKVTGLALLQNPLLNKTTGFTPEERRELGLEGLIPPHISSFEEQKHRTYLRYLEAPTDLARHEYLRALQDRNEVLYYAILEDHLEEMLPIIYTPTVGEAVKLYSNNYRYPRGFTVSTNDIERVEEMLDNVTVNDVRMIVATDSSAILGIGDQGFGGMAISIGKLSLYTAAGGVGPDKTLPVELDVGTNRQDLIDDPLYLGVHHRRWQGQQYDEFVDAFVEAVSARYPKAIIQWEDFSRGTAFRVLERYRKVVPSFNDDIQGTGAMALAGLLRASRMKGEFLTEQVFVVVGAGAAGIGVASAIRQGLEAEGLAPEEAGRRVYVVDRYGLLMEGQPDLEPQQMPFVRRRGDLEGWTFGGEYPTLHEVLVHARATALLGFTGVPGLFRQEDIEAMLAHTPRPIVFPLSNPSSHVEARPSDIVAWTRGGAIVATGSPFPDVPYDNERIPVGQGNNAFIFPGLGFGAVVSRAREITDNMVMAAALTLAEYTTQHHPHLVYPPISELRELSIHVAVRVAEQAIQDGVCAERRVRNMDREQLAALIRERAWLPRPLPLRRE

SEQ ID NO: 77844 - DNA, 1632 bp, Clostridium acetobutylicum ATCC 824
  CDS (1)..(1632): transl_table=11
atgaataatttaaaaggtttagaattactaagaaatcccttcctcaataaaggtactgcttttactcttgaagaaaggaaaaaatacgatttaaccggtcttcttccttgtgctgtaatgactcttgaagagcaagaaaaggtggtttatgaaaagcttaaatcaattgatgatgctttagataagcatttttatttaatgaacatatacgatacaaatagaattcttttctattatgtggtaaaaaaacatatcgttgaacttcttcctatagtttatacccctactattggagatgccgtaattaattactctaagaattacgatactcctaaggatgctgtcttcttatctataaaccatcccgaaaatataaaaaaatctatagaagctgtttccaatgatttagacgatattaagcttattgttgttactgatggtgaaggtgttcttggcataggtgattggggtgttcaaggtgtggatatttccattggtaaacttgctgtatacactgtggctgccggtcttaaccctagaaatgtccttcctattgttattgatgcaggtactaataatgaagctcttctcaatgatcctttttatgttggcaataaacacaaaagagttactggtgaaaagtactactccttcattgatgaattcgtaaaaacctgcacctcacttttccctgatgttcttcttcactgggaagactttggacgcggcaatgcaagcactatacttgaaaaatacagaaataacatatgcacctttaatgatgatattcagggtacaggcgttatgatggtagctgctctaaactctgtagcaaaagtaactaatactcctattaaaaatcacaaaatacttgtatttggcggtggtactgctggtattggtgtatctgatcaaatacttttagaaaaaattagaagcggtcttactcttgatgaggctttaaaagatttttatattgtagatcgtcagggccttatcactgaggatatgcaggatttaactgaaggacagaaaaaatattctagaaaaaaaggtgaatttaaaaaacctctaaaagaccttgcagagatagttgctgaagttaaacctactgtactaattggaacctccggagttcacggtgcctttactgaagctgttgttaaaaacatggcaaaatccactgaaagaccagctataatgccaatttctaatccaacaaagcttgctgaagcaaaagctgaggatataataaaatggtccgatggaaatgctcttgtggttactggaagtccttcttctcctgtagaatacaagggtgtaacctatacaataggtcaggctaacaatgcccttctttatcctggtttaggtcttggaatagttgtttctaagtctaagactgtttctgatggaatgcttgctgctgctgctcacggtgtttcttctttaatagacctttccgtaaaaggtgcacctatgcttcctgtaatatcaaagcttagagaagcctcaaagcttgtagctactgctgtggttaaagaagccgttaaagaaaatttaaatcgtgcacctatagttgatgctgaaaatgctgttgaaaatgaaatttgggaaccatactatagataa

SEQ ID NO: 77845 - protein, 543 aa, Clostridium acetobutylicum ATCC 824
MNNLKGLELLRNPFLNKGTAFTLEERKKYDLTGLLPCAVMTLEEQEKVVYEKLKSIDDALDKHFYLMNIYDTNRILFYYVVKKHIVELLPIVYTPTIGDAVINYSKNYDTPKDAVFLSINHPENIKKSIEAVSNDLDDIKLIVVTDGEGVLGIGDWGVQGVDISIGKLAVYTVAAGLNPRNVLPIVIDAGTNNEALLNDPFYVGNKHKRVTGEKYYSFIDEFVKTCTSLFPDVLLHWEDFGRGNASTILEKYRNNICTFNDDIQGTGVMMVAALNSVAKVTNTPIKNHKILVFGGGTAGIGVSDQILLEKIRSGLTLDEALKDFYIVDRQGLITEDMQDLTEGQKKYSRKKGEFKKPLKDLAEIVAEVKPTVLIGTSGVHGAFTEAVVKNMAKSTERPAIMPISNPTKLAEAKAEDIIKWSDGNALVVTGSPSSPVEYKGVTYTIGQANNALLYPGLGLGIVVSKSKTVSDGMLAAAAHGVSSLIDLSVKGAPMLPVISKLREASKLVATAVVKEAVKENLNRAPIVDAENAVENEIWEPYYR

SEQ ID NO: 77846 - DNA, 1644 bp, Listeria monocytogenes EGD-e
  CDS (1)..(1644): transl_table=11
atgactttaaaatcaggttttgactatatgaataatccattattaaataaaggaaccgctttttcaaaagaagaaagagcaagctatcaattggacggattactgccaccaattatcgaaacaattgaacaacaagccgtgcgcatcgagacgcaaatagaaaatttagaaacacctttacataaacatcggcttttaacaaacttatataatgaaaatcgcaccctttactattatgtcgtaacaaaaaacgtgactgactatttgccaattatttatacaccaactatcggcgacgctgttatccagtaccataaagattacactgcaccggatgaagcattatttgttgatgcctttgcacccgaaaaattaagcgcatcaataaaaaactacgcaaaaaataatccgaatattgatatgattgtcataacagatggtgaaggcgtgcttggaattggcgactggagtgtgaatggtgtcaaaatcgctgttggaaaattagcggtttatacggttgcagctggacttgcaccagatcgtgttcttcctgtcgttattgacgccgggacgaacaacgaaacacttcttaacgatccactgtatctaggaaataaacgcccccgcctttcagaaagtgaatatgacgcttttattgcttcttttgttaatgttatgaaagaagtttttccgaaagccatccttcactgggaagactttggacgcgcgaatgcaagtcgtattctgcataattaccgcgataaaatttgtacatttaacgatgatattcaaggtactggagccatggtggttgccgctgttcttgcgacgattcaagtttcacgcattccattaagtgaacaaaagattattatttttggggccggaactgctggaatcggtattgctgatcaacttagtgcgcaattgatgcgtgaaaccggtctcccttttgaaaaagccaaaaagcacttttatttagtcgatcgaaaaggtttagtgcttgataatatgacagacttaactaccgggcaaaagaaatatgcgcatccatcggctgaatggtctaacgtgcctacagatacattagaaaacttagtggaagccgttcatccaacgatgttaatcggctgttctggtgtcaccggtgcctttaaagagagtatcgtcaaaaaaatgacccagtatacagaacgaccagcgattttgccactttctaatccaacaaaattagccgaagcaactgcttctgatttaatccagtggacagacggaaaagcacttatcgtcactggtagcccttccaaaccagtcgaatatcaaaataccacttatgaaatcggtcaagcgaacaatgcacttctttaccctggactaggacttggtgctcttgtcactcgtgcaaaatatattacagatgatatgctcgctgctgcttcgatggctgtcgctgagcagatttcgccaaacaaagcaggcgcagctcttttaccacatgtgcgcacccttcgagaaacatcgcgcgcagtagccattgctgtcgctaaccaagctataaaagaaaacatccatcaagtcgaattaacgaatgtcatcgaagctatcgagcttgagatgtggcaacctatttataaaggagtttag

SEQ ID NO: 77847 - protein, 547 aa, Listeria monocytogenes EGD-e
MTLKSGFDYMNNPLLNKGTAFSKEERASYQLDGLLPPIIETIEQQAVRIETQIENLETPLHKHRLLTNLYNENRTLYYYVVTKNVTDYLPIIYTPTIGDAVIQYHKDYTAPDEALFVDAFAPEKLSASIKNYAKNNPNIDMIVITDGEGVLGIGDWSVNGVKIAVGKLAVYTVAAGLAPDRVLPVVIDAGTNNETLLNDPLYLGNKRPRLSESEYDAFIASFVNVMKEVFPKAILHWEDFGRANASRILHNYRDKICTFNDDIQGTGAMVVAAVLATIQVSRIPLSEQKIIIFGAGTAGIGIADQLSAQLMRETGLPFEKAKKHFYLVDRKGLVLDNMTDLTTGQKKYAHPSAEWSNVPTDTLENLVEAVHPTMLIGCSGVTGAFKESIVKKMTQYTERPAILPLSNPTKLAEATASDLIQWTDGKALIVTGSPSKPVEYQNTTYEIGQANNALLYPGLGLGALVTRAKYITDDMLAAASMAVAEQISPNKAGAALLPHVRTLRETSRAVAIAVANQAIKENIHQVELTNVIEAIELEMWQPIYKGV

SEQ ID NO: 77848 - DNA, 1644 bp, Listeria innocua Clip11262
  CDS (1)..(1644): transl_table=11
atgactttaaaatcaggttttgactatatgaataacccactattaaataaaggaacagcttttacaagtgaggaaagattaaactataaattagacggattactgccgccaattatcgaaacaatcgaacaacaagctttgcgcatcgaaaaccaactagaaaacttagaatcccctctacataaacaccaatttttaacaaacttatataacgaaaatcgcacactttattattacgttgttaccaaaaacgtgagcgaatatttgccaattatttatacgccaacgattggggatgcggtaatacattatcatacagactataccgcgcctgatgaagctttatttattgatgcttttacacccgaaaaactaagagcatctgttgaaaattatgcgcaaaacaatccaaatattgatatgatcgtgattacagatggtgaaggcgtgctcggcattggtgattggggcgtgaacggcgtcaaaatagcagtcggaaaattagcagtttatacggttgcggctggcctttctcctgaccgtgttctcccagttgtaattgatgcaggaacaaataataaaacactacttgaagactcgcgttacttagggaataaacgtccgcgcctgtcagaaagcgattacgatacttttatcgcacaatttgtggaagtcatgagtgatgttttcccaagcgctattcttcactgggaagattttggccgggcaaatgcaagtcgtatcctccacaattatcgtgataaaatttgtacgtttaatgatgatatacaaggaactggcgcgatggttgttgccgctgctcttgcaacaattaacgtttcaaatattcctttaaacaaacaaaagattattattttcggtgctggaactgctggcatcggtattgctgatcaactcagtggtcaattgatgcgcgaaactggtcttccttttgaaagtgcaaaaaaacatttttacttactggaccgtagtggtttagtgcttgataatatgaccgatttaacggatggtcaaaagaaatatgcgcatcaagcttctgactgggctagcgtgcctactgatacattagaacacttagttgaagcaattcatccaacaatgctaattggctgttctggcgttactggagcctttaaagagagcatcgtaaaaaaaatgacggagcatacagaacgaccagcaattttgccgctgtctaatccaaccaaattagctgaagcaactgccgcagacttgattaaatggacagatggaaaagcgctaatcgtaacaggaagtccatccaaacccgtgacttatcaaaatattacctatgaaattggtcaagctaataacgcccttctataccctgggcttggacttggcgcacttgttacacgttctaaatttattacagacggaatgctagccgctgcatcaagtgccgttagtgatcaaatttctacaaacgaacttggagctgccctcttaccacatgttcgtacacttagagaaacttcccgcgcggttgctattgcggtagcgaaccaagcaatcaaagaaaatatccaccaagtcgagttagcaagtgtcacaaaagctgtcgaacgtgagatgtggcaaccaacttataaaggagtttaa

SEQ ID NO: 77849 - protein, 547 aa, Listeria innocua Clip11262
MTLKSGFDYMNNPLLNKGTAFTSEERLNYKLDGLLPPIIETIEQQALRIENQLENLESPLHKHQFLTNLYNENRTLYYYVVTKNVSEYLPIIYTPTIGDAVIHYHTDYTAPDEALFIDAFTPEKLRASVENYAQNNPNIDMIVITDGEGVLGIGDWGVNGVKIAVGKLAVYTVAAGLSPDRVLPVVIDAGTNNKTLLEDSRYLGNKRPRLSESDYDTFIAQFVEVMSDVFPSAILHWEDFGRANASRILHNYRDKICTFNDDIQGTGAMVVAAALATINVSNIPLNKQKIIIFGAGTAGIGIADQLSGQLMRETGLPFESAKKHFYLLDRSGLVLDNMTDLTDGQKKYAHQASDWASVPTDTLEHLVEAIHPTMLIGCSGVTGAFKESIVKKMTEHTERPAILPLSNPTKLAEATAADLIKWTDGKALIVTGSPSKPVTYQNITYEIGQANNALLYPGLGLGALVTRSKFITDGMLAAASSAVSDQISTNELGAALLPHVRTLRETSRAVAIAVANQAIKENIHQVELASVTKAVEREMWQPTYKGV

SEQ ID NO: 77850 - DNA, 2292 bp, Drosophila melanogaster; identical to SEQ ID NO: 5601
  CDS (1)..(2292)

SEQ ID NO: 77851 - protein, 763 aa, Drosophila melanogaster; identical to SEQ ID NO: 5602

SEQ ID NO: 77852 - DNA, 1854 bp, Drosophila melanogaster; identical to SEQ ID NO: 5621
  CDS (1)..(1854)

SEQ ID NO: 77853 - protein, 617 aa, Drosophila melanogaster; identical to SEQ ID NO: 5622

SEQ ID NO: 77854 - DNA, 1623 bp, Streptococcus mutans UA159
  CDS (1)..(1623): transl_table=11
atgtatgcacatgacattttaaacgatccttttttgaataaagggactgcttttaccatggaagaacgtaagaaatttggacttattggtcttttgccccctcacattcagactcttaaagagcaagcagagcagacgtatgcgcaaatgcaaactaaagctaataacttggaaaaacgtcttttcttgatggagatttttaataccaaccggacacttttctactatctcttttctcaacatttggaagagttaaatccaattgtttacgatccaaccatcgcagatacgattgaaggttacagtgatctttttgtggatcctcaatatgcgggttatttggacattaaccatcctgaaaatattgaggctaccctcaaaaatgcggcaggtgaccgtgatattcgtttgattgttgtgaccgatgccgaaggtatccttggtatcggtgactgggggactaatggggtggacatctctgttgggaagctcatggtttacacaggggcagcagggattgatccagtaactgttttgccattggtgattgatgcaggtaccaaccgtgaggaattgcgcaataatcctaactatctggggaaccgtcatgaacgtgttcgtggtgagcgttactatgacttcgtggatcaatttgtccaaacagctgaacgtcttttccctaaactttaccttcactgggaagacttcggtcgttcaaatgcggccaatatcttggaaaaataccgtaaggaaattccaaccttcaacgatgatattcaagggactggcatcgtaacccttggtggtatctttgcggctatggatatcacaggtgaaaaattgactgatcaagtctatctctgttacggtggcggtacagcaggtgcgggtattgcctctcgtgtcttgcgtgaaatggtttcagaaggcctgcctgaagacgaagcctacaagcgtttcttcatggtggacaagcaaggtctcctctttgacgatatggacgacttgactcctgaacaaaagccatttgccaagaagcgggcggattttccaaatgcagatcagttgacagacctcttgcaagtggttaaaaccgtgaaaccaaccatcttggttggtacctcaacaaatccaggtgccttcacgaaagaagttgttgaagctatgtgtgaaaacactgaacgcccagtcatcttcccaatctctaatcctacaaaattggcagaagcatcggctcaagacttgattacctggtctgatggtaaggcttttgtggcaaccggtattccagctgatactgtatcgtacaagggtgtggactatgtcatcggtcaagctaacaatgccctcatctaccctggccttgggcttgggatgttggcatcagaagctagccttttgacagatgaaatgatcggagcggcagcacactctctcagtggtatcatcgatatcaccaaaccaggtgcgccagttcttcctccattcaaatatgtgggtgatgtgtctatcaaggtcgctgaagccgtggctaagaaggctcaagaacaaggtcttgcacgtgctgaagaaaccgatatggctaaagctgttcgtgactttaagtggtacccagagtattaa

SEQ ID NO: 77855 - protein, 540 aa, Streptococcus mutans UA159
MYAHDILNDPFLNKGTAFTMEERKKFGLIGLLPPHIQTLKEQAEQTYAQMQTKANNLEKRLFLMEIFNTNRTLFYYLFSQHLEELNPIVYDPTIADTIEGYSDLFVDPQYAGYLDINHPENIEATLKNAAGDRDIRLIVVTDAEGILGIGDWGTNGVDISVGKLMVYTGAAGIDPVTVLPLVIDAGTNREELRNNPNYLGNRHERVRGERYYDFVDQFVQTAERLFPKLYLHWEDFGRSNAANILEKYRKEIPTFNDDIQGTGIVTLGGIFAAMDITGEKLTDQVYLCYGGGTAGAGIASRVLREMVSEGLPEDEAYKRFFMVDKQGLLFDDMDDLTPEQKPFAKKRADFPNADQLTDLLQVVKTVKPTILVGTSTNPGAFTKEVVEAMCENTERPVIFPISNPTKLAEASAQDLITWSDGKAFVATGIPADTVSYKGVDYVIGQANNALIYPGLGLGMLASEASLLTDEMIGAAAHSLSGIIDITKPGAPVLPPFKYVGDVSIKVAEAVAKKAQEQGLARAEETDMAKAVRDFKWYPEY

SEQ ID NO: 77856 - DNA, 2280 bp, Drosophila melanogaster; identical to SEQ ID NO: 5631
  CDS (1)..(2280)

SEQ ID NO: 77857 - protein, 759 aa, Drosophila melanogaster; identical to SEQ ID NO: 5632

SEQ ID NO: 77858 - DNA, 1596 bp, Bradyrhizobium japonicum USDA 110
  CDS (1)..(1596): transl_table=11
atgacgctgctgcgcgatcccttgctcaacaagggcaccgccttcactgaggcggagcgcgccgcgctcggcctgcgcggcctcttgccgccctgcgtgctgacgatggagacgcaggtcgatcgtgtgctcaccaatctgcgtatgctgccgactgatctcgaaaaatatgtcgcgctgaatgcgctgcatgaccgcaacgaggcgctgttcttccgcgtcgtcgtagacaatatcgacgagatccagccgatcatctacacgccgaccgtcgggctcgcctgccagaagtacggcctgatcttccagcggccgcgcggcatgttcatctcctcgcgcgatcgcggccagatcgcggagatcctgaagaactggccctatccggccaggctgatcgtggtcaccgatggcgagcgcatcctgggcctcggcgatctcggcgccaacggcatgggtattccggtcggaaagctctcgctctattcggcctgcgccggcgtgcatcccgagcattgcctgccgatcgtgctcgacgtcggcaccaacaatgaagagctgttgaacgatccctattatctcggcctgcgcgagcggcggctcaccggcgaggcctatgacagcttcgtcgacgagttcatggtcgccgcgcgaaagacgttcccgggtgtgctgatccagttcgaggattttgccaatcactcggcgttcaagctgctgcacaaatatcgcgatgaagcctgcgtcttcaacgacgacatccagggcaccgcggcggtggcgcttgccggcctgttctcaggcttgcgcatctccggcggcaagctgaaagatcagaagatcctgttcctcggtgcgggcgaggcggcgaccggcatcgccgatctcgtggtctccgccatgatggccgagggcgccactgaggccgaggcgctccgccgcaactggctggtggattcccgcggcctcgtcgtcagcggccgggatggtctgtccggccacaagctccgctacgcgcatgccggccaggcgccgatctccgacttcctcaccgcgatcaagacgctgaagccgacggcgatcatcggcgtcgccgcggtcggcggcgccttcacgcccgacgtgctcaaggcgatggccgggctcaacgagcatccgatcgtgttcgcgctgtccaacccgacctcgaaggcggaatgctcggcggaggatgcctatcgctacaccgagggccgcgcgctgttcgcttgcggcagcccctacgaccccgtgaagctcaatggccgcaccttcgtgccgcgccagggcaataactcctacatcttccccggcgtcggcctcggcgtcatcgccacccgctcgcgtctcgtcaccgacgagatgttcatggccgccgcccattcgctcgccgattgcgtcggtaaggaagacctcgcgcagggcagcctctatccggcactcccccgcatccgcgaagtctcggcccgcattgccgccgcagtggcagacgttgcctatcagcgcgggctcgccgacggccccgcgcccaacgacgtaaaggctctggtccagtcgcagatgtacgagccgaaatactga

SEQ ID NO: 77859 - protein, 531 aa, Bradyrhizobium japonicum USDA 110
MTLLRDPLLNKGTAFTEAERAALGLRGLLPPCVLTMETQVDRVLTNLRMLPTDLEKYVALNALHDRNEALFFRVVVDNIDEIQPIIYTPTVGLACQKYGLIFQRPRGMFISSRDRGQIAEILKNWPYPARLIVVTDGERILGLGDLGANGMGIPVGKLSLYSACAGVHPEHCLPIVLDVGTNNEELLNDPYYLGLRERRLTGEAYDSFVDEFMVAARKTFPGVLIQFEDFANHSAFKLLHKYRDEACVFNDDIQGTAAVALAGLFSGLRISGGKLKDQKILFLGAGEAATGIADLVVSAMMAEGATEAEALRRNWLVDSRGLVVSGRDGLSGHKLRYAHAGQAPISDFLTAIKTLKPTAIIGVAAVGGAFTPDVLKAMAGLNEHPIVFALSNPTSKAECSAEDAYRYTEGRALFACGSPYDPVKLNGRTFVPRQGNNSYIFPGVGLGVIATRSRLVTDEMFMAAAHSLADCVGKEDLAQGSLYPALPRIREVSARIAAAVADVAYQRGLADGPAPNDVKALVQSQMYEPKY

SEQ ID NO: 77860 - DNA, 1644 bp, Lactobacillus plantarum WCFS1
  CDS (1)..(1644): transl_table=11
atgacaaaaactgcaagtgaaattttaaataacccattcttaaataaaggcactgcctttaccaaagaggaacgtcaagcacttggcttgacggggacgttaccaagcaaggttcaaacaattgatgaacaggcgacgcaagcttatgcccaattcaagagcaagcctagtcgtttggaacaacggattttcttaatgaatctctttaacgaaaaccggacactattcttccatttgatggatgaacacgtggttgaatttatgccaatcgtttatgatcccgtcgttgccgattccattgaacaatataatgaattgttcttggacccacaaaatgcggcctttgtttccgtagatgcacctgaagatattgaagcaactttgaagaatgcagcggacggccgtgatattcggttagtcgttgttacggatgctgaaggtattcttggtatgggtgactggggtgttaacggtgttgatattgccattggtaaattaatggtttacaccgccgctgccggcattgacccatcacaagtactgccagttagcatcgatgctggaacaaacaaccaaaaattattagatgatccattgtatcttggtaaccggcacaagtgtgtttccggcgaacaatactatgatgtgatcgacaagttcgttgctgctgaacaacaattattcccagattcattgttacactttgaagatttcggtcgcgacaatgcgcaagtaatcttggacaagtacaaggatcaaatcgcaacctttaacgatgatatccaaggaaccgggatggttgttttagctggtatcttaggtgcattgaacatttcaaaggaaagcatcaaggaccaaaaaatcttatcatttggtgccggaacggccggtatgggaattgccaaccaaatcttggatgaattgatgcaagctggtttaacagaagaagaagctaagcaacacttctacgctgttgataagcaaggtttactatttgacgacacggaaggtttaaccccagcccaaaaagccttcacgcgcaaacggagtgaatttagcaacgctgacgaattaaccaacttggaagccgttgttaaagccgttcacccaaccgttatgattgggacatcgactcagcctggtacctttactgaaagcatcatcaaggaaatggcggcgcacacggaacggccaatcatcttcccactttctaacccaaccaagttagcagaagctaaagcggaagatttaatcaaatggacggatggccgggccttagttgcgactgggattccagctgatgatgttgaatacaaaggtgtcacttaccaaatcggtcaaggaaacaacgccttgatgtaccctggtttaggatttggtttgattgcttcaacagccaaggtgctgaacgctgagaccttgtcagcagcctgccacgcattaggtggaatcgttgatacgtcgaagccgggtgccgcagtattgccaccagttgcgaaaattactgaattttcacaaaaattagctgaagtcgtggcacaaagtgttatcgatcagaagctcaacaaagaaccaattgcagatgctaaacaagcggttgctgatatgaagtgggtcccagaataccgggccatcagcaaatag

SEQ ID NO: 77861 - protein, 547 aa, Lactobacillus plantarum WCFS1
MTKTASEILNNPFLNKGTAFTKEERQALGLTGTLPSKVQTIDEQATQAYAQFKSKPSRLEQRIFLMNLFNENRTLFFHLMDEHVVEFMPIVYDPVVADSIEQYNELFLDPQNAAFVSVDAPEDIEATLKNAADGRDIRLVVVTDAEGILGMGDWGVNGVDIAIGKLMVYTAAAGIDPSQVLPVSIDAGTNNQKLLDDPLYLGNRHKCVSGEQYYDVIDKFVAAEQQLFPDSLLHFEDFGRDNAQVILDKYKDQIATFNDDIQGTGMVVLAGILGALNISKESIKDQKILSFGAGTAGMGIANQILDELMQAGLTEEEAKQHFYAVDKQGLLFDDTEGLTPAQKAFTRKRSEFSNADELTNLEAVVKAVHPTVMIGTSTQPGTFTESIIKEMAAHTERPIIFPLSNPTKLAEAKAEDLIKWTDGRALVATGIPADDVEYKGVTYQIGQGNNALMYPGLGFGLIASTAKVLNAETLSAACHALGGIVDTSKPGAAVLPPVAKITEFSQKLAEVVAQSVIDQKLNKEPIADAKQAVADMKWVPEYRAISK

SEQ ID NO: 77862 - DNA, 1698 bp, Coxiella burnetii RSA 493
  CDS (1)..(1698): transl_table=11
atgctagacattaccttcaaaaccgacaaaaacaacaaaccctatcttgaaaccggcatcactggtaaagccttattaactatccctcagttaaataaaggaacggcgttcaccgaagaagaacgtgatacttttggattaagagggaaactaccgaacagagtggaaacgctagacgatcaagtcgctcgcgcctacttacaatataaatcatttgatatgcagcttaatcgcaatttctatctcaatcatcttttggataccaatcaggtcttgtttcatcggttagtgaaaaatcacgtccaagaaatgcttcccaccatttacacgcctattgttggcaacgctgttcgcgctttcaataaaagattcatgcatcctcgcggtctttatatttcttacgaagaccgaaaccaaattaaaaaaattcttaataaccgctctcaccccatcatcgaccttatcgtcgtcagcgatggtgaaggcgtactaggcattggcgatcagggggtcggtgcaatggcgattcctgtggcgaaactcatggtttataccgccatcggtggcattaatcccattcggactttgcccatcttgctagatgcaggcaccaataatgaagaattattaaacgaccctctttacttaggctggcgtcatccgcgtttatccggcaatgaatatgcggaatttatcgaaaaattcattgaagccgtgcaagctacgtttccgcaggtttttttacattgggaagacttcggacgcacgaacgcttatcgtaatttaattaagtaccgcgaaatcacttgcagttttaacgatgatattcagggtaccggctgcgtggctctcgccgctatcttggccgcattaaaaatcacccgctcaaccctaccagaacagcgtatcgccgtttttggtgctggcacagcaggcatgggaataaccgatacgctatttcgcgctttatctcaaaacggcttatcagaaaaagaagccagaaacccattttggttaatcgatcgaaacggcttattaacggagtatagcgaagaagtaacttcggctcagcagccgtaccttcgtaaaaaagaagaaatagcttcttggaaaatcaaaaatccacagcaaatttccttgcttgaagtcatcgaaaatgtaaaacccactattttaattggtgcatccgctcaaagccatgcctttgatcaaaccattgtaaaagcgatggcaaaacacgttgaaaaacctattattttccctttatccaaccctactgatcgcagcgaagccgaaccggctgacttgcatcgatggagccatggtaaagctttaattgcgactggcagcccttttgaggatattattttcgacaatcaaatatttcccgtgaatcaatgcaataattatttagcttttcccggcatcgggcttggcgctatcgcggttaaagccaatcgcgttagtgacaatatgctgtggagcgctagtcaagccctcagtcgatacgcaaacgaatccacacaccgcttactgcccagcatcgcccaagcccaagaagcctcccgccaagtagccattgctgttgcaaaaaccgctattgaagaaggcctcgctaaattctctctcgatcaagtagaaacactggtcgatcaacaaatctgggaacctcattatttatcttaccgaaaaagataa

SEQ ID NO: 77863 - protein, 565 aa, Coxiella burnetii RSA 493
MLDITFKTDKNNKPYLETGITGKALLTIPQLNKGTAFTEEERDTFGLRGKLPNRVETLDDQVARAYLQYKSFDMQLNRNFYLNHLLDTNQVLFHRLVKNHVQEMLPTIYTPIVGNAVRAFNKRFMHPRGLYISYEDRNQIKKILNNRSHPIIDLIVVSDGEGVLGIGDQGVGAMAIPVAKLMVYTAIGGINPIRTLPILLDAGTNNEELLNDPLYLGWRHPRLSGNEYAEFIEKFIEAVQATFPQVFLHWEDFGRTNAYRNLIKYREITCSFNDDIQGTGCVALAAILAALKITRSTLPEQRIAVFGAGTAGMGITDTLFRALSQNGLSEKEARNPFWLIDRNGLLTEYSEEVTSAQQPYLRKKEEIASWKIKNPQQISLLEVIENVKPTILIGASAQSHAFDQTIVKAMAKHVEKPIIFPLSNPTDRSEAEPADLHRWSHGKALIATGSPFEDIIFDNQIFPVNQCNNYLAFPGIGLGAIAVKANRVSDNMLWSASQALSRYANESTHRLLPSIAQAQEASRQVAIAVAKTAIEEGLAKFSLDQVETLVDQQIWEPHYLSYRKR

SEQ ID NO: 77864 - DNA, 1764 bp, Streptomyces avermitilis MA-4680
  CDS (1)..(1764): transl_table=11
atgcatccgtgttctcccaggctggtcggtgtccccgcccccgaccgttttggagtactcatgggcacgcagtggaacgccgtggacggtcgcatccggacgaccgcccgcggacacgccgtgctgaacagtccgcggctgaaccggggcaccgccttcacccggcaggagcggcaggaactgggcctggtgggtctggtgccgccgcaggtgctgacgcaggaccagcaggccgcccgcgcctacacgcagttccgttcccagcccaacgacctcgccaagaacgtgtatctgacggcgctgcgcgaccgcaacgaggtgctgttccaccggctgctcggcgaccacctcgccgagatgctgcccatcgtgtacaccccgaccgtcggcaccgcgatcgagcgctacagctatgagtaccgccgcccgcgcggcgtgtacctgtcggtcgacgcgcccgaggacatcgagcgcaccctgcgcgcgtccgggctgggcgccgacgacgtcgacctgatcgtggcgaccgacggcgaggcgatcctcggcatcggcgactggggggtgggtggcatcgacatcgcggtggggaaactcgccgtctacaccgccgccgcgggcgtggacccggcccgcactctggcggtgatgctggacgtgggcaccaaccgccaggagctgctggacgacccgctctatctggggaaccggcacccgcgcgtggaccgggagagctatgacgccttcatcgacgcgtacgtcaccgcggccaccgagctgttccccgacgccctgctgcactgggaggacttcggcccggccaacgcccgccgcatcctggaccggtaccgcgagaaggtccgcaccttcaacgacgacatccagggcaccggcgcggtcaacctggccgccgtgctctccggtgtgcgcgccggcggtgtcccgctgcgcgaccaccgcgtcgtgctcttcggcgccggtaccgccggcatcgggatcgccgaccagctccgcgacgccctgatcgccgacgggctgacgccgcaggaggccaccgaccgcatctgggccgtggaccgccacggcctgctcgccgaggaccagcaggggctgcacgacttccagctgcgctacgtccgtcgcggcgccgagatcgccggctggcggcgcgacgacgccctcggcggcgttccgctggccgaggtcgtcgaccgggtgcgcccgagcgtcctgatcggcgcgtccgggcagggcggggccttcaccgaggacatcgtccgcgccatggccgcgcacaccgaccgcccgatcatcctgcccatgtccaaccccacccggctggccgaggccgtccccgccgacctgctgacctggaccgacggccaagcgctgatcgccaccggcagccccttcgacccggtggaggtcgacggcgtcacccaccacatcgggcaggccaacaacgcgctggtcttccccggcctggggctgggcgccgtcgtcgcccgcgccgagcgcatcaccgacggcatgctcgtcgcctcggcacgcgccgtcgcggagcagaccgacgccacggcgccgggcgtgccggtgctgcccctgatcgaccggctgcgggacacctccgccgcggtggccgtggccgtggcccgcgccgccgtcgaggacggcgtcgcccgggagaccgtcgacgacgcggtcgaggagcgggtccgcgcggccatgtggcagccggagtacccgccgatcgaggccgtctga

SEQ ID NO: 77865 - protein, 587 aa, Streptomyces avermitilis MA-4680
MHPCSPRLVGVPAPDRFGVLMGTQWNAVDGRIRTTARGHAVLNSPRLNRGTAFTRQERQELGLVGLVPPQVLTQDQQAARAYTQFRSQPNDLAKNVYLTALRDRNEVLFHRLLGDHLAEMLPIVYTPTVGTAIERYSYEYRRPRGVYLSVDAPEDIERTLRASGLGADDVDLIVATDGEAILGIGDWGVGGIDIAVGKLAVYTAAAGVDPARTLAVMLDVGTNRQELLDDPLYLGNRHPRVDRESYDAFIDAYVTAATELFPDALLHWEDFGPANARRILDRYREKVRTFNDDIQGTGAVNLAAVLSGVRAGGVPLRDHRVVLFGAGTAGIGIADQLRDALIADGLTPQEATDRIWAVDRHGLLAEDQQGLHDFQLRYVRRGAEIAGWRRDDALGGVPLAEVVDRVRPSVLIGASGQGGAFTEDIVRAMAAHTDRPIILPMSNPTRLAEAVPADLLTWTDGQALIATGSPFDPVEVDGVTHHIGQANNALVFPGLGLGAVVARAERITDGMLVASARAVAEQTDATAPGVPVLPLIDRLRDTSAAVAVAVARAAVEDGVARETVDDAVEERVRAAMWQPEYPPIEAV

SEQ ID NO: 77866 - DNA, 1722 bp, Streptomyces avermitilis MA-4680
  CDS (1)..(1722): transl_table=11
atgacgaccgaccggaacaagacggccgagcgggacaccacccacaagcccttgagggtcacggcccggggaagggccgtcctggccgacccccggctcaaccggggaaccgcgttcaccgatgaggagcgccgggccctgggcctggtcggcctcgtgccgccgcgcgtgctcacccaggacgagcaggccgaccgcgcctatgcccagttccgggagcagcccggcgacctggccaagaacgtctacctgacggccctccacgaccgcaacgaggtgctgttctaccggctggtcggcgaccacctcgaggagatgctgcccatcgtctacacccccaccgtgggcacggccatcaagcgctacagctacgagtaccggcgcccccgtgggatctacctgtccgtgaacgcccccgacgacatcgaacgctccctgcgcgccgccggcctcggcgccgacgacgtcgacctgatcgtcgccaccgacggcgagggcatcctcggcatcggcgactggggcgtgggcggcatcgacatcgccgtcggcaagctcgccgtctacaccgccgccgccggcgtcgacccgcgccgcaccctgcccgtcatgctcgacgtcggcaccaaccgccaggagctcctcgacagccccctctacctcggcaaccggcacccccgcgtcgaccgcgacacctacgacgccttcatcgacgcctacgtcaccgccgcgacgaagctgttcccccgcgctctgctgcactgggaggacttcggacccgccaacgcccgccgcatcttcaaccactaccgcgacgacgtcttcaccttcaacgacgacatccagggcaccggcgcagtcaacctcgccgccgtcctctccggcgccaaggccggtgacctgcccctgcgcgaccaccggatcgtcgtcctcggcgcgggcagcgccggtatcggcgtcgccgaccagctccgggacgccctcgtcgccgaagggctctcgtccgacgaggccaccgcccgcttctggtgcgtcgaccgctacggcctgctcaccgccgaccagggcgacaaactccgcgacttccaggtgccgtacgcccgtcccgccgacgaggtgtccgactggcagcgcgacgacgacctgcccggcatcccgctcgacgaggtggtccgccgggtccatccgaccatcctcatcggcacctccggccagggcggcgccttcaccgagaccgtcgtccgcgagatggccgcacacaccccgcgcccgatcatcctgcccatgtccaaccccaccgacctcgccgaggccaagcccgccgacctgctcgcctggaccgacggcaaggcgctcgtcgccacgggcagccccttcgacccggtggaactcaacggcacgacctaccggatcggccaggccaacaacgccctgatcttcccgggcctggggctgggcgccatcgtcgcccgagccacccgggtcaccgaccgcatgctccgcgcggcggccgacgcggtcgcgaaccagacggacgtgacggacccgggcgcgcccgtgctgccacccgtccgcgacctccgcgagacctctttcgccgtggccgtggcggtggcccgagcggcggcggaggacgacgtcgcccgagccggcaccgacgacatcgaggcggcggtacgggcggtgacgtgggagccggtctatccgccggtccaggcggtgtga

SEQ ID NO: 77867 - protein, 573 aa, Streptomyces avermitilis MA-4680
MTTDRNKTAERDTTHKPLRVTARGRAVLADPRLNRGTAFTDEERRALGLVGLVPPRVLTQDEQADRAYAQFREQPGDLAKNVYLTALHDRNEVLFYRLVGDHLEEMLPIVYTPTVGTAIKRYSYEYRRPRGIYLSVNAPDDIERSLRAAGLGADDVDLIVATDGEGILGIGDWGVGGIDIAVGKLAVYTAAAGVDPRRTLPVMLDVGTNRQELLDSPLYLGNRHPRVDRDTYDAFIDAYVTAATKLFPRALLHWEDFGPANARRIFNHYRDDVFTFNDDIQGTGAVNLAAVLSGAKAGDLPLRDHRIVVLGAGSAGIGVADQLRDALVAEGLSSDEATARFWCVDRYGLLTADQGDKLRDFQVPYARPADEVSDWQRDDDLPGIPLDEVVRRVHPTILIGTSGQGGAFTETVVREMAAHTPRPIILPMSNPTDLAEAKPADLLAWTDGKALVATGSPFDPVELNGTTYRIGQANNALIFPGLGLGAIVARATRVTDRMLRAAADAVANQTDVTDPGAPVLPPVRDLRETSFAVAVAVARAAAEDDVARAGTDDIEAAVRAVTWEPVYPPVQAV

SEQ ID NO: 77868 - DNA, 1707 bp, Bacillus cereus ATCC 14579
  CDS (1)..(1707): transl_table=11
atgagcaagtttacagtagcttctaatggtgcattagaaacaacattaagaggagcagaagtattatcaacaccacttttaaataaaggggtagctttcacacaaaatgaaagagaagagttaggtttaaaagggttattaccgccagcggttttaacgttagaagaacaggcacgccgagcatacgaacaatttagttctcagccggatgatttattaaagaatgtatacttaactgcgttacatgatcgaaatgaagtattattttatcgtatattaacagatcatttacgtgaaatgttaccgattgtatatacaccaactgtcggtgtagcaattcaaagatatagtcatgaatatcgtaaaccacgtggcgtttatttatcaattaacgattcatcaggtatcgaagaagcatttaccaatatcggtgcaacagctgagaacattgatttagtcgttgtaacagatggagaaggcatattaggaattggtgactggggcgttggtggtattaacattgcaatcggaaaactagctgtttacactgctgcagttggaatcgatcctagccgcgtattaccggtaattttagatgtaggtacaaaccgtgaggaactattaaacaatccattttatattggaaatcgtcaccctcgtataacaggtgaagcttacgatgaatttattgatacgtttgtacaagcggtaaacaaacaattcccgaaagcacttttacattgggaagactttagctctcgtaacgcacgaaaaattttagataaatatcgtcatgatgtttgtacatttaatgatgatattcaaggtacaggtgcagtttcacttgcggcagtattatcggcagtgaaagcttctggtgtaccgctaagtgaacaccgcgttgttgtatttggtgctggtacggctggaatcggtatcgcagatcaagttagagatgcgatggtccgcgtaggcgtatctgaagaagaatcatataagcgtttctggtgtattgatcgtaacgggttagttacagataatatggaagatcttcttgatttccaaattccgtacgcaagaaaagaagcagaagtaagtgagtggaaagaaaatgatgtgatcggacttgctgaagttgtgaaacatgtaaaaccgacaattttaattggtacatctactgttgcaggtgcatttaaagaagagattattaaagaaatggcttctcacgtagaaagaccaatcattttaccaatgtcgaatccaacgccacttgctgaagcaaaaccagcagatttaatcgagtggacagaaggaagagcgttagttgcaacaggaagtccatttgaaccagttacatataacggtgtaacgtatgtgattggacaatcaaataatgcacttattttcccagggcttggtcttggaacaattgtagtacgagcaagcgtcatgacggatggaatgttcgcagcggctgctgaagcagttgcaagtatggtagatacaagtcagccaggagcacctattttaccagaggtcgaagaattacgtaatatctcagaaatggttgcaattgaagtagcgaaagttgcagttgcagaaagtgttgcaagagtgaacttaagtgataacgatatcaagatggcagtgcaagaagcaatgtggaagcccagagtatcgccaaataaaagcggtagaaaaggttag

SEQ ID NO: 77869 - protein, 568 aa, Bacillus cereus ATCC 14579
MSKFTVASNGALETTLRGAEVLSTPLLNKGVAFTQNEREELGLKGLLPPAVLTLEEQARRAYEQFSSQPDDLLKNVYLTALHDRNEVLFYRILTDHLREMLPIVYTPTVGVAIQRYSHEYRKPRGVYLSINDSSGIEEAFTNIGATAENIDLVVVTDGEGILGIGDWGVGGINIAIGKLAVYTAAVGIDPSRVLPVILDVGTNREELLNNPFYIGNRHPRITGEAYDEFIDTFVQAVNKQFPKALLHWEDFSSRNARKILDKYRHDVCTFNDDIQGTGAVSLAAVLSAVKASGVPLSEHRVVVFGAGTAGIGIADQVRDAMVRVGVSEEESYKRFWCIDRNGLVTDNMEDLLDFQIPYARKEAEVSEWKENDVIGLAEVVKHVKPTILIGTSTVAGAFKEEIIKEMASHVERPIILPMSNPTPLAEAKPADLIEWTEGRALVATGSPFEPVTYNGVTYVIGQSNNALIFPGLGLGTIVVRASVMTDGMFAAAAEAVASMVDTSQPGAPILPEVEELRNISEMVAIEVAKVAVAESVARVNLSDNDIKMAVQEAMWKPRVSPNKSGRKG

SEQ ID NO: 77870 - DNA, 1743 bp, Nitrosomonas europaea ATCC 19718
  CDS (1)..(1743): transl_table=11
atgatctgctcgatctgtttgaacgggtgtcagccggtactccggttgaaatcgaggccggatgaagtctggagagaagcaggtaaccggaagagcaatattgacatcaatagcctggcgggggaatacaaaatgaagccgttgcgaggtaaagcattactgaatgatcctgtacaaaataaatccactgctttcacccgggaggaacgcgaacgctatggtttgcagggattgctgccatatagtgtgacggatatcgggaaacagcagcagcgggtactggccaatctgcgcagtaagaacagcaatatcgagaagtacggatatttgaacgacctgctcgaacggaaccagcggctgttttatcgcacgctgatcgactatattggtgaaatcatgcccctggtctatacgcccaccgtaggtgaagcttgcatgaagttcacacagattttcagaaaaccgcaggggttttacattactccggaagatcggggaaaaatcctgcctttgtttgagaactggccggagaatgatgtgcggatcatcgtcgtcaccgatggagagcgcatcctcgggcttggagatctgggcgcaaacggtatgggaataccgatcgggaaaatggctttgtatgtggcttgcgccggcattcgtcccgagtactgtatgccggtcatgctggatgtgggtaccagtaatcagatactgcgggaagatccactgtatctgggttacccgcgtccgcggctgactggtcaggattatctgtcactggtggaggaattcgtggcggccgtacagaataaatttccgcaggcattgatccagttcgaggatttcagcagtcagaatgcattcagattgctggatcgttatgccgggtcggttcgatgtttcaatgacgatattcagggaacggctgcggttacgctggcgggtatttatgcttcctgccggattacgcacaaaccatttgttgatctgaaaatcatgctgctgggaacgggttcggccgcaaccggtgtcgctgaactgttgttgtcagcattcatgatggctggattgagtgaagctgaagctcgttccagaatcagtttcgtggacaggcagggcctggtggtgactgttcgggaagagatcaagccgcgtgtccgatcctttgccagtgaacatgccgcaatggatttcgtgggtgcaattaccgctatccggccggacgtactgatcggtgcaacgggaactgcaggcgcattcgatgagatcgcgattcgtcaaatggcacgatgtcaggaacatccggtgatcatcgcactttccaatccaacctcacatacggaatgtactgctgaccaggcgtaccggtggagtgatggacgcgctgtttttgcaagtggcagtccatttgctccggtcacgctggatggacgaacccgttacccggcgcagggaaataatgtgtatatctaccctggaatcgggctggggatggtggccagccatgcacgtctggtcgttgagcatatgtttctggccacggccgaagaactggcgaattgtgtgttacctgaagaaatcgaacgtggatcgatttatccggagattgcccgggtacgcgatgtttcacaaaagatcgccgtcaaggtttgtcaggtggcccgtcaggagggactggccggcgtggatctacctgatgacctggaaacgtatgtgtacaccctgatgtatgagcctggttattga

SEQ ID NO: 77871 - protein, 580 aa, Nitrosomonas europaea ATCC 19718
MICSICLNGCQPVLRLKSRPDEVWREAGNRKSNIDINSLAGEYKMKPLRGKALLNDPVQNKSTAFTREERERYGLQGLLPYSVTDIGKQQQRVLANLRSKNSNIEKYGYLNDLLERNQRLFYRTLIDYIGEIMPLVYTPTVGEACMKFTQIFRKPQGFYITPEDRGKILPLFENWPENDVRIIVVTDGERILGLGDLGANGMGIPIGKMALYVACAGIRPEYCMPVMLDVGTSNQILREDPLYLGYPRPRLTGQDYLSLVEEFVAAVQNKFPQALIQFEDFSSQNAFRLLDRYAGSVRCFNDDIQGTAAVTLAGIYASCRITHKPFVDLKIMLLGTGSAATGVAELLLSAFMMAGLSEAEARSRISFVDRQGLVVTVREEIKPRVRSFASEHAAMDFVGAITAIRPDVLIGATGTAGAFDEIAIRQMARCQEHPVIIALSNPTSHTECTADQAYRWSDGRAVFASGSPFAPVTLDGRTRYPAQGNNVYIYPGIGLGMVASHARLVVEHMFLATAEELANCVLPEEIERGSIYPEIARVRDVSQKIAVKVCQVARQEGLAGVDLPDDLETYVYTLMYEPGY

SEQ ID NO: 77872 - DNA, 1734 bp, Bacillus anthracis str. Ames
  CDS (1)..(1734): transl_table=11
atgaatagaggtagggatgttatgagcaagtttacagtagcttctaatggttcattagaaacgacattaagaggagtagaagtattatcaacaccacttttaaataaaggggtcgctttcacgcaagaagaaagagaagaattaggtttaaaagggttattaccgccagcagttttaacattggaagaacaagcacgccgagcatacgaacaattttgttctcagccggatgatttattaaagaatgtatacttaacagcgttacatgatcgaaatgaagtgttattttatcgcattttaacagatcatttacgcgaaatgttaccaatcgtatatacaccaactgttggtgtagcaatccaaagatatagtcatgaataccgtaaaccacgtggtgtgtatttatcaattaacgatccgtcaggtattgaagaagcattcgccaatatcggtgcaacagcagaaaatattgatttagtcgttgttacagatggagaaggcatacttggaattggtgactggggcgttggtggcattaacatcgcaatcggaaaattagctgtttatacggcagcagttggaatcgatcctagccgcgtattaccggtaattttagacgtaggtacaaatcgtgaggaactattaaataatccattttatattggaaatcgtcaccctcgtataacaggtgaagcttacgatgaatttattgatacatttgtacaagcggtaaataaacaattcccgaaagcacttttacattgggaagactttagctctcgaaatgcacgaaaaattttagataaatatcgtcatgatatttgtacgtttaatgatgatattcaaggaacaggtgcagtttcacttgctgcggtattatcggcagtgaaagcttctggtgtaccgctaagcgaacaccgtgttgttgtgtttggtgctggtacggctggaatcggtatcgcagatcaagttagagatgcgatggtacgcgtcggcgtatcagaagaagaatcatataagcgtttctggtgtattgatcgtaacggattagttacagataacatggaagatcttcttgatttccaaattccatatgcaagaaaagaagcggaagtaagtgagtggaaagaaaatggtgtgatcgggcttgctgaagttgtgaaacatgtgaaaccgacaattttaattggtacatcaactgttgcaggagcatttaaagaagaaattattaaagaaatggcttctcacgtagaaagaccaatcattttaccgatgtcgaatccgacgccacttgctgaagcgaaaccagccgatttaatcgagtggacagaaggaagagcactagttgcaacaggaagtccatttgaaccagttacatataacggtgtaacgtatgtaattgggcaatcaaataatgcacttattttcccaggtcttggtcttggaacaattgttgtacgtgcaagcgtcatgacagatggaatgttcgcagcagcagctgaagcagttgcaagtatggtggacacaagtcagccaggagcacctattttgccagaagttgaagagttacgtaatatctcggaaatggtagcaattgaagtagcgaaagttgctgttgcagaaggtgttgctagagagaacttcagtgataacgatattaagattgcagtgaaagaagcaatctgggagcctgagtatcgccaaataaaagcggtagaaaaggttacaatatag

SEQ ID NO: 77873 - protein, 577 aa, Bacillus anthracis str. Ames
MNRGRDVMSKFTVASNGSLETTLRGVEVLSTPLLNKGVAFTQEEREELGLKGLLPPAVLTLEEQARRAYEQFCSQPDDLLKNVYLTALHDRNEVLFYRILTDHLREMLPIVYTPTVGVAIQRYSHEYRKPRGVYLSINDPSGIEEAFANIGATAENIDLVVVTDGEGILGIGDWGVGGINIAIGKLAVYTAAVGIDPSRVLPVILDVGTNREELLNNPFYIGNRHPRITGEAYDEFIDTFVQAVNKQFPKALLHWEDFSSRNARKILDKYRHDICTFNDDIQGTGAVSLAAVLSAVKASGVPLSEHRVVVFGAGTAGIGIADQVRDAMVRVGVSEEESYKRFWCIDRNGLVTDNMEDLLDFQIPYARKEAEVSEWKENGVIGLAEVVKHVKPTILIGTSTVAGAFKEEIIKEMASHVERPIILPMSNPTPLAEAKPADLIEWTEGRALVATGSPFEPVTYNGVTYVIGQSNNALIFPGLGLGTIVVRASVMTDGMFAAAAEAVASMVDTSQPGAPILPEVEELRNISEMVAIEVAKVAVAEGVARENFSDNDIKIAVKEAIWEPEYRQIKAVEKVTI

SEQ ID NO: 77874 - DNA, 1647 bp, Mycobacterium bovis AF2122/97
  CDS (1)..(1647): transl_table=11
atgagcgacgcccgcgtgccacggatcccggccgcgttgtccgcaccaagtctcaaccgtggagtcggcttcacccacgcgcagcggcggcggctggggctgaccggccggcttccgtcggccgtgctcacgctcgaccaacaggccgaacgcgtatggcatcagttgcagagcttggccaccgatctgggccgcaacctgcttctcgaacagctgcactaccgccacgaggtgctgtacttcaaggtgctggccgaccatttgcccgaactgatgccggtggtgtacacgcccaccgttggcgaggcaatccaacgcttctccgacgaataccgcgggcaacgcggactgtttctgagcatcgacgaacccgacgaaatcgaggaagccttcaacacgttggggctggggcccgaggacgtcgacctgatcgtgtgcaccgatgccgaggcgatcctgggtatcggtgactggggtgtgggtggcatccagatcgctgtgggcaaattggccctctacaccgccggcggcggcgtcgatccgcgccgctgcctcgcggtgtctctggatgtcggcaccgacaatgagcagctgctggccgatccgttctatctgggcaatcgccacgcccggcggcgcggtcgggaatacgacgagttcgtcagtcgctatatcgaaacggctcaacggttatttccgcgtgccattctgcatttcgaggacttcgggccggcgaacgcgcggaagatcctagacacatacggcacggattactgcgtgttcaacgatgacatgcaaggaaccggcgcggtggtcttggccgccgtatacagcggtctgaaggttaccggtatcccgctgcgcgatcagacaatagtcgtcttcggcgcaggcaccgcagggatggggatcgccgatcagatccgggacgcgatggtggcagacggtgccacgctcgagcaggcggtgtcccagatctggccgctcgacaggccgggcctgttgttcgacgacatggatgacctgcgcgacttccaagtgccgtacgcgaaaaaccgccaccagctcggtgtggccgtcggggatcgggtcgggctgagcgacgcgatcaagatcgcatcgcccactatcctgctcggctgctcaacggtctacggagcgttcaccaaagaggtggtcgaggcgatgacggcgtcctgcaaacacccgatgatctttccgctgtccaacccgacgtcgcgcatggaagccatccccgccgacgtgctggcgtggtcgaatggcagggcgctgcttgccaccggcagcccagtcgccccagtggaattcgacgaaaccacctacgtcatcggtcaggccaacaacgtgttggcgtttcccggcatcggactgggcgtcattgtcgctggtgcccggttgataaccaggcgcatgctgcatgcagcagcgaaggccattgcgcaccaggccaatccgacaaatcccggagactcgctgttgccggatgtccaaaatctgcgggccatctcgacaacggtcgccgaagctgtctatcgggccgccgtccaagacggggtggcttccaggacgcacgacgacgtcaggcaggccatagtcgacaccatgtggctcccggcatatgactaa

SEQ ID NO: 77875 - protein, 548 aa, Mycobacterium bovis AF2122/97
MSDARVPRIPAALSAPSLNRGVGFTHAQRRRLGLTGRLPSAVLTLDQQAERVWHQLQSLATDLGRNLLLEQLHYRHEVLYFKVLADHLPELMPVVYTPTVGEAIQRFSDEYRGQRGLFLSIDEPDEIEEAFNTLGLGPEDVDLIVCTDAEAILGIGDWGVGGIQIAVGKLALYTAGGGVDPRRCLAVSLDVGTDNEQLLADPFYLGNRHARRRGREYDEFVSRYIETAQRLFPRAILHFEDFGPANARKILDTYGTDYCVFNDDMQGTGAVVLAAVYSGLKVTGIPLRDQTIVVFGAGTAGMGIADQIRDAMVADGATLEQAVSQIWPLDRPGLLFDDMDDLRDFQVPYAKNRHQLGVAVGDRVGLSDAIKIASPTILLGCSTVYGAFTKEVVEAMTASCKHPMIFPLSNPTSRMEAIPADVLAWSNGRALLATGSPVAPVEFDETTYVIGQANNVLAFPGIGLGVIVAGARLITRRMLHAAAKAIAHQANPTNPGDSLLPDVQNLRAISTTVAEAVYRAAVQDGVASRTHDDVRQAIVDTMWLPAYD

SEQ ID NO: 77876 - DNA, 1776 bp, Vibrio vulnificus YJ016
  CDS (1)..(1776): transl_table=11
ttgatgtatatcaagcgctatttacaaccaattagtgaagccgttatcatttttagcgtttcctcaaaaaccctactaaggcacccaatgaataacgataaacgcccactctacatcccgttcgcgggtccggcgctactgagtaccccattactaaacaaaggcagcgctttttcagcggaagaacgcatctcttttaaccttgaaggtctgcttcctgaaaccacggaaacgattcaagagcaggttgaacgcgcatacatgcagtacaaagcgttcgagagtgacatggataagcacatctacctgcgcaatatccaagatactaacgaaaccttgttctatcgcttggtgcaaaatcacatcactgagatgatgccgatcatttacaccccgaccgtgggcgcggcatgtgaaaacttctccaatatttaccgccgtggccgtgggttattcgtttcttacgcaaaccgtgatcgtattgacgatattctgaacaatgcctctaaccacaacgtaaaagtgattgtagtgactgatggtgagcgtattcttggtctgggtgaccaaggtatcggcggcatgggcattcctattggtaagctttctctttacaccgcttgtggtgggatcagcccagcttacaccttgcctatcgtgttggatgtcggtaccaacaacccacaacgccttgctgacccaatgtacatgggctggcgtcacccgcgtattaccggtgcagattacgacgcgtttgttgaagagttcattcaagcggttcaacgtcgttggccagatgcacttattcagtttgaagacttcgcacagaaaaacgcgatgccgctacttgagcgttacaaaaaccgcatttgttgcttcaatgatgatatccaaggcaccgcggcagtaacggttggctccttgatggcagcgtgtcaagcagctggcagcaagctttctgagcaacgcattactttcctcggcgcaggttctgccggctgtggtattgccgaagcgatcattgcacaaatggtctcggaaggtatttcagataagaaagcgcgctctcaagttttcatggttgaccgttggggtttattgcaagaaggcatgccgaacctgcttgatttccaacaacgtctggtacaaaaacacagcgtgacggcgaaatgggaaaccgaagccaatggcttctcgctacttgatgtggtgaagaacgcaaaaccaactgtattgatcggggtttctggtgctcctggcttgtttactcaagaagtcattcaagaaatgcacaagcactgccctcgtccaatcgtcttcccactgtctaacccaactagccgagtagaagcggtgcctgcggatatcattcgctggacaaacggtgacgcattggtagccactggcagcccgttcgatcctgtgattcatgaaggcaaaacctacccaatcgtacaatgcaataacagttacatcttcccgggtatcggtttaggtgtcttggcagttaacgccaaacgtgtcacagacgaaatgttgatggaatccagccgcgcattggcgacgtgttctccgttggcaatcaatggtaaaggcgcgctcctgccaccacttgaagagatccacacagtatcaaaacgcattgcctacgcagtggcgaaaaaagccatcgaacaaggtgtggcgttggaaattgctgacgatgcgctgcaagtcgctattgaacaacatttctggcaaccggtataccgccgttacaaacgcacagcgttttaa

SEQ ID NO: 77877 - protein, 591 aa, Vibrio vulnificus YJ016
MMYIKRYLQPISEAVIIFSVSSKTLLRHPMNNDKRPLYIPFAGPALLSTPLLNKGSAFSAEERISFNLEGLLPETTETIQEQVERAYMQYKAFESDMDKHIYLRNIQDTNETLFYRLVQNHITEMMPIIYTPTVGAACENFSNIYRRGRGLFVSYANRDRIDDILNNASNHNVKVIVVTDGERILGLGDQGIGGMGIPIGKLSLYTACGGISPAYTLPIVLDVGTNNPQRLADPMYMGWRHPRITGADYDAFVEEFIQAVQRRWPDALIQFEDFAQKNAMPLLERYKNRICCFNDDIQGTAAVTVGSLMAACQAAGSKLSEQRITFLGAGSAGCGIAEAIIAQMVSEGISDKKARSQVFMVDRWGLLQEGMPNLLDFQQRLVQKHSVTAKWETEANGFSLLDVVKNAKPTVLIGVSGAPGLFTQEVIQEMHKHCPRPIVFPLSNPTSRVEAVPADIIRWTNGDALVATGSPFDPVIHEGKTYPIVQCNNSYIFPGIGLGVLAVNAKRVTDEMLMESSRALATCSPLAINGKGALLPPLEEIHTVSKRIAYAVAKKAIEQGVALEIADDALQVAIEQHFWQPVYRRYKRTAF

SEQ ID NO: 77878 - DNA, 1734 bp, Bacillus cereus ATCC 10987
  CDS (1)..(1734): transl_table=11
atgaatagaggtagggatgttatgagtaagtttacagtagcttctaatggttcattagaaacgacattaagaggagtagaagtattatcaacaccacttttaaataaaggggttgctttcacgcaagaagaaagagaagaattaggtttaaaagggttattaccgccagcagttttaacattggaagaacaagcacgccgagcatacgaacaattttgttctcagccggatgatttattaaagaatgtatacttaacagcgttacatgatcgaaatgaagtattattttatcgtattttaacagatcatttacgcgaaatgttaccaatcgtatatacaccaactgttggtgtagcgattcaaagatatagtcatgaatatcgtaaaccacgtggtgtgtatttatcaattaacgatccgtcaggtattgaagaagcgttcgccaatattggtgcaacagcagaaaatattgatttagtcgttgtaacagatggagaaggtatacttggaattggtgactggggcgttggtggtattaacatcgcaatcggaaaattagctgtttatacagccgcagttggaatcgatcctagccgcgtattaccggtaattttagatgtaggtacaaaccgtgaggaactattaaacaatccattttatattggaaatcgtcaccctcgtataacaggtgaagcatacgatgaatttattgatacatttgtacgagcggtaaataaacaattcccgaaagcacttttacattgggaagactttagctctcgaaatgcacgaaaaattttagataaatatcgtcatgatatttgtacgtttaatgatgatattcaaggtacaggtgcagtttcacttgctgctgtgctatcggcagtgaaagcttcgggtgtaccactaagtgaacaccgcgttgttgtatttggtgctggtacggctggaatcggtatcgcagatcaagttagagatgcaatggtccgcgtaggtgtatcagaagaagaatcgtataagcgtttctggtgcattgatcgtaacggattagttacagataatatgaaagatcttcttgatttccaaatgccgtatgcaagaaaagaagcggaagtaagtgagtggaagcaaaatggtgtaatcggacttgctgaagttgtgaaacatgtgaaaccaacaattttaatcggtacatcaactgttgcaggcgcatttaaagaagagattgttaaagaaatggcttctcacgtagaaagaccaatcattttaccgatgtcgaacccgacgccacttgctgaagcaaaaccagcagatttaatcaagtggacagaaggaagagcattagttgcaacaggaagtccatttgaaccagttacatacaacggtgtaacgtatgtgattggacaatcaaataatgcacttattttcccaggacttggtcttggaacaattgtcgtacgtgcaagcgttatgacggacggaatgttcgcagcagcagctgaagcagttgcgagcatggtagatacaagtcagccaggagcacctattttaccagaagttgaagagttacgtaatatctcggaaatggtagcaattgaagtagcgaaagttgctgttgcagaaggtgttgctagagagaacttaagtgataacgatatcaagattgcagtgaaagaagcaatctgggagcctgagtatcgccaaataaaagcggtagaaaaggttagaatatag

SEQ ID NO: 77879 - protein, 577 aa, Bacillus cereus ATCC 10987
MNRGRDVMSKFTVASNGSLETTLRGVEVLSTPLLNKGVAFTQEEREELGLKGLLPPAVLTLEEQARRAYEQFCSQPDDLLKNVYLTALHDRNEVLFYRILTDHLREMLPIVYTPTVGVAIQRYSHEYRKPRGVYLSINDPSGIEEAFANIGATAENIDLVVVTDGEGILGIGDWGVGGINIAIGKLAVYTAAVGIDPSRVLPVILDVGTNREELLNNPFYIGNRHPRITGEAYDEFIDTFVRAVNKQFPKALLHWEDFSSRNARKILDKYRHDICTFNDDIQGTGAVSLAAVLSAVKASGVPLSEHRVVVFGAGTAGIGIADQVRDAMVRVGVSEEESYKRFWCIDRNGLVTDNMKDLLDFQMPYARKEAEVSEWKQNGVIGLAEVVKHVKPTILIGTSTVAGAFKEEIVKEMASHVERPIILPMSNPTPLAEAKPADLIKWTEGRALVATGSPFEPVTYNGVTYVIGQSNNALIFPGLGLGTIVVRASVMTDGMFAAAAEAVASMVDTSQPGAPILPEVEELRNISEMVAIEVAKVAVAEGVARENLSDNDIKIAVKEAIWEPEYRQIKAVEKVRI

SEQ ID NO: 77880 - DNA, 1824 bp, Nasonia vitripennis
  CDS (1)..(1824)
atgggggttacgtcgtgtgggaggaatggctgcggcgcgagggcgcgggcgctgccggccgtcagctccagcatggatgtccagcagcgcagggacatccacgaggtccagggtgacgtcatacccatcaacatggtcaagggcatcggccatctgcgagacccccggctaaacaagggattagccttcacattggaggagagaatagcactgggaatccacgggctccagccgccgagatttaaaacccaagaggagcaactggctctctgcaaagcttccgtaatgaagtacacggaggatctgaaccgctacctctacctcgtcgagctgcaggagcgaaacgagcggctcttcttccggctgctgaaggagaacatcgagcagatgatgcccatcgtgtacacgccgaccgtcggtctcgcctgccaaaagttcggtgttatataccgcaggccgcgcggcctcttcatcaccatctacgacaagggtcacatctacgagatcctcaataattggccggagcaggcggtgcgggcgatctgcgtgacggacggcgagcggatcctgggtctcggcgacctgggcgcctgcggcatgggcattcccgtgggaaagctggccctgtacacggcgttggcgggaatcaagccgcatcagtgcctgcccatcaccatcgacgtcggcaccaacaacgagcagctgcgcaacgatccgcactacatcggcctgagcaagcccaggaccttcggccccgagtacgacgagctgctcgacgagttcatgtgcgcctgcgtcaggaagtacggccagaacgtgctcatccagttcgaggacttcggcaatcacaacgccttcaggtttttggacaagtacaggaacaagtactgcacgttcaacgacgacatccagggcaccgctgccgtcgctgttgccgggattctcgccagtcagaggctcaccaacaagcccatgcgcgagaacaagttcgtcttcctcggtgctggagaggccgctatcggaatagcggatctgtgcgtcaaggcgctggaagccgacggatgctcgaaggaggaggcacgcaataacatttggatgctggacatcaatggtctgctgaccaccacccgaaccgagggtgacttggacgggcacaagatttactacgccaaggatcacccgcccatgaagagccttatcgaggtcgttaggaaagtcaagccatcgattctcataggcgcttcggcagcggccaacacgtttacccccgaggttttgcaagagatggctaaaaataatgagaggcctttgatctttgcactgagcaatccaacaagcaaagccgagtgcacagcccaggctgcgtacgagcacacgcagggaaggtgtatattctcgtctggctcgccgttcggagaagtcaaatataacggaaaaatcttcaaaccgggacaaggcaacaacgcctatatcttccctggcatcgctctgggcgtaatcgcgacgggctgccatcacatcaccgaggagatgttcctgctctcggcccaggaggtcgcgaacaacgtgtcggatgcggacttggagatgggcagtgtttacccgcccttgagtactattcaagagtgctccattgacattgcctgcaaaattgcggactatgcctacaaacacggtaatttggctagtgaatacccagaaccaaaggacaagcgatcgttcatcatgagcaaaatgtatgactgcaactacgacagcccacttccaaacatgtatacgtggcccgaagacttttccactccccgtatcttgccggaaaagtaa

SEQ ID NO: 77881 - protein, 607 aa, Nasonia vitripennis
MGVTSCGRNGCGARARALPAVSSSMDVQQRRDIHEVQGDVIPINMVKGIGHLRDPRLNKGLAFTLEERIALGIHGLQPPRFKTQEEQLALCKASVMKYTEDLNRYLYLVELQERNERLFFRLLKENIEQMMPIVYTPTVGLACQKFGVIYRRPRGLFITIYDKGHIYEILNNWPEQAVRAICVTDGERILGLGDLGACGMGIPVGKLALYTALAGIKPHQCLPITIDVGTNNEQLRNDPHYIGLSKPRTFGPEYDELLDEFMCACVRKYGQNVLIQFEDFGNHNAFRFLDKYRNKYCTFNDDIQGTAAVAVAGILASQRLTNKPMRENKFVFLGAGEAAIGIADLCVKALEADGCSKEEARNNIWMLDINGLLTTTRTEGDLDGHKIYYAKDHPPMKSLIEVVRKVKPSILIGASAAANTFTPEVLQEMAKNNERPLIFALSNPTSKAECTAQAAYEHTQGRCIFSSGSPFGEVKYNGKIFKPGQGNNAYIFPGIALGVIATGCHHITEEMFLLSAQEVANNVSDADLEMGSVYPPLSTIQECSIDIACKIADYAYKHGNLASEYPEPKDKRSFIMSKMYDCNYDSPLPNMYTWPEDFSTPRILPEK

SEQ ID NO: 77882 - DNA, 1725 bp, Nasonia vitripennis
  CDS (1)..(1725)
atgtttacgttcgaaagggatcagttgggacagcggcctgccgacggggataccggtactcctggactcgtccgaggtttggatcacgtcaggaatccgcagctgaataagggcatggccttcacgatcgaggagcgccagactttagggatccacggtcttctcccagcgactgtcaagacccaggatgaacagctcgagctttgcaggcttaacctcgacagatacaccgacgagctatccaagtacatctacctcactggtcttctggaccgcaacgaaaagctgttctacagactgctgagtgaggatgtagagaaaatgatgccactggtttacactccaacggtcggtctggcctgtcagaagttcggccttatttaccgtagacctcgaggccttttcatcagtatccacgataagggacacgtttacgacgtgctgaagaactggcctgagcacgacgtacgcgccatcgttgtcaccgatggagagcgtatccttggccttggagaccttggtgcccagggtatgggtatacccatcggcaagctttcgttgtacaccgcacttgctggtatcaagccgcaccagtgcttgcctatcaccctcgatgtcggcactaacaatcaggcattcctggacgaccctctgtacattggacaccgtcacaaacgcgtgaccggtcccgagtacgatgccttcatcgatgagtttatgaaggcagcagtcaggcgctacggtcagaacaccctcatccaatttgaggatttcggcaactccaacgctttcagactgctgaacaagtaccgagaccactactgcaccttcaacgatgacattcagggcactgcttccgtcgcagtcgccggactgttcgcatcgctcagactcaccaagaccaggctttcggataacactatcgtgttccagggtgccggagaggccgccctgggaattgcatggctgtgcgtgatggcaatgagaaaggagggcgtaacggaagaagaggccaagagcaaaatctggatggtggactcgaagggtctgatcgtgaagaaccgcccgagcggtggcataagtgagcacaaagtgcagttcgctcgagagcacgcgcccgtcgacagtcttgccgaggtcgtcaaactggccaagccttcggtgctgatcggagccgcagctatcggtggcgctttcactcgccagatcctcgaggagatgggcaagaacaatgccaggccagtcatcttcgcgctcagcaaccctacgagtaaagccgagtgtaccgccgaggaggcttacaatgccactgagggtcgcgctatcttcgcgagtggctcgcccttcgacccggtgaactacggcggtaagatgctgtacccaggccagggtaacaacagctacatcttcccaggtattgcgctaggtgccatctgcgctggcatgaagacgatacccgaggaggcattcctccgggcggcgacgaccctcgccgaaatcgttacagacacggatctcgaaagaggtactctgtatccccctctcaaagatatccagaaatgctccattagcatcggtactaagctcatggactacgcttatgcggaatcacttgcaacgatacatccggagccagacaattacgaggagttcatcagagcccaactctacgacacaagctacacgtcgtcgatacctccggtttacccgtggcccaagatgtaa

SEQ ID NO: 77883 - protein, 574 aa, Nasonia vitripennis
MFTFERDQLGQRPADGDTGTPGLVRGLDHVRNPQLNKGMAFTIEERQTLGIHGLLPATVKTQDEQLELCRLNLDRYTDELSKYIYLTGLLDRNEKLFYRLLSEDVEKMMPLVYTPTVGLACQKFGLIYRRPRGLFISIHDKGHVYDVLKNWPEHDVRAIVVTDGERILGLGDLGAQGMGIPIGKLSLYTALAGIKPHQCLPITLDVGTNNQAFLDDPLYIGHRHKRVTGPEYDAFIDEFMKAAVRRYGQNTLIQFEDFGNSNAFRLLNKYRDHYCTFNDDIQGTASVAVAGLFASLRLTKTRLSDNTIVFQGAGEAALGIAWLCVMAMRKEGVTEEEAKSKIWMVDSKGLIVKNRPSGGISEHKVQFAREHAPVDSLAEVVKLAKPSVLIGAAAIGGAFTRQILEEMGKNNARPVIFALSNPTSKAECTAEEAYNATEGRAIFASGSPFDPVNYGGKMLYPGQGNNSYIFPGIALGAICAGMKTIPEEAFLRAATTLAEIVTDTDLERGTLYPPLKDIQKCSISIGTKLMDYAYAESLATIHPEPDNYEEFIRAQLYDTSYTSSIPPVYPWPKM

SEQ ID NO: 77884 - DNA, 1776 bp, Magnaporthe grisea 70-15
  CDS (1)..(1776)
atgccttccaagtttgcccaccttcccctctccacgagtggtcctctcgactgcgccctgagtggcacagcaatactaaaccacccctttttcaacaaaggctcggcattcacggccgctgagaggcgagactttggtctccttggcctcctccctcaaaatattcagacgttggaacagcaagccaaccgcgcatatgcccagtattcgtcgcggcccgatgacctggccaagaacaccttcttgacctcgctcaaggagcagaacgaggtcctcttctaccgcctgctacacgacaacctgcccgagatgtttggcgtcgtttacaccccgaccgagggtgacgcaatccaaaactactccaggctgttccgccggcccgagggctgcttcctcaacgtcaatgacgtggaccgcgtcagggaggacctgcagcgttggggccgccccgaggacgtcgactatatcgtcgtctcggacggcgaggagatcctgggcatcggtgaccagggctgtggcggcatcctcatcagcatcgccaagctcgtcctgaccacgctttgcgcaggcctgcacccgaaccgcaccctccccgtcgtcctcgactgcggcaccgacaaccagggcctgctcgacgacccgctgtacttgggcctgcgggagcgtcgcgtgaggggggagaagtacgactcgctggtccgcgagttcgtcgccgctgccagggacctcttcccccgcgccgtcatccactttgaggactttggcgtgaccaacgcccgccgcatcctcgacacgtaccgcccccgcgcgcccgttttcaacgacgacgtccagggcaccgggtgcgtcgtgctcgcggccatcatggcgggcatgcacgtcgcgggcctgaagatccaggacctgcgcatggtggtttttggcgccgggtccgccggcacgggcatcgccgacatggtgagggacgccatcgccgaggagagcgggtgtggcaaggactgcgccgcggagcagatctggctcgtcgacaagccggggctcctgacgacagcaacgcaaaacgacaccgcgcagacgccctacgccaagaagccgtggggcgagggccacgggacggacctgctcgcggtcgtggacgaggtgcgtcccaatgtcctgatcggcacgtcgacggtgcccggggcgtttaccgaggagatcgtgcgggcgatggccaaacatgccccaaggcccataatcatgccgctgtcgaacccgacaaggctgcacgaggcggtccctgcagacctgatggcgtggaccgacggcaaagcgctggtggcgacggggtcgccgtttgcgccggtgaagctggacggtggtagggaggtcgagattgcagagtgcaacaacagcgtcgtgttccccggcatcgcgctcggtagcgtcctgagcagggcgcggctggtgacggacagcatgctcgtcggggccgtcaaggccgtcgcggccatgagccctgccctcaaagatcctgcgggttccctgctgccgggcgtggatgaggtgaggaacgtcagcgtcgcggtcgccagtggggtcattcgcgccgcggtgcaggagggcgttgcgactgaggagggcatacctcgtgggaaagacgatggggacctggaggagtgggtgagggagcagatgtggaatcccgtgtaccgggagctgaggaaggtcggaggtggcgatgcgaccagggaggcgaaaggggagctgaagcaggctgggaccttggagggttga

SEQ ID NO: 77885 - protein, 591 aa, Magnaporthe grisea 70-15
MPSKFAHLPLSTSGPLDCALSGTAILNHPFFNKGSAFTAAERRDFGLLGLLPQNIQTLEQQANRAYAQYSSRPDDLAKNTFLTSLKEQNEVLFYRLLHDNLPEMFGVVYTPTEGDAIQNYSRLFRRPEGCFLNVNDVDRVREDLQRWGRPEDVDYIVVSDGEEILGIGDQGCGGILISIAKLVLTTLCAGLHPNRTLPVVLDCGTDNQGLLDDPLYLGLRERRVRGEKYDSLVREFVAAARDLFPRAVIHFEDFGVTNARRILDTYRPRAPVFNDDVQGTGCVVLAAIMAGMHVAGLKIQDLRMVVFGAGSAGTGIADMVRDAIAEESGCGKDCAAEQIWLVDKPGLLTTATQNDTAQTPYAKKPWGEGHGTDLLAVVDEVRPNVLIGTSTVPGAFTEEIVRAMAKHAPRPIIMPLSNPTRLHEAVPADLMAWTDGKALVATGSPFAPVKLDGGREVEIAECNNSVVFPGIALGSVLSRARLVTDSMLVGAVKAVAAMSPALKDPAGSLLPGVDEVRNVSVAVASGVIRAAVQEGVATEEGIPRGKDDGDLEEWVREQMWNPVYRELRKVGGGDATREAKGELKQAGTLEG

SEQ ID NO: 77886 - DNA, 1878 bp, Apis mellifera
  CDS (1)..(1878)
atgttcgtcctgcagaggtctatattatcgcccagcagcagaagttgtacaggatcatgggcgcgtatgcttcctcctacgcatcctgctgtaaaggatattcaacaaaaagagattcacgaagtgtccggcgatgtcatacctatcaatatggtgaaaggtatcggtcatttaagggatccacgactcaataagggtttggcatttactttgaaagaaagaatatctttgggtatacatggtttacagcctccaagattcaaaactcaggaagaacaattggctctgtgcaaagcttcagttatgaagtacacagaggatttaaaccgttatctttatctcgtagaactgcaggagagaaacgagagattatttttccgtctgttgagcgagaacatcgaacaaatgatgccaattgtttacacacctaccgttggactagcctgtcaaaagtttggcgttatctatcgaagaccccgtggattattcattactatatacgacaaaggtcacatttatgaaatcttgaacaactggcccgagcaagcagttcgagcgatttgcgtgacggatggagaaagaattctcgggctgggtgatcttggagcttgtgggatgggaatcccagtggggaaattggccctttacacggctctggccggcataaaaccgcaccaatgcctaccaattacgatcgatgttgggacaaacaatgaacaattgagaaacgatcctcattacatcgggcttaacaagcccaggagtcatggggccgaatacgatgaattgatcgatgaatttatggccgcttgcgtgaaaaagtatggtcaaaatgttctcatccaattcgaagattttggcaatcacaacgctttccgtttcttggataaatatcgtgataaatattgcacgtttaacgacgatatacaaggtactgctgcggtcgcggttgctggaattctagcatcgaaaagaataactaagaaaagaatatccgaaaacaagttcgtatttttaggcgccggcgaggcagctatcgggatagccaatctttgcgtgaaggcgatggaagtggacggttgcagcactcagcaagcgcgcgacaatatttggatgatggatatcgatggactgctggttaaagatcggccggaaggcaacctcgaaggtcacaagatctggtacgcgaaaaagtacaaagtgatgaaatcgttgttcgaggtggtaaaggaaataaaaccgtccgttttgatcggcgcgtcggcggcagcgggagcgttcaccaccgacgttctaaaggagatggccagaaacaacgagagacctttaattttcgcgttgagcaatccgacaagcaaagcggaatgcacggctcaacaagcgtacgatcacacgaatgggaaatgtatattttcgtccggttcgccgttcggcgacgtgcattacggagggaaaatttacaagcccggccaggggaacaacgcgtacattttccctgggatcgcgttgggcgtgatcgccactggctgccaccacatcaccgaggatctgttccttatttcagctcaggctgtcgccgatcacgtgaaagacgaacatctcgaagttggtagcgtttatccgccgttaggcaccattcgcgaatgttccattgatatcgccgttcgaatcgccgaatatgcttacgctaagagtgggttggcaagtgaatatccagagcccaaggacaaacggcaatttattgtaagtaaaatgtacgatgcgaactacgacagtccactgccaaacgtttatgactggccaggagactatgccaaacctcgtgttttgccagataaagacactgtcgaaatccgccacgatttaaaacatctgtag

SEQ ID NO: 77887 - protein, 625 aa, Apis mellifera
MFVLQRSILSPSSRSCTGSWARMLPPTHPAVKDIQQKEIHEVSGDVIPINMVKGIGHLRDPRLNKGLAFTLKERISLGIHGLQPPRFKTQEEQLALCKASVMKYTEDLNRYLYLVELQERNERLFFRLLSENIEQMMPIVYTPTVGLACQKFGVIYRRPRGLFITIYDKGHIYEILNNWPEQAVRAICVTDGERILGLGDLGACGMGIPVGKLALYTALAGIKPHQCLPITIDVGTNNEQLRNDPHYIGLNKPRSHGAEYDELIDEFMAACVKKYGQNVLIQFEDFGNHNAFRFLDKYRDKYCTFNDDIQGTAAVAVAGILASKRITKKRISENKFVFLGAGEAAIGIANLCVKAMEVDGCSTQQARDNIWMMDIDGLLVKDRPEGNLEGHKIWYAKKYKVMKSLFEVVKEIKPSVLIGASAAAGAFTTDVLKEMARNNERPLIFALSNPTSKAECTAQQAYDHTNGKCIFSSGSPFGDVHYGGKIYKPGQGNNAYIFPGIALGVIATGCHHITEDLFLISAQAVADHVKDEHLEVGSVYPPLGTIRECSIDIAVRIAEYAYAKSGLASEYPEPKDKRQFIVSKMYDANYDSPLPNVYDWPGDYAKPRVLPDKDTVEIRHDLKHL

SEQ ID NO: 77888 - DNA, 1977 bp, Candida glabrata CBS 138
  CDS (1)..(1977)
atgtttttgttcaggaagccatcgataaggtcatgccagcgcataaatagcctgtgttccttactggagttacaacgtggatatgctaccactaccagggagaacacactatacccaccacacgcggatacatcctcaccacacaaaactcctgtaggtgaagctgccaaggaatacttgaagcagaaaaagaggaagttgcaagagaaaggtacgcctaagtcaacgagattaacagtggaaggtgtaatcgaatgtccgttggaatcctttcaattacttaattctccacttttcaacaaaggttctgccttcactcaggaggaaagagaggcctttaacttagaggccttgcttcctccacaagtgaatacacttgatgaacaacttgagcgtgcctacaagcaactttgttacttaaagacaccgttagccaagaatgacttcatgacttctttgagagtgcagaataaagtcttgtattttgcattggtgagaaaacacattagagagttggttcccatcatatataccccaacggagggtgatgctattgcatcttattcccacagattcagaaaaccagaaggtgtattcctcgatatcacagaaccaaactctgtggagaagagattggcagtttacggagaggccaaagatgttgactacatcgttgtatctgattcagaaggtatcttaggtatcggtgaccaaggtgttggtggtgttcgtattgcgatttcaaaattagccctaatgactttatgtggtggtatccatccaggaagagtcctaccggtttgcttggatgtgggtactaacaacaagaaattagcaagagatgaattgtatatgggtaacaaattctcaaggataaggggtaagcaatatgatgacttcatagatagctttatccaagcggtcaaaaaactatatccaagtgccgttttacatttcgaagatttcggtgttaagaacgccagacgaatcctggataagtaccgttatgatttgccatgcttcaacgatgacattcaaggtactggtgcagttgtcactgcttcattgcttgctgcactaaagcatacagacagagaattaaaggatacaaaggtgttagtttttggagcagggtctgctggtcttggtattgctgaccaaataacaaatcacatggttacacatggactaactccagaagaagctcggagtaacatttatttgatggacagacgtggtttaatcctagaatctatggaggagaactcaacggtagctcaacacagatatgccaaaccagacgaagattgggatgatattgatactaccaagttattcaacgttgtttctaagatgaaaccaacgtgcttggtaggttgttccacacaggcaggtgcttttaccaaggagatcgtccaagagatgtataaatacaacccaagaccaatcattttcccactatccaatccaactagattacacgaggctgttccatctgatctaatggagtggaccaataatgatgccttggttgcaacaggttctccatttgctccagtgaatggctaccgtatctccgagaataacaactgtttctcattcccaggtattggtctaggtgctgttctttcccgtgccacagctatcacagacactatgatttccgcggcagtagaccaacttgcggccctatctccattgaaaccaggtgactctaggcctggtttgctaccaccattggaagacattacaaacacttccgctaagctagctactgcggttattctacaatcgttaaaggaaggcactgcccgtatcgaagacgaagaagtgccaggcagtcccggtgagaaagtcactgtaccaagagacttcgaccaatgtctagaatgggtgaaatcacagatgtgggaaccagtgtacagacccatggtaaaagtgaattacgacccagaagtgcatactaaccaaatgtaa

SEQ ID NO: 77889 - protein, 658 aa, Candida glabrata CBS 138
MFLFRKPSIRSCQRINSLCSLLELQRGYATTTRENTLYPPHADTSSPHKTPVGEAAKEYLKQKKRKLQEKGTPKSTRLTVEGVIECPLESFQLLNSPLFNKGSAFTQEEREAFNLEALLPPQVNTLDEQLERAYKQLCYLKTPLAKNDFMTSLRVQNKVLYFALVRKHIRELVPIIYTPTEGDAIASYSHRFRKPEGVFLDITEPNSVEKRLAVYGEAKDVDYIVVSDSEGILGIGDQGVGGVRIAISKLALMTLCGGIHPGRVLPVCLDVGTNNKKLARDELYMGNKFSRIRGKQYDDFIDSFIQAVKKLYPSAVLHFEDFGVKNARRILDKYRYDLPCFNDDIQGTGAVVTASLLAALKHTDRELKDTKVLVFGAGSAGLGIADQITNHMVTHGLTPEEARSNIYLMDRRGLILESMEENSTVAQHRYAKPDEDWDDIDTTKLFNVVSKMKPTCLVGCSTQAGAFTKEIVQEMYKYNPRPIIFPLSNPTRLHEAVPSDLMEWTNNDALVATGSPFAPVNGYRISENNNCFSFPGIGLGAVLSRATAITDTMISAAVDQLAALSPLKPGDSRPGLLPPLEDITNTSAKLATAVILQSLKEGTARIEDEEVPGSPGEKVTVPRDFDQCLEWVKSQMWEPVYRPMVKVNYDPEVHTNQM

SEQ ID NO: 77890 - DNA, 1923 bp, Kluyveromyces lactis NRRL Y-1140
  CDS (1)..(1923)
atgattaaacttcccgctaaactgcttggttccagattttattcttctgtaaccaaccagaatcgttattctgtcactaggcacaatgctccaaagaaatgtccagagtccggccattacaataaaattccaattggcaaagaagctgctaggttacaatcccaacctaaagtgactagactgtctgtcgatggaccaattgaatgtcctttggaaggtttccaattgttgaattcaccattgttcaataagggatcggctttcactttggaagaaagaaaggcattcggtctagatgggttgctaccaccacaagtgaacaccttggatgaacaagtggaaagagcttacaagcaactctgttacttgaagaccccattggctaagaacgatttcatgacttcgatgagagtgcagaacaaggttcttttcttcgaattggtcagaagacacattagacaactggtaccgatcatttataccccaactgaaggtgatgccattgctgcatactctcacagatttaggaaacctgaaggtgtcttcttagacattaccgagccagacagtattgattctcggttggctgcttacggtgaggataaggacgttgactatgttgtcgtctctgatggtgaaggtattctaggtatcggtgatcaaggtatcggtgctatcagaatcgctatctcgaaattggcattaatgaccctttgtggtggtgtccacccaggtagagtgatgccagttgcattagatgttggtactaataacaagcaattggctagagacgaattgtacatgggtaacagattcagtcgtattcgtggtaaacaatatgatcaatttttggacaagttcatcaaggctttgaaacatagattcccaaatgcagtgctacatttcgaagatttcggtgtaactactgctagaactttattagaacgttacagaaacgaattaccatgtttcaacgatgatatccagggtactggtgccgttgttatggcctctttcatcgctgctctaaaacataccaatagagaattggtggattcgaggatcttggtttatggtgctggttccgctggtttaggtatcgctgatcaaatagttaatcatatggtcactcacggctgtactccagaggaggcaagagccaagatttatctaatggacagaaagggtttgattctagataccatggaaaatgactctaatccagcccaatttttatacgccaaaccaagtgaaaactgggaaggtgccaacacacagtcattggtggatgttgtatcaaaggtaaaaccaacctgtttgattggttgttcaacccaagcaggtgccttcaacaaggttgtcgtagaagaaatgtacaaacataacccaagacctatcattttcccactttcaaacccaacaagactacatgaagctgtaccagaagatttactgaaatggacaaactacgatgctcttgtcgctactggttctccattcccacctgtagatggataccgtatctcagagaacaacaactgtttctctttcccaggtatcggtctaggtgctgttctatcgcgtgctaaggtcatctcagataagatgatcagtgccgcagtggatcaattagctgatttgtcaccattgaaaccaggtgactctaaaccaggtttgttgccacctcttgaagaaatcaacgacacctccgctagagtcgctaccgctgtcatcctacaagctcttgaagagggttctgcaagaattgaagaagaaaacgttccaggtacagataaaaaggttcaagtcccaagagatttcaacaaatgtcttgaatgggttatcaaacaaatgtggaagccagaatatagaccgttgataaaggtggaacatgatcctgcggtacatacccaccaattctga

SEQ ID NO: 77891 - protein, 640 aa, Kluyveromyces lactis NRRL Y-1140
MIKLPAKLLGSRFYSSVTNQNRYSVTRHNAPKKCPESGHYNKIPIGKEAARLQSQPKVTRLSVDGPIECPLEGFQLLNSPLFNKGSAFTLEERKAFGLDGLLPPQVNTLDEQVERAYKQLCYLKTPLAKNDFMTSMRVQNKVLFFELVRRHIRQLVPIIYTPTEGDAIAAYSHRFRKPEGVFLDITEPDSIDSRLAAYGEDKDVDYVVVSDGEGILGIGDQGIGAIRIAISKLALMTLCGGVHPGRVMPVALDVGTNNKQLARDELYMGNRFSRIRGKQYDQFLDKFIKALKHRFPNAVLHFEDFGVTTARTLLERYRNELPCFNDDIQGTGAVVMASFIAALKHTNRELVDSRILVYGAGSAGLGIADQIVNHMVTHGCTPEEARAKIYLMDRKGLILDTMENDSNPAQFLYAKPSENWEGANTQSLVDVVSKVKPTCLIGCSTQAGAFNKVVVEEMYKHNPRPIIFPLSNPTRLHEAVPEDLLKWTNYDALVATGSPFPPVDGYRISENNNCFSFPGIGLGAVLSRAKVISDKMISAAVDQLADLSPLKPGDSKPGLLPPLEEINDTSARVATAVILQALEEGSARIEEENVPGTDKKVQVPRDFNKCLEWVIKQMWKPEYRPLIKVEHDPAVHTHQF

SEQ ID NO: 77892 - DNA, 1914 bp, Debaryomyces hansenii CBS767
  CDS (1)..(1914)
atgcttaaagctaataatttcaatactagaatagccaaaacgacgaaacttgggaaaatccaaattcgaagtaatagcaatggtgtgaacaattcgaattcgtcgatccacacacatactatcaaaacaccagttggaatcaaggcagcgattgcatccttgaagcctaagaccactagattatcgattgagggtccaatagaatgcgatttgcagggatttgcccttttgaatgctcctgggttcaataaaggatcggcgtttagcaaagaagaaagacaggcatttggattggaagggttattgccgtcaagaataaactcgttggacgaacaagtagaaagagcttacagacagttctcttacttgaagactccgttagcaaaaaatgacttctgtacctctatgaggatccaaaataaggtcttatattatgaattggtaagacgccatattagggaaatgatccctattatctacacaccaaccgaaggtgatgccattgctgcttattcgcatagatttaggaagccagaaggttgctttttggatatcaccgagccagatatgatcgataaaagattatcggcgtttggggaagacaaagatattgattatatagttgtctctgatggtgagggtattttaggtattggtgatcaaggagtcggtggcgttagaattgccattgccaaattgggattaatgaccttgtgtggtggtgtccatccaggtagagtattaccaattgttcttgatgtgggtactaataaccaagaattgctccatgacgaattatacatgggcaacaaatttccaagagttcgtggtaaagaatactgggatttcatagataaattcattaatgctgttaagcaaagatttccaaatgctgttttgcattatgaagactttggtgtttcaactggtagaaaaatgttgcaaaaatatagagaatcattaccttcttttaacgatgacattcaaggtactggtgctgttgttatggcttccatgactgctgctttacaattttctgacagaaatttattagattcaaaggttttaatttatggtgcgggttctgcaggtttaggtatcgctgaccaaattgtaaatcatatggttagtcatggtgctacagaagaacaagcagtagcatccattcattgcatggaccgtcgtggtttacttttgaaatcattcgatgaaatgtcagacgcacaaaccaagtatgctgatgtagatagtgaatgggaaggagtagacacaagaaatttggtagaagtaataagacatgtcaagcctacagttttggttggatgttcaactcaggctggggcatttacagagcaagttattaaggaaatgtataatcacaacaaacaaccaattgttttcccattatcaaatccaacaagattgcatgaagctttccctatagacattatgaaatggacggataacaaggcattaattgctaccggttcgccatttgagcctgttaacgggtttgctatttctgagaacaataactgttttactttcccaggtattggattgggtgctgtattgtcaagatgtacaacaatctcagatactatggtatcagcagcagtagaccagttagccctgttatctccaaaaatggaaaaccctaagaatggcttattgccaagattggaacaaatcgatgaggtgagtgctaaggttgctaccgccgttattttacaatcattaaaagaaggtacggcaagagttgaaagcgaagaaaaacctgatggtgggtttgtcgaagtaccaaaagactttaataagtgcttaaagtgggttcaatcgcaaatgtggaaaccaatttataggccattggttaaagtcaagcatgttccagaagttcatacatatcaacactag

SEQ ID NO: 77893 - protein, 637 aa, Debaryomyces hansenii CBS767
MLKANNFNTRIAKTTKLGKIQIRSNSNGVNNSNSSIHTHTIKTPVGIKAAIASLKPKTTRLSIEGPIECDLQGFALLNAPGFNKGSAFSKEERQAFGLEGLLPSRINSLDEQVERAYRQFSYLKTPLAKNDFCTSMRIQNKVLYYELVRRHIREMIPIIYTPTEGDAIAAYSHRFRKPEGCFLDITEPDMIDKRLSAFGEDKDIDYIVVSDGEGILGIGDQGVGGVRIAIAKLGLMTLCGGVHPGRVLPIVLDVGTNNQELLHDELYMGNKFPRVRGKEYWDFIDKFINAVKQRFPNAVLHYEDFGVSTGRKMLQKYRESLPSFNDDIQGTGAVVMASMTAALQFSDRNLLDSKVLIYGAGSAGLGIADQIVNHMVSHGATEEQAVASIHCMDRRGLLLKSFDEMSDAQTKYADVDSEWEGVDTRNLVEVIRHVKPTVLVGCSTQAGAFTEQVIKEMYNHNKQPIVFPLSNPTRLHEAFPIDIMKWTDNKALIATGSPFEPVNGFAISENNNCFTFPGIGLGAVLSRCTTISDTMVSAAVDQLALLSPKMENPKNGLLPRLEQIDEVSAKVATAVILQSLKEGTARVESEEKPDGGFVEVPKDFNKCLKWVQSQMWKPIYRPLVKVKHVPEVHTYQH

SEQ ID NO: 77894 - DNA, 1890 bp, Yarrowia lipolytica CLIB122
  CDS (1)..(1890)
atgttacgactacgaaccatgcgacccacacagaccagcgtcagggcggcgcttgggcccaccgccgcggcccgaaacatgtcctcctccagcccctccagcttcgaatactcgtcctacgtcaagggcacgcgggaaatcggccaccgaaaggcgcccacaacccgtctgtcggttgagggccccatctacgtgggcttcgacggcattcgtcttctcaacctgccgcatctcaacaagggctcgggattccccctcaacgagcgacgggaattcagactcagtggtcttctgccctctgccgaagccaccctggaggaacaggtcgaccgagcataccaacaattcaaaaagtgtggcactcccttagccaaaaacgggttctgcacctcgctcaagttccaaaacgaggtgctctactacgccctgctgctcaagcacgttaaggaggtcttccccatcatctatacaccgactcagggagaagccattgaacagtactcgcggctgttccggcggcccgaaggctgcttcctcgacatcaccagtccctacgacgtggaggagcgtctgggagcgtttggagaccatgacgacattgactacattgtcgtgactgactccgagggtattctcggaattggagaccaaggagtgggcggtattggtatttccatcgccaagctggctctcatgactctatgtgctggagtcaacccctcacgagtcattcctgtggttctggatacgggaaccaacaaccaggagctgctgcacgaccccctgtatctcggccgacgaatgccccgagtgcgaggaaagcagtacgacgacttcatcgacaactttgtgcagtctgcccgaaggctgtatcccaaggcggtgatccatttcgaggactttgggctcgctaacgcacacaagatcctcgacaagtatcgaccggagatcccctgcttcaacgacgacatccagggcactggagccgtcactttggcctccatcacggccgctctcaaggtgctgggcaaaaatatcacagatactcgaattctcgtgtacggagctggttcggccggcatgggtattgctgaacaggtctatgataacctggttgcccagggtctcgacgacaagactgcgcgacaaaacatctttctcatggaccgaccgggtctactgaccaccgcacttaccgacgagcagatgagcgacgtgcagaagccgtttgccaaggacaaggccaattacgagggagtggacaccaagactctggagcacgtggttgctgccgtcaagccccatattctcattggatgttccactcagcccggcgcctttaacgagaaggtcgtcaaggagatgctcaaacacacccctcgacccatcattctccctctttccaaccccacacgtcttcatgaggctgtccctgcagatctgtacaagtggaccgacggcaaggctctggttgccaccggctcgccctttgacccagtcaacggcaaggagacgtctgagaacaataactgctttgttttccccggaatcgggctgggagccattctgtctcgatcaaagctcatcaccaacaccatgattgctgctgccatcgagtgcctcgccgaacaggcccccattctcaagaaccacgacgagggagtacttcccgacgtagctctcatccagatcatttcggcccgggtggccactgccgtggttcttcaggccaaggctgagggcctagccactgtcgaggaagagctcaagcccggcaccaaggaacatgtgcagattcccgacaactttgacgagtgtctcgcctgggtcgagactcagatgtggcggcccgtctaccggcctctcatccatgtgcgggattacgactag

SEQ ID NO: 77895 - protein, 629 aa, Yarrowia lipolytica CLIB122
MLRLRTMRPTQTSVRAALGPTAAARNMSSSSPSSFEYSSYVKGTREIGHRKAPTTRLSVEGPIYVGFDGIRLLNLPHLNKGSGFPLNERREFRLSGLLPSAEATLEEQVDRAYQQFKKCGTPLAKNGFCTSLKFQNEVLYYALLLKHVKEVFPIIYTPTQGEAIEQYSRLFRRPEGCFLDITSPYDVEERLGAFGDHDDIDYIVVTDSEGILGIGDQGVGGIGISIAKLALMTLCAGVNPSRVIPVVLDTGTNNQELLHDPLYLGRRMPRVRGKQYDDFIDNFVQSARRLYPKAVIHFEDFGLANAHKILDKYRPEIPCFNDDIQGTGAVTLASITAALKVLGKNITDTRILVYGAGSAGMGIAEQVYDNLVAQGLDDKTARQNIFLMDRPGLLTTALTDEQMSDVQKPFAKDKANYEGVDTKTLEHVVAAVKPHILIGCSTQPGAFNEKVVKEMLKHTPRPIILPLSNPTRLHEAVPADLYKWTDGKALVATGSPFDPVNGKETSENNNCFVFPGIGLGAILSRSKLITNTMIAAAIECLAEQAPILKNHDEGVLPDVALIQIISARVATAVVLQAKAEGLATVEEELKPGTKEHVQIPDNFDECLAWVETQMWRPVYRPLIHVRDYD

SEQ ID NO: 77896 - DNA, 1746 bp, Aspergillus nidulans FGSC A4
  CDS (1)..(1746)
atgagcctcgcccgcttcaagcacctcccgcgcgccacccagggacctatcaaatgcccctacaagggcgctgccctgctcggcaacgccaactacaacaagggctctgcccattccgagcgtgagcggcgcgaattcaacttgcacggactactgccacccaatatccagacattggacgaacaggtggagcgggcataccagcagtacaaaagccgtcccgatgacctggcgaaaaacaccttcatggcgagcatgaagtcgcaaaaccaggtgctttactaccggctgctgcagactcatctcaaggagatgttcagcgtcatctacacgccgacggaggcggatgcgatccagaactactcacggctgttccggaagcctgaagggtgctatctgagtatccgtgaccatggtgagaaagagatcgatgagtgtttcgctaacttcagcggtggggatgacgtggattatatagttgttagcgacggggagcagtggcagatcctcgggataggcgatcagggcgtcggggcgatcctgatatctgtcgcgaagctggtcatcaccactgcctgtgctggcatccatccatcaagacagctccctgtagtgttggattgtgggacgaataatgaggagctactcaacgataagctctacttgggtctgcggcaacggcgcgcacaaggggaggaatacgataagtttgtggataaatttgtgaggatggccaggaagaggtttcccaatgcctatatccacttatgcagtgaggactttggtctccaaaacgccaaacgtatccttgacagataccgctcacaattaccttgcttcaacgacgatattcagggcaccggttgtgtcacgctggctgccctcatggccggactccatgttagcaatgtcaagctaaaagatgtcagagtcgtgtgctatggctctggatctgcaggcactggcatcgcagatcagattagcgatgccattgccaccgaggcaggtttctctaaaagtgatgccttgaagcagatttggtgcattgataaacaaggcctactgctgaaatctcaaggcgacgcactcacagccagccagaaatatttcgcaaaagaagacaatgaatggcctgagggtcaagatattgatctttattccgtcatcaagcacgtcaagccccatgttctgatcgggacatccaccaaacctgggtcttttacagaggagaccatccgcgagatggcaaaacatgtcgaccgcccaataatcttccccctcagtaacccgacgagattgcatgaggctcagccgcaggatatcaccaagtggacggacgggaaagccctgattgcgactggcagtcctttcccgcctgtagagtacaacggcaccaagacggaaatcgtatcagccgaatgcaataactcaaccgccttccccggtattgggctcggagctgtcctctcacgagccagccgcctatctgagaagatggtcgtcgcagcttcaaaggcactagcagcaaaggctccagcgctggaagatccaaacaagccacttcttccagacgttgagaatgtcagagagttgagtttgaatgtcgccaaggcagttattcagacggcagtgaaggaaggattggcccaggaagagggcattccagaggacgagaaggatttggaagactggatacgggctcagatgtgggaggcaacctatcgggatttggagaaggctgattaa

SEQ ID NO: 77897 - protein, 581 aa, Aspergillus nidulans FGSC A4
MSLARFKHLPRATQGPIKCPYKGAALLGNANYNKGSAHSERERREFNLHGLLPPNIQTLDEQVERAYQQYKSRPDDLAKNTFMASMKSQNQVLYYRLLQTHLKEMFSVIYTPTEADAIQNYSRLFRKPEGCYLSIRDHGEKEIDECFANFSGGDDVDYIVVSDGEQWQILGIGDQGVGAILISVAKLVITTACAGIHPSRQLPVVLDCGTNNEELLNDKLYLGLRQRRAQGEEYDKFVDKFVRMARKRFPNAYIHLCSEDFGLQNAKRILDRYRSQLPCFNDDIQGTGCVTLAALMAGLHVSNVKLKDVRVVCYGSGSAGTGIADQISDAIATEAGFSKSDALKQIWCIDKQGLLLKSQGDALTASQKYFAKEDNEWPEGQDIDLYSVIKHVKPHVLIGTSTKPGSFTEETIREMAKHVDRPIIFPLSNPTRLHEAQPQDITKWTDGKALIATGSPFPPVEYNGTKTEIVSAECNNSTAFPGIGLGAVLSRASRLSEKMVVAASKALAAKAPALEDPNKPLLPDVENVRELSLNVAKAVIQTAVKEGLAQEEGIPEDEKDLEDWIRAQMWEATYRDLEKAD

SEQ ID NO: 77898 - DNA, 1893 bp, Candida albicans SC5314
  CDS (1)..(1893): transl_table=12
atgttaaaggttgccagactccagatccgatttaattcaagcacagccgcctcagcagcagcagtagcagcaaagaccgctgaagtgcgtactcgtactgtcaaaaccccagttggtattaaagccgcaattgaatcattaaaaccaaaggccacgagattgtcaatggatggtccagttgagtgtgcactttctgggttttccttgttgaattcaccacaattcaataaaggatcagcattttccaaagaagaaagagaaagttttgatttaactggacttttaccttcacaagtcaattctttagatgaacaagtggaaagagcatatcgacaattttcctatttgaaaactcccttagccaagaatgatttttgtacatctatgagattacaaaataaagtgttgtattatgaattggtgagacgtcatattagagaaatgttaccaatcatttatactcctactgaaggtgacgcaattgctagttattccgacagattcagaaaaccagaaggttgtttcttggacattaatgatcctgacggcattgataaacgtttgtctgcatatggagaagataaagatattgattatattgttgtttccgatggtgaaggtattttgggtattggtgatcaaggtgtaggtgccattagaattgctatagccaaattgggtcttatgactttatgtggaggtattcatcctgcaagagttttaccaattgctttagatgttggtacaaacaatgacagattactaaatgatgaattatacatgggtaacaaattcccaagagttagagatgaaaagtattgggactttgttgataaagtgatccaagcaatcaaaaaaagattccccagttcagttttgcattatgaagattttggtgtgtcaactggtagagacttgttatataagtacagagaagaattgccttcctttaacgatgatattcaaggaaccggggctgtggttatggcatcaatcactgctgcattgaaattttcaaaacgtgacttgaaagatattcaagttttggtatatggagctggatctgctggtttgggtattgctgaccagatcaccaatcatttagtgtcacatggtgccactgaggaacaagcaagagcaagaatccattgtatggatcgttatggtttgataactaacgaatccactaatgcaagtccagcacagcttaaatatgctgatcctgcctcagaatgggacggtgtcgatactaagagcttattggcatgtgtcaacaagattaaaccaacggtgttagttggatgttctacccagccaggtgcttttactgaagaaatcgtcagggaaatgtataagcacaacccacaaccaattattttccctttatccaacccaaccagattacatgaagctgttccttctgatttgatgaaatggacagataacaatgcattgattgcaactggatctccatttgaacccgtggatggctattatatttctgaaaacaacaattgtttcacattcccaggtattggattaggtgctgttttatcgagatgtacgacaatttctgataccatgatttcagccgccgttgatcgattagcttccatgtctcctaaaatggagaatcctaagaatggattgttacctagattagaagaaattgatgaagtgagtgcccatgttgctactgcagttattttacaatccttgaaggaaggtactgctagagtggagagtgaagaaaaaccagatggtggatttgttgaagtgcctagagactatgaaggttgtcttaaatgggtacaatcacaaatgtggaaaccagtttatagaccatacgttaaggtggaatacgtttccgaaattcacacttatcagtattag

SEQ ID NO: 77899 - protein, 630 aa, Candida albicans SC5314
MLKVARLQIRFNSSTAASAAAVAAKTAEVRTRTVKTPVGIKAAIESLKPKATRLSMDGPVECALSGFSLLNSPQFNKGSAFSKEERESFDLTGLLPSQVNSLDEQVERAYRQFSYLKTPLAKNDFCTSMRLQNKVLYYELVRRHIREMLPIIYTPTEGDAIASYSDRFRKPEGCFLDINDPDGIDKRLSAYGEDKDIDYIVVSDGEGILGIGDQGVGAIRIAIAKLGLMTLCGGIHPARVLPIALDVGTNNDRLLNDELYMGNKFPRVRDEKYWDFVDKVIQAIKKRFPSSVLHYEDFGVSTGRDLLYKYREELPSFNDDIQGTGAVVMASITAALKFSKRDLKDIQVLVYGAGSAGLGIADQITNHLVSHGATEEQARARIHCMDRYGLITNESTNASPAQLKYADPASEWDGVDTKSLLACVNKIKPTVLVGCSTQPGAFTEEIVREMYKHNPQPIIFPLSNPTRLHEAVPSDLMKWTDNNALIATGSPFEPVDGYYISENNNCFTFPGIGLGAVLSRCTTISDTMISAAVDRLASMSPKMENPKNGLLPRLEEIDEVSAHVATAVILQSLKEGTARVESEEKPDGGFVEVPRDYEGCLKWVQSQMWKPVYRPYVKVEYVSEIHTYQY

SEQ ID NO: 77900 - DNA, 1746 bp, Strongylocentrotus purpuratus; identical to SEQ ID NO: 5687
  CDS (1)..(1746)

SEQ ID NO: 77901 - protein, 581 aa, Strongylocentrotus purpuratus; identical to SEQ ID NO: 5688

SEQ ID NO: 77902 - DNA, 1863 bp, Tribolium castaneum
  CDS (1)..(1863)
atgttcgctctcattccccggtcccttgtaacgaacgtgtcatcacgatcggcggttagtttatcgggacagaaagcaaccgttcaagaagcagtcaaatggctcatagattcgaaaaaagattaccacactgtgtcaggagatacaatcacgccttcaaaagtcatgggtatcgaccatcttcgtgatcctcgtctcaacaagggtctggctttcactttggaagaacgtcaagctttgggtatccatggtctacaacctgcccgatttaaaacacaagaagaacaactggaattatgccgaatttctgtgatgcgttatcaggagaatctcaacaaatatctgtatatgacggaattgcatgatcgtaatgagaaattatttttccgtttgttatccgaaaatatcgaaatgttgatgccgattgtttacacacctacagttggtttagcctgtcagaggtttggattgatctatcggagaccaagaggactctttatcacaatcaatgacagaggacatgtctacgacgttctgaaaaactggccagaatcagacgtccgagcaatcgtcgtaacagacggtgaacgtatattgggtttgggcgatttaggagcatgtggtatgggtattcctgttggaaaactcgctctatacactgcacttgccggcatcaaaccgcatcattgtcttccgatcgtcctagatgtcggaaccaacaaccaaacactgttggaagaccctctctatgtaggtctacgccagaaaagactttcaggacctgaatacgactcatttgttgatgaattcatgcaagctgcagtcaagcgttacggtcaaaacgtcctcatccaattcgaagatttcggaaatcacaacgctttccgttatttggataaataccgaggtgtctattgcaccttcaatgacgatattcagggtactgcaggtgttgctgtttcgggccttttggcttctgcaagagttaccggcaagaaaatatccgaaaataagtttctgtttttgggagctggtgaagctgccattggtattgctgacctgtgtgttaaagcaatgcaagtcgaaggattgtcactggaagaagcgagaggaaaaatctggatgatggatattgatggtttattggctaaaggacgtccggaagggaaactagacggacataaggcgtactatgcgaaagaacataaaccagtcaaagatttggcttcagttgtaaatgaagttaaaccatcggttttaattggtgcgtctgctgcaagtggcgcttttacgcctgaaattttgaaaagtatggcgtcgtttaacgatagaccgattatttttgccttgagtaatcctaccgacagggcggagtgtacagcagaacaggcctataataatactgatggtcgttgcatcttctcaagcggttctccgttccctcctgtcacctacaaaggtaccactttttacccaggtcaaggcaacaacgcttacattttccctggagttgctttgggtgttatcttagccagaattcaccacattaaggaagaattgttcttattggctgctcaagccgttgctgatcatgtgaacgactccgatatccaaaagggtagtttatatccacctctcagttgcatcagggaatgttctgtcgatattgctacgagaattttagattactcctaccaagaaggaattgcaaccgtatatccggaaccacaggacaaaaaagcatacgttatgcaacacctttataattacaattacgaatcggcattgcctactacatggccatggcctaatgcacccgaaattaagacaaggcccatcgaaccgacaaagttgatggcttaa

SEQ ID NO: 77903 - protein, 620 aa, Tribolium castaneum
MFALIPRSLVTNVSSRSAVSLSGQKATVQEAVKWLIDSKKDYHTVSGDTITPSKVMGIDHLRDPRLNKGLAFTLEERQALGIHGLQPARFKTQEEQLELCRISVMRYQENLNKYLYMTELHDRNEKLFFRLLSENIEMLMPIVYTPTVGLACQRFGLIYRRPRGLFITINDRGHVYDVLKNWPESDVRAIVVTDGERILGLGDLGACGMGIPVGKLALYTALAGIKPHHCLPIVLDVGTNNQTLLEDPLYVGLRQKRLSGPEYDSFVDEFMQAAVKRYGQNVLIQFEDFGNHNAFRYLDKYRGVYCTFNDDIQGTAGVAVSGLLASARVTGKKISENKFLFLGAGEAAIGIADLCVKAMQVEGLSLEEARGKIWMMDIDGLLAKGRPEGKLDGHKAYYAKEHKPVKDLASVVNEVKPSVLIGASAASGAFTPEILKSMASFNDRPIIFALSNPTDRAECTAEQAYNNTDGRCIFSSGSPFPPVTYKGTTFYPGQGNNAYIFPGVALGVILARIHHIKEELFLLAAQAVADHVNDSDIQKGSLYPPLSCIRECSVDIATRILDYSYQEGIATVYPEPQDKKAYVMQHLYNYNYESALPTTWPWPNAPEIKTRPIEPTKLMA

SEQ ID NO: 77904 - DNA, 1827 bp, Tribolium castaneum
  CDS (1)..(1827)
atgcttgattatttcacaaaactggttggaaacaattcaggagaaaacggacgactactgaacaccggcaatcagaaagtaaacgactcgtcgaacgtgcacacagtgaaaatgtcgacgtacgaaagagatcgactgggccaacgaggagccggagacaatgctgctacaagttcaacgagtggtctcgatcgactaaagaatgccagcttaaataagggaatggcttttactttggaggaacgacaaattttgggcatccacggttttctccctccacgagtaaaaacacaagaagaacaagtagaacattgtcgtatgtgtctggagcgtcttgataatagtctcaacaaatacctttacctaatgaatctccttgatcgcaacgagaaattgttttatcgtctcgttggagaaaatgtccaagatataatgcctctgatctacactcctactgtaggtgaagcatgccaaaaattcggtttggtttatcggcgacctagaggcttgttcataaccattcacgataaaggacatgtttatgatattttgaagaactggcccgaatccgacatcagggtaatcgtcgtaacagacggcgaacgcatcctgggtctgggtgacttgggtgcctgtggtatgggcatacccatcggcaaactctccctctacacggctttagccggaattaaaccgcaccaatgtctgccaataactctagatgttggaacaaacaccgaaaaaatgctcaacgatccactttacatcggcctaaaacaaaaccgtgtcagaggccaacaatacgacgatttcatcgaagaattcatgcaatcagttgtaagacgttggggccaaaacactctcattcaatttgaagattttggaaacgcaaatgcgttccgtcttttaggcaaatacagggatagttattgcaccttcaatgatgatattcaaggcactgcaagtgttgcagttgccggaattttggcatcacttcgtgccacgaaaactcgattgtctgacaatactttggtgtttcaaggagctggtgaagcttcgcttggaattgctgcactttgtgtgatggcaatgaaagccgaaggaacaccggaacatgaagcacggaaacgaatctggatggttgattccaaaggtttgattgttaaaaatcgaccagacgggggaatcaccgaacataaagaacccttcgctcaggatcatgcaccaattaaaacacttgccgaagttgtgcaacaagtcaaaccgaccattttgattggagctgcggcagttggcggtgcgttcacgccagagattttgagagagatggctaagaattgtaaaaaacccgtgatttttgcattgagtaatccgacttcgaaggctgaatgtacggctgaacaagcgtatgaaaatacagatgggacttgtatttttgcaagtggaagtccctttgatcctgttacttataagggacgcacttattatccaggacaagggaataattcgtatattttcccgggtgttggtttggctgcgatttgtgtgggaatgcgtacgattggagaagatgtatttttgatttctgctgagaccctcgctaatttggtatcagaggctgatttagagaaaggaagtctctacccacctctgtctacaattcaggaagtgtctgtgaaaattgcaacacgtcttggagaatatgcttacaagaaaggttttgcaacggtttgcccacaacctgacgacatggaagctttcataagggcacaaatgtacaacacagactacatccctgcagtcccttgcacttatcccttcccctaa

SEQ ID NO: 77905 - protein, 608 aa, Tribolium castaneum
MLDYFTKLVGNNSGENGRLLNTGNQKVNDSSNVHTVKMSTYERDRLGQRGAGDNAATSSTSGLDRLKNASLNKGMAFTLEERQILGIHGFLPPRVKTQEEQVEHCRMCLERLDNSLNKYLYLMNLLDRNEKLFYRLVGENVQDIMPLIYTPTVGEACQKFGLVYRRPRGLFITIHDKGHVYDILKNWPESDIRVIVVTDGERILGLGDLGACGMGIPIGKLSLYTALAGIKPHQCLPITLDVGTNTEKMLNDPLYIGLKQNRVRGQQYDDFIEEFMQSVVRRWGQNTLIQFEDFGNANAFRLLGKYRDSYCTFNDDIQGTASVAVAGILASLRATKTRLSDNTLVFQGAGEASLGIAALCVMAMKAEGTPEHEARKRIWMVDSKGLIVKNRPDGGITEHKEPFAQDHAPIKTLAEVVQQVKPTILIGAAAVGGAFTPEILREMAKNCKKPVIFALSNPTSKAECTAEQAYENTDGTCIFASGSPFDPVTYKGRTYYPGQGNNSYIFPGVGLAAICVGMRTIGEDVFLISAETLANLVSEADLEKGSLYPPLSTIQEVSVKIATRLGEYAYKKGFATVCPQPDDMEAFIRAQMYNTDYIPAVPCTYPFP

SEQ ID NO: 77906 - DNA, 1644 bp, Listeria monocytogenes str. 4b F2365
  CDS (1)..(1644): transl_table=11
atgactgtaaaaccaggttttgactatatgaataatccattattaaataaaggaaccgctttttcaaaagaagaaagagcaagctatcaattggacggattactgccaccaattatcgaaacaattgaacaacaagccgtgcgcatcgagacgcaaatagaaaatttagaaacacctttacataaacatcagcttttaacaaacttatataatgaaaatcgcaccctctactattatgtcgtaacaaaaaacgtgactgactatttgccaattatttatacaccaactatcggcgacgcagttatccagtaccataaagaatacactgcgccggatgaagccttatttattgatgcctttgcacccgaaaaattaagcgcatcaataaaaaactatgcaaaaaataatccgaatattgatatgattgttataacagatggtgagggtgtgcttggaattggcgactggggtgtgaatggtgtgaaaatcgctgttggaaaattagcggtttatacggttgcagctggacttgcaccagaccgtgttctgccagttgttattgacgccggaacgaacaacgaaacacttcttaacgatccactatatctaggaaataaacgcccccgcctttcagaaagtgaatatgacgcttttattgcttcttttgttaatgttatgaaagaagttttcccgaaagccatccttcactgggaagactttggacgcgcgaatgcaagtcgtattctgcataattaccgcgataaaatttgtacatttaacgatgatattcaaggtacaggggccatggtggttgctgctgttcttgcgacgatccaagtttccaaaataccattaagcgagcaaaagattattattttcggggctggaactgctggaatcggtatcgctgatcaacttagtgctcagtggatgcgtgaaactggtcttccttttgaatcggcgaaaaagcatttttatttagtcgaccgaaatggtttagtgcttgataatatgaccgacttaactaccgggcaaaagaaatatgcacatccgtcgactgagtggtctaacgtgcccacagatacgttagaaaacttaatggaagcagttcatccaacaatgttaatcggctgttctggtgtcaccggtgcctttaaagagagcatcgtcaaaaaaatgacccagtatacagaacgaccagcgattttgccactttctaatccaacaaaattagccgaagcaactgcttctgatttaattcagtggacagatggaaaagcgcttattgttacaggtagcccttccaaaccagtagaatatcaacatactacttatgaaatcggtcaagcgaacaatgcacttctctatccggggctcggactaggtgctcttgtcactcgtgcgaaatatattacagatggtatgctcgctgctgcttccatggctgtcgctgagcagatttcaccaaacaaagcaggcgcagcccttctaccacatgtgcgcacccttcgcgaaacatcgcgtgcagtagccatcgctgtcgctaaccaagctattaaagaaaacatccatcaagtcgaattaacgaatgtcaccgaagctatcgagcgggaaatgtggcaacctatttataaaggagtttag

SEQ ID NO: 77907 - protein, 547 aa, Listeria monocytogenes str. 4b F2365
MTVKPGFDYMNNPLLNKGTAFSKEERASYQLDGLLPPIIETIEQQAVRIETQIENLETPLHKHQLLTNLYNENRTLYYYVVTKNVTDYLPIIYTPTIGDAVIQYHKEYTAPDEALFIDAFAPEKLSASIKNYAKNNPNIDMIVITDGEGVLGIGDWGVNGVKIAVGKLAVYTVAAGLAPDRVLPVVIDAGTNNETLLNDPLYLGNKRPRLSESEYDAFIASFVNVMKEVFPKAILHWEDFGRANASRILHNYRDKICTFNDDIQGTGAMVVAAVLATIQVSKIPLSEQKIIIFGAGTAGIGIADQLSAQWMRETGLPFESAKKHFYLVDRNGLVLDNMTDLTTGQKKYAHPSTEWSNVPTDTLENLMEAVHPTMLIGCSGVTGAFKESIVKKMTQYTERPAILPLSNPTKLAEATASDLIQWTDGKALIVTGSPSKPVEYQHTTYEIGQANNALLYPGLGLGALVTRAKYITDGMLAAASMAVAEQISPNKAGAALLPHVRTLRETSRAVAIAVANQAIKENIHQVELTNVTEAIEREMWQPIYKGV

SEQ ID NO: 77908 - DNA, 1734 bp, Bacillus thuringiensis serovar konkukian str. 97-27
  CDS (1)..(1734): transl_table=11
atgaatagaggtagggatgttatgagcaagtttacagtagcttctaatggttcattagaaacgacattaagaggagtagaagtattatcaacaccacttttaaataaaggggtcgctttcacgcaagaagaaagagaagaattaggtttaaaagggttattaccgccagcagttttaacattggaagaacaagcacgccgagcatacgaacaattttgttctcagccggatgatttattaaagaatgtatacttaacagcgttacatgatcgaaatgaagtgttattttatcgcattttaacagatcatttacgcgaaatgttaccaatcgtatatacaccaactgttggtgtagcaatccaaagatatagtcatgaataccgtaaaccacgtggtgtgtatttatcaattaacgatccgtcaggtattgaagaagcattcgccaatatcggtgcaacagcagaaaatattgatttagtcgttgtaacagatggagaaggtatattaggaattggtgactggggcgttggtggtattaacatcgcaatcggaaaattagctgtttatacagccgcagttggaatcgatcctagccgcgtattaccggtaattttagatgtaggtacaaatcgtgaagaattattagacaatccattttatattggaaatcgtcatcctcgtataacaggtgaagcttacgatgaatttattgatacatttgtacaagcggtaaataagcaattcccgaaagcacttttacattgggaagacttcagttctcgtaatgcacgaaaaattttagataaatatcgtcatgatatttgtacgtttaatgatgatattcaaggtacaggtgcagtttcgcttgcggctgtattatcggcagtaaaagcttctggtgtaccgctaagtgaacaccgcgttgttgtgtttggtgctggtacggctggaatcggtatcgcagatcaagttagagatgcgatggtccgcgtaggcgtatcagaagaagaatcatataagcgtttctggtgtattgatcgtaatgggttagttacagataatatggaagatcttcttgatttccaaatgccgtatgcaagaaaagaagcggaagtaagtgagtggaaagaaaatggtgtgattggacttgctgaagttgtgaaacaagtgaaaccgacaattttaatcggtacatcaactgttgctggtgcatttaaagaagaaattattaaagaaatggcttctcacgtagaaagaccaatcattttaccgatgtcgaatccgacgccacttgctgaagcgaaaccagccgatttaatcaagtggacagaaggaagagcactagttgcaacaggaagtccatttgaaccagttacatataacggtgtaacgtatgtaattgggcaatcaaataatgcacttattttcccaggtcttggtcttggaacaattgtcgtacgtgcaagcgtcatgacagatggaatgttcgcagcagcagctgaagcagttgcaagtatggtggacacaagtcagccaggagcacctattttgccagaagttgaagagttacgtaatatctcggaaatggtagcaattgaagtagcgaaagttgctgttgcagaaggtgttgctagagagaacttaagtgataacgatattaagattgcagtgaaagaagcaatctgggagcctgagtatcgccaaataaaagcggtagaaaaggttacaatatag

SEQ ID NO: 77909 - protein, 577 aa, Bacillus thuringiensis serovar konkukian str. 97-27
MNRGRDVMSKFTVASNGSLETTLRGVEVLSTPLLNKGVAFTQEEREELGLKGLLPPAVLTLEEQARRAYEQFCSQPDDLLKNVYLTALHDRNEVLFYRILTDHLREMLPIVYTPTVGVAIQRYSHEYRKPRGVYLSINDPSGIEEAFANIGATAENIDLVVVTDGEGILGIGDWGVGGINIAIGKLAVYTAAVGIDPSRVLPVILDVGTNREELLDNPFYIGNRHPRITGEAYDEFIDTFVQAVNKQFPKALLHWEDFSSRNARKILDKYRHDICTFNDDIQGTGAVSLAAVLSAVKASGVPLSEHRVVVFGAGTAGIGIADQVRDAMVRVGVSEEESYKRFWCIDRNGLVTDNMEDLLDFQMPYARKEAEVSEWKENGVIGLAEVVKQVKPTILIGTSTVAGAFKEEIIKEMASHVERPIILPMSNPTPLAEAKPADLIKWTEGRALVATGSPFEPVTYNGVTYVIGQSNNALIFPGLGLGTIVVRASVMTDGMFAAAAEAVASMVDTSQPGAPILPEVEELRNISEMVAIEVAKVAVAEGVARENLSDNDIKIAVKEAIWEPEYRQIKAVEKVTI

SEQ ID NO: 77910 - DNA, 1635 bp, Staphylococcus aureus subsp. aureus MRSA252
  CDS (1)..(1635): transl_table=11
atgaaaggcattgaattacttaacaatccatttttaaacaaaggtacagcttttactaacgaagaaagaaaacagttagggcttgaaggattattacctgcgaatgttcgaactttagaacaacaagcagaacaatgttatgaacaattcaaggcgaaacaaaccgattttgagaaacgtttatttttaatggcaatttttaatcgtaatcgtacattgttttacaaattgacttctgagcatttagttgaatttatgccaattatttatgaccctgttattgcacaatcgattgaacaatataatgagaatttcagtagaccccaagatgcagtatttttatctgttgatagacaagaccaaattgaacaagaattgcgcaacgttgcaaatggcagagatattcgattaatcgtagtaacagatgcggaaggtatattaggtatcggcgattggggcgttgatggtgtagatattgcgataggaaaattaatagtatatacagcggcagctggaataaatcccgcacaagtattacctgtatctttagatgtaggtactaataatgaacaattactgaatgatgaactttatttaggaaatcgtcataaacgtgtcgatgatgagacatattacacatttgtagataaatttgtgagtgcagtgcgtaaagaatatcctaatgcactattacattgggaagattttggtagagggcatgctaaaaatattttagataaatatgaagatactttaccaacatttaatgatgatattcaaggtacaggtatagttacattagccggcgtactaggtgcattaaatatttctaaagtagactatacgaatcagacgttcttagtttatggtggtggtacagctggtatgggtattaccaatattttaaaagatgaactaattaaacaggatgtttcagaagataaagcaaatcagcatttctatattatggataaacaaggattgttgtttgatgatatggatgacttaactgaagctcaacaagtatttgctaaaaataggaatgaattttcaaatacagtaaactggaaaaatttaaaagaagtaattgaaaatattaagcctactgttttaatcggtacatcaactcaaacaggtgcatttacagaagatgcagtaaaagagatgttaaaacatacagaacgtccaatgattttcccattgtctaatcctacaaaattagcagaagcaactgcacaagatttattaaaatggactaatggaaaagcattaattggaactggtatcccatataatgacattgaatacaatggtgtgaattacagtattggtcaagcaaataatgcattgatgtatcctggtttaggtttgggtcttattgcgtcaaaagcgaagaaagtaaatcaacagattctatcagctgcgagtcatgcacttggtggcatggtcaatccagatgaaccaggagctgcagtcttaccacctgttgagaaaatacatcaatgttctcgtgccatagccaaagcggttgcacaaagtgtcattgatcaaggattaaacgctgaaactattgatgatattgatgaagcaattgaagctgaaatttggtatcctgaatacaaatcatacatttaa

SEQ ID NO: 77911 - protein, 544 aa, Staphylococcus aureus subsp. aureus MRSA252
MKGIELLNNPFLNKGTAFTNEERKQLGLEGLLPANVRTLEQQAEQCYEQFKAKQTDFEKRLFLMAIFNRNRTLFYKLTSEHLVEFMPIIYDPVIAQSIEQYNENFSRPQDAVFLSVDRQDQIEQELRNVANGRDIRLIVVTDAEGILGIGDWGVDGVDIAIGKLIVYTAAAGINPAQVLPVSLDVGTNNEQLLNDELYLGNRHKRVDDETYYTFVDKFVSAVRKEYPNALLHWEDFGRGHAKNILDKYEDTLPTFNDDIQGTGIVTLAGVLGALNISKVDYTNQTFLVYGGGTAGMGITNILKDELIKQDVSEDKANQHFYIMDKQGLLFDDMDDLTEAQQVFAKNRNEFSNTVNWKNLKEVIENIKPTVLIGTSTQTGAFTEDAVKEMLKHTERPMIFPLSNPTKLAEATAQDLLKWTNGKALIGTGIPYNDIEYNGVNYSIGQANNALMYPGLGLGLIASKAKKVNQQILSAASHALGGMVNPDEPGAAVLPPVEKIHQCSRAIAKAVAQSVIDQGLNAETIDDIDEAIEAEIWYPEYKSYI

SEQ ID NO: 77912 - DNA, 1647 bp, Propionibacterium acnes KPA171202
  CDS (1)..(1647): transl_table=11
gtgtcacgaaaacctgagcccatgaccaacccgatcacgaatcgggggacggcctttacccgagctgaacggttggagcacggcatgatcggacgccttccggcggccgtcgaaaccttggagcaacaggcccaacgctgttaccgccagcttcagggattgggctgcaatattgatcgctacgtcttcctggaggagctccaaaaccgtaacgagaccctctactacaaactcctcgtcgatcacctcgtcgagctgttgccggtaatctatgatcccaccgtcggtgaggctattaagaagtggagccacgcctaccgacgctcccgggcggtctatttgtcagtagaccatatcgaggacgtccgcccctccttcgagactctcgagctggggcctgatgacgtcgacttgctcgtcgtttccgattccgaacaaatcctgggaattggagactggggcgtcaacggaaccgatatctccatcggcaagctcgccgtctacactgcggccgccggtattcggccggaacgcactatcgccgtcaatctggacgtcggcaccgacaacgcatatttgctcaacgacccgtcttatcttggcaatcgtcacgccagggtgcgcggggaacgctacgacgagttgatccacgagtacctcgaagttgcaagcgagctgtacccacacgcactgttacatttcgaggacttcggtgcttctaatgctcgccgcattctggtacagaatgccgcaaaccaccgcatctttaatgacgacatgcaaggcacagcagccatcgtgttggcagccgtcatctccgggcttaaggtgacccggcaatccttcgctgatcagcgcctgatcgtatacggggcaggtaccgctggcaccggaattgctgaccaaatccgcgcagccatgatcagtgacgggttaagccagcaggaggcagtcgatcggatttggctcgtcgaccgcaatggcctggtcactgacgatatgaagggcctacccgactaccaagagccctacgctaagccagttgagaaaactcgtcattgggctcacacgaatcgacacattggtcttaccgagacgatccgacgaattcacccgacgatcctcatcgggacctccactgaccacgacgcttttacccagcaggtcgtcgaggaaatgtgccgagaagtcgagcgccccatcatcatgccgctgtcgaatccgactgagaagatcgaggcgatgcctgccgacgttattgcgtggtcaaaggggaaagctctggtttccgttggaattccggtagcgcccttccattatgaaggcacccgttacgagattgggcagggcaataacgccctcctctacccgggcctaggactaggagttatcgtctcgggagccgaacgggtgagcgcccgcatgatccgtgccgccgccgaagcggtggcctcccaagttgacccgcgtccggctgggtcatccctgctaccggcggtggagaacctacgtgcctcctcggccaccgttgcagtggcggtcgtgcaagctgccatcgaggagggccttgccaccaaaaagcccagcaacgtcgtccaggcagtgcaagatgccatgtggtggccgcattacccgccggtgggctga

SEQ ID NO: 77913 - protein, 548 aa, Propionibacterium acnes KPA171202
MSRKPEPMTNPITNRGTAFTRAERLEHGMIGRLPAAVETLEQQAQRCYRQLQGLGCNIDRYVFLEELQNRNETLYYKLLVDHLVELLPVIYDPTVGEAIKKWSHAYRRSRAVYLSVDHIEDVRPSFETLELGPDDVDLLVVSDSEQILGIGDWGVNGTDISIGKLAVYTAAAGIRPERTIAVNLDVGTDNAYLLNDPSYLGNRHARVRGERYDELIHEYLEVASELYPHALLHFEDFGASNARRILVQNAANHRIFNDDMQGTAAIVLAAVISGLKVTRQSFADQRLIVYGAGTAGTGIADQIRAAMISDGLSQQEAVDRIWLVDRNGLVTDDMKGLPDYQEPYAKPVEKTRHWAHTNRHIGLTETIRRIHPTILIGTSTDHDAFTQQVVEEMCREVERPIIMPLSNPTEKIEAMPADVIAWSKGKALVSVGIPVAPFHYEGTRYEIGQGNNALLYPGLGLGVIVSGAERVSARMIRAAAEAVASQVDPRPAGSSLLPAVENLRASSATVAVAVVQAAIEEGLATKKPSNVVQAVQDAMWWPHYPPVG

SEQ ID NO: 77914 - DNA, 1707 bp, Propionibacterium acnes KPA171202
  CDS (1)..(1707): transl_table=11
atgtcagttccctttcagtatgcgcatgatgacgacggaggccttctaaggattgcggcccgtggccaggaggtgttgacgaaccctctggccaatcggggcactgccttcactatcgagcagcgaaaggcgcttggtctcaccggcctgctgccgtcgggtgtcatgacgatcactgatcagctcaagcgggtctacgcacagtattcggcgcagcctgatgacctggccaagtacctgtacctcaaccacatgcatgaccgcaatgaggtgctgtatttccgcctccttgccgagcatattgaggagatgcttccaatcgtttacacgccgaccatcggcaaagcgattgaggagtacagccactggtacgaccgtccgcgcggcatttacctgtccatcgatgatccggaagacatggagcaggctctcgcacagttgggtcatggccctgacgacgtcgacctcatcgtggccaccgatgcggagggcatcctgggcatcggcgaccaaggtgtcggtggcgtcgcgatcacggtaggaaagctagccgtatacaccgcagctgcagggattcaccctcaccgcgtgctcccggtcattctcgacgtcggtaccgacaatatggaacgtcttaacgacgatggctaccttggggtgcgtcacccccgcgtgcgcggcgagcgttacgatgaattcgtccagcaatatgtcgagaccgctcatcggatgttcccccacgccctactgcactgggaggattttgcggccggcaacgccacccggattctcaacaaataccgcgacgactactgcacgtttaatgacgacatccagggcaccgcggctgtcgtcgtcgcggcagtgctgagtgccgttaagtcgtcggggatcccgctgaatgatcatcgcattgtcatccatggggcgggctcggctggtaccgggattgccaacctgctggtgcagcttatggtgagccagggcgctgacgaaaagacggctcgctctcatttctgggggcttggatcccatggcttgttgcgcgaaggtttacgtctgcgcgactttcagcaacccttcgcgcgcaataaagaggagttggaaggctggaccctcgatagcccagaccagtacacgctcggtgacgtggtacgaaacgtccacccgacgatccttatcggctgctccgcccagcccggtgccttcaccgaggacatcgtcaagacgatggctgcccagtgtgagcgtccggtcatcatgccactgtcgaacccgacccgtaaggctgaagccctgccgtccgacgtactcacgtggactgacgggcgtgctttggtcgctaccggttcgccgttcaagccagtcatgatcaatggcgtgacctatcagatcgcgcaggcaaataacgctctagtgttcccaggaattggtttgggaactatcgctgttcgggcgtcccgggtcactagcggcatgatcgcggccgctgccgaggcggtggcgatgcatatcgataaccgcgttgtgggagcttcgctgttgccgtcaatcaagagcctaaggccactgtcggcatctgtggccattgctgtcgcccagcaggcgatggaggagggcgtggcaaccgaggtcacagacaatccagttgagaaggtgttctcggcgatgtggcagccgcgttacccgcgcatcgcggttgtctga

SEQ ID NO: 77915 - protein, 568 aa, Propionibacterium acnes KPA171202
MSVPFQYAHDDDGGLLRIAARGQEVLTNPLANRGTAFTIEQRKALGLTGLLPSGVMTITDQLKRVYAQYSAQPDDLAKYLYLNHMHDRNEVLYFRLLAEHIEEMLPIVYTPTIGKAIEEYSHWYDRPRGIYLSIDDPEDMEQALAQLGHGPDDVDLIVATDAEGILGIGDQGVGGVAITVGKLAVYTAAAGIHPHRVLPVILDVGTDNMERLNDDGYLGVRHPRVRGERYDEFVQQYVETAHRMFPHALLHWEDFAAGNATRILNKYRDDYCTFNDDIQGTAAVVVAAVLSAVKSSGIPLNDHRIVIHGAGSAGTGIANLLVQLMVSQGADEKTARSHFWGLGSHGLLREGLRLRDFQQPFARNKEELEGWTLDSPDQYTLGDVVRNVHPTILIGCSAQPGAFTEDIVKTMAAQCERPVIMPLSNPTRKAEALPSDVLTWTDGRALVATGSPFKPVMINGVTYQIAQANNALVFPGIGLGTIAVRASRVTSGMIAAAAEAVAMHIDNRVVGASLLPSIKSLRPLSASVAIAVAQQAMEEGVATEVTDNPVEKVFSAMWQPRYPRIAVV

SEQ ID NO: 77916 - DNA, 1737 bp, Desulfotalea psychrophila LSv54
  CDS (1)..(1737): transl_table=11
atgtcttcagatttgtatcggtttaagtatgatgagtttggtaatacacgtgacattgctgtttatggaacagggccaagtattatgtcctgtagctacaccaataaaagcacggcctttagttctaaagaacgtgatgactttggacttcagggttctttaccacctggctttcgtgatcttgaagcgcaggtagaaaattgtcatataaagcttggtgaaaaagaaagtgaggaagaaaaatatatttttatccgttctctttttgatcgtaatgtcacccttgcccatgcccttattcagagtgacttagaaaaattcatgggtattatctatacgccgacggttgggcttgctgtgcagaagtactctgcaatgttcaggcaggcaaacggacttcatttctctccagataccattgaccaggcagaggacattcttcgtcgttttgcccatcgtgatattcgggttgccgttgttactgataatcagggaattcttggaataggtgatcagggagcaggcggtatcgccatttgccttggaaaattaatgctttatacccagggtgcaggtattgccccatggcattgtctgcccatctctcttgatattggtaccgacaacgaggcgttacttgccgacaaacattacctcggttggcgccagaagcgtctcgtaggagatgaatataccgcttttattgatcgttttgcccgtgccttcagaaatgtgtttccgaatgccctctgtcagtgggaagatttctccaagcaaaatgccttcgatatccgtgataagtaccgtcattccatggtctcctttaacgatgatgttcagggtaccggtgctattaccttctcggcgattctttccgcaatgaaagttaagcgcgccaagcttaccgatcaggtatttcttattcatggcgcaggtgccggtggtgttgggattggtgagcagattcaggtagccctgatggcagagggtctgtctgaagaggaggctagagataaggtctttaccattgactcacgtggtgtggtcaccgttgatcgtaaaatagaggcctacaaaaagaaatttgccaaggatggagccaagctctcctggttggcagatcctgaaaatcataagcttgaaaatgttattaagcaggcaggtgttaccgttcttatcggcacctcgggacagggtggatgttttaccgagaccgttgtcaagaatatgctggggaatacagagagacccgttattttccctctttctaatccaacccatatggctgaagcacagcctaaagatatctacgcatggacaaatgggcaggcacttgtggctactggtagcccctttgctccggtggaacatgatggcaagacctcacgcattggccagtgtaataatgtctttgtcttccctggtgttggtcttggggtgcttgcctctggagcgcgtgaggtgttgcctgaatttttcactgcagcagcctacgccgtatcaaattctcttagtcaggaggcccttgatcgaggctgtttggtgcccgaggtaagtgaaatatccaaggtgagtgagaaggtagcccttgccgtcgccacatgtgcgattgagcatggggtgagcagaccatgtgtctattccgattttagccacaataatgaccctgctcgaatgaaggtgcttatttctaagatgcgctggagtcctgagtatctaccaatgacagcgatgtag

SEQ ID NO: 77917 - protein, 578 aa, Desulfotalea psychrophila LSv54
MSSDLYRFKYDEFGNTRDIAVYGTGPSIMSCSYTNKSTAFSSKERDDFGLQGSLPPGFRDLEAQVENCHIKLGEKESEEEKYIFIRSLFDRNVTLAHALIQSDLEKFMGIIYTPTVGLAVQKYSAMFRQANGLHFSPDTIDQAEDILRRFAHRDIRVAVVTDNQGILGIGDQGAGGIAICLGKLMLYTQGAGIAPWHCLPISLDIGTDNEALLADKHYLGWRQKRLVGDEYTAFIDRFARAFRNVFPNALCQWEDFSKQNAFDIRDKYRHSMVSFNDDVQGTGAITFSAILSAMKVKRAKLTDQVFLIHGAGAGGVGIGEQIQVALMAEGLSEEEARDKVFTIDSRGVVTVDRKIEAYKKKFAKDGAKLSWLADPENHKLENVIKQAGVTVLIGTSGQGGCFTETVVKNMLGNTERPVIFPLSNPTHMAEAQPKDIYAWTNGQALVATGSPFAPVEHDGKTSRIGQCNNVFVFPGVGLGVLASGAREVLPEFFTAAAYAVSNSLSQEALDRGCLVPEVSEISKVSEKVALAVATCAIEHGVSRPCVYSDFSHNNDPARMKVLISKMRWSPEYLPMTAM

SEQ ID NO: 77918 - DNA, 1716 bp, Bacillus licheniformis ATCC 14580
  CDS (1)..(1716): transl_table=11
ttgaaaggaagacgacgggtgagccacaataaattaaatgaacaagtgatcgagacgcggttaagaggatttgaagtccttgcgactcccctgttgaacaaaggggttgccttccctccggaggaaagggatgctctcggcttgacaggattgcttcctcccaaggtgctgacgcttgaagaacaggcaaaacgggcgtataaacagttccaatcacagcctgatgatttgagcaaaaacgtctatttaacggcgcttcatgatcgaaatgaagtgctgttctacaggcttctgaacgaccatatgacagaaatgctgccgattgtctataccccgactgtcggaacggcaatacagcaatacagccatgaatacagaaagccgcgggggctgtttttgtcggttaatgaccctgaaggcatgaaaacggcatttgaaaatctggccgctaaaagaagccggatcgatttgatcgtggccactgatgctgaaggaattctcggaatcggggattggggagtcggcggcatcgccatttcgatcggaaagcttgctgtttatactgcagctgcgggcatcgatcctaacagggtcctgccagtagtcattgatgcggggacgaaccaggaaaggcttctgaacgatccgctttatgtcgggaatcagcattcgaggatcaggggcgagcgttatgaatcgtttattgatcaatacgttcaaatcgcaaccgagacgtttccgggcgttttgctgcactgggaagatttcggaacgcagaacgcgcgtcagattttgaaaaaatacaaagacaaaatttgcacctttaatgatgacattcaaggcacaggagctgttaccctcgcagcggtgcttgcggccgttaaaatatcaaaaatgccgctgaaggatcataaagtggtcatatttggagcggggacggccggaatcggcaatgctgagcaaattcgcgccgcactcgttcaagagggagtgtcggaagaggaatcataccgccgtttttggtgtgttgatcggaacggtttgctgacagatgatatgaacgacttgcaggacattcaacaaccgtatgcaaggcctgctgacgaggtaaaagacttcagccggaacggcccgggggatgcaattgatctgctcgaggtggttaaaagagtgcagcctaccattttgattggaacctcgacggtatcgggcgcatttacagaggaaattgtaaaagaaatggcaaagcatgtgaaacggccggctatattcccgatgtccaatccgacgccgttatctgaagcaaggcctgaagatttgatcaattggacggaagggcgggcgctcgtcgccacaggaagcccgtttgcgcctgtggaatacagcggcacccgttatgcgatcggccaggcgaataatgcctttgtattccccggccttgggctcggaacgctcgtatcaaaagcaagactgattacggacaacatgttttacgccagcgcggctgcgatcgcgggtatggttgatacgggccggcccggcgccgcgcttcttccggaagttgaggatttgcgcacggtttccgcaaccgtggcaacggctgtcatcaaagcagccatagaagacggagttgcagaaaacgagccggacgatgtgattcaggcggtgcaggatgcgatgtggcatccggtctaccggccgattcgcgccatataa

SEQ ID NO: 77919 - protein, 571 aa, Bacillus licheniformis ATCC 14580
MKGRRRVSHNKLNEQVIETRLRGFEVLATPLLNKGVAFPPEERDALGLTGLLPPKVLTLEEQAKRAYKQFQSQPDDLSKNVYLTALHDRNEVLFYRLLNDHMTEMLPIVYTPTVGTAIQQYSHEYRKPRGLFLSVNDPEGMKTAFENLAAKRSRIDLIVATDAEGILGIGDWGVGGIAISIGKLAVYTAAAGIDPNRVLPVVIDAGTNQERLLNDPLYVGNQHSRIRGERYESFIDQYVQIATETFPGVLLHWEDFGTQNARQILKKYKDKICTFNDDIQGTGAVTLAAVLAAVKISKMPLKDHKVVIFGAGTAGIGNAEQIRAALVQEGVSEEESYRRFWCVDRNGLLTDDMNDLQDIQQPYARPADEVKDFSRNGPGDAIDLLEVVKRVQPTILIGTSTVSGAFTEEIVKEMAKHVKRPAIFPMSNPTPLSEARPEDLINWTEGRALVATGSPFAPVEYSGTRYAIGQANNAFVFPGLGLGTLVSKARLITDNMFYASAAAIAGMVDTGRPGAALLPEVEDLRTVSATVATAVIKAAIEDGVAENEPDDVIQAVQDAMWHPVYRPIRAI

SEQ ID NO: 77920 - DNA, 1695 bp, Bacillus licheniformis ATCC 14580
  CDS (1)..(1695): transl_table=11
atgagaagaacgaaggaaggacatttggagacttctttgcggggtaaagacgttctttccattccaacgctaaataaaggtgttgcattttctcttgaagaaagaaagaacctcggtctagaagggcttctgccgccgactgttctcagccttgatcagcaggcagaacgggcttacgaacaattttcccgtcaacctgacagacttcgccaaaacgtatatttgaacgatctgcaaaacagaaacgaagtgcttttctataaattattgcaaaaccacctgcgtgaaatgcttccggttgtctatacgcctactgtcggcgaagcgattcaggaatacagccacgaataccgcagaccgcacggcgtttacttgtcaatcgatgatatggacggaatcgaaacggcttttaaaaacctgcaggcatctgctgatgacatcgatttgatcgtcgctacagattccgaaagcattttggggatcggcgactggggcgtcggaggcatcaatattgcgattggtaagcttgcagtatatacggcggcagcgggaatcgatccgagccgcgttatcccggtcgtactggatgtcggaacgaataatgaaaaactgctaaacgatccgctctatatcggaaaccgtcatccgcgtgtagaaggcgagcgctatgaacaatttatcgacgcttatgtcgaaacagcattgaagcttttccctaacgcgcttctacactgggaagatttcggaaataaaaatgcccgcaatatcatgagtaaatataaccataaaattgcaacatttaatgatgatattcaaggaacaggggctatcacgctggctgcgattttagcagctgtcaaaaagaccggcacgtctttgaaagaccaccgggtcgtcatcttcggacctggttctgctggtataggaatcgctgaccaaatccgcgacaccatggtgcttgaagggctttcagaagaagaagccaaccgtgcattctggacagtcgattacagaggattattaacgacaggcatggatcaaatcatggatttccaagaaccgtatttgcgcgatacggaagaagtgaaagattggaaacgcaatgaaaagggagagatttcctttgaggaagtcatccgtcaagtgaagcctacgatcctgattggtacatcaggtgttgccggcgcctttagtgaagaaatcatcaaagagatggcggctcatactgagcgtcctgtgattctgccgatgtcaaatccgacacatctggccgaagctgttcctgaagacttgttcaaatggacggacggaaaagcgcttgtggcgacgggaagcccgtttgaagctgttgagtacaatggcgtgaaacacgaaatcggacaatccaataacgcttttgtattccctggattaggcctgggtacaatcgttgcgaaagcgaaagtcatcacaaacggcatgtttgctgcatctgccaacgcggtcgcgaacatggtggatcatgaaaagccgggtgcaggtcttctgccgaaaatcgacgacctgcaagacgtatccgttcaagtggcgatcgacgttgtaaaagctgccattaaagacggcgtggcccaagttcagcctgaagatgtcgaaaaggctgtccgcgaagccatgtggcgtccggagtataaaacaattgttgcaaaacaagactaa

SEQ ID NO: 77921 - protein, 564 aa, Bacillus licheniformis ATCC 14580
MRRTKEGHLETSLRGKDVLSIPTLNKGVAFSLEERKNLGLEGLLPPTVLSLDQQAERAYEQFSRQPDRLRQNVYLNDLQNRNEVLFYKLLQNHLREMLPVVYTPTVGEAIQEYSHEYRRPHGVYLSIDDMDGIETAFKNLQASADDIDLIVATDSESILGIGDWGVGGINIAIGKLAVYTAAAGIDPSRVIPVVLDVGTNNEKLLNDPLYIGNRHPRVEGERYEQFIDAYVETALKLFPNALLHWEDFGNKNARNIMSKYNHKIATFNDDIQGTGAITLAAILAAVKKTGTSLKDHRVVIFGPGSAGIGIADQIRDTMVLEGLSEEEANRAFWTVDYRGLLTTGMDQIMDFQEPYLRDTEEVKDWKRNEKGEISFEEVIRQVKPTILIGTSGVAGAFSEEIIKEMAAHTERPVILPMSNPTHLAEAVPEDLFKWTDGKALVATGSPFEAVEYNGVKHEIGQSNNAFVFPGLGLGTIVAKAKVITNGMFAASANAVANMVDHEKPGAGLLPKIDDLQDVSVQVAIDVVKAAIKDGVAQVQPEDVEKAVREAMWRPEYKTIVAKQD

SEQ ID NO: 77922 - DNA, 1725 bp, Legionella pneumophila subsp. pneumophila str. Philadelphia 1
  CDS (1)..(1725): transl_table=11
atgcttgattttagtttgaatcgtgatccccaaacgggcgagttatacatagaaacctcattatgtgggaagcctttactgactacaccgcaattaaacaaaggaacagcatttactcaggaagaaagaaaagatttcggtcttttaggcaagttaccacaccgcgtagaaactcttgatgaacaagtaaaacgtgcctatcttcaatattcaagttacacgacacgtttgcagcaacatatttatttgaataatttacatgataaaaaccaaatagtattttacaaactgctaagtcgtcatttgggggaaatgcttcccatcatctatacaccaatcgttggtgctgcagccaagaggtttagtcatgaatacagacagccacgaggattgtatattgctcattcggataaaaaccagcttgaggaaataattaataaccgttcgaatccagacatagaccttgttgtagtgaccgatggtgagggagtcctaggcattggcgatcaagggataggaggaatggatatacctgttgcaaaactaatggtttacagcttatgtggtgggattgatccaactcgcacattacccatatttcttgatgtaggaactaacaaccaagaattattaaatgaccctatgtatctgggttgccgtcaccccagaataaaaagctcagaatacgacgattttatcaaaacttttgtcaatgaaattcataagcaatttccaaatgcttttttacattgggaagactttggtcgaggcaatgctcgacgaatcctggatcaatttcaagatgaattgtgtacttttaatgatgatattcagggaactggtgcagtaactctggcagcaattttggcagcatgtgatgtaactggactacccttacatgaacacagaatcgttgtgtttggagctggctcagcaggtactggtattagcgaccaaattgttgatgcgatggtgaaaagcggattgagcctaactgatgcttatgacagattctggttaatagacaaacaggggttattacttgcgactgaccaagagcttactgatgctcaaaaaccctatgcacggaatcctatagatatacaatcctgggaaattaataataaacaacatccttcgtttactgacactatcaggcatgtcaaacctaccattttaattggctgttcagcgcaaacgggtgcattctcacaagatattgtggaaactatgtcgacatcctgcgagcgaccaatcattttccctttatcaaatcctgatgaaaaatgtgaagcacagccctcagatatattggcatggagtaaaggacgggcattaattgctactggaactgcttttgcccctattgaatatcagaaccgaatggtgcaaatagctcaatgcaacaatgccttggtattccctggaattggattgggcgttttggcggtaagcgcctctcgtttaaccaaagatatgatattggctgccgcccagactttaagtaaatttgcgccaagtaaaaaggacagctttttgcccctgttaccctcattagacaatgcgcaaattgtagccaaagaaatagctattgcagtagctcagtgtgcaatagactcaggttatgctcaaaaaaatcaagacaaggagctacctcgattaattgatgaactcttttgggagcctagatatctgccttttagaaaaaaaggatggagtgaatag

SEQ ID NO: 77923 - protein, 574 aa, Legionella pneumophila subsp. pneumophila str. Philadelphia 1
MLDFSLNRDPQTGELYIETSLCGKPLLTTPQLNKGTAFTQEERKDFGLLGKLPHRVETLDEQVKRAYLQYSSYTTRLQQHIYLNNLHDKNQIVFYKLLSRHLGEMLPIIYTPIVGAAAKRFSHEYRQPRGLYIAHSDKNQLEEIINNRSNPDIDLVVVTDGEGVLGIGDQGIGGMDIPVAKLMVYSLCGGIDPTRTLPIFLDVGTNNQELLNDPMYLGCRHPRIKSSEYDDFIKTFVNEIHKQFPNAFLHWEDFGRGNARRILDQFQDELCTFNDDIQGTGAVTLAAILAACDVTGLPLHEHRIVVFGAGSAGTGISDQIVDAMVKSGLSLTDAYDRFWLIDKQGLLLATDQELTDAQKPYARNPIDIQSWEINNKQHPSFTDTIRHVKPTILIGCSAQTGAFSQDIVETMSTSCERPIIFPLSNPDEKCEAQPSDILAWSKGRALIATGTAFAPIEYQNRMVQIAQCNNALVFPGIGLGVLAVSASRLTKDMILAAAQTLSKFAPSKKDSFLPLLPSLDNAQIVAKEIAIAVAQCAIDSGYAQKNQDKELPRLIDELFWEPRYLPFRKKGWSE

SEQ ID NO: 77924 - DNA, 1671 bp, Legionella pneumophila subsp. pneumophila str. Philadelphia 1
  CDS (1)..(1671): transl_table=11
atggcaatcaaagtaacaaaaaggggaatggacatactaagagaccccatactaaataaaggtaccgcatttagcctccaggaaagagatgaatttgccttgcatggtttaataccaacaacagtggaaacccttgaacaacaagtagttcgctgccttgacgcttatagtgccaaagaggaccctttggagaaacacatttacttacgtgccttgcaggaccgaaatgaagtacttttttatcgttttataattgataatctggttcatattttgcccattatatacacaccggttgtcggccaagcctgtgaaatgttttcccacatttatcggcaaccaagaggagtatttctaagttatccagagcgagacaaactggacagcatcatacaaaacattgcgtcgactcgttcaaccaaagtaattgttgtcactgatggcgaacggatcttggggttgggagatcaaggagcaggtggattgggaattcctataggcaaattgtctctttataccagttgcggtggtatacatccttctaacactttacctattattctggatgtaggaaccaataataaggagcgtctggacgatccggaatatattgggtggagacacgctcggatttcaggcaaagagtatgatgattttgttgatcaatttgtgcaaagtataaaacgccatatgcctcatgtgctattacaattcgaagattttgcacaacaacatgcctatcctttattggagcgatataaaaatcaactttgtacttttaatgatgatattcaaggaactgcttctgttgctgtagccgccatactagcagcaactcgtgttactaatactcctttaaaggaacatcgagttgctttattaggtgcaggatcagcgggttgtgggatcagtgagcagctggtgcatgccatgatgaaccagggactttctgaagaagaagccagatcacgtttttatttagttgacaggtatggacttttacatgatgagatgacagatctattgccatttcaaaaaggatttgtccgttcttctaccagtctccaaaattggaaattagaaaaaaaaggagaaatcacgttaacagacgttattaacaatgcccaaccgactatactcctgggggtgtctggccaacctaaccaattcaaggaagcaatgatcaagaccatgctaagctattgtgaacgccccataatttttcctttatcaaatcctacgtctcgcgcagaagcaatcccgcaagatctgttaaattggacagctggtaaagctttaattgcaacaggcagtccctttgagccagttgtaattaatggtcataaaattgagatagctcaatgcaataattcttacattttcccgggagttggtcttggagtagttgcaggacaagccaaaagagtgactgatttaatgatgatggcagcagcagttgcattaagtgagctagcacctgcaatcagaaccggagaaggacgcttactcccagaattaaattccattagagaagtcagtcaacatatagcgagagcggtaattttacagggtataaaagagggtcatatagagccaatgaacaataataaaatcgatgattctataaaaagaacgatgtggactccacaatatgaaccatatgttctataa

SEQ ID NO: 77925 - protein, 556 aa, Legionella pneumophila subsp. pneumophila str. Philadelphia 1
MAIKVTKRGMDILRDPILNKGTAFSLQERDEFALHGLIPTTVETLEQQVVRCLDAYSAKEDPLEKHIYLRALQDRNEVLFYRFIIDNLVHILPIIYTPVVGQACEMFSHIYRQPRGVFLSYPERDKLDSIIQNIASTRSTKVIVVTDGERILGLGDQGAGGLGIPIGKLSLYTSCGGIHPSNTLPIILDVGTNNKERLDDPEYIGWRHARISGKEYDDFVDQFVQSIKRHMPHVLLQFEDFAQQHAYPLLERYKNQLCTFNDDIQGTASVAVAAILAATRVTNTPLKEHRVALLGAGSAGCGISEQLVHAMMNQGLSEEEARSRFYLVDRYGLLHDEMTDLLPFQKGFVRSSTSLQNWKLEKKGEITLTDVINNAQPTILLGVSGQPNQFKEAMIKTMLSYCERPIIFPLSNPTSRAEAIPQDLLNWTAGKALIATGSPFEPVVINGHKIEIAQCNNSYIFPGVGLGVVAGQAKRVTDLMMMAAAVALSELAPAIRTGEGRLLPELNSIREVSQHIARAVILQGIKEGHIEPMNNNKIDDSIKRTMWTPQYEPYVL

SEQ ID NO: 77926 - DNA, 1653 bp, Methylococcus capsulatus str. Bath
  CDS (1)..(1653): transl_table=11
ttgaggggcccgctgctgttgaattacccgttgttcaacaagggcccggccttcccggaacaggaacgccgggaactgggcctgctcggtctgctgccgccgcatgtcgacaccctcgagacccaggtcgaacgcgcctacgaggcctttcgcgccaagcccaccgacctggaacgccacatctacctgcgcgccttgcaggacgagaacgaagtattgttctaccgactgatgcaggattacatcggggagacgatgcccgtcgtctatacgcccaccgtgggcgaagcctgccagcggttcagccacatctaccggcatccgcgcggactgttcatcgcctaccccgagcgcgagcacatcgacgagctgctggccaataccgcgcagcgtgaggtcgacgtcatcgtggtgacggacggcgagcgcatcctcggcctgggagaccagggcgcaggcggcatgggcatccccatcggcaagctggcgctgtataccctctgcggcggaatccaccccgcacgcacactgccggtattgctcgatgtcggcacggacaacccggacctcctgaacgatccgctgtacatgggctggcgccacccgcgggtgcggggcaccgaatacgacgaattcgtcgagcgcttcgtgcaggcggtgatgcggcgctacccgaacgtgctcctgcaatgggaagacttcgcccaggccaatgccggcccgctgctggagcgctaccgcgaccggctgtgcacgttcaacgacgacatccagggcacggcggcagtggccaccggcacggtgctggccgcagtcaaggtcacgggaacgcggctgcgggatcaggtcgtcgccgtcttcggcgcgggctcggccggctgcggcatcgccgaacagatctgcgcggccatggtccgggacggcttgtccgagaccgaagcgcgctcacgatgtttcctgatcgaccggtccggcctgctgcgcgaggggctttccggcctgccgccgttccagcaagccttcgcgcagcccgcggcacggctggccggctggcgggtggaccgagccgggaccatcggcctggccgaggtagtgaacaacgcccgcccgagcgtgctgatcggcgtatccggcgcggctggggctttcaccgaatccatcgtcaaggcgatggccgactacacaccccgccccatcatactgccgctgtcgaacccgacttcccgctgcgaagccctgcccgcgcagattctggcctggaccgaaggccgtgccctggtcgccactggcagcccgttcgccgacgtcgcctgggagggacgcacgatcccgattccgcaatgcaacaacagctatattttccctggactgggcctgggcatcctcgccataggcgcgcgccgggtgacccccggcatgttcatggccgccgcccaggccctggccaacgcatcccccgcggccaccgacccgcacggccccctgctcccgcccctgaccgccatccgcaacgtatcccgcctcattgcgttggccgtcgcgaaggaggccgtcgccgcgggcgtcgcagcacctgccagcgatgccgatctggaacgcatggtggatgaacggatgtggaccccggcttatgcacggctgaccggctgctaa

SEQ ID NO: 77927 - protein, 550 aa, Methylococcus capsulatus str. Bath
MRGPLLLNYPLFNKGPAFPEQERRELGLLGLLPPHVDTLETQVERAYEAFRAKPTDLERHIYLRALQDENEVLFYRLMQDYIGETMPVVYTPTVGEACQRFSHIYRHPRGLFIAYPEREHIDELLANTAQREVDVIVVTDGERILGLGDQGAGGMGIPIGKLALYTLCGGIHPARTLPVLLDVGTDNPDLLNDPLYMGWRHPRVRGTEYDEFVERFVQAVMRRYPNVLLQWEDFAQANAGPLLERYRDRLCTFNDDIQGTAAVATGTVLAAVKVTGTRLRDQVVAVFGAGSAGCGIAEQICAAMVRDGLSETEARSRCFLIDRSGLLREGLSGLPPFQQAFAQPAARLAGWRVDRAGTIGLAEVVNNARPSVLIGVSGAAGAFTESIVKAMADYTPRPIILPLSNPTSRCEALPAQILAWTEGRALVATGSPFADVAWEGRTIPIPQCNNSYIFPGLGLGILAIGARRVTPGMFMAAAQALANASPAATDPHGPLLPPLTAIRNVSRLIALAVAKEAVAAGVAAPASDADLERMVDERMWTPAYARLTGC

SEQ ID NO: 77928 - DNA, 1722 bp, Pseudomonas syringae pv. syringae B728a
  CDS (1)..(1722): transl_table=11
atgagtagacgaaaaaggcgattagagaaaatgaccaaaacttcgcgacctttgtacatttcctatgcaggaccctcactgctggaaatgcccctgctgaacaaaggcagtgccttcaccccgcaagagcgggtcgaattcaatctgattggtctcctgccgcagaacgtagagacgatcgaagagcaagtcacccgggtctacagccagtacaaacagtgtgcgagcgacctggacaagcatatctacctgcgttcgatccaggacaacaacgaaaccctgtttttccgtctgctcgactcccacctggacgagatgctgccgatcatctacacgccgacggtggggcaggcctgtcaggaattctccaagatctaccgcacgcatcgcggcctgttcatttcctaccccgagcgtgaccgcatcgatgacattttgcgcagcgcgaccaaggatcggatcaagatcattgtcgtgaccgacagcgagcgaattctcggcctgggcgatcagggcatcggcggcatgggcattccgatcggcaaactgtcgttgtacaccgcttgcggcgggatcagcccggcgtacacgctgccgatcgtgctggatgtcggcaccaacaatcgtgagctgctggacgacccgatgtacatgggctggcgtcacgagcgggtatcgggcaaggaatacgaagacttcatcgcgctgttcatcgacgcggtgcagcgtcgctggccggacgtgctgttgcagtttgaagatttcgcccagtccaacgccatgccgctgctcgaaaagtatcgcgacgaactgtgctgcttcaacgatgacatccagggcaccgcttcggttgccgtgggtacgttgctggcggcctgcaaggccaagaatgaaaccctcggccagcagaaggtggtgtttgtcggagccggttcggcaggctgcgggatcgccgagcacatcatcgcagcgatgcgcattgaaggcctgagcgaaagcgaagcgcgcaaacgtattttcatggttgatcgtttcggcctgttgaccgaaagcatggacaacctgctcgacttccagaaacgactggcgcaaaagaccgccgacgtgtctggctggactgccggctcggaagccttcccacagttgctcgacgtggtcacccacgccggcgccaccgtaatgatcggtgtgtccgggcagcgcggtctgttcaccgagcaggtgattcgcgaactgcacaagcattgcgccaaacccctggtcatgccgctgtccaatccgacgtccaaagtggaagccacgccggaagaaatcctgcgctggaccgacggcaatgcgctggtggccaccggcagtccgtttgcgccagtggaaatcaacggtcgcacggtgcatatcgcgcagtgcaacaactcctacatctttccgggcatcggcctcggcgtggtggcctgcaaggcatcgcgcatcactgaccggatgctcatggcggcgtccaatgcgctggccgagtgctcgccgatggtgacagggaagggcgatgcggtgttgccgccgctcaaggaaatccagcaggtcagccgcaagatcgcgttggctgtggccagggaagcgcaggccgaagggctggcgctggaaaccaccgaagaggcactgcttgaggccatcgagcgtaatttctggttgccgggctaccgggcctaccgccgtcgctcggtctga

SEQ ID NO: 77929 - protein, 573 aa, Pseudomonas syringae pv. syringae B728a
MSRRKRRLEKMTKTSRPLYISYAGPSLLEMPLLNKGSAFTPQERVEFNLIGLLPQNVETIEEQVTRVYSQYKQCASDLDKHIYLRSIQDNNETLFFRLLDSHLDEMLPIIYTPTVGQACQEFSKIYRTHRGLFISYPERDRIDDILRSATKDRIKIIVVTDSERILGLGDQGIGGMGIPIGKLSLYTACGGISPAYTLPIVLDVGTNNRELLDDPMYMGWRHERVSGKEYEDFIALFIDAVQRRWPDVLLQFEDFAQSNAMPLLEKYRDELCCFNDDIQGTASVAVGTLLAACKAKNETLGQQKVVFVGAGSAGCGIAEHIIAAMRIEGLSESEARKRIFMVDRFGLLTESMDNLLDFQKRLAQKTADVSGWTAGSEAFPQLLDVVTHAGATVMIGVSGQRGLFTEQVIRELHKHCAKPLVMPLSNPTSKVEATPEEILRWTDGNALVATGSPFAPVEINGRTVHIAQCNNSYIFPGIGLGVVACKASRITDRMLMAASNALAECSPMVTGKGDAVLPPLKEIQQVSRKIALAVAREAQAEGLALETTEEALLEAIERNFWLPGYRAYRRRSV

SEQ ID NO: 77930 - DNA, 1722 bp, Pseudomonas syringae pv. phaseolicola 1448A
  CDS (1)..(1722): transl_table=11
atgagtagacgaaaaaggcgattagagaaaatgaccaaaacttcgcgacctttgtatatttcctatgcaggaccctcactgctggaaatgcccctgctgaacaaaggcagtgccttcaccccgcaagagcgggtcgaattcaatctgatcgggctcctgccgcagaacgtagagaccatcgaagagcaagtcacccgggtctacagccagtacaagcagtgcgcgagcgatctggacaagcatatctacctgcgttcgatccaggacaacaacgaaactctgttcttccgcctgctggactcgcatctggacgagatgctgccgattatctacaccccgacggtgggtcaggcgtgtcaggaattctccaagatctaccgcacgcaccgtggcctgttcatttcctaccccgagcgcgaccgcatcgatgacattctgcgcagcgccaccaaagaccggatcaaaatcattgtcgtgaccgacagcgagcgaattctcggtctgggcgaccagggtatcggtggcatgggcattccgattggcaaactgtcgctgtacaccgcctgtggcggcatcagcccggcgtacacgctgccgatcgtgctggatgtgggcaccaacaaccgtgagctgctggatgacccgatgtacatgggctggcgtcacgagcgggtatcgggcaaggaatacgaagacttcatcgcgctgttcatcgacgcggtgcagcgtcgctggccggacgtgctgttgcagtttgaagattttgcccagtccaacgccatgccgctgctcgaaaagtatcgggacgagctgtgctgcttcaacgatgacatccagggcaccgcgtcggttgccgtgggtacgttgctggcggcctgcaaggccaagaatgaaaccctcggccagcagaaggtggtgtttgtcggtgccggttcggcgggctgcgggatcgccgagcacatcatcgcagcgatgcgcatcgaaggcctgagtgaaagcgaagcgcgcaaacgtatcttcatggttgatcgcttcggcctgctgaccgagggtatggacaatctgctcgatttccagaagcgtctggcgcagaagaccgccgatgtgtctggctggactgctggcacagaagccttcccgcagttgctcgacgtggtgacgaacgccggggccacggtgttgatcggcgtgtccgggcagcgtggtctgttcaccgagcaagtgattcgcgaactgcacaagcattgcgccaaaccactggtaatgccgctatccaatccgacttccaaggtagaagccaccccggaagaaatcctgcgctggacggatggcaatgcgctggttgctaccggcagtccgttcgcgccggtggagatcaacggtcgcaccgtgcacatcgctcagtgcaacaactcctatatctttccgggcatcggcctcggcgtggtggcttgcaaggcgtcgcgcatcaccgaccgtatgctgatggcggcatccaatgcgctggccgagtgttcgccgatggtcacggggcagggcgatgcggtgttgccgccactcaaggaaattcagcaggtgagccgtaaaattgctctggctgttgccaaagaggcccaggctgaaggcttggcactggaaacttccgaagaggcactgcttgaagccatcgagcgtaatttctggctgccgggctatcgtgcctatcgccgtcgttcggtctga

SEQ ID NO: 77931 - protein, 573 aa, Pseudomonas syringae pv. phaseolicola 1448A
MSRRKRRLEKMTKTSRPLYISYAGPSLLEMPLLNKGSAFTPQERVEFNLIGLLPQNVETIEEQVTRVYSQYKQCASDLDKHIYLRSIQDNNETLFFRLLDSHLDEMLPIIYTPTVGQACQEFSKIYRTHRGLFISYPERDRIDDILRSATKDRIKIIVVTDSERILGLGDQGIGGMGIPIGKLSLYTACGGISPAYTLPIVLDVGTNNRELLDDPMYMGWRHERVSGKEYEDFIALFIDAVQRRWPDVLLQFEDFAQSNAMPLLEKYRDELCCFNDDIQGTASVAVGTLLAACKAKNETLGQQKVVFVGAGSAGCGIAEHIIAAMRIEGLSESEARKRIFMVDRFGLLTEGMDNLLDFQKRLAQKTADVSGWTAGTEAFPQLLDVVTNAGATVLIGVSGQRGLFTEQVIRELHKHCAKPLVMPLSNPTSKVEATPEEILRWTDGNALVATGSPFAPVEINGRTVHIAQCNNSYIFPGIGLGVVACKASRITDRMLMAASNALAECSPMVTGQGDAVLPPLKEIQQVSRKIALAVAKEAQAEGLALETSEEALLEAIERNFWLPGYRAYRRRSV

SEQ ID NO: 77932 - DNA, 1608 bp, Saccharophagus degradans 2-40
  CDS (1)..(1608): transl_table=11
atgacgctcaaggttcacgaactactcaataacgcgcgcctcaataaggggacagctttcacacttgaagaaagagaagaacttgggcttagtggcctacttccaccacatgtaagcacaatgaaggagcaggtagaacgcgcattatcgagtattcggcgcaaagaatctgatatagaccgctatatatttttatctgcactccaaaagcgcaacgaaagattgtattaccgcctacttatcgatcataccaaagagcttatgccattggtgtacacccccacggttggtcaagcctgtctcgaatttgccagtatttttcgtgaaaccagcgggttttatctttcctatgcagacaaaggcttaatacaaaagcgcttggccaattggccagagcaagatgtaaggcttattgtggtaaccgatggcgaacgcatattaggcttgggcgatttaggcgcaaacggcatgggtattcctataggtaaactcgccctttattgcgcctgcgctggggtaaagcccgagcagtgcctacctattatgctagaccttggcaccaacaacgaaagcattcgcaacgatccactctatttaggtgtacccgagccaagaaaacgcggtagcgaatatgacgactttttagaagagtttgtgcgcgcggttgaaaagcaattccccaatgcgctgctgcaatttgaagattttgccaccggcaatgccgtaaacttgttggaaaaatatcgcgatcagctactgtgctttaatgacgatattcaaggcaccgcttctgttgtgcttgcaggcctaatggctacaactcgcatttctaaaatacccttgcaagaacagcgcttcttatttttaggggccggctcggctgcaaccggtattggccacctgcttaccacggcattagagcgcgaaggtataaccaccgacgaagcgcgcgcgcgcctattttttatagaccgcaaaggcttagttacccaatgtcgcgatgatctacccggccatgtggcaccttttgctgccaacatgccgcccatggacctaaagcaagcaatcgatacaataaaacccaacgccctgatcggcgcctcgggtaccgctggcgtgtttacagaagagattattcacactgttgcaagctgccacagaaaccctacaatttttgcgctttccaaccccacatcaaaggccgaatgcacagcggaagatgcttataagttttccgatggccgcgcaatttttgcaagtggtagcccgtttgatgtggtacatataaatggtgaaattaaagtgccagggcaaggcaataacgcctatatttttcccggtttaggcttgggcgctattcacggtaaaattacgcgtattaccgacgaccaacttattactgccgcgcaagaattagctggcagcgtttccgacaagcagatccaacacggctgcttgtaccctcctttagatgagattagaaacgtgtcggtaaaaattgctgcagcggttgcccgcgatgcagaacgcacaggcttaacatctgaacccgtgccggaaaatttcgaggaattattaactgcagagctttacgacccgctttactaa

SEQ ID NO: 77933 - protein, 535 aa, Saccharophagus degradans 2-40
MTLKVHELLNNARLNKGTAFTLEEREELGLSGLLPPHVSTMKEQVERALSSIRRKESDIDRYIFLSALQKRNERLYYRLLIDHTKELMPLVYTPTVGQACLEFASIFRETSGFYLSYADKGLIQKRLANWPEQDVRLIVVTDGERILGLGDLGANGMGIPIGKLALYCACAGVKPEQCLPIMLDLGTNNESIRNDPLYLGVPEPRKRGSEYDDFLEEFVRAVEKQFPNALLQFEDFATGNAVNLLEKYRDQLLCFNDDIQGTASVVLAGLMATTRISKIPLQEQRFLFLGAGSAATGIGHLLTTALEREGITTDEARARLFFIDRKGLVTQCRDDLPGHVAPFAANMPPMDLKQAIDTIKPNALIGASGTAGVFTEEIIHTVASCHRNPTIFALSNPTSKAECTAEDAYKFSDGRAIFASGSPFDVVHINGEIKVPGQGNNAYIFPGLGLGAIHGKITRITDDQLITAAQELAGSVSDKQIQHGCLYPPLDEIRNVSVKIAAAVARDAERTGLTSEPVPENFEELLTAELYDPLY

SEQ ID NO: 77934 - DNA, 1695 bp, Pseudomonas aeruginosa UCBPP-PA14
  CDS (1)..(1695): transl_table=11
atgaccgaaacagccaagcgtcccttgtacgttccccatgccggcccttcgctgctggagatgccgctgctgaacaaaggcagcgcgttcagtacccaggaacgcatcgatttcaacctgcagggcctgctgccgcacaacatcgagaccatcgaggagcagaccgagcgcgcctacagccagtacaacctgtgcaacaccgatctggaccgccacatcttcctgcgctcgatccaggacaacaacgagaccctgttcttccgcctgctcgaggagcacctggaagaaatgatgccgatcatctacacccccacggtcggccaggcctgccaggagttctcgaagatctatcggacccaccgcggcctgttcatctcctacccggaccgcgagcggatcgacgacatcctgcgcagcgccaccaagaacaacgtgaagatcgtggtggtcaccgacagcgagcggatcctcggcctcggcgaccagggcatcggcgggatgggcatcccgatcggcaagctgtcgctgtacaccgcctgcggcggtatcagcccggcctacaccctgccggtggtgctggacgtgggcaccaacaacccggacctgctcaacgacccgatgtacatgggctggcgccacgagcgggtgagcggggcgcagtacgaggagttcgtcgacctgttcatccaggcgatcaagcgccgctggcccaacgtcctgctgcaattcgaggacttcgcccagaccaatgccatgccgttgctggagcgctacaaggacgagctgtgctgcttcaacgacgacatccagggcaccgccgcggtggccgtgggcaccctgctggcggcttgcaaggccaagggcgagaagctcagcgagcagaccgtgaccttcgtcggcgccggctccgccggttgcggcatcgccgagcagatcatcgccgccatgcaactggagggcctggacgaggcccaggcgcgtcggcgcatcttcatggtcgaccgctggggcctgctcaccgacgacatgagcaacctgcttgacttccagcaccgcctggcgcagaagcgcgccgatctcggtgcctggggcggccagcagggcgacgacctggcgttgctggaagtgatccgcaatgcccggccgacggtgctgatcggcgtctccgggcagcgcgggctgttttccgaagaggtcatccgcgagctgcacagccattgcaagcagccgctggtgatgccgctgtccaacccgacctcgcgggtcgaggcgactccgcaggaaatcctcaactggaccgacggccaggcgctggtcgccaccggtagcccgttccaaccggtgcaggtgggcgacaagcggattcccatcgcccagtgcaacaacgcctatatcttccccggcatcggcctgggggtgatcgccgcgcgggccaaccgggtcaccgaaggcatgctgatggccgcggccaacgccctggccaactgctcgccgatcgttacccggggcgagggcgccgtgttgccggcgctgggtgacatccgcgaggtcagcaagcgcatcgccgtcgccgtggccaagcaggcccaggccgagggcaaggccctgcataccagcgacgaggtattgaacgacgccatcgaggcgaacttctggttcccgcgctaccgtgcctaccgccggacttcgttctga

SEQ ID NO: 77935 - protein, 564 aa, Pseudomonas aeruginosa UCBPP-PA14
MTETAKRPLYVPHAGPSLLEMPLLNKGSAFSTQERIDFNLQGLLPHNIETIEEQTERAYSQYNLCNTDLDRHIFLRSIQDNNETLFFRLLEEHLEEMMPIIYTPTVGQACQEFSKIYRTHRGLFISYPDRERIDDILRSATKNNVKIVVVTDSERILGLGDQGIGGMGIPIGKLSLYTACGGISPAYTLPVVLDVGTNNPDLLNDPMYMGWRHERVSGAQYEEFVDLFIQAIKRRWPNVLLQFEDFAQTNAMPLLERYKDELCCFNDDIQGTAAVAVGTLLAACKAKGEKLSEQTVTFVGAGSAGCGIAEQIIAAMQLEGLDEAQARRRIFMVDRWGLLTDDMSNLLDFQHRLAQKRADLGAWGGQQGDDLALLEVIRNARPTVLIGVSGQRGLFSEEVIRELHSHCKQPLVMPLSNPTSRVEATPQEILNWTDGQALVATGSPFQPVQVGDKRIPIAQCNNAYIFPGIGLGVIAARANRVTEGMLMAAANALANCSPIVTRGEGAVLPALGDIREVSKRIAVAVAKQAQAEGKALHTSDEVLNDAIEANFWFPRYRAYRRTSF

SEQ ID NO: 77936 - DNA, 1629 bp, Pediococcus pentosaceus ATCC 25745
  CDS (1)..(1629): transl_table=11
atgactgaaaaagcaatgagtattcttaataatccatatttaaataaaggaacggcgttcactaaagaagaacgtgaccaattaggattgaatggtttaattccaccatacatccaaacaatcgatgaacaagttgaacaagtttatgcacaatttcaaaccaaggccaatgaccttgaaaagcgtttgttcttgatgcaaatcttcaacgaaaaccgcgtgttattttacaagttatttagtcaacacgttgttgaatttatgccaatcgtttacgatccaactattgcagatacaatcgaaaactatagtgaattatatgtacaatcacaaaatgcaacattcctatcaatcgatgatccagatatgatggaagaagctttgaaaaattcagctgctggacgcgatattcgtttgattgttgttactgatgcagaaggtatcttaggtattggtgactggggtactaacggtgttgatatctctgttggtaaattgatggtttatacagctgctgctggtatcgacccaagccaagtattgcctgttgttctagatgtcggtactaacaaccaagatttattgaagaacccaatgtatttaggtaaccgtcacgaacggattaaaggtgatcgttactacgattttgttgataagtttgttgaaacagctgaaaacttattccctaacatgtacttgcatttcgaagactttggtcgtgataatgcagctaacattttgaataagtacaaagatcgttatgtaatcttcaatgatgatattcaaggaacaggaattatcacattagctggtatccttggagcattaaacatttctaagcaaaagattacagaccaagtttacttaagctttggtgcaggtacagccggagccggtattttaggacgaatctacgaagaaatgattgaaaatggtttatcagaagaagaagctaagaagcacttctacatggtagacaagcaaggactattgttcgatgacgatgaaacattgacaccagaacaaaaaccatttgctcgcaaacgaagtgaatttgataatgctgatgaactaactgatctattatcagttgttaaagcagttcacccaacaattatggtgggtacttctactcaaccaggttcatttacagaagaagttgtacgtgaaatggcagctcatacagaacgtccaattatcttcccactatcaaatcctactaagttagctgaagctaaagctgaagatttacttaagtggactgatggccgcgcattaattgctactggtattccagtaggagatattgaatacaacggtgtaacttaccaaattggtcaagctaataatgctttagtttaccctggtttaggtttaggtgtgattgcttcgactgctaaggtattgaatgacacaatgatttctaaagctgctcattcattaggtggtatcgtggatgttgaccaaccaggagctgctgtattacctcctgtttcaaaattgagcgatttctctaatactgttgctaaggcaattgctcaaagtgctgttgatcaaggacttacaaaagaaaagattgataatgttgatcaagcagttgaagatacacgttggaatcctgaatactaa

SEQ ID NO: 77937 - protein, 542 aa, Pediococcus pentosaceus ATCC 25745
MTEKAMSILNNPYLNKGTAFTKEERDQLGLNGLIPPYIQTIDEQVEQVYAQFQTKANDLEKRLFLMQIFNENRVLFYKLFSQHVVEFMPIVYDPTIADTIENYSELYVQSQNATFLSIDDPDMMEEALKNSAAGRDIRLIVVTDAEGILGIGDWGTNGVDISVGKLMVYTAAAGIDPSQVLPVVLDVGTNNQDLLKNPMYLGNRHERIKGDRYYDFVDKFVETAENLFPNMYLHFEDFGRDNAANILNKYKDRYVIFNDDIQGTGIITLAGILGALNISKQKITDQVYLSFGAGTAGAGILGRIYEEMIENGLSEEEAKKHFYMVDKQGLLFDDDETLTPEQKPFARKRSEFDNADELTDLLSVVKAVHPTIMVGTSTQPGSFTEEVVREMAAHTERPIIFPLSNPTKLAEAKAEDLLKWTDGRALIATGIPVGDIEYNGVTYQIGQANNALVYPGLGLGVIASTAKVLNDTMISKAAHSLGGIVDVDQPGAAVLPPVSKLSDFSNTVAKAIAQSAVDQGLTKEKIDNVDQAVEDTRWNPEY

SEQ ID NO: 77938 - DNA, 1629 bp, Leuconostoc mesenteroides subsp. mesenteroides ATCC 8293
  CDS (1)..(1629): transl_table=11
atgactacaacagggtatagcattttgcgtaatccatttttaaataagggaacggcattttctgcagctgagcgtgagcaattgggcttaactggcacattaccaagtcaagtacaaatgattgaagaacaagcagaacaagcttacaaacaatttcaggcgaaaagtcctttacttgaaaaaagaacatttcttatgaatttgtttaatgaaaacgtgacattgttctatcacttgatggatcaacatgtttcagaatttatgccaattgtttatgatcctattgttgcagagtctattgaacaatataatgaaatttacactaatcctcaaaatgcagcatttttgtcaatcgatcatccagaaaatattgagagctcattgaagagtgtcgctgatggcagagatataaagctagttgttgtgactgatgctgaaggtatattaggcatgggcgattggggtgtcaatggtgttgatattgccgttggtaaattgatggtttacacagcagcagctggaatagacccggcaacagtattaccagtaagcattgatgcaggtacgaataacaaaatattattagaaaatcctttgtatttagggaacaaacatgaacgtattgctggtgaaaagtatcttgaattcatagataagtttgtaactgctgaacaaaaattgttcccagcatcattattgcattgggaagattttggacgttcaaatgcacaagtaattttggataaatataaagacagcattgccacatttaacgatgatattcaaggaaccggaatgattgttttggcaggaatattcggagctctaaatatatcgaaagaaaaactagttgatcaaagattcctaacgttcggtgccggtacagctggtatgggtattgttaatcagattttttcagaattaaaacaagctgggttatccgatgcagaggctcgcagccatttctatcttgtggataagcaaggattattatttgatgatactgaagatttaactgaagcgcaaaaggcgttcacacgttcaagaaaggaacttgttaactctgaacaattagacaatttggaagcagtggtcaatgagatacgtccaacagttttgattggtacttcaacacagccaggtacatttacggaagcaattgtaaaatcgatggcacaaaatacagaacgcccaattatttttcctttgtcaaatccaacaaaattagctgaagcaactgcagaaaacttaattaaatggactgatggaaaagctttgatagcaactggtattcctgcagcgaatgttacctacaaaggagtgacatataaaataggacagggcaataacgcgttgatttatcctggtttaggctttggtcttgttgcctcaactgctaagctgttaacacaagaaacaatctcagctgctattcatgcattgggtggtctagtggatgctgatgaaccaggagcagcagtactgccaccagtttcaaatcttactgagttttcacaaaagattgctgaaattacagcacaaagtgttctaaagcagggacttaatcgtgaaaaaattgccgatccaaagcaagccgtacaagatgctaaatggtctgcggagtactaa

SEQ ID NO: 77939 - protein, 542 aa, Leuconostoc mesenteroides subsp. mesenteroides ATCC 8293
MTTTGYSILRNPFLNKGTAFSAAEREQLGLTGTLPSQVQMIEEQAEQAYKQFQAKSPLLEKRTFLMNLFNENVTLFYHLMDQHVSEFMPIVYDPIVAESIEQYNEIYTNPQNAAFLSIDHPENIESSLKSVADGRDIKLVVVTDAEGILGMGDWGVNGVDIAVGKLMVYTAAAGIDPATVLPVSIDAGTNNKILLENPLYLGNKHERIAGEKYLEFIDKFVTAEQKLFPASLLHWEDFGRSNAQVILDKYKDSIATFNDDIQGTGMIVLAGIFGALNISKEKLVDQRFLTFGAGTAGMGIVNQIFSELKQAGLSDAEARSHFYLVDKQGLLFDDTEDLTEAQKAFTRSRKELVNSEQLDNLEAVVNEIRPTVLIGTSTQPGTFTEAIVKSMAQNTERPIIFPLSNPTKLAEATAENLIKWTDGKALIATGIPAANVTYKGVTYKIGQGNNALIYPGLGFGLVASTAKLLTQETISAAIHALGGLVDADEPGAAVLPPVSNLTEFSQKIAEITAQSVLKQGLNREKIADPKQAVQDAKWSAEY

SEQ ID NO: 77940 - DNA, 1734 bp, Solibacter usitatus Ellin6076
  CDS (1)..(1734): transl_table=11
atgcgccagagtgtcataccgatctttgtacccgtcacgaagccccggccccttgagtgtcgttcctatcaaaccaagtgtcgaggggtggcggtcctgaattcgcccatgctgaacaaaggaacggcgtttacctcaaaggagcggaaagagctgggtctgacaggcctgctcccacccgaaatcagcacgctcggcacccaggtaaaattggcatatatccaatatgaccgcctgccggatacattggccaagaacacctacctgactactctgcacgcacacaacgaagtgctgttttaccgcctcttctcagaacacctgcgtgagatgattccagttctcgacgatgcgacgctgagtctggccgcacagcgcaaccaccatgagtgcggtcagtcgcgaggcgtgtacctctcgattgaccacatcgacgctatggaagaagcgtttgccaatctgggcgcggacgccggcgacatcgacctgatcctgactaccgacggcgagcaggtacggggtgtcggcgatgcaggcatgagcggcatcgaaaggtctctcggcaaactcgcagtctatacggccgccggcggaatcaatccgaatcgggcaatttccgtggtgctcgacgtcggtaccgatcggcaagatctcctcgacgatcccacgtacatcggcaatcggcatccccgaatccgcgggaagcgctacgatgccttcctggaatcctatgtaacgaccactacgcggctgtttccgcacgcgatgcttcattgggagaacttcgctcctgggaacggacgccggcttctcgaaaaatacggcgggcaggtatgcaccttcaatgacgatatgcagggtaccggcgcgatcaccctggcagcggcgatctccgcggtccggatctgcggaacgcctctccgcaatcagcgggtggttatcttgggcgccgggactgcgggcgttggcattgcagatcagatctgcgacgccatggcgcgtgagggtctctcccggcaggaggcggtgcgccagttctggtttgtagaccggcaaggcttgcttaccagcaacatgacgggccaactacgcgaccaccaggtaaccttcgcacggccggatgtcgagagcagaggctggaagcagcttcacgggggaggcatcggtctcgccgaggtagtgcggcaagtgaaacccaccatgctgattggcgcatcatcgtcgtccggcagtttcacggaacccatcatcaggcagatggcggcgcataccgcccggccgatcatcttcgtgctttccacgccgccggtgcgggcggaagcgaatcctgccgacttgattgcgtggacggccgggcgcgcgttgattgcgactggcagcctgtttgcaccggtcacgtacaggggcttgacctatgtggtcgcgcaattgaacaacgcgatggtttacccgggactgagtctcggcgcggtagtagcacgtgcccgcaggatcagcgaagggatgtttgaggcggcggccggcgcggtgtcgagcctggtaacagtgcgccatccaggggcatcgctgctgccccatatcgacgacctgagttcggtgtcaatgacggtggccgccgccgtggccgaagccgcggtttcggaaggcctctcacgagcgccgatcgatgatattgttcaacaggtgcgagatgcgatgtggcagcccgagtaccacgagatccaggcatcatga

SEQ ID NO: 77941 - protein, 577 aa, Solibacter usitatus Ellin6076
MRQSVIPIFVPVTKPRPLECRSYQTKCRGVAVLNSPMLNKGTAFTSKERKELGLTGLLPPEISTLGTQVKLAYIQYDRLPDTLAKNTYLTTLHAHNEVLFYRLFSEHLREMIPVLDDATLSLAAQRNHHECGQSRGVYLSIDHIDAMEEAFANLGADAGDIDLILTTDGEQVRGVGDAGMSGIERSLGKLAVYTAAGGINPNRAISVVLDVGTDRQDLLDDPTYIGNRHPRIRGKRYDAFLESYVTTTTRLFPHAMLHWENFAPGNGRRLLEKYGGQVCTFNDDMQGTGAITLAAAISAVRICGTPLRNQRVVILGAGTAGVGIADQICDAMAREGLSRQEAVRQFWFVDRQGLLTSNMTGQLRDHQVTFARPDVESRGWKQLHGGGIGLAEVVRQVKPTMLIGASSSSGSFTEPIIRQMAAHTARPIIFVLSTPPVRAEANPADLIAWTAGRALIATGSLFAPVTYRGLTYVVAQLNNAMVYPGLSLGAVVARARRISEGMFEAAAGAVSSLVTVRHPGASLLPHIDDLSSVSMTVAAAVAEAAVSEGLSRAPIDDIVQQVRDAMWQPEYHEIQAS

SEQ ID NO: 77942 - DNA, 1671 bp, Magnetococcus sp. MC-1
  CDS (1)..(1671): transl_table=11
atgggcaaaacatttgatagcaatcgtttaaaagagcttaccggacatgccaacccgctggagatcctgaacgatccctacatgaacaaaggcgtggcttttacggaagaagagcgggatctgtttcatctccgcggtctactgccccccagggtccagaccatggaggctcagttagggcgggctttagataattttcgctgcaaacctaacgatttagagaaatatattttcctaaccggcctgcaagagcgtaatgaaaccctcttctaccggttggtcatgaccaacattgaagagatgttacccatcatctacacacccacggtgggtaaggcgtgccaaacctatggtcacatctttcgccgcccccaaggcatgtttatctccattaacgacaagggccgcatcgctgaactgctgggcaactgggtccataaggatgtacgggttattgtggtaaccgatggtagccgtattctgggcctgggggatctgggcgcacacggtatgggtattccagtgggtaagttggcactctataccgccttggcgggcatcccccccatccactgtttacctgtcaccctggacatgggcaccaacaacgaagccctgcggaatgatcccctctatgtgggcctgccccaaccccgtgtcaccggtgagatctatgatgaaatgatcgaagagtttgtgctggcggtacaggagcagttcccccgtgccatgattcaatttgaggatttttctaacgacaacgccttccggttattggaaaaatatcaggaccgcatctgcaccttcaatgacgatattcaaggcaccgccgccgtggcactcgctggcattttgggcgctttgcgcattacagaggcggatttatgcacccagcgttatctctttatgggcgctggcagtgcaggctttggcattgccgacctcattttacgcgccatggaacaaaagggcatcccccgtgagcaggggctcaagcagttccgctttatggactcacgggggctggtcactcgcagccgcaccgatctgcggggacgtaaatcagaatttgtctgtgatgacccgccactcaccgacttgcaacaggtggtggaacgctttatgcccacggtattgattggggtttcggggcagcccggcgttttccaccagggtgtggtcgaggccatggcccgcatcaatcctcgccccattatctttgctctctccaaccccaccagcaaggccgaatgtagcgcccaacaatgctaccagtggagtgatgggcgcgccatctttgccagcggcagcccctttgagcccgtcaccattgccggtcaaacctttgtgtcgggtcaggggaataatgcctactgtttccccggtattggtttaggggtgattatgtgtgaagccagccgcgtgaccgaggagatgttcctagtcgccgcccagaccctggcccaaatgaccgcccagagtgacctggatcaagggcgtgtctatccctccatgcaggacatccgcgcaatctctctaaacattgctttagcggtggtcgatctggccagcaagcgcggactggcccagcgagatttgggtgaacacgccaaagagcgcattagtgcgtggatgtgcaatgccaactatcgcaactacgccaaccgctaa

SEQ ID NO: 77943 - protein, 556 aa, Magnetococcus sp. MC-1
MGKTFDSNRLKELTGHANPLEILNDPYMNKGVAFTEEERDLFHLRGLLPPRVQTMEAQLGRALDNFRCKPNDLEKYIFLTGLQERNETLFYRLVMTNIEEMLPIIYTPTVGKACQTYGHIFRRPQGMFISINDKGRIAELLGNWVHKDVRVIVVTDGSRILGLGDLGAHGMGIPVGKLALYTALAGIPPIHCLPVTLDMGTNNEALRNDPLYVGLPQPRVTGEIYDEMIEEFVLAVQEQFPRAMIQFEDFSNDNAFRLLEKYQDRICTFNDDIQGTAAVALAGILGALRITEADLCTQRYLFMGAGSAGFGIADLILRAMEQKGIPREQGLKQFRFMDSRGLVTRSRTDLRGRKSEFVCDDPPLTDLQQVVERFMPTVLIGVSGQPGVFHQGVVEAMARINPRPIIFALSNPTSKAECSAQQCYQWSDGRAIFASGSPFEPVTIAGQTFVSGQGNNAYCFPGIGLGVIMCEASRVTEEMFLVAAQTLAQMTAQSDLDQGRVYPSMQDIRAISLNIALAVVDLASKRGLAQRDLGEHAKERISAWMCNANYRNYANR

SEQ ID NO: 77944 - DNA, 1689 bp, Shewanella sp. ANA-3
  CDS (1)..(1689): transl_table=11
atggacgataataaacgccccctctatcttccgtttgcaggacctgccattcttgaagctcccttaattaacaagggcagtgcattttcggaagaagagcgtattttctttaacctcgaaggcttagtaccctacgccattgaaactattgaagaacaggcttcacgcgcctacgatcagttcagaagtttcaataacgatctcgataagcacatctatctgcgcaacattcaagacaccaacgaaaccctgttttatcgtttagtgcaaaaccacatcagcgaaatgatgccaattatctacaccccgacggtaggtttggcctgtgagcgcttctcgaaaaactatcgccgtaaccgtggtctgttcatctcttacccgaataaggacagaatcgacgacatcctcaataactcgactcgccaaaaagtaaaaatcatcgttgtgaccgacggtgagcgcatcttaggcttaggcgaccaaggtattggcggcatggggatcccgattggtaaattgtcactctacaccagctgtggtgggatcagccccgcatacacactgccaattaccttagacgtaggtaccgataatccacagttgctggaagatcctatgtacatgggttggcgccatccgcgtattggcggcgaggagtatgccgagtttatcgaagcctttatgcaagccgtgcatgtacgttggccagatacactgatccaattcgaagactttgcccaaaagaatgcgatgccaatccttgagcgttataaggatcgctactgctgctttaacgatgacattcaaggtaccgccgccgtgactgtgggctcgttactcgccgcctgtaaagccgcgggcactgagctcaacaaacaacgtatcgccttcttaggtgccggtagcgcaggctgcggtattgccgaagccatcgttgcgcaaatggtgtctgaagggatcagcgatgagcaagcccgcagccaagtctgcatggttgaccgttggggcctgctgcttgacaacatgcctaacctgttgccattccaacaaaaattggctcaaaaatgtgccgatatctgcaactggaataacttcagcgacaatatttcactgctcgatgtggtcaataacgctaaaccaacggtactgattggcgtatcgggcgcaccaggtctgtttaccgaagaaattgttcgtgcaatgcatagccactgcgaacgcccaattatcttcccactgtcaaaccccaccagccgtgttgaagcgacgccaaaagacattctgcactggacgtctggccaagccttagtggcaacgggtagcccgtttgaacctgttgttgtcgatggcgaaacctatgaaatcgcgcaatgtaacaacagctttatcttccctggtattggtttaggggtactcgcctcgggtgctcgccatgtctccgatgcgatgttaatggcatcgagccgcgcgctcgccgaatgctcaccgttagccattaatggctcaggaccactcctgccaaaactggaagatattcactcagtaagtaagcatattgcgtttgccgtcggtaaagtggcgattgaacaaggcctatccttacctgcaagtgatgagctgctgatgcaatctatcgaagataatttctggaagccagagtatcgccgttataagcgtacgtctttctaa

SEQ ID NO: 77945 - protein, 562 aa, Shewanella sp. ANA-3
MDDNKRPLYLPFAGPAILEAPLINKGSAFSEEERIFFNLEGLVPYAIETIEEQASRAYDQFRSFNNDLDKHIYLRNIQDTNETLFYRLVQNHISEMMPIIYTPTVGLACERFSKNYRRNRGLFISYPNKDRIDDILNNSTRQKVKIIVVTDGERILGLGDQGIGGMGIPIGKLSLYTSCGGISPAYTLPITLDVGTDNPQLLEDPMYMGWRHPRIGGEEYAEFIEAFMQAVHVRWPDTLIQFEDFAQKNAMPILERYKDRYCCFNDDIQGTAAVTVGSLLAACKAAGTELNKQRIAFLGAGSAGCGIAEAIVAQMVSEGISDEQARSQVCMVDRWGLLLDNMPNLLPFQQKLAQKCADICNWNNFSDNISLLDVVNNAKPTVLIGVSGAPGLFTEEIVRAMHSHCERPIIFPLSNPTSRVEATPKDILHWTSGQALVATGSPFEPVVVDGETYEIAQCNNSFIFPGIGLGVLASGARHVSDAMLMASSRALAECSPLAINGSGPLLPKLEDIHSVSKHIAFAVGKVAIEQGLSLPASDELLMQSIEDNFWKPEYRRYKRTSF

SEQ ID NO: 77946 - DNA, 1629 bp, Fusobacterium nucleatum subsp. vincentii ATCC 49256
  CDS (1)..(1629): transl_table=11
atggcaaaaaaatcttatgaagtattaaatgacccatttttaaacaaaggaacagctttcacaaaggaagaaagaaaagaactagaattaactggactactaccaccacaaattcaaacaattgaggaacaagcagaacaagtatatgcacaatacaaaagtaaagaacctctaataaacaaaagaagatttttaatggaaatttttgacacaaatagaactttgttttattacttgttcagtcaacatgtagttgaatttatgccaatagtatacgatccagttatagctgaaaatatagaaaattatagtgagctgtttgtaaatccgcaaaatgcagtatatttgtcaatagactctcctgaaacaattgaagaatctttaagaaatgcgacaaaagatagagaaataagacttatagttgcaactgatgcagaaggtattttaggaattggagattggggaactaatggggttgatatttctgttggaaagttaatggtctatacagcagcagctggaatagatcctaagtcagttttaccagttgttttagatgcaggaacaaatcgtgaaactttacttgaagacaaactatatttaggaaatcgtcataaaagagtttatggagatgaatattatgactttgtagatagatttgttcaaactgctgaaaaactattccctagactatatttacactttgaagattttggtcgttcaaatgcagctaatgttttacataaatattggaaaacttatcctgtatttaacgatgatattcaaggaacaggaatcattacattagcagggattttaggagcattaaaaatttctggagaaaaattaactgatcaaagatatatgtgttttggagcaggaacagcaggagcaggaatagcagatcgtatatatcaagaaatgttacaacaaggtttatctgaaaatgaagctcgtagtagattttatttagttgacaaacaaggacttttgtttgacgatatgaatgatttaactccagaacaaaaaccatttgctcgtaaaagaactgaatttaataatgcaaatgaattaacaaatttagaagcagcagttaaggcagttagaccaactattttagttggaacttctacccaaccaaatacttttacagaaacaatagtaaaagaaatggcttcatatacagcaagacctattatattcccattgagtaatccaacaaaattagcagaagcaactgctgaaaatttaattaaatggacagaagggaaggcactagttgcaacaggtattcctgctgatccagttgaatacaatggagtaacttatgaaataggacaagctaataatgctttaatatatccagcacttggattaggagcaattgcttcaacagctaaattaatgacaaatgaaatgatatcaaaagctgctcactcattgggaggaattgttgatacaacaaaaccaggagcagctactttaccaccagtatcaaaattaacagaattttctcaaagagttgctgaagctgttggacaatgtgcattagatcaaaaattaaatagagaagacataactgatataaaagaagctattgaaaaaattaaatggacaccaaaatattaa

SEQ ID NO: 77947 - protein, 542 aa, Fusobacterium nucleatum subsp. vincentii ATCC 49256
MAKKSYEVLNDPFLNKGTAFTKEERKELELTGLLPPQIQTIEEQAEQVYAQYKSKEPLINKRRFLMEIFDTNRTLFYYLFSQHVVEFMPIVYDPVIAENIENYSELFVNPQNAVYLSIDSPETIEESLRNATKDREIRLIVATDAEGILGIGDWGTNGVDISVGKLMVYTAAAGIDPKSVLPVVLDAGTNRETLLEDKLYLGNRHKRVYGDEYYDFVDRFVQTAEKLFPRLYLHFEDFGRSNAANVLHKYWKTYPVFNDDIQGTGIITLAGILGALKISGEKLTDQRYMCFGAGTAGAGIADRIYQEMLQQGLSENEARSRFYLVDKQGLLFDDMNDLTPEQKPFARKRTEFNNANELTNLEAAVKAVRPTILVGTSTQPNTFTETIVKEMASYTARPIIFPLSNPTKLAEATAENLIKWTEGKALVATGIPADPVEYNGVTYEIGQANNALIYPALGLGAIASTAKLMTNEMISKAAHSLGGIVDTTKPGAATLPPVSKLTEFSQRVAEAVGQCALDQKLNREDITDIKEAIEKIKWTPKY

SEQ ID NO: 77948 - DNA, 1644 bp, Listeria monocytogenes str. 1/2a F6854
  CDS (1)..(1644): transl_table=11
atgactgtaaaatcaggttttgactatatgaataatccattattaaacaaaggaaccgctttttcagaagaagaaagagcaaactatcaattggacggattactgccaccaattatcgaaacaattgaacaacaagccgtgcgcatcgagacgcaaatagaaaatttagaaacacctttacataaacatcagcttttaacaaacttatataatgaaaatcgcaccctttattattatctcgtaacaaaaaacgtgactgactatttgccaattatttatacaccaactatcggcgacgcagttatccagtaccataaagaatacactgcgccggatgaagccttatttattgatgcctttgcacccgaaaaattaagcgcatcaataaaaaactacgcaaaaaataatccgaatattgatatgattgtcataacagatggtgaaggtgtgcttggaattggcgactggggtgtgaatggtgtcaaaatcgctgttggaaaattagcggtttatacggttgcagctggacttgcaccagaccgtgttcttcctgtcgttattgacgccggaacgaacaacgaaacacttcttaacgattcactgtatctaggaaataaaggcccccgcctttcagaaagtgaatatgacgcttttattgcttcttttgttaatgttatgaaagaagtttttccgaaagccatccttcactgggaagactttggacgcgcgaatgcaagtcgtattctgcataattaccgcgataaaatttgtacatttaacgatgatattcaaggtactggagccatggtggttgccgctgttcttgcgacgattcaagtttcacgcattccattaagtgaacaaaagattattatttttggggccggaactgctggaatcggtattgctgatcaacttagtgcgcaattgatgcgtgaaaccggtctcccttttgaaaaagccaaaaagcacttttatttagtcgatcgaaaaggtttagtgcttgataatatgacagacttaactaccgggcaaaagaaatatgcgcatccatcggctgaatggtctaacgtgcctacagatacattagaaaacttagtggaagccgttcatccaacgatgttaatcggctgttctggtgtcaccggtgcctttaaagagagtatcgtcaaaaaaatgacccagtatacagaacgaccagcgattttgccactttctaatccaacaaaattagccgaagcaactgcttctgatttaatccagtggacagacggaaaagcacttatcgtcactggtagcccttccaaaccagtcgaatatcaaaataccacttatgaaatcggtcaagcgaacaatgcacttctttaccctggactagggcttggtgctcttgtcactcgtgcaaaatatattacagatgatatgctcgctgctgcttcgatggctgtcgctgagcagatttcgccaaacaaagcaggcgcagctcttttaccacatgtgcgcacccttcgagaaacatcgcgcgcagtagccattgctgtcgctaaccaagctataaaagaaaacatccatcaagtcgaattaacgaatgtcatcgaagctatcgagcttgagatgtggcaacctatttataaaggagtttag

SEQ ID NO: 77949 - protein, 547 aa, Listeria monocytogenes str. 1/2a F6854
MTVKSGFDYMNNPLLNKGTAFSEEERANYQLDGLLPPIIETIEQQAVRIETQIENLETPLHKHQLLTNLYNENRTLYYYLVTKNVTDYLPIIYTPTIGDAVIQYHKEYTAPDEALFIDAFAPEKLSASIKNYAKNNPNIDMIVITDGEGVLGIGDWGVNGVKIAVGKLAVYTVAAGLAPDRVLPVVIDAGTNNETLLNDSLYLGNKGPRLSESEYDAFIASFVNVMKEVFPKAILHWEDFGRANASRILHNYRDKICTFNDDIQGTGAMVVAAVLATIQVSRIPLSEQKIIIFGAGTAGIGIADQLSAQLMRETGLPFEKAKKHFYLVDRKGLVLDNMTDLTTGQKKYAHPSAEWSNVPTDTLENLVEAVHPTMLIGCSGVTGAFKESIVKKMTQYTERPAILPLSNPTKLAEATASDLIQWTDGKALIVTGSPSKPVEYQNTTYEIGQANNALLYPGLGLGALVTRAKYITDDMLAAASMAVAEQISPNKAGAALLPHVRTLRETSRAVAIAVANQAIKENIHQVELTNVIEAIELEMWQPIYKGV

SEQ ID NO: 77950 - DNA, 1695 bp, Pseudoalteromonas tunicata D2
  CDS (1)..(1695): transl_table=11
atgactaataaagacactaaaaactttctttacatcccacattcgggtccaaaactcatagaaacgcctttattaaataaagggagtgcgtttaccaagcgcgaacgtgaaagcttcaacttaatgggcttattaccaccacgatttgaatcgattgaagagcaagttaaacgctgttatcagcaatattcaagctttactgataacctcaacaaacatatttatttacgtgcaatccaagataataacgaaacgctttattaccgtttagtacgtgatcatttagaagaaatgatgcctattatttacaccccaacagtgggtgatgcgtgtgagcagttctctgatatttatcgcagcgctcgtggcttatttatttcttatgaagatcgtcatcaaatcgatgatattttgcgtaatgccaccaaaggtaaagtaaaagtaattgttgtcacagacggtgaacgtattttaggcctaggcgaccaaggtattggcggtatggggatcccaataggtaaattgtcgttgtatacggcatgtggcggtattagccctgcctatactttacctgtaatgctagatgttggtactaataacgaaaaactgcttaatgatcctatgtatatgggtgctcgtcataagcgtattggccaagaagagtacgatgaatttttagatttattcatcaatgctgttaaacgccgttggccaaatgtattactgcaatttgaagatttcgctcagccaaatgcaatgccactattaaaacgttaccgcaatgaaatttgtagttttaatgatgatattcaaggtactgcggcaatcacggttggatctttgttagctgcatgtcgtgtaaaaggtgaaaagctatcagatcaaacggttgcttttgtaggtgccggttcagcaggttgtggtattgcagagcaaattattagtcaaatggtatttgaaggtatttcagatgcccaagctcgtagtcaaattttcatggttgaccgttttggcttactcactgatggcatggccgacttacgtgatttccaacaagcactagtacaaaatgatactacacttgcagattggacattcagtggtgaatacgcttcgttacttgatgtgatgcactgcgcaaaaccacatattttaattggtgtatcgggtcagccaggtttgttcaccgagcaagttattcgtgctatgtatcaaggttgtgaaagaccaattattttccctttaagtaatccgtcaaaacaagtagaagctgtgccacatgatgtgatccattggacagaaggccaagcaattgtagcaaccggtagcccattttccccggttgaatatgatggtaaaaccttcccaattccacaatgtaacaacagttatatttttccaggcattggtttgggcgtaattgctgccaaagcaaaaaccattaccgatgaaatgctcatggtttcgagtgaaacccttgcagcttcttcaccacttgccaatacgggtaaaggaagtttacttcctgcactgacgcaaattgaagctttaagcaaagaaattgcctttgctgtcgctaaaaaagcgattgagcagggcgttgctttagaaatatctgatgatgctctgcgctcagcaattgataaaaactactggctaccacaatatcgtgattataaacgagtgagtatctaa

SEQ ID NO: 77951 - protein, 564 aa, Pseudoalteromonas tunicata D2
MTNKDTKNFLYIPHSGPKLIETPLLNKGSAFTKRERESFNLMGLLPPRFESIEEQVKRCYQQYSSFTDNLNKHIYLRAIQDNNETLYYRLVRDHLEEMMPIIYTPTVGDACEQFSDIYRSARGLFISYEDRHQIDDILRNATKGKVKVIVVTDGERILGLGDQGIGGMGIPIGKLSLYTACGGISPAYTLPVMLDVGTNNEKLLNDPMYMGARHKRIGQEEYDEFLDLFINAVKRRWPNVLLQFEDFAQPNAMPLLKRYRNEICSFNDDIQGTAAITVGSLLAACRVKGEKLSDQTVAFVGAGSAGCGIAEQIISQMVFEGISDAQARSQIFMVDRFGLLTDGMADLRDFQQALVQNDTTLADWTFSGEYASLLDVMHCAKPHILIGVSGQPGLFTEQVIRAMYQGCERPIIFPLSNPSKQVEAVPHDVIHWTEGQAIVATGSPFSPVEYDGKTFPIPQCNNSYIFPGIGLGVIAAKAKTITDEMLMVSSETLAASSPLANTGKGSLLPALTQIEALSKEIAFAVAKKAIEQGVALEISDDALRSAIDKNYWLPQYRDYKRVSI

SEQ ID NO: 77952 - DNA, 1689 bp, Photobacterium sp. SKA34
  CDS (1)..(1689): transl_table=11
atgaacaacgataaaagacctttatatatcccctatgcaggtcctgcactgcttgaaacacctcttctaaacaaaggtagtgcattctctgtcgaagaacgtatgtactttaaccttgaagggcttcttcctgaagctattgaatctattgaagaacaaacagaacgtgcttatcagcaatatttaaagtttgataacgatatggataagcacatttatctccgaaatatccaagataccaatgaaaccttgttttaccgtttggtagaaaaccacgtaacagaaatgatgccaatcatctataccccgacagtgggttctgcgtgtgaagatttctcaaatatttaccgtcgcggtcgtggtctatttatttcttacccaaaccgtgatcgcattgaagacatgctaaacaatgcttcacgtcagaacgtaaaagtgattgtagtaaccgacggtgaacgtattcttggattaggtgaccaaggcatcggtggtatgggtattccaattggtaagctttctttatacaccgcgtgtggtggtattagtccggcttatactctacctgttgtacttgatgttggtactaataacccgcaacgtttatcagatcctatgtacatgggttggcgccatagccgtattacaggtaaagagtacgatgcgtttgttgatgagtttatccaagcagttaaacaacgttggcctgaagcattaattcaatttgaagattttgcacaaaaaaatgcaatgcctttacttgagcgttacaaagataaagtttgttgctttaacgatgatattcaaggtacagcggcggtaactgttggctctctactcgcagcatgtaaagcagcaggcaataagctgtcagagcaacgtgtaaccttccttggtgcaggctcggcaggttgtggtattgcagaagcgattattgcacaaatggtgtctgaaggtatttctgatgcacaagctcgcagccaagtattcatggttgatcgttggggcctactcattgatggaatgccaaatctacttaacttccaacaagcacttgttcagaaaaatacacaattagcagattgggatgtggcagataataacatctcactccttgatgttatgcgtaatgcaaaaccgacgattttaatcggtgtatcaggtgttccgggactatttagtgaagaagtgatccgtgaaatgtacgcgcactgtgagcgccctatcatttttccactttctaacccaacaagccgtgttgaggcaacaccatttgatatcattcgttggacggatggtaacgcattggttgctacaggttcaccatttgagcctgtggtttatgaaggcaaaacttatccaatcgcacaatgtaataatagttacattttcccaggtattggtttaggggtattagcggttaatgctcgccgtgttaccaatgaaatgctaatggaaagtagccaagcattagcagagtgttcaccacttgctattcatggtcatggtcctctattaccaccgttagaagagattcagaaagtctctcgtaaaattgcttttgccgttgcaaagaaagcggttgaacaacataaagcacctaaaaactccgatgaacgtatcagagaaaaaatcgatgctaacttctggaaatcagaatatcgtcgttacaaacgaacttcgttctaa

SEQ ID NO: 77953 - protein, 562 aa, Photobacterium sp. SKA34
MNNDKRPLYIPYAGPALLETPLLNKGSAFSVEERMYFNLEGLLPEAIESIEEQTERAYQQYLKFDNDMDKHIYLRNIQDTNETLFYRLVENHVTEMMPIIYTPTVGSACEDFSNIYRRGRGLFISYPNRDRIEDMLNNASRQNVKVIVVTDGERILGLGDQGIGGMGIPIGKLSLYTACGGISPAYTLPVVLDVGTNNPQRLSDPMYMGWRHSRITGKEYDAFVDEFIQAVKQRWPEALIQFEDFAQKNAMPLLERYKDKVCCFNDDIQGTAAVTVGSLLAACKAAGNKLSEQRVTFLGAGSAGCGIAEAIIAQMVSEGISDAQARSQVFMVDRWGLLIDGMPNLLNFQQALVQKNTQLADWDVADNNISLLDVMRNAKPTILIGVSGVPGLFSEEVIREMYAHCERPIIFPLSNPTSRVEATPFDIIRWTDGNALVATGSPFEPVVYEGKTYPIAQCNNSYIFPGIGLGVLAVNARRVTNEMLMESSQALAECSPLAIHGHGPLLPPLEEIQKVSRKIAFAVAKKAVEQHKAPKNSDERIREKIDANFWKSEYRRYKRTSF

SEQ ID NO: 77954 - DNA, 1701 bp, Rickettsiella grylli
  CDS (1)..(1701): transl_table=11
atgccaaaatttaaaccggttacggatcaaaatgaaaacgttcgttttttagaaacaaatgcgttgggttcgacgctattaacaacggctaaattaaataaaggcactgcatttacggaatcagaacgacaggagttaggattacttggaaaattgccctatcgtgtcgaaagtttacagcaacaaacgcaacgtgtttaccaacaatttttaaaaaaagaagataatttagaaaagcacctttatttacggtgtttgcataatacaaatgaaatattattttataaattagtcagtcaacatttaacagagatgttgcctgtgttgtatacaccaactgttggaaaagccgttgaacaatttagtcaagaattccaagaagcacgtggtttatatattgcttatcccgataacgatcggatcgatcaaatccttgataatcgtttaaatccagaagtggacattattgtgatgaccgatggagagggtgtattaggtttaggtgatcaaggtatcggaggaatgggcatttgtatcgcaaaattaatcgtttatgttctctgtgcggggattaatcccaaccggttattgccaatacaaatcgatgtgggaacgaacaatgaacaattgctgaatgatcccctctatttgggttggcgtcatccccgcgtatcaggtcaacaatatgatgatatgatagcgcgtgttgtttctgcaatacaacgaaaattacctcgtgcttatttgcattgggaagattttggtcgtgaaaatgcacgacgtaatttagaatgctaccgtgatacgatgtgtacgtttaatgacgatatgcaagggacaggcgcagtgaccttagttgcactgttgtcggctattcggcgcactaaagttcctttaactgaacaacgcattgttattgtgggggcaggtacggctggaacagggattgccgatcaattatgtgcgggtatgctacgacaaggtttatcgagagatgaggcgttatcacgattttatttggtagggcggcatggcttgatacaagattcgacaccgaatctaacagcttttcaaaaaccttatgcccaacgattgatgaataaaaccgaggcgacgtggcagctctatgatgttgtgcaaaaatttaaacccacggtattaatcggtagttcgggtcaaggcggaatttttacggaagctatcgttaaaacgatggcaagtcaggttgaatatccaatcatttttccattgtcaaatccgacagaaaaatcagaagcaacacccgatgatttgttcaattggacagagggacgtgcactgattgcgacgggaagcccttttggtcaagtttattataaaggtgaaaaaataccgattgcacaatgtaataatgcgctgatttatccagggattggtttgggtgtcgttactgcacaagcaactcgtctcagtgatggcatgatttgggaagcctgcaacgctttaagccattttacccaaacatcatcgtcgaaaaaggcattattacctcattttgaagacatacaagccatgagtcgctgtatcgctttagcggtagctgcacaagcacgtcgagaaggtttagcacaagttccagactccattgatttgacccaagaaatggataggcaattttggaagcccgaatacctgccttatcgttattccaaatcgctatga

SEQ ID NO: 77955 - protein, 566 aa, Rickettsiella grylli
MPKFKPVTDQNENVRFLETNALGSTLLTTAKLNKGTAFTESERQELGLLGKLPYRVESLQQQTQRVYQQFLKKEDNLEKHLYLRCLHNTNEILFYKLVSQHLTEMLPVLYTPTVGKAVEQFSQEFQEARGLYIAYPDNDRIDQILDNRLNPEVDIIVMTDGEGVLGLGDQGIGGMGICIAKLIVYVLCAGINPNRLLPIQIDVGTNNEQLLNDPLYLGWRHPRVSGQQYDDMIARVVSAIQRKLPRAYLHWEDFGRENARRNLECYRDTMCTFNDDMQGTGAVTLVALLSAIRRTKVPLTEQRIVIVGAGTAGTGIADQLCAGMLRQGLSRDEALSRFYLVGRHGLIQDSTPNLTAFQKPYAQRLMNKTEATWQLYDVVQKFKPTVLIGSSGQGGIFTEAIVKTMASQVEYPIIFPLSNPTEKSEATPDDLFNWTEGRALIATGSPFGQVYYKGEKIPIAQCNNALIYPGIGLGVVTAQATRLSDGMIWEACNALSHFTQTSSSKKALLPHFEDIQAMSRCIALAVAAQARREGLAQVPDSIDLTQEMDRQFWKPEYLPYRYSKSL

SEQ ID NO: 77956 - DNA, 1689 bp, Vibrio sp. Ex25
  CDS (1)..(1689): transl_table=11
atgaacaacgataaacgcccactatatattccatatgcgggtccggctcttttagcaacccctcttttgaacaaaggcagtgcattctctgctgaagaacgtagttcattcaacttagaaggcttgcttccagagtctaccgaaacaatccaagagcaggtggaacgtgcctaccagcaatacaagagtttcgaaagcgatatggataagcacatttatctgcgtaatatccaagacaccaacgaaacactgtattaccgcctagtgcaaaaccacatttcagagatgatgcctatcatctacacgccaactgtcggcgcagcatgtgaaaacttctctaacatctaccgtcgtggtcgtggtctattcatttcatatccgaaccgtgaccgtattgacgatctgctgaacaacgcagcaaaccacaacgttaaagtgattgttgtgacagatggcgaacgtatccttggcttgggtgaccaaggtatcggcggcatgggtattcctattggtaaactgtcactttataccgcgtgtggtggtatcagccctgcttacacgctaccaatcgtgcttgatgtgggtaccaataacccgcaacgtttagctgatccgatgtacatgggttggcgtcaccctcgtattacgggtgcagaatacgatgcatttgtagaagagtttattcaagcagtacagcgccgttggcctgatgccttgatccagttcgaagactttgctcagaaaaatgcgatgcctcttcttgagcgttacaaagatcgcgtgtgctgcttcaatgatgatattcaaggcacggcggccgttactgttggctctctacttgcagcctgtaaagcagcaggtactcagctgtctaaacagcgtatcaccttcttgggcgctggctctgctggttgcggtatcgcagaagcgatcatcgcacaaatggtatcggaagggatttctgacgagcaagctcgctcacaagtttacatggttgaccgttggggtctgttacaagaaggtatgcctaaccttcttgatttccaacaacgcctggtgcagaaacataccaatacgaaagagtgggaaaatgaaggaaatggcttctcactcctcgacgttatgcgtaacgccaaaccaacggtactgattggtgtttctggtgctcctggcctatttagccaagaagtcatcgaagaaatgcataaacactgtaagcgtccgattgtcttcccactatcgaacccaacaagccgcgtagaagcaacacctaacgacatcattcgctggacaaatggtgaagcacttgttgcaacaggtagcccatttgagcctgtggttcatgaaggtcgcacttacccgattgcacaatgtaacaacagctacatcttcccaggcattggccttggtgtacttgctgtaaacgcaaaacgtgtcaccgacgaaatgctaatggaatcgagccgtgcgctcgcaacatgctctcctctagcaatcaacggtcgtggtgcactacttccaccgttggaagagattcactcggtatcgaaaaagatcgcgtttgctgttggtaagaaggcaatcgaacaaggtgtggcattagaaattactgatgaagcattgaacgtggcgattgaacaatcgttctggcagcctgtttaccgtcgttacaaacgcactgcgttctaa

SEQ ID NO: 77957 - protein, 562 aa, Vibrio sp. Ex25
MNNDKRPLYIPYAGPALLATPLLNKGSAFSAEERSSFNLEGLLPESTETIQEQVERAYQQYKSFESDMDKHIYLRNIQDTNETLYYRLVQNHISEMMPIIYTPTVGAACENFSNIYRRGRGLFISYPNRDRIDDLLNNAANHNVKVIVVTDGERILGLGDQGIGGMGIPIGKLSLYTACGGISPAYTLPIVLDVGTNNPQRLADPMYMGWRHPRITGAEYDAFVEEFIQAVQRRWPDALIQFEDFAQKNAMPLLERYKDRVCCFNDDIQGTAAVTVGSLLAACKAAGTQLSKQRITFLGAGSAGCGIAEAIIAQMVSEGISDEQARSQVYMVDRWGLLQEGMPNLLDFQQRLVQKHTNTKEWENEGNGFSLLDVMRNAKPTVLIGVSGAPGLFSQEVIEEMHKHCKRPIVFPLSNPTSRVEATPNDIIRWTNGEALVATGSPFEPVVHEGRTYPIAQCNNSYIFPGIGLGVLAVNAKRVTDEMLMESSRALATCSPLAINGRGALLPPLEEIHSVSKKIAFAVGKKAIEQGVALEITDEALNVAIEQSFWQPVYRRYKRTAF

SEQ ID NO: 77958 - DNA, 1695 bp, Alteromonadales bacterium TW-7
  CDS (1)..(1695): transl_table=11
atgacaacaaatactgatcctaattacttatatattcatcactctggccctggccttattgaaacgccattactaaacaagggcagtgcgtttagtaaaaaagagcgcgaaaattttaaccttgcaggtttacttcctccacgctttgaaaccatcgaagagcaagttgaacgttgttatcaacaatactcaagttttaccgacaatttaaataagcacatttatttacgtgccattcaagataacaacgaaacgctttattatcgcttagtgcgcgatcatcttgaagaaatgatgccgattatttacacccctacagtgggtgatgcctgtgaaaagttttcggatatttaccgcagcgcacgtggcttgtttatttcgtacgaagaccgttaccaaattgacgacattttacgtaatgccacaaagggtaaagtaaaagtcattgttgtgaccgacggtgaacgtatattaggactaggcgaccaaggtattggtggcatgggtattcctattggtaaattgtcattgtacaccgcgtgtggtggtataagcccagcatatacattgccagttatgcttgacgtagggaccaacaacgaaaagcttttaaatgatcctatgtatatgggcgcacgccataaacgtatagctcaagacgagtacgatgagtttttagatctatttattaaagcggtcaaacgccgttggccaaatgtattgcttcaatttgaagactttgcacaacccaatgctatgccgcttcttaagcgctatcgtgaagaaatttgtagctttaacgatgacattcaaggcactgcatcagtaacagttggctctttattagctgcgtgtcgtgttaaaggctcaactcttagccaacaaaaagttgtatttgttggtgcaggctctgcgggttgtggtattgctgagcaaattattagccaaatggtatttgaaggtatcactgaagagcaagcacgtagccaagtatttatggttgaccgttttggtctgttaactaatggcatggaaggtctacgcgacttccaacaagctttagcgcaaccaactgacgcgctaaatgattggacttacagtggtgaatacgcgtcattgttagatgtaatgcattgtgcaaaaccagacatacttattggtgtatcgggtcagccaggtttgtttacagagcaagttattcgtgcaatgcattcaacttgtgaacaacctataattttcccgttaagtaacccgtctaaacaggtagaagcacacccagaagacgtcattaaatggactgatggtaaagcattagttgcaacaggtagcccgtttgatcccgttgaatataatggtgaaactttcccaattccacagtgtaacaacagttatattttccctggtattggtttaggcgttattgcagctaaggctacacgcattacagatgccatgcttagcgtgtcgagtgaaatgcttgctgagtcttcaccgcgagcaaacagcggtaaaggcagtttattaccagcattaacagaaattgaaacgcttagtaaacgcattgcatttgctattgctaaaaaagcgatagaagagggtgttgcattggaaatttctgacgatgctctgtgggcagccattgataaaaattattggttaccaaaataccgtaactacaaacgttgcagcgtttaa

SEQ ID NO: 77959 - protein, 564 aa, Alteromonadales bacterium TW-7
MTTNTDPNYLYIHHSGPGLIETPLLNKGSAFSKKERENFNLAGLLPPRFETIEEQVERCYQQYSSFTDNLNKHIYLRAIQDNNETLYYRLVRDHLEEMMPIIYTPTVGDACEKFSDIYRSARGLFISYEDRYQIDDILRNATKGKVKVIVVTDGERILGLGDQGIGGMGIPIGKLSLYTACGGISPAYTLPVMLDVGTNNEKLLNDPMYMGARHKRIAQDEYDEFLDLFIKAVKRRWPNVLLQFEDFAQPNAMPLLKRYREEICSFNDDIQGTASVTVGSLLAACRVKGSTLSQQKVVFVGAGSAGCGIAEQIISQMVFEGITEEQARSQVFMVDRFGLLTNGMEGLRDFQQALAQPTDALNDWTYSGEYASLLDVMHCAKPDILIGVSGQPGLFTEQVIRAMHSTCEQPIIFPLSNPSKQVEAHPEDVIKWTDGKALVATGSPFDPVEYNGETFPIPQCNNSYIFPGIGLGVIAAKATRITDAMLSVSSEMLAESSPRANSGKGSLLPALTEIETLSKRIAFAIAKKAIEEGVALEISDDALWAAIDKNYWLPKYRNYKRCSV

SEQ ID NO: 77960 - DNA, 1935 bp, Zea mays; identical to SEQ ID NO: 5885
  CDS (1)..(1935)

SEQ ID NO: 77961 - protein, 644 aa, Zea mays; identical to SEQ ID NO: 5886

SEQ ID NO: 77962 - DNA, 1836 bp, Medicago truncatula
  CDS (1)..(1836)
atgtggaaggttacgcgattcgccgcatcatcgcgatcgcggttgttctcgacggcgatacctgcaccgtgtatggttcataaacgtggtgctgatattcttcatgatccttggttcaataaggatacaggatttcctttaactgaaagagatcgtttgggtcttcgaggcctccttcctcctcgtatcatttcatttcaggagcaatatgaccgttttaccataacatattattattttaattttccagtgagctcatatagatcattggagaagaatacccatggccagtcagataaaattgtttccttatccaaatggaggatcttaaatagactacatgacaggaatgagacattgtactatagagcacttattgataacatcaaagaatttgctccaataatttatactcctacagttgggttagtgtgtcaaaattattgtgggttatatagacgcccacgtggaatgtattttagtgccaaagataaaggagagatgatgtcaatgatctataactggccagctcctcaggtagacatgattgtcttgacagatggtagtcgtattcttgggttaggtgaccttggagttcagggcattggaatacctgtaggaaaacttgatatgtatgttgcagctgctggtatcaacccacaaagaatacttccgatcatgctggatgttggaacaaacaatcaaaagctacttgatgatcgcctttatttaggacttcgacaacctaggttggaaggtgaagagtatctgtctattgtggatgaattcatggaagctgttcacgcacggtggccgaaggctattgtgcagtttgaggatttccaaatgaagtgggcttttgaaaccctgaaacgatatcgccataagttttgcatgtttaatgatgatatacagggcacagctggtgttgcacttgctggactactgggaactgtaagagcccaaggtcgaccgttgtctgattttgcaaaacaaaagatagttatagttggagctgggagtgcagggcttggcgttcttaacatggctgtccaagcagtttcaaggatgtcagggtgcagcgaaacagctgcaaaaagtcaatttttcttaattgataaaaatggtcttgtcacgacagaaaggagtaatctagatccagctgcagttccatttgctaaaaatccaagagaccttgaagggcttgcagagggtgctagtatcattgaagtggttaagaaggttaagccacatgtgctgcttggattgtctggggttggtggtgtctttaatgagcaggttcttaaggcaatgagagaatctgtttcaacaaaaccggctatctttgccatgtctaatcccactatgaatgctgagtgtactgctattgatgcatttaatcatgctggagaaaacatagtgtttgcaagtggaagcccttttgaaaatgtagatcttggaaatggaagagctggccatgtaaatcaagccaacaacatgtacctgtttccagggattggcttgggatcacttctgtctggtgctcatcatataacagatggaatgttgcaggcagcatctgaatgccttgcttcatacatgacagaggaagatatccaaaaaggaatcttgtatccatccattgattgtatacgaaatgttacagcagaggtcggggctgctgttctacgtgcagcaattgctgaaggactggctgaaggacacgggggtgttgggtccaaagaacttgaacatatgtcagaagatgatactgtggagtatgtcagaggaaatatgtggtaccctgagtattgccctcttgttcatgaaaaatga

SEQ ID NO: 77963 - protein, 611 aa, Medicago truncatula
MWKVTRFAASSRSRLFSTAIPAPCMVHKRGADILHDPWFNKDTGFPLTERDRLGLRGLLPPRIISFQEQYDRFTITYYYFNFPVSSYRSLEKNTHGQSDKIVSLSKWRILNRLHDRNETLYYRALIDNIKEFAPIIYTPTVGLVCQNYCGLYRRPRGMYFSAKDKGEMMSMIYNWPAPQVDMIVLTDGSRILGLGDLGVQGIGIPVGKLDMYVAAAGINPQRILPIMLDVGTNNQKLLDDRLYLGLRQPRLEGEEYLSIVDEFMEAVHARWPKAIVQFEDFQMKWAFETLKRYRHKFCMFNDDIQGTAGVALAGLLGTVRAQGRPLSDFAKQKIVIVGAGSAGLGVLNMAVQAVSRMSGCSETAAKSQFFLIDKNGLVTTERSNLDPAAVPFAKNPRDLEGLAEGASIIEVVKKVKPHVLLGLSGVGGVFNEQVLKAMRESVSTKPAIFAMSNPTMNAECTAIDAFNHAGENIVFASGSPFENVDLGNGRAGHVNQANNMYLFPGIGLGSLLSGAHHITDGMLQAASECLASYMTEEDIQKGILYPSIDCIRNVTAEVGAAVLRAAIAEGLAEGHGGVGSKELEHMSEDDTVEYVRGNMWYPEYCPLVHEK

SEQ ID NO: 77964 - DNA, 1830 bp, Aspergillus niger
  CDS (1)..(1830)
atggctctatctctcctgagactcaagcccaacccgccgtcttcccttctacccctgcagagccatacatctatcaagtcggtcgcgagaatgtctacgtcctcgaaatcttccaagttcagtcatcttccccgggcttcgtccggacctttggtgtgtccgtttgaggggagagatgctctgcagtcatgccagttcaataaaggctcggcgtttacagaggaggagcgcaaaacattcaagcttcatggtctgcttcctcccaacattcagaccctcgaggagcaggttcagcgggcctacgagcaatatagcagtcgagataatgatctggctaagaacacgtttatggctagtatgaaggcgcagaatgaggttctttactacaagttgattgatacccatctcaaggagatgctcagcattatttacactcccactgaaggcgatgcaattcagaactattctcgattgttccggaagccagagggctgtttcctgaacatcagggaccaagacagaattgaagagtgcctttccaatttcagccgcggcgaagaagtcgactatatagtcgttagcgatggtgaagagatcttagggattggtgaccaaggcgtaggcgctatcttgatctcggttgccaaattagccctgaccacattgtgtgctgggatacacccaagtcggcaattgccagtggttctagactgtgggacagataatgaatcacttctcacggacgagctatacctgggtctccgacagtcgcgcgtcagaggcgaggaatatgatcaattcgtggaaaagtttgtggaaacggctcgaaagaggttcccacgcgcgtatatacacttcgaggattttggccttcataacgccaagagaatcttggataaattcaaatcgcgtatcccgtgcttcaatgacgatattcaggggactggctgtgtcaccctggctgccttgttatccggattccacgtgggtggtatcgaattagaggatgctcgtgttgtcgtctttggatctggatcagcgggcactggtatcgcggagcagctcgctgataccatcgcaactgaaacacacaaacctaaagaagaagcctcaaagcagatatggtgtctcgacaaaccgggtcttctggtcaaatcgctcggagaccagctgacgccagcccaagtaccctttgcgcgagacgacaaagagtggcctgatgcggattcgcgcgatctgctttcagtagtgaagaaggtgaagccgcatgccttgatcggtacctccactaaaccgaactctttcaccgaggatgtgatccgggaaatggcgaagcacgtcgaaaagccaatcatattccccctcagtaacccgactcgtctgcacgaggcacagcctgaggacatcaatcgttggactgatggccgggctttgatagccaccggcagccctttcccacccgtcgatcgcaacgggggaaagtatgagatagcggaatgtaacaactcgacatgctttcccgggatcgggttgggcgcagtcctgtcgcgaacacgaacgttgtccaacaagatgcttgtgagtgcagtcaaggcattggcagcgcggtcgccagcactgcaggatcccaacggacctctcctacctgatgtcagagatgtacgggagcttagcgtcgacatcgccaaagccattattaagacggcggtcaaagaagggcatgctgaagaggagggaattcccacgaatgaagatgagttagaagagtggattcgggcgcaaatgtgggaacccgtatacaggccccttgtgaagccacaaaaacaatga

SEQ ID NO: 77965 - protein, 609 aa, Aspergillus niger
MALSLLRLKPNPPSSLLPLQSHTSIKSVARMSTSSKSSKFSHLPRASSGPLVCPFEGRDALQSCQFNKGSAFTEEERKTFKLHGLLPPNIQTLEEQVQRAYEQYSSRDNDLAKNTFMASMKAQNEVLYYKLIDTHLKEMLSIIYTPTEGDAIQNYSRLFRKPEGCFLNIRDQDRIEECLSNFSRGEEVDYIVVSDGEEILGIGDQGVGAILISVAKLALTTLCAGIHPSRQLPVVLDCGTDNESLLTDELYLGLRQSRVRGEEYDQFVEKFVETARKRFPRAYIHFEDFGLHNAKRILDKFKSRIPCFNDDIQGTGCVTLAALLSGFHVGGIELEDARVVVFGSGSAGTGIAEQLADTIATETHKPKEEASKQIWCLDKPGLLVKSLGDQLTPAQVPFARDDKEWPDADSRDLLSVVKKVKPHALIGTSTKPNSFTEDVIREMAKHVEKPIIFPLSNPTRLHEAQPEDINRWTDGRALIATGSPFPPVDRNGGKYEIAECNNSTCFPGIGLGAVLSRTRTLSNKMLVSAVKALAARSPALQDPNGPLLPDVRDVRELSVDIAKAIIKTAVKEGHAEEEGIPTNEDELEEWIRAQMWEPVYRPLVKPQKQ

SEQ ID NO: 77966 - DNA, 1779 bp, Tigriopus californicus
  CDS (1)..(1779)
atgagttacaagcctttggatcgaattggatccaggccaatggccacccgagtaacagctgatcgaggaacatcagttgcaccctccactgttcccggaatggattacctccgcaatcccaagctcttcaagggcatgggattcagtcttgaagagagacaggctcttggaattcatggcttgctcccaccgaggatcaagacccaagatgagcaagtggataattgtttgagaaacttgaatcgttacgagaacaaactgaatcaatatgtgtacatgattgatcttttggaccgaaatgagagactcttctacaagcttctgtcggaaaatgtgcaaaaactcatgcccattgtgtatacacccactgtgggagaggcatgccagaagtttgggtacactttcaaaagacctcagggcctatttatcactttttacgacaagggacatatctatgacatcttgcaaaactggcccgaaaatgatgttcgagccattgttgtaactgacggagagcgtattttgggtttgggagatttgggggttcacggaatgggcattcccgtgggtaaattggctctctacacggctttggccggaatcaagcctcaccaaactctgcccatcactttggatgtggggaccaataaccaaaagttcttggaagatgccgattatgttggtctgcgccatcgtcgcgtcactggccaagattatgacgacttcatcgacgagtttatggatgcggtggtccagcgatatggccagaacaccttgatccaattcgaggattttggcaatcacaatgccttccgctttctggagaagtaccgcaacaagttctgcaccttcaatgacgacatccaaggaacagcttccgtcgctgtagctggcatcctggctgctctgaaagcaacggacaccaaactctcggatcacaccttcttgttccaaggtgctggagaggctgccattgggatcgcccaacttctggccaaggccatggaaaaacgggaaggcattcccgaggccgaagcacgaaagcagatctggatgaaagactccaaaggtctgattgtcaaggatcgacctgagggagggatcagccaacataaggccccatttgctcacgagcacgagcccatgaaggaactggaagacattgtgaagaagttgaagccctcttgtttgattggggctgccgccatatcgggggtatttaaccaaggcatcctggaggacatggcctctttcaacaaaaggcccattgtttttgccttgagcaatcccaccgataaggctgagtgcactgctgaagacgcttacaaacacaccaagggtcaagtagtgtatgcttcgggatcgccatttgagccttttgactacgatggcaaacgtgtggagcctggtcaagggaataatgcctatatcttccctggagtgtccttgggtgtgatttgcactggcatccatcatatttccgatgaggtcttcttgggtgcggctgaagccttggctgatatggttacccccgatgatttggctgttggtcgactctacccacccattgagaaaatcaaggattgttcgatcaagattgcggccaatattgctaatattgcttatgaggaccaaacggcatccacctatccggagcccaaagataaagaagagttcattcggagccagttgtacaactatgagtacgacggggtcagcgctctaccagaacgttatgattggccagaagaggtccaaaagccttttagtaaactgtaa

SEQ ID NO: 77967 - protein, 592 aa, Tigriopus californicus
MSYKPLDRIGSRPMATRVTADRGTSVAPSTVPGMDYLRNPKLFKGMGFSLEERQALGIHGLLPPRIKTQDEQVDNCLRNLNRYENKLNQYVYMIDLLDRNERLFYKLLSENVQKLMPIVYTPTVGEACQKFGYTFKRPQGLFITFYDKGHIYDILQNWPENDVRAIVVTDGERILGLGDLGVHGMGIPVGKLALYTALAGIKPHQTLPITLDVGTNNQKFLEDADYVGLRHRRVTGQDYDDFIDEFMDAVVQRYGQNTLIQFEDFGNHNAFRFLEKYRNKFCTFNDDIQGTASVAVAGILAALKATDTKLSDHTFLFQGAGEAAIGIAQLLAKAMEKREGIPEAEARKQIWMKDSKGLIVKDRPEGGISQHKAPFAHEHEPMKELEDIVKKLKPSCLIGAAAISGVFNQGILEDMASFNKRPIVFALSNPTDKAECTAEDAYKHTKGQVVYASGSPFEPFDYDGKRVEPGQGNNAYIFPGVSLGVICTGIHHISDEVFLGAAEALADMVTPDDLAVGRLYPPIEKIKDCSIKIAANIANIAYEDQTASTYPEPKDKEEFIRSQLYNYEYDGVSALPERYDWPEEVQKPFSKL

SEQ ID NO: 77968 - DNA, 1779 bp, Tigriopus californicus
  CDS (1)..(1779)
atgagttacaagcctttggatcgaattggatccaggccaatggccaccagagtaacagctgatcgaggaacatcagttgcaccctccactgttcccggaatggattacctccgcaatcccaagctcttcaagggcatgggattcagtcttgaagagagacaggctcttggaattcatggcttgctcccaccgaggatcaagacccaagatgagcaagtggacaattgtttgagaaacttgaatcgttacgagaacaaactgaatcaatatgtgtacatgattgatcttttggaccgaaatgagagactcttctacaagcttctgtcggaaaatgtgcaaaaactcatgcccattgtgtatacacccactgtgggagaggcatgccagaagtttgggtacactttcaaaagacctcagggcctatttatcactatttacgacaagggacatatctatgacatcttgcaaaattggcccgaaaatgatgttcgagccattgttgtaactgacggagagcgtattttgggtttgggagatttgggggttcacggaatgggaattcccgtgggtaaattggctctctacacggctttggccggaatcaagcctcaccaaactctgcccatcactttggatgtggggaccaataaccaaaagttcttggaagatgccgattatgttggtttgcgccatcgtcgtgtcactggccaagattacgacgacttcatcgacgagtttatggatgcggtggtccagcgatatggccagaacaccttgatccaattcgaggattttggcaatcacaatgccttccgctttctggagaagtaccgcaacaagttctgcaccttcaatgacgacatccaaggaacagcttccgtcgctgtagctggcatcctggctgctctgaaagcaacggacaccaaactctcggatcacaccttcttgttccaaggtgctggagaggctgccattgggatcgcccaacttctggccaaggccatggaaaaacgggaaggcattcccgaggccgaagctcgaaagcagatctggatgaaagactccaaaggtctgattgtcaaggatcgacctgagggagggatcagccaacataaggccccatttgctcgcgagcacgagcccatgaaggaactggaagacattgtgaaggagttgaagccctcgtgcttgattggggctgccgccatatcgggggtatttaaccaaggcatcctggaggacatggcctctttcaacaaaaggcccattgtttttgccttgagcaatcccaccgataaggctgagtgcactgctgaagacgcttacaaacacaccaagggtcaagtagtatatgcctccggatcgccatttgagccatttgactacgatggcaaacgtgtggagcctggtcaagggaataatgcctacatcttccctggagtatccttgggtgtgatttgcaccggcatccatcatatttccgatgaggtcttcttgggtgcggctgaagccttggctgatatggttacccctgaagatttggctgttggtcgactctacccacccattgagaaaatcaaggattgctcgatcaagattgcggccaatattgctaatattgcttatgaggaccaaacggcatccacctatccggagcccaaagataaagaagagttcattcggagccagttgtacaactatgagtacgacggggtcagcgctctaccagaacgttatgattggccagaggaggtccaaaagccttttagtaaactgtaa

SEQ ID NO: 77969 - protein, 592 aa, Tigriopus californicus
MSYKPLDRIGSRPMATRVTADRGTSVAPSTVPGMDYLRNPKLFKGMGFSLEERQALGIHGLLPPRIKTQDEQVDNCLRNLNRYENKLNQYVYMIDLLDRNERLFYKLLSENVQKLMPIVYTPTVGEACQKFGYTFKRPQGLFITIYDKGHIYDILQNWPENDVRAIVVTDGERILGLGDLGVHGMGIPVGKLALYTALAGIKPHQTLPITLDVGTNNQKFLEDADYVGLRHRRVTGQDYDDFIDEFMDAVVQRYGQNTLIQFEDFGNHNAFRFLEKYRNKFCTFNDDIQGTASVAVAGILAALKATDTKLSDHTFLFQGAGEAAIGIAQLLAKAMEKREGIPEAEARKQIWMKDSKGLIVKDRPEGGISQHKAPFAREHEPMKELEDIVKELKPSCLIGAAAISGVFNQGILEDMASFNKRPIVFALSNPTDKAECTAEDAYKHTKGQVVYASGSPFEPFDYDGKRVEPGQGNNAYIFPGVSLGVICTGIHHISDEVFLGAAEALADMVTPEDLAVGRLYPPIEKIKDCSIKIAANIANIAYEDQTASTYPEPKDKEEFIRSQLYNYEYDGVSALPERYDWPEEVQKPFSKL

SEQ ID NO: 77970 - DNA, 2310 bp, Solanum lycopersicum
  CDS (105)..(2027)
agagttgtgaggacaagtaggagagaggaagataaagagcagtactttttgagcagatctatcacaaacaatctcttctctctcactctgcccaaaactcagccatgttctccttgaatggcaccagttttacgaacaattcgttatctggggtttcaagatgtttgaatcagtcaagcagaagagtttcagctcctatggtggtggtagccgccgtgaactcaaacggaaaacctggagatggaagtgttagtgtattggttgagaatgctttgacggaaagtcctgcaccggttgagatggaggttaaatctactgttactggtggagttcaagacgtttatggtgaggatagtgccacagaagatcaatccatcacaccttggaccttatctgttgctagtggtttctcattgttgcgtaacccacactacaataagggccttgctttctctgagagagagagagacacccactatttgcgtggtcttcttcctcctgtcgtaattagtcatgaccttcaggtcaagaaaatgatgaacagcatccgtaagtatgatgtaccacttcaaagatacatggccatgatggatcttcaggaaatgaatgagcggctattctacaagcttcttattgacaatgttgaggagcttcttccgatagtttacactccaactgttggtgaagcatgccagaaatatggtagcatcttcaggcgtcctcaaggtctttttatcagcttgaaagaaaaaggcaaaattcacgaggtattaaaaaattggcccgagaagaaaattcaagttattgttgttactgatggagaacgaattctgggccttggggaccttggttgccagggaatggggataccagtgggcaagctctctttatacactgctctgggaggcattcgtccttcagcttgtttgcccgttaccattgatgtgggtacaaacaatgaaaatttgttgaacgatgaattctacattggactcaggcaaagaagagctaccggacaggaatattctgaacttttagatgaatttatgtatgccgtcaagcagaattatggggagaaagtgctcattcagtttgaagactttgcaaatcataatgcatttgacctccttgcaaagtatggaactagccaccttgttttcaatgatgacatacaggggacagcatccgtggtccttgctgggctgatggccgcattaaacttggttggaggaagcttgtctgaacatacattcttattccttggagcaggagaggctggcacaggtatagctgaactcatagctcttgagatgtcaaagcagactggaatccctctagaagagactcgcaagaaaatttggatggtggattctaaggggctaattgttaagtctcgcatggagatgcttcaacatttcaagaggccctgggcacatgaccacgaaccagtacaagaactagtgaatgccgtgaagtcaattaagcctacggtcttgattggatcttctggagctgggagaacgtttactaaagaagttgtacaagctatggcaaccttcaatgagaaaccaattatttttgccctctccaatccaacatcacagtctgaatgtactgctgaggaggcttatagctggagtgaggggcgagccatttttgctagtgggagtccatttgctccagttgagtacaatgggaaggtctatgcgtctggccaggcaaataatgcatatattttccctgggtttggtctaggactgataatctctggtgcaattcgtgtccacgatgacatgctcctggtagcctcggaagctttagcggacgaagtttctcaagagaactttgaaaagggactcatatacccgccattttccaacataagaaagatttcagcgcatattcgtgccaaagtggcagctaaagcatatgaattaggtttggccactcgtctaccgcagcccaaggacctagtcgcatatgcagagagctgcatgtacagcccagcataccgcagctatcgttgagtcagagaagatattgttgcttcaaaattagtcactgttccttccagtgttagttagttattgatgtcattcctttctccttttagttggtttgctcttaaaatttaagaaaatacggtagcttgcagatatggtgtactcgtgaaatatttgattatgttaagagttaaatgtagggaactttgcagcatcaaatattagtagattattgtggagaagaagaaaataaccaaatgtctttgatactttggtgtcttatataattaaaaaaaaaaaaaaaaaa

SEQ ID NO: 77971 - protein, 640 aa, Solanum lycopersicum; identical to SEQ ID NO: 5898

SEQ ID NO: 77972 - DNA, 1740 bp, Solanum lycopersicum; identical to SEQ ID NO: 5899
  CDS (1)..(1740)

SEQ ID NO: 77973 - protein, 579 aa, Solanum lycopersicum; identical to SEQ ID NO: 5900

SEQ ID NO: 77974 - DNA, 2186 bp, Vitis vinifera
  CDS (157)..(2079)
gcacgagctcatataagcgacagctgcagagagagaaggagagtcagtagaaaaccgaggagggcttaacctgaagactctctcttacagtttctctgcatctctcattttcttcctgaattgagtgttggaagggcgcaaaactctcttgtcaccatgatctcgttgaacagcagtagtttcctgagcaactcgggcttttccgggatttctcggagcgtgtctcagaggaaggttctacctccggtagtgttggctttggggtccaacggcagagcaggggagctaaacgtcagcgctgtgatggagagtaccttgaaggagttgagggatggtaacacggtgcttgaggtggattcgaaatccgcggtcagtggtggggttcgggatgttcaaggcgaggatgccgccacagaggatcagattgttactccttggactataaccgtcgctagcggttattcgttattgcggaatccacatcataataaagggcttgccttcactgaaaaagagagagatcaccattatttacgtggccttctccctccagctgttgtctctcaagatcttcaggtaaaaaagttgatggccaatatccgccagtatactgttccattgcagaagtacatggcaatgatggatcttcaggaaagaaatgaaaagctgttctacaagctactcatggataatgttgaggagctactcccagttgtctataccccaacggttggtgaagcttgccaaaaatatggaggcatcttgaggcgtcctcagggccttttcattagtctgaatgagaaggggaagattcttgaggtactgaagaactggcctgagaagaatattcaagttattgttgtcactgatggggagcgaattttggggcttggggatcttggttgccagggtatggggataccagtagggaaactctctttatacaccgcacttggaggagttcgtccttcagcctgcttgccagttacaattgatgtgggaacaaacaatcagaaattattggatgatgagttctatatcgggctccggcagaagagggcaacagggcaggaatatgctgaacttatacatgaattcatgtgtgcggtcaagcagaactatggggagaaagtccttgttcagtttgaggactttgcaaaccacaacgcatttgatctgcttgcaagatatggtacaactcatctcgttttcaatgatgatattcagggaacggcatctgtggttcttgcagggcttatttcagcgctaaatttagttgggggaaccttagctgaacatacatttttattccttggtgctggagaggctggcactggaatagcagaactcatagctcttgagatgtcaaaacagacacaagctccactggaagagacccgcaagaagatttggcttgtggactcaaagggattgattgttagctcccgcatggattcacttcaacatttcaagaagccctgggctcatgagcatgagcctattaaaaatctcgtagatgctgttaaggcaatcaagccaacggtgttgattggatcttcaggagtaggcagaacatttactaaggaggtggttgaggccatggcctccttcaatgagaaacccatcattcttgctctctccaacccgacttcacaatctgaatgcacagctgaagaagcttatacatggagtgagggtcgtgccatttttgctagtggaagcccatttgaccccgtcgaatacaatggaaaagtttttgtgcctggacagtcaaataatgcatacattttccctggatttggtctgggtttgatcatctctggtgcaatccgtgtgcatgacgacatgcttttggcagcctcggaagctttggcaaaacaggcaacccaggagaacttcgacaagggaatgatatacccaccattctctaatatcagaaagatttcagcccatattgccgctaatgtggctgctaaagcttacgagcttggtttggctacccgtctccctcagccggaaaatctggtggagtatgctgagaactgcatgtacagccctgcatatcgatcattccggtgaatgggtgggaagatcctgtagtgttggcttgaagtttaattttcatgttctttctttttaatcatttacaccttattttttcctttttattaccccctattcccttc

SEQ ID NO: 77975 - protein, 640 aa, Vitis vinifera; identical to SEQ ID NO: 5902

SEQ ID NO: 77976 - DNA, 2453 bp, Aloe arborescens
  CDS (308)..(2086)
ggcacgaggaacacgcgagcggagtaatcaatattcaaaagttcgagagagagagagagagagagagagagagagagaggagggaggacaacatcttcgttttgttctcgactctctgtcatcttcacggttcaaatttcaagctgccgccatgctctccaccctcaaagccgccagctttctgaaaagcgaggaaaagatcgaatttttctcggcgcagcgaaggagatcgtcggtggtggtgggctcaagagtgatcaattgctgcagcgcgaggaaagagggggccaacttgaggggggtgaagatggagagcatgatgaagagtctgagaggcgacgacgtgtcggtgctggatctcgatccgaagacagctgttggaggtggggtcggtgacgtgtacggcgaggaccgggcgactgaggagcagcaagtcacgccttggactgtttcagttgccagtggttactctttgttgagggatccacaccacaacaaagggcttgcctttagcgagaaagagagggatgcccattacttgcgaggccttttaccacccacatgcatcagtcaagagatccaagtaaaaaagatgttgcacaatcttcgccagtatcaggtgcccctccagcggtacatggcaatgatggatcttcaggagatgaatgagagacttttctacaagcttctcatcgatcatgttgaggaattgctcccggttgtttacacaccaacagtcggtgaggcttgccagaagtacggctgcatctttaggcgtccacagggtctttatatcagcttaaaagaaaagggaaagattcttgaggtgttgaagaactggcctgagaggaacattcaagttattgttgtcactgatggtgagcgcattttggggcttggcgatcttggttgtcaggggatgggaattcctgtaggcaagttgtccctttacactgccctaggaggcattcgtccttctgcatgcttaccagtcaccattgacgtggggacaaacaatgagcaacttttgaaggatgaattttatattggattgaggcaaaagcgtgctactggccaggaatatgctgagttactgcatgaatttatggctgctgtcaaacagaactatggggagaaagttcttattcagtttgaagactttgccaaccataatgcatttgagttactagcaaaatatagtacaagccatctcgtcttcaatgatgatattcagggaacggcttctgttgtacttgctgggcttgttgctgcactgaagttggttggtggaacattagcggagcacactttcttgtttctgggtgctggcgaggctggtaccggtattgcagagcttatagctcttgaaatgtcaaaacagacaaaagctccggtcgaagagactcgtaagaagatttggcttgtagattccaagggcttgatcgtgagctcacgcaaggatacactgcaacactttaagaagccttgggcacatgaacatgaacctgttgacactctcttaggggctgtgaagaccatcaagccaacagtgctgataggatcatccggagtggggagaactttcacgaaggaggtcatcgaggccatgtcctctttcaccgagaagccggtgattcttgcgctatcaaacccaacatcgcagtctgagtgtactgctgaagaagcatacacttggagtaagggccgagccatttttgccagcgggagcccatttgatccagttttatacaacggaaagctctttgtacccggccaggcaaataatgcttacattttccccggactcggtcttggactggtgatctccggagcaatacgtgtacatgacgacatgcttcttgcagcttccgaagcattggctcagcaggtgacgcaagagaatttcgccaatggactcatctatccaccttttagcataatcagaaagatctctgcccagatcgctgctaatgtagcagctaaagcttatgagctaggtcttgccactcgtctccctcgaccagcggaccttgtgaaatacgcagagagctgcatgtacaccccagcgtaccgcagttacagataaatcaatggaaggtggacgatatttccttaaatgttgtactttaactgttctgagttgcctgtgttatcccttataggtgttccagtttccaaagtttcaggtattatgttagcaagtagttcttgtctctgtggtgttctttctcacagtaatgcctggagagcctagcttcgctcagagcgttaacttgaaattcacaggtccagtgggattatagactagaatcgtgttttagttttattgcctgtgttgctcttagttgcccattcgttttgaaataagctgatgttgcacctaatttccatgttgtaatacttagtcatatgtaacagttgtattttctgatgttttagttaccagtttgtgc

SEQ ID NO: 77977 - protein, 592 aa, Aloe arborescens; identical to SEQ ID NO: 5904

SEQ ID NO: 77978 - DNA, 1959 bp, Zea mays
  CDS (1)..(1959)
atggcctcggtgtccgtcgtgctgctacagcgctcctcctcgcgcgtccgaggatatatacggctccagcgcatcgccagctcttcagttacgttggttttggagggcgaggggcattggtggtggagcaacagccgcggccgcgacgagaggtttggcgcaagaacggtgcaccatatggcgggatcagtagaggggaaaacggcggcgtgccggtggggtggtcaagttgcgatggcgccgggcgtggtgaccggcggtgtggaggatgcctatggcgaggaccgcgcgaccgaggaccagactgtcacaccgtgggccgtctgcatcgcaagtggtcactccctgctgagggatccaaggcacaacaaagggctctctttcacggagaaagagcgggacacgcactacctgcgaggattattgcctccggtagtgctatctcaggacctccaggagaagaggatgttgcagaatgttaggcagttccaggtgcccttgcagcgctacactgcgctaatggaccttcaggagagaaatgagaggctattttacaagctcttgattgacaatgtcgaagaactgcttcctgttgtgtatacaccaacagtgggggaagcttgccagaagtatgggtcgatcttcagacgaccgcagggtttatacatcagcctcaaggagaagggaaggatcttggaggtactgaggaactggacagagaagagtattcaggttattgtggtcactgatggtgagcgcattttaggcctgggagatcttggttgccagggcatgggaattcctgtggggaagcttgcactgtatactgctcttggaggtgtacggccatccgcttgcttacctattaccattgatgtgggaacaaataatgaagacctactgaaggatgaattctacattggcttaaagcaaagaagagcaactggccaggaatactctgaatttctggatgagtttatggccgcagttaggcagaactatggacaaaaagttcttgtccagtttgaggactttgcaaaccacaatgcatttacacttcttgagaagtacaggacaaaccatcttgtatttaatgatgatatccagggcacggctgctgtagttcttgcagggattattgctgctctgaagtctgttggtgggactctagctgatcatacattcttgttcttcggtgcaggagaggctggtacgggcattgctgaactagttgctctcgagatatccagacaggcaaatgtttcagtagaagaggctcgcaaaaagatctggctggttgattcaaagggactaattgtggcctcacgtgaagagactctccagccatttaagaagcgatatgcacatgagcatgaacctgtcaaagatcttttaggtgctgttaaggctatcagaccaactgcactcataggatcagctggtgtaggtcaaagtttcactaaagaggtgattgaggttatgtcttcgattaatgagagacccattgtccttgctctatcgaacccgacgtcacagtctgaatgtactgctgaacaagcatatacatggagtcaggggcgtgccatatttggcagtggaagcccatttgatccggtgaaatataatgacaagctgtttgtgcctgcccaggcaaacaatgcatacattttccctgggtttggtctaggggtggtgatctcaggagccgtccgggtgtcagacgatatggttcttgctgctgctgaagcactagcggaacaggtaaccccggagcatattgagaaaggcctgatctacccgcccttctccatcatcaggaagatttcagctaacatagctgcccatgtcgccgcaaaagcttatgatctcggaatggctacccagctccctcggccaaaagacctggtgaagtacgctgagagctgcatgtacagccccgtctaccgatcgtacaggtga

SEQ ID NO: 77979 - protein, 652 aa, Zea mays
MASVSVVLLQRSSSRVRGYIRLQRIASSSVTLVLEGEGHWWWSNSRGRDERFGARTVHHMAGSVEGKTAACRWGGQVAMAPGVVTGGVEDAYGEDRATEDQTVTPWAVCIASGHSLLRDPRHNKGLSFTEKERDTHYLRGLLPPVVLSQDLQEKRMLQNVRQFQVPLQRYTALMDLQERNERLFYKLLIDNVEELLPVVYTPTVGEACQKYGSIFRRPQGLYISLKEKGRILEVLRNWTEKSIQVIVVTDGERILGLGDLGCQGMGIPVGKLALYTALGGVRPSACLPITIDVGTNNEDLLKDEFYIGLKQRRATGQEYSEFLDEFMAAVRQNYGQKVLVQFEDFANHNAFTLLEKYRTNHLVFNDDIQGTAAVVLAGIIAALKSVGGTLADHTFLFFGAGEAGTGIAELVALEISRQANVSVEEARKKIWLVDSKGLIVASREETLQPFKKRYAHEHEPVKDLLGAVKAIRPTALIGSAGVGQSFTKEVIEVMSSINERPIVLALSNPTSQSECTAEQAYTWSQGRAIFGSGSPFDPVKYNDKLFVPAQANNAYIFPGFGLGVVISGAVRVSDDMVLAAAEALAEQVTPEHIEKGLIYPPFSIIRKISANIAAHVAAKAYDLGMATQLPRPKDLVKYAESCMYSPVYRSYR

SEQ ID NO: 77980 - DNA, 1931 bp, Nicotiana tabacum
  CDS (69)..(1844)
gaactagtggatcccccgggctgcaggaattcggcacgaggaaagaagaaaagttaaaagagaaaatcatggagagcgcgttgaaggagcagagaggaggagaatcggtgcttgacctgtcaccgagagcaacaccggcgggtggtgtcgaggatgtctacggtgaggattgcgccaccgaggaccagcttatcactccctggactatcgccgtttctagtggctacaacttgttgagggacccacgttacaacaaagggcttgccttcactgagagagaaagagatgctcattacttgcgaggccttctgcctcctgtgatttccacacaggagcttcaggagaaaaaaattatgcagtctcttcgccagtatgatgtccctctgcacaaatatgtcgccatgatggaattagaggaaagaaatgaaaggttgttttacaagcttcttatcgataatgtagaagagttacttccaattgtctacactccaactgttggtgaggcgtgccaaaagtatggaagcatctttaagcgtcctcagggtttatacatcagcttgaaagaaaagggaaggatccttgaggtattgaagaactggcctgaaagatcaatacaggttattgttgtgactgatggagaaagaattttgggacttggggacctcggctgccagggaatggggataccagttgggaagttggctctgtatactgcacttggaggagtcagaccttcagcgtgcttgccaataaccattgacgttgggacaaataatgagcagttactgaaagatgaattctacattggtctcagacaaaagagagcaactgggcaggaatactatgacttcctacatgagttcatgtcagctgtaaagcaaaattatggtgaaaaaattctcgtacagtttgaagattttgcaaaccacaatgcttttgagctgttggctaaatatggtaccactcatttggtcttcaatgatgatatacaggggacagcttctgtggtgcttgcagggcttattgcatcccttaagctacttggaggctcattagctgatcatacattcttgttcctcggagcaggagaagctgggactggtattgcagaactcatagcacttgaaatttcaaagaagacaaaatatcccgtggaggagacacgaaaaaagatctggcttgtggattcaaagggtcttattgttagtggtcgcaaggaaacacttcaatccttcaagaagccttgggctcatgaacacgaacctgttaacaatctcctagatgctgttaaggccattaagccaaccgtcttaattgggacatctggagttggaagaacatttacaaaggaagttattgaggccatggcctccacaaatgagagacctcttattatggctctctcaaacccaacctcacaagctgaatgtacagctgaagaagcttatacttggagtgagggtcgcgctgtttttgccagtggaagtccattcccttcttttgaatacaatggcaaactcaacattcctggccaggcaaacaactgttacatattccctggatttggttttgggttggtcatgtctggtacaatccgtgtgcatgatgacatgcttttagcagcttcggaagctttggctgctcaagtaactgaggaacattttgccaaggggatgatataccctccttttgctgatatcagaaagatctcagctcacatagctgctagtgttgcagccaaagcatatgaacttgttgtggcaacacgtctccctcgacctgcaaatttggtgaagtatgctgagagttgcatgtatactcctaattaccgaagctacaggtgaattgatcatttcacaggcggtaatcttgtatgcaccaggcttctagtccatttgtaccttcctttcttgtaagcttttgttgtgtca

SEQ ID NO: 77981 - protein, 591 aa, Nicotiana tabacum; identical to SEQ ID NO: 5908

SEQ ID NO: 77982 - DNA, 1743 bp, Ostreococcus tauri
  CDS (1)..(1743)
atgctggcgctcgtggcgagcgcgacgacggtggcgtcgatgggggcggaccaatcgagggcgtcgccggtgcggtcgtcgacgcgcgcggcggatagggcgccgccgacgaacgcggtgcgacgggcggcgtgcggaccggggtacgcgagtttaagagatgcgagcgcgtatcgagggctcgcgacgaacgatcgacgagggaagggtgtagatggattgatacccgcgggagaggtgggagaggaggtggagatcgcgcgagcgaacgcggcgttggcgcagtgcgagacgccgtttgagaagtataagcagctcgtggcgctgcagatgacggacgagagtacgttctatcgcatgctgcgatcgcagacggagaccttgttgccgattttgtacacgcccacggtgggggaggcgtgcgtgaagttcgggacgttggtacagcgaccgatggggctgtgggtcagctcaaacgacgccgggaacgtcaagcagttgattcgcaactggccggcgacggatgtgaagatcgcagttatcaccgacggggagagaatcttaggcttaggggaccaaggggcgaacggaatggggatcagcgccggtaagagcatggtgtacgccgcatgtggggtcccaccgagcgcattacttccgattcaggtcgacacgggcacaaacaaccaaacgttgctcgacgatcctctgtacattggactgaaacagaagcgcgatcgtacgaaagcgtacgacgcgctcttggacgagatcgttgtggcggtgagatcccgttacggtcaaaagacgatcattcactgggaggactttgcgcccaagaacgcgtttagggtgctgcgaaggtttcagcaggcgccagaggtcgtgacgtacaacgacgacatccagggcacggccgcggtcaccgtgagcgggttgctcgcgtccgtcaggtctcttggaggggatgtcacgcaacaaagagtgttatttttcggggcaggtcaggcgaacatcggcgctgcggagctcttcgttagcgccttggtgcaacgcggcgtctcagaagaagaggcgaagaagcgagtttggttattcgactcgaaagggctcgtcgtgcgctctcgcgcttcgcagctgagcgaagacaaattggcgtatgcgcaagacgctccggaggagtctgatctggagcgagtgatcgagctcatcaagccaaccgcgctggtcggcgccgccgccgtgcccggaaagttcaacgagcgagtggtgaaaaagatgtccaaaataaacgacaggccgatcatcttcgccttgtccaacccgacatctcaggcagagtgctcggccgagcaggcgtacgcgtggagcgacggtcgagcgatattcgccagcggcacccgctttccgcccgtcacgtaccgctcgcggaagtttgagcccggcttcgcgaacaacgcgttcatcttcccacccatcgcgctcgccaccatcgtcaccggcaccatcaacgtaactccagaaatgttcctcaccgccgccgaggccttggccgaatccgtcgacgacgaactcttctccgtgggcgccgtgtacccgcccgtggaccgcatcgcgtcatccgcgcgcgtcgtcgccgcgcgcgtcgcccacgccgtcgacccctccatctccctcgaagagtggacagatcgcgtcgaccaatacgtccgcaaaaatgatttatttagcagtgtatcgtaa

SEQ ID NO: 77983 - protein, 580 aa, Ostreococcus tauri
MLALVASATTVASMGADQSRASPVRSSTRAADRAPPTNAVRRAACGPGYASLRDASAYRGLATNDRRGKGVDGLIPAGEVGEEVEIARANAALAQCETPFEKYKQLVALQMTDESTFYRMLRSQTETLLPILYTPTVGEACVKFGTLVQRPMGLWVSSNDAGNVKQLIRNWPATDVKIAVITDGERILGLGDQGANGMGISAGKSMVYAACGVPPSALLPIQVDTGTNNQTLLDDPLYIGLKQKRDRTKAYDALLDEIVVAVRSRYGQKTIIHWEDFAPKNAFRVLRRFQQAPEVVTYNDDIQGTAAVTVSGLLASVRSLGGDVTQQRVLFFGAGQANIGAAELFVSALVQRGVSEEEAKKRVWLFDSKGLVVRSRASQLSEDKLAYAQDAPEESDLERVIELIKPTALVGAAAVPGKFNERVVKKMSKINDRPIIFALSNPTSQAECSAEQAYAWSDGRAIFASGTRFPPVTYRSRKFEPGFANNAFIFPPIALATIVTGTINVTPEMFLTAAEALAESVDDELFSVGAVYPPVDRIASSARVVAARVAHAVDPSISLEEWTDRVDQYVRKNDLFSSVS

SEQ ID NO: 77984 - DNA, 1650 bp, Ostreococcus tauri
  CDS (1)..(1650)
atggataacattgaaaatctccgcggtaccgcggtactggactcgccgtcgttgaacaaaggcactggattcacgttcacgcagagagagcgcctcggcctgcgcggtttattaccacgcaagtacgagtcgccagaaattcaagtcagtcgggcgtggcatcaattatgcgcgtttgaagaggacatcaatcgttacgtatacctcgagaacttgcacatgcagaacgagcgtttgttttatcgtgtgctcgtcgagcacttggaggatttgatgccaatcgtgtacacgccaaccgtcggagacgccgtggttaactttgattcgctctatcgtaaccgctgcggaatgtatttctcacgcttggattcgggagttatgcgaacaatgctcgataattggccctcttctgacgtcgaaatcatcgtcgtcaccgacggtgggagagtgttgggtctcggcgactggggcacgaacggtatggcaatcagcgttggaaaggtttccctctactgcgcgagcggaggcttcgatccagcgaaggcgatgccggtttgcttggatttgggtacgaataatacagccctgaccgaacacgagtattacctcggctcgaacgagtccagacttacaggggacgctcacctcgccgtggtgactgagttctgtctcgccgtcaaggacaaatttcccaactgcttgatacagtttgaggatttcaagaccgaagatgcctttcgaattctcgagcacttgcggagaaaagtgctgtgcttcaacgacgatatccagggcaccggggcgacaattttggcgggtcttataaacgccttgcgagcgcagggaacgtcgacacgagactgtcgaataatattttttggcgccggctcgtcggcaataggcgtcgcgacgcaaatcatgcaacttctgataagcgaaggcctgagcgaaacacaagctaagcacgcgatttggctcatggatagtaaaggcttgatcaccgacacgcgcgaagactatgacaatctgtccagccagaagagaaaatttgctcaacacggcgaggagccgtgcccggatttgggagagctcattcaacgcgtgaaacctcacgcgctgttcggtctctctggttttggaccagtctttactcgcgaacacatagagttgatgtgcgagcacatcggcaagccgatcgtgtttcctctttccaatcccacgagcaaggctgagatcactgcgcaagacgcgtacacttggagcaaaggaaagtgtttgttcgccgcgggatcacctttcgctccagtgacgatcgaaggaaatacgtacgttcccggccaaggaaataatatgttcatattcccgggagtcggattcggggcggtttctgtgcgagcggagtacattccggattcatttttcctctgtgcggcgcgcgcactcgccacgatcgtgcccgaggacgaagtacgcgcaggaaagatttatccatccgtctcggccatccgtgccatctcaaagacagtagccgtggccgtggctgagcacgcgtatgaagtaggcgtcgcgcaactctatcccaagcccggcgacatggacgccttcataactgaacgaatgtggtatcccatgaatgacggggctgtttga

SEQ ID NO: 77985 - protein, 549 aa, Ostreococcus tauri
MDNIENLRGTAVLDSPSLNKGTGFTFTQRERLGLRGLLPRKYESPEIQVSRAWHQLCAFEEDINRYVYLENLHMQNERLFYRVLVEHLEDLMPIVYTPTVGDAVVNFDSLYRNRCGMYFSRLDSGVMRTMLDNWPSSDVEIIVVTDGGRVLGLGDWGTNGMAISVGKVSLYCASGGFDPAKAMPVCLDLGTNNTALTEHEYYLGSNESRLTGDAHLAVVTEFCLAVKDKFPNCLIQFEDFKTEDAFRILEHLRRKVLCFNDDIQGTGATILAGLINALRAQGTSTRDCRIIFFGAGSSAIGVATQIMQLLISEGLSETQAKHAIWLMDSKGLITDTREDYDNLSSQKRKFAQHGEEPCPDLGELIQRVKPHALFGLSGFGPVFTREHIELMCEHIGKPIVFPLSNPTSKAEITAQDAYTWSKGKCLFAAGSPFAPVTIEGNTYVPGQGNNMFIFPGVGFGAVSVRAEYIPDSFFLCAARALATIVPEDEVRAGKIYPSVSAIRAISKTVAVAVAEHAYEVGVAQLYPKPGDMDAFITERMWYPMNDGAV

SEQ ID NO: 77986 - DNA, 1623 bp, Lactococcus lactis subsp
  CDS (1)..(1623): transl_table=11
atgcgtgcacatgaaattttaaacaatccttttttaaataaaggaacagcttttactatgaaagaacgtcaagaattggggttgattggtcttcttccaccaactgttcaaacaattgaggaacaagctgtacaaacttacgaacaatatttgacaaaaccatctgatttagaaaaacgtcatttcttgatggaaatttttaatacaaaccgtactttgttttactacttattcaacaaacatattgtagaatttaatccagttgtttatgatccaacaattgctgatacaattgaaaactacagtcatttgttcgtagatccacaatatgctgcttatcttgatattaaccaccctgaaaacattactgaaacattgaaaaaggcagcaggtgacagagaaattcgtcttattgttgtaactgatgctgaaggaatccttggtattggagactggggaactcaaggtgttgatatctcagttggtaaattaatgatttatacagccgcagcaggtattgatccagcgtctgtacttccagttgttattgatgcaggaacaaatagaaaagaacttttagaagatcatttgtatcttggaaatcatcaagaacgtatttacggtgatcaatactacagtttcgtcgatcaatttgtagaaactgcagaatcaattttccctaaattgtaccttcactgggaagatttcggacgttcaaatgctgcaacaattttaaataactacaaaacaaaaatcccaacatttaatgatgacattcaaggaactggtattgttgttttaggtggtattttcggatcacttgacattacaggtgaaaaattaactgatcaagtatatctttgctatggtggtggttcagccggtgcagggattgctggtcgtgttcatgctgaaatggttagtgaaggtctttctgaagaagaagcttacaaacatttcttcatgattgatcaacaaggtttactttttgatgatatggaagaccttacaccagctcaaaaaccatttgctaaaaaaagtgctgattataaagatgctggagatatgactgaccttcttaacgttgttaagacagtaaaaccaactattttagtaggaacttcaactaatccaggtgcctttacaaaagaagttgttgaagcaatgtgtgctaatacagaacgcccagtaatcttccctatctcaaatccaactaaaaaaatggaaactacagctgaacaagttattgagtggtctgatggaaaagcttttgtcgctactggtgttccttcaggaacaatcagctacaaaggtgttgattatcaaattggtcaagcaaataactcacttatctacccaggtttgggcttaggaatgttggcatctgaagcaaaacttttgacagatgaaatgatcggtgcagctgcacattcattgagcggtttagtagatccaggtaaaccaggtgctcctgttcttcctccatttgaatttgttgctgatgtatcaattaaagttgcagaagcagttgctaagaaagctcaagaacaaggtcttactgaatctaaagaaactgatatggctaaagcagttcgtgatcttaaatggtatccagagtactaa

SEQ ID NO: 77987 - protein, 540 aa, Lactococcus lactis subsp
MRAHEILNNPFLNKGTAFTMKERQELGLIGLLPPTVQTIEEQAVQTYEQYLTKPSDLEKRHFLMEIFNTNRTLFYYLFNKHIVEFNPVVYDPTIADTIENYSHLFVDPQYAAYLDINHPENITETLKKAAGDREIRLIVVTDAEGILGIGDWGTQGVDISVGKLMIYTAAAGIDPASVLPVVIDAGTNRKELLEDHLYLGNHQERIYGDQYYSFVDQFVETAESIFPKLYLHWEDFGRSNAATILNNYKTKIPTFNDDIQGTGIVVLGGIFGSLDITGEKLTDQVYLCYGGGSAGAGIAGRVHAEMVSEGLSEEEAYKHFFMIDQQGLLFDDMEDLTPAQKPFAKKSADYKDAGDMTDLLNVVKTVKPTILVGTSTNPGAFTKEVVEAMCANTERPVIFPISNPTKKMETTAEQVIEWSDGKAFVATGVPSGTISYKGVDYQIGQANNSLIYPGLGLGMLASEAKLLTDEMIGAAAHSLSGLVDPGKPGAPVLPPFEFVADVSIKVAEAVAKKAQEQGLTESKETDMAKAVRDLKWYPEY

SEQ ID NO: 77988 - DNA, 1776 bp, Medicago truncatula; identical to SEQ ID NO: 5911
  CDS (1)..(1776)

SEQ ID NO: 77989 - protein, 591 aa, Medicago truncatula; identical to SEQ ID NO: 5912

SEQ ID NO: 77990 - DNA, 1926 bp, Pichia jadinii
  CDS (1)..(1926)
atgacaatctcaaacacccaagctgctgatggcagacgttactccacaactgtgggtgccagtggagcttcgacgacaagagacacgacgataggttccgttaacgagtacccagatgagtgcatttcgaaggagcctattggtgaggctgctcgtgcagccatcaatgttgcaaaggccacaagactctctgctgttggcccaattgagtgttctctcaacggtttccagctgctgaactctccattgttcaacaaaggttccgctttcacactcgaggagcgtgctgcgtttggcctcgaaggtttgttacctgcccaggtcaacgaccttaatgcccaagttgagagggcttacaagcaattgtgctacttgaagacaccattggccaagaacgacttctgttcgtcaatgagagtgcagaacaaggttctgttttacgaattggtgagaagacacattagagagctggttccaatcatctacacaccaactgaaggtgacgccattgctgcctactcccacagatttagaaaaccagaaggttgtttcctcgatatcacagatccagactccatcgaccgcagactggccaactttggtgaagataaggatgttgactacattgttgtctctgacggtgaaggtatcttgggtattggtgaccaaggtgttggtggtgtccgtattgccatctctaagcttgcccttatgaccctttgtggtggtatccacccaggtagagtcatcccagtgtgtcttgatgttggtaccaacaacaagaagctgatcaccgatgatttgtacatgggtaacagattcccaagagtccgtggtaaggagtacgacgactttgtcgacaagtttatccaggttttgaagagaagattcccatctgcaactcttcattttgaggatttcggtgtcaccactggtcgtccactcttgcaaagatacagaaacgagttggcttgtttcaacgatgatatccaaggtaccggtgctgtcgtgatggcttccctctctgcagccttgaagcacaccaaccgtaaccttttggattcccaaattgtcatctacggtgctggttccgccggtttgggtattgctgatcaaattgtcaaccacatggttacacacggtgccactgtcgaggaggccaagtctaagatccacgctctagatatcagagggttgattctcaagtccatgaaggagacctccactccagatcaacactcttatgccgacgaagatgctgattgggagggaatcgacacgaagtcattgtacgaagttgtcaagaagatcaaaccaacttgtttgattggatgttccacacaagctggtgcattcacacagcagattgtgcaagagatgcacaagcacaacccacgtccaatcatcttcccattgtccaacccaacaagactccacgaggctgttccagaggacttgatggcctggacaaacaacgacgccatggttgccaccggttctccattcaaacctgtcgatggatgggtcatctcggagaacaacaactgttttgcattcccaggtatcggcctgggctctgttctctcaagagccaagatcatctcggacaagatgatctctgctgccgtggaccagctggcctctctgtccccattgtccaaggaccctaaggctggtttgcttccaccattggaggtcatcaacgacacatctgccaaggttgcggctgctgtcatcctacaagcactggacgagggccttgcccgtatcgaggacgaggtgcagccaggcaaggatgagtacgttactgtcccaggggactttgatgcctgtgtggagtgggtgaaacagcagatgtggaagccagagtacagaccaatggttaaggtggaacacagacacgatatccatacgcatcagttctga

SEQ ID NO: 77991 - protein, 641 aa, Pichia jadinii
MTISNTQAADGRRYSTTVGASGASTTRDTTIGSVNEYPDECISKEPIGEAARAAINVAKATRLSAVGPIECSLNGFQLLNSPLFNKGSAFTLEERAAFGLEGLLPAQVNDLNAQVERAYKQLCYLKTPLAKNDFCSSMRVQNKVLFYELVRRHIRELVPIIYTPTEGDAIAAYSHRFRKPEGCFLDITDPDSIDRRLANFGEDKDVDYIVVSDGEGILGIGDQGVGGVRIAISKLALMTLCGGIHPGRVIPVCLDVGTNNKKLITDDLYMGNRFPRVRGKEYDDFVDKFIQVLKRRFPSATLHFEDFGVTTGRPLLQRYRNELACFNDDIQGTGAVVMASLSAALKHTNRNLLDSQIVIYGAGSAGLGIADQIVNHMVTHGATVEEAKSKIHALDIRGLILKSMKETSTPDQHSYADEDADWEGIDTKSLYEVVKKIKPTCLIGCSTQAGAFTQQIVQEMHKHNPRPIIFPLSNPTRLHEAVPEDLMAWTNNDAMVATGSPFKPVDGWVISENNNCFAFPGIGLGSVLSRAKIISDKMISAAVDQLASLSPLSKDPKAGLLPPLEVINDTSAKVAAAVILQALDEGLARIEDEVQPGKDEYVTVPGDFDACVEWVKQQMWKPEYRPMVKVEHRHDIHTHQF

SEQ ID NO: 77992 - DNA, 1737 bp, Drosophila simulans; identical to SEQ ID NO: 5915
  CDS (1)..(1737)

SEQ ID NO: 77993 - protein, 578 aa, Drosophila simulans; identical to SEQ ID NO: 5916

SEQ ID NO: 77994 - DNA, 1788 bp, Aspergillus oryzae; identical to SEQ ID NO: 5917
  CDS (1)..(1788)

SEQ ID NO: 77995 - protein, 595 aa, Aspergillus oryzae; identical to SEQ ID NO: 5918

SEQ ID NO: 77996 - DNA, 1734 bp, Aspergillus oryzae
  CDS (1)..(1734)
atgtcgaagcatttgtccagatttagtcaccacccacgcgcagcttctgggcctctagagtgtccctatgagggcagagatatcataacgtcatgccagtttaacaaaggctctgcattcagtgaagaagaaaggaatgttttcaagctgcatggtctattgcctccgaacatccaaactttggaagagcaggtccaacgggcatttcaacaatataagagccgtcccgatgctttggctaaaaatactttcatggcaagcatgaaggcgcaaaatgaggttctatactacaaactgatacaaactcatctgaaagagatgtttagtgtgatatacacacccacggaaggtgacgcaattcaaaattactcccgcttattcagaaggccagagggctgcttcttaaatataaaagaccaggataggattgaagagtgtctttgcaattttggccgcggcatagatgttgattacatcgtcgttagtgatggcgaggaaatactgggcatcggagaccaaggtgtcggatccatattaatttccgtcgctaagctggtcctcgcgacattatgtgctggaattcacccttctcgacagctgcctgtagttctagattgtggcacagataacaaagacctactcaacgatgagttatatttgggccttcgacagccgcgtgtcagaggcgatgaatacgatcgatttgtggaaaagtttgtgacaactgccaggaagatgtttcctaaagcgtacatccacttcgaagactttggcctccataatgctagcaggcttctaaatcagtatcgaccacatatcccttgtttcaatgatgatattcagggaacaggatgtgtgactctggcggcattaatggcggcttttcatgtcagtaatatcggactagcagatgtgcgtgtagtggtctttggctcgggctcagctggtactggaattgcgaaacaagtcgccgataccattgctacggacactggcagaacaaagcaagaagcttcagcacagatttggtgtcttgataagccaggtattttgctcaagtctcttggtgaccaacttaccgcagctcaagcaccatttgcacgggatgacaacgagtggcccaaggagaagggcacagatttactttcagttgtgaaggaggtaaaaccgcatgtcttgattggcacgtcaacgaagccaaaggcattcacagaaaacattatccgggagatggcgaagcacgttgaacatcctatcgtctttcccttaagcaaccctacacgattacatgaggcttccccggaggacattaaccactggacagaaggtcgagctttaatggccactgggagtccattccctcccgttgagcgtaatggagtagaatacgaagtagcggagtgcaataattcaacctgctttcctggcatcggccttggggcagttctatctcggacgcagatcctctctgacaagatgttggtggcagccgccagagcgttagcttctcagtctccggcgctacaggatccaaacaggcctcttcttccggatgttgagaatgtgcgcgagatcagcgtgcatattgctcgggcaatcatcgagacagcaatcgaggaaggatatgcccaagaaaaagatattccgagtcatgaggaagagttggaggagtggatccgtgtgcagatgtgggagcccatttataggccgcttgtcaaggcaggagaaaagtaa

SEQ ID NO: 77997 - protein, 577 aa, Aspergillus oryzae
MSKHLSRFSHHPRAASGPLECPYEGRDIITSCQFNKGSAFSEEERNVFKLHGLLPPNIQTLEEQVQRAFQQYKSRPDALAKNTFMASMKAQNEVLYYKLIQTHLKEMFSVIYTPTEGDAIQNYSRLFRRPEGCFLNIKDQDRIEECLCNFGRGIDVDYIVVSDGEEILGIGDQGVGSILISVAKLVLATLCAGIHPSRQLPVVLDCGTDNKDLLNDELYLGLRQPRVRGDEYDRFVEKFVTTARKMFPKAYIHFEDFGLHNASRLLNQYRPHIPCFNDDIQGTGCVTLAALMAAFHVSNIGLADVRVVVFGSGSAGTGIAKQVADTIATDTGRTKQEASAQIWCLDKPGILLKSLGDQLTAAQAPFARDDNEWPKEKGTDLLSVVKEVKPHVLIGTSTKPKAFTENIIREMAKHVEHPIVFPLSNPTRLHEASPEDINHWTEGRALMATGSPFPPVERNGVEYEVAECNNSTCFPGIGLGAVLSRTQILSDKMLVAAARALASQSPALQDPNRPLLPDVENVREISVHIARAIIETAIEEGYAQEKDIPSHEEELEEWIRVQMWEPIYRPLVKAGEK

SEQ ID NO: 77998 - DNA, 1626 bp, Oenococcus oeni
  CDS (1)..(1626): transl_table=11
atgacagatccagtaagtattttaaatgatccttttattaacaaaggaactgcttttacggaagcggagagagaggagcttggtttaaacggtttattaccggccaaggttcaggctttacaagagcaagttgatcagtcttatgctcaatttcaaagcaaggtttcaaatctcgaaaaacgattgtttttaatggaaatattcaatacgaatcacgtgttgttttataagcttttttctcaacatgttgttgaatttatgccaattgtttatgacccgacaattgctgatacaattgaaaattattcggaattatttgttgaaccgcaaggtgccgcttttttggatattaatcatccggaaaacattcaatcgactctgaaaaatgctgctaatggccgcgatatcaagctgctggtcgtttctgatggcgaaggtattcttgggattggagactggggtgtccagggtgttgatattgctgtcggcaaactgatggtttatacagttgcggccggaatcgatccatcaacagttcttgcagttgttattgatgctggaacaaataacgaaaagcttttgaaagatcctatgtatttgggaaataaatttaatcgtgttcgtggcgataagtactatgattttatcgacaaatttgttaatcatgccgaatcgctttttcctaatttatatttgcattgggaagattttggccgttcgaatgcttctaatatcttaaacagctataaagataaaattgctacttttaatgatgatattcaaggaactggaatcgtcgttcttgccggcgttcttggagcgttgaagatttccggtcagaaattaactgatcaaacttacatgagcttcggtgccggaactgctggaatgggaattgttaaacacttgcatgaagaaatggttgaacagggtctttccgacgaagaggctaaaaagcatttcttccttgttgacaaacaaggcctcttgtttgacgatgatccggatttaactccagagcaaaagcctttcgctgctaaacgaagtgatttcaacaatgctaatcaattgaccaatctccaagcagctgttgaagctgtccacccgaccattttggtcggaacctcgacacatccaaattcctttactgaagaaattgttaaagatatgtctggttatactgaaagaccaatcatttttccaatttccaatccaacaaaattagccgaagcaaaagccgaagatgttttgaaatggtctaatggaaaagccttgatcggtactggtgttccagttgacgatattgaatatgagggcaacgcttaccaaatcggtcaggccaacaatgccttgatctatccaggtcttggctttggtgccattgccgctcaatcaaagctgcttacgcctgaaatgatttctgctgctgcccatagtcttggaggaatcgttgatacaacaaaagttggtgctgctgttttgccaccagtttcaaaattagccgacttttcgcgtacagtcgctgtcgctgtcgctaaaaaagctgttgaacaaggtcttaatcgccagccgattgatgatgttgaaaaggccgtcgacgatttgaagtgggagccgaaatactaa

SEQ ID NO: 77999 - protein, 541 aa, Oenococcus oeni
MTDPVSILNDPFINKGTAFTEAEREELGLNGLLPAKVQALQEQVDQSYAQFQSKVSNLEKRLFLMEIFNTNHVLFYKLFSQHVVEFMPIVYDPTIADTIENYSELFVEPQGAAFLDINHPENIQSTLKNAANGRDIKLLVVSDGEGILGIGDWGVQGVDIAVGKLMVYTVAAGIDPSTVLAVVIDAGTNNEKLLKDPMYLGNKFNRVRGDKYYDFIDKFVNHAESLFPNLYLHWEDFGRSNASNILNSYKDKIATFNDDIQGTGIVVLAGVLGALKISGQKLTDQTYMSFGAGTAGMGIVKHLHEEMVEQGLSDEEAKKHFFLVDKQGLLFDDDPDLTPEQKPFAAKRSDFNNANQLTNLQAAVEAVHPTILVGTSTHPNSFTEEIVKDMSGYTERPIIFPISNPTKLAEAKAEDVLKWSNGKALIGTGVPVDDIEYEGNAYQIGQANNALIYPGLGFGAIAAQSKLLTPEMISAAAHSLGGIVDTTKVGAAVLPPVSKLADFSRTVAVAVAKKAVEQGLNRQPIDDVEKAVDDLKWEPKY

SEQ ID NO: 78000 - DNA, 1629 bp, Pediococcus damnosus
  CDS (1)..(1629): transl_table=11
atggcaaaaagtccagtagaaattttgaacgatccatttttaaataaggggaccgcatttacaaaagaagagcgtcaatcacttggtttggttgggttattaccaccttacgtccaaacattagatgaacaagctgcgcaaacgtatgcgcaagtcgaatcaaaaacaagtagtttagaaaaacgaattttcttaatggaaatctttaatgaaaatcgcgtattattctataaattatttagccagcacgtagttgaattcatgccaatcgtgtatgatccaaccattgccgacacaattgaaaactatagtgagctgtttgttcagccccaaaatgcaacattcttatcaattgatgatccagacagcatgaaggattctttgaaaaacgctgctgatggtcgcgatattcgtttgatcgtggtcacagatgcggaaggaattctaggaattggtgactggggcacaaatggtgtcgacatctctgttggaaaactaatggtttatacagcggctgccggaatcgatcctagccaggttatgccagttgctttagatactggaacaaataatcaagatttgttaaaagatccaatgtaccttggcaatcgtcacgaacgcgtaactggtgatcgttactacaaatttgtggatcagtttgtaaacacggctgaagatctttttccaaaactttatcttcattttgaagattttgctcgggataatgatgctaatatcttaaatacgtacaaagacaaaatcacgacatttaatgatgacatccagggaactggaattattgttttggctgggattttgggtgctttgaatatttctaaacaaaaaatgacggatcaagtttatctttcatttggtgctggaactgctggcgctggaatcacgaaacggatttatgatgaattcttgcaacaaggcttatctgcagatgaagcaaagaaacacttctatttggttgataaacaaggcttgttgtttgatgatgacaagacgttgacaccagaacaaaagccatttgcacgttctcgttctgaatttgccaatgccgatgatttaacaactttagaagcggctgtaaaggcaattcacccaacgattttggtgggaacttcaactcaaccaggaacgttcacagaatcaattgtgaaagaaatggctgctcatactgaccgcccaattattttcccgttatcaaatccaactaaattagcagaagctaaagctgaagatttgattaaatggtctgatgggaaggctttagtagcaacaggaattccagcagatgacgttgaatacaatggcgtcacttaccaaattggtcaggctaacaatgcgttagtttatcccggtttaggattaggtgtgattgcttccactgctaaagttttaaatgatgaaatgatttcaaaggctgcccattcattaggtggaattgtggatggtaacaaggctggtgctgctgtattaccaccagtttcaaagctcgatcaattctcatacacggtggcaaaggctgcagcgcagagtgcggttgatcaaaaattgaatcaggaaccaatttcagatgttgataaggcaattaccgatatgaagtgggaaccaaagtattag

SEQ ID NO: 78001 - protein, 542 aa, Pediococcus damnosus
MAKSPVEILNDPFLNKGTAFTKEERQSLGLVGLLPPYVQTLDEQAAQTYAQVESKTSSLEKRIFLMEIFNENRVLFYKLFSQHVVEFMPIVYDPTIADTIENYSELFVQPQNATFLSIDDPDSMKDSLKNAADGRDIRLIVVTDAEGILGIGDWGTNGVDISVGKLMVYTAAAGIDPSQVMPVALDTGTNNQDLLKDPMYLGNRHERVTGDRYYKFVDQFVNTAEDLFPKLYLHFEDFARDNDANILNTYKDKITTFNDDIQGTGIIVLAGILGALNISKQKMTDQVYLSFGAGTAGAGITKRIYDEFLQQGLSADEAKKHFYLVDKQGLLFDDDKTLTPEQKPFARSRSEFANADDLTTLEAAVKAIHPTILVGTSTQPGTFTESIVKEMAAHTDRPIIFPLSNPTKLAEAKAEDLIKWSDGKALVATGIPADDVEYNGVTYQIGQANNALVYPGLGLGVIASTAKVLNDEMISKAAHSLGGIVDGNKAGAAVLPPVSKLDQFSYTVAKAAAQSAVDQKLNQEPISDVDKAITDMKWEPKY

SEQ ID NO: 78002 - DNA, 1722 bp, Cryptococcus neoformans
  CDS (1)..(1722)
atgtcatctagtaactccacagtcagagtggccctccgtggcggcgctatcctcaacaaccctagattcaacaagggtagtgctttcacccaccaggaaagatcagagtttgctttgagggggagattgccttatgcagtggactctcttgaaatacaggtaaagcgcgcctatgaacagtacaagtctagagaaacgaatatcttgaaaaactctttcttgcaatctatgaaagcccaaaactggaccctattctacgcacttctccaggctcatcttgtagagatgttcccaatcgtctacactcccaccgaggccgatgccattgccgactattcccacctttttagaagaagtgaaggcttgtatctcactccgcctggggagaagaatatggaggaggactttctagatgcctgcgaagggagagaacttgaattgattgtcgtttccgatggcgaagcaattttaggtatcggagaccaaggatccggaggtattggtatctcaggtgccaaagctgtcatttacagtcttatcgctggtgttgaccccgccaagtgtttggctatcacccttgacgtaggcacgaacaaccaggatttgctgaatgatcctttgtacatcggatacagggagaaaaggttgcgagatgatccgtacgaccagttcgtagacaagtttgtggggcttgtcaaaaagcaccagccggaatgtctcctgcactttgaagactttggtgtcaccaatgctgaacgactcctcagaagatatagggatcagcattccattttcaacgatgatatccaaggaacaggagcggtaactcttgcggctgttcaggcagctattagtgtgaccaagagctctcttaaagatcagcgaattgtgatttatggatctggctcagcaggtcttggtattgctaggcagcttcgagatgccatcgctctcgactcttccggttctccttccgaagcagccaaacagttctggttaatcgacaagcatgggcttataaaaaaatcacttggaaaggataagatcaggagtgagattgaagatgaattcatccgagatgaaggtgattggggggagggcgagactggcttgaaggaggtggtaaagaagatcaagcccactatattggttgggaccagtacgcaagctggagccttcaccgaagaggtagttaaagagatgtctaaacatgtggataggcctatcatcttcccgctcagtaaccccaccagactttgtgaagctcaaccgaaggatgtcagtgagtggagtaagggtaaggccctgatgtcaaccggctctcccttcgacccagtagatatttcagattctggtgagaagtacatcgtggctgaatgtaacaatgctctgatctatcctggattgggtctcggtagcattctcgcgaagtcttcaaagatgacagacaagatgataatagccggtgctcaacgtctaggccagctcgctcccgccttggtcaaaaagaatgccaacaagtccttgcttcccgactttggtgacgcccaaaaggttaatttcgaagtggctttggcagtgttggagcaggcgatggaggatggcgtagcaagagcaaaggatatccccgaggataaggatgagagaaggaagtgggctgaaaacaataggtggtcgcctggttatcccaactttaaatatgacccggagggtttgaaataa

SEQ ID NO: 78003 - protein, 573 aa, Cryptococcus neoformans
MSSSNSTVRVALRGGAILNNPRFNKGSAFTHQERSEFALRGRLPYAVDSLEIQVKRAYEQYKSRETNILKNSFLQSMKAQNWTLFYALLQAHLVEMFPIVYTPTEADAIADYSHLFRRSEGLYLTPPGEKNMEEDFLDACEGRELELIVVSDGEAILGIGDQGSGGIGISGAKAVIYSLIAGVDPAKCLAITLDVGTNNQDLLNDPLYIGYREKRLRDDPYDQFVDKFVGLVKKHQPECLLHFEDFGVTNAERLLRRYRDQHSIFNDDIQGTGAVTLAAVQAAISVTKSSLKDQRIVIYGSGSAGLGIARQLRDAIALDSSGSPSEAAKQFWLIDKHGLIKKSLGKDKIRSEIEDEFIRDEGDWGEGETGLKEVVKKIKPTILVGTSTQAGAFTEEVVKEMSKHVDRPIIFPLSNPTRLCEAQPKDVSEWSKGKALMSTGSPFDPVDISDSGEKYIVAECNNALIYPGLGLGSILAKSSKMTDKMIIAGAQRLGQLAPALVKKNANKSLLPDFGDAQKVNFEVALAVLEQAMEDGVARAKDIPEDKDERRKWAENNRWSPGYPNFKYDPEGLK

SEQ ID NO: 78004 - DNA, 1959 bp, Zea mays
  CDS (1)..(1959)
atggcctcggtgtccgtcgtgctgctacagcgctcctcctcgcgcgtccgaggatatatacggctccagcgcatcgccagctcttcagttacgttggttttggagggcgaggggcattggtggtggagcaacagccgcggccgcgacgagaggtttggcgcaagaacggtgcaccatatggcgggatcaggagagggggaaaacggcggcgtgccggcgggtggtcaagttgcgatggcgccgggcgtggtgaccggcggtgtggaggatgcctatggcgaggaccgcgcgaccgaggaccagactgtcacaccgtgggccatctgcatcgcaagtggtcactccctgctgagggatccaaggcacaacaaagggctctctttcacggagaaagagcgggacacgcactacctgcgaggattattgcctccggtagtgctatctcaggacctccaggagaagaggatgttgcagaatgttaggcagttccagatcccgttgcagcgctacactgcgctaatggaccttcaggagagaaatgagaggctattttacaagctcttgattgacaatgtcgaagaactgcttcctgttgtgtatacaccaacagtgggggaagcttgccagaagtatgggtcaatcttccgacgaccacagggtttatacatcagcctcaaggagaagggaaggatcttggaggtactgaggaactggacagagaagagtattcaggttattgtggtcactgatggtgagcgcattttaggcctgggagatcttggttgccagggcatgggaattcctgtggggaagcttgcactgtatactgctcttggaggtgtacggccatccgcttgcttgcctgttaccattgatgtgggaacaaataataaagacctactgaaggatgaattctacattggcttaaagcaaagaagagcaactggccaggaatactctgaatttctggatgagtttatggccgcggttaggcagaactatggacaaaaagttcttgtccagtttgaggacttcgcaaaccacaatgcatttatacttcttgagaagtacaggacaaaccatcttgtatttaatgatgatatccagggcacggctgctgtagttcttgcagggattgttgctgctctgaagtctgttggtggaactctagctgatcatacattcttgttcttcggtgcaggagaggctggtacgggcattgctgaactagttgctctcgagatatccagacaggcaaatgtttcagtagaagaggctcgcaaaaagatctggctggttgattcaaagggactgattgtggcctcacgtgaagagactctccagccatttaagaagcgatatgcacatgagcatgaacctgtcaaagatcttttaggtgctgttaaggctatcagaccaactgcactcataggatcagctggtgtaggtcaaagtttcactaaagaggtgattgaggttatgtcttcgattaatgagagacccattgtccttgctctatcgaacccgacgtcacagtctgaatgtactgctgaacaagcatatacatggagtcaggggcgtgccatatttggcagtggaagcccatttgatccggtgaaatataatgacaagctgtttgtgcctgcccaggcaaacaatgcatacattttccctgggtttggtctaggggtggtgatctcaggagccgtccgggcgtcaaacgatatggttcttgctgctgctgaagcactagcggaacaggtaaccccggagcatattgagaaaggcctgatctacccgcccttctccatcatcaggaagatttcagctaacatagctgcccgtgtcgccgcaaaagcttatgatctcggaatggctacccagctccctcggccaaaagacctggtgaagtacgctgagagctgcatgtacagccccgtctaccgatcgtacaggtga

SEQ ID NO: 78005 - protein, 652 aa, Zea mays
MASVSVVLLQRSSSRVRGYIRLQRIASSSVTLVLEGEGHWWWSNSRGRDERFGARTVHHMAGSGEGENGGVPAGGQVAMAPGVVTGGVEDAYGEDRATEDQTVTPWAICIASGHSLLRDPRHNKGLSFTEKERDTHYLRGLLPPVVLSQDLQEKRMLQNVRQFQIPLQRYTALMDLQERNERLFYKLLIDNVEELLPVVYTPTVGEACQKYGSIFRRPQGLYISLKEKGRILEVLRNWTEKSIQVIVVTDGERILGLGDLGCQGMGIPVGKLALYTALGGVRPSACLPVTIDVGTNNKDLLKDEFYIGLKQRRATGQEYSEFLDEFMAAVRQNYGQKVLVQFEDFANHNAFILLEKYRTNHLVFNDDIQGTAAVVLAGIVAALKSVGGTLADHTFLFFGAGEAGTGIAELVALEISRQANVSVEEARKKIWLVDSKGLIVASREETLQPFKKRYAHEHEPVKDLLGAVKAIRPTALIGSAGVGQSFTKEVIEVMSSINERPIVLALSNPTSQSECTAEQAYTWSQGRAIFGSGSPFDPVKYNDKLFVPAQANNAYIFPGFGLGVVISGAVRASNDMVLAAAEALAEQVTPEHIEKGLIYPPFSIIRKISANIAARVAAKAYDLGMATQLPRPKDLVKYAESCMYSPVYRSYR

SEQ ID NO: 78006 - DNA, 2150 bp, Flaveria bidentis
  CDS (89)..(2032)
gaaagtacatttcacattcttcaatcttcatctcttgtaagagagatagagagatattttgccctaattcacactcttctctcgcaccatgatttccttgaactcttcatttcttgagaggagctccgttgccggaggctcgaggacgcaatcgcagtcgttgaggttgtcggtgaggcgtcctgtggtggcgtctatgctgaattccaacagcctaccggagagaaacgtcaacgtttcggtggatagtgctgtgagggatgtgaatgctccggtggcggtggaagttgatcgttctgttggtgaaaaaccatttgcagttgttggtggtggtgttgaggatatgtacggtgaggataccgccaccgaggatcagtatatcactccgtggtctgtttctgtcgccagcggctattcgttgttgcgggacccacaccacaataaaggtctggcctttactgagaaagaacgagatgcccattttctacgtggtcttcttcctccagttgttgttaatcacgatcttcaggtaaaaaagatgatgcataatatccgccaatatcaagtacctctacagaggtaccaagccatgatggatcttcagcaaagaaatgagaggttattctacaagctattaattgagaatgttgaggagcttctcccaattgtatatacaccaaccgttggtgaagcatgccaaaaatacgggagcattttcgagaactcacagggtttatttattagtttaaaagacaagggtagaattcttgagatattgaagatttggccacataaaaaaattcaagttatagttgtcacagacggtgaacgaatcttaggtctaggagaccttggctgtcagggaatgggcatacctgtgggaaagctcgctctgtacacagctcttggaggagttcgcccctcagcttgtttgccgataaccattgatgttggcaccaataatgagaagttgttgaacgatgaattctacattggtttaaagcaaaagagagctgctgggcaggagtatgctgaacttatgaatgagttcatgtctgctgtcaagcagaattatggggaaaaggtcctcattcagtttgaggattttgcaaaccacaacgcctttgatcttcttgaaaagtacagaaccacccatcttgtgtttaacgatgatatacaggggacagcttccgtggtgcttggagggcttatttctgcactaaaattagttggtggatctttggcagaccaaaaatttttattccttggagctggagaggctggcacaggcattgctgaactcatagctctggagatatcaaaacagacaaatattccattagaagagagccgcaagaaggtttggcttgcggactcaaagggtttgattgttaaatcccgcctagattcactacagcatttcaagaagccctgggcccatgatcatgaacctgttaatgaattcttggatgctatcaagacaatcaagccaacagtgttaattggatcatcagggacaggacagactttcacaaaagaagttgttgaaactatgtcatcacttaatgagaaacctattattcttgctctttccaacccaacttcacaatctgaatgtaccgctgagcaagcttatacctggagtgagagtcgtgctatattcgccagtgggagtccctttaagcctgttgaatataatggaaagctctatgtgtcaggccaggccaacaatgcatacattttccctggatttggtctgggcttgatcatttctggtgcaatccgcgttcatgatgacatgcttttagcagcctccgaggctttagctgaacaggtgacacaggaacattttgacaaagggctaatattcccaccattcaccagcatccgcaagatttctgctcatattgctgccaaggtggcagccaaagcatatgaacttggtttggcgagtcgtcttccccaaccagaaaatctagtagcttatactgagagctgcatgtacagccccaaataccgcatctatcgttaagtttagcggggaaaaaggacagttgatctgttgctgtttgcaattttttaaagggtatgttgtcagatgcatgttgtaatgcttgttcatcaacacatcatatgacttgcagttgctg

SEQ ID NO: 78007 - protein, 647 aa, Flaveria bidentis; identical to SEQ ID NO: 5926

SEQ ID NO: 78008 - DNA, 1728 bp, Hydrilla verticillata; identical to SEQ ID NO: 5935
  CDS (1)..(1728)

SEQ ID NO: 78009 - protein, 575 aa, Hydrilla verticillata; identical to SEQ ID NO: 5936

SEQ ID NO: 78010 - DNA, 2242 bp, Hydrilla verticillata
  CDS (119)..(1963)
gaaactggtgggcagggcagctgaagatggacttacttccctgctaccaaggtacgaagcaagttcatattattaccctggagagcagaggtcaaccgcatccgcgtgcgtgataatcatgctctcgcacaaccgcctccgcgtgctgcgaaaggcggtgatcccgtgctgcgttgggcggaggaagggttttgctgccgacaggaagggttccgccatggagagggagaatgaggcttatgtggataaccaccaggtggctaatggtgccgcgtttgtggtggataatgccgcagctctggatcagcccatcacgccctggatgagcatggttgcgagtggttatacattattaagagatccacaccataacaacggactggctttcacagagaaagaaagagatgctcactatctgcggggcctgttgcctcctgtaagcatcagccaggaactccaggaaaagaagctcatgcgcaaccttcgtgagtacaaagttcctcttcagcgttacatggcaatgatggatcttcaggagagaaatgaaagacttttctataagcttctaattgacaatgtggaagagttgctccctgttgtttacacgcctaccgttggcgaggcttgccagaagtatggatcaatcttccggcgacctcggggactttatattagccttagagaaaagaacaaagttctcgaggtattaaaaaattggccacaaaagaatattcaggttattgttgtcacggacggggagcgaatacttggtcttggcgatctaggatgccagggtatgggaattcctgttggtaaactcgctctgtatacagcccttggaggaattcgcccttctgcttgtcttccggtaactattgatgttgggacaaataatgagaacttactcaatgacgagttctatattgggttaaggcggaagagagccactggtcaggaatatgctgaacttctagaagagttcatgtcttctgtgaagcaaaaatatggagagcgcattctaattcagtttgaagactttgccaaccacaatgcttttgacttgctttcgaaataccgtgaaacacatttagtgttcaatgatgacattcagggaacagcttctgttgtccttgctggggttgttgctgcactgagactggttggtggaacactagccgagcatactttcttatttcttggtgcaggggaggctggtaccggtatagctgaactaatcgctcttcaaatgtcaaaagagacaagaataccagtggaagaggctcgcaagaagatttggcttgtggactcgaagggcttaatagtgagatcccgtatacagtcacttcaacatttcaagaaaccgtgggctcatgagcatgaatctattaaaggactgttggatgctgtcaagtcaatcaagccgacagtgttaattggatcatctggggcgggtcaggccttcactcaagaagttatcgagacaatggctctgttcaatgaaaagccaattattctagcactatccaaccccacttcacaatctgaatgctctgcagaacaagcttatacctggtcaaagggacgcgctatttttgctagtggcagcccatttgaccctgtcgagtacaagggaagaacttttgttcctggacaggcaaacaatgcatacattttccctggatttgggcttggtttggtaatgtcgggagccatacgagtacacgacgatatgcttcttgctgcttctaaggcattagctgaacaagtgacggacgagaacttcgagaaggggctgatctatcctccattctcaaacatccgaaagatttccgctcacattgccgctaatgttgctgcaaaggcatatgaacttggtcttgcaggtaatcttcctcgccctgataatttggttaaacatgcagagaagtgcatgtacagccccatttaccgtacctaccgttgacaactgagccaaagttttgtgatcgatccgtcagagatatagatacatttttgttagcatttcgaattttgctactcccatgcctctgttagtgttcttttcatttggaacccaaagaaactccatgtgttcatccgttagtgaattgatggttttgttgcttgcgcatacggttgattctgtatctacagcagaacattaccttgaagcatattatatcttccctaaataattctttgaggtaagatcatttgccatttttgtaaaaaaaaaaaaaaa

SEQ ID NO: 78011 - protein, 614 aa, Hydrilla verticillata; identical to SEQ ID NO: 5938

SEQ ID NO: 78012 - DNA, 2591 bp, Hydrilla verticillata
  CDS (156)..(2120)
gaaactacatctctctgttcctcctccgccgcagatttccggcgcaaatccaggcccccagacgtggaggggctttccccgaggaccctctccgcctgaagcctcggaaagaccccatctttctctctctccctctcccttcttaaggcctcaccatgttctcatcctacgcactcgcccgcaccggccacctgagctgcaatccctgcacggagctgaggccgaaggtttcaaaaggtgggtcttcgtgtgtgtaccagaggacgttcgtgaggtgctgcgggaacggcgctccgtcgaggcgtgtggcgacggcgagcttggaggcgaggaatagcgttgttctgaaggagccggaggctatggagggggcgttgaatgggtccgccgtggtggattcgccttccgcggtctccggtggcgtgcgggacacctacggcgaggaccgcgccaccgaggatcagctcctcacgccgtggaccgcctctgttgcaagtggtaactccttgctgcgggatccacgcctcaacaaaggactcgccttcacagagaaagaaagagatgcacactacctgcgaggactcttgcctccagtgtttctaactcaggagattcaggaaaagaagctgatgacgaacctccgccagtaccaagttccacttcagcgttacatggcaatgatggatcttcaggagagaaacgagaggctcttctacaagctccttatcgataacgtggaggagcttcttccagttgtgtacacgccaactgttggtgaggcctgccagaaatatggttcgatcttcaggcgtcctcagggattatatatcagtctacgagagaaggggaagattctcgaggtgttgaagaattggcctgagaggaacatagaggtcatcgttgtcaccgatggcgagaggatcttggggctcggtgatctcggatgccagggtatgggaattcctgttggcaaacttgcactctatacagcacttggaggtgttcggccgtcagcgtgtttgcccgtgactattgatgttgggacaaacaatgagaatctactccaggacgaattttatatcggactcaggcagaagagggctagaggcaaggagtatgctgaactcattgaagagtttatgtctgctgttaagcagaactacggggagagagtccttgtccagtttgaagactttgcaaaccataatgcatttgaactgctgacaaaatattccaagtcccatcttgtgttcaatgatgatatccagggcaccgcttcggttgtgctcgctgggctgatcgcatcactaaaattagtaggtggaactttggctgagcacacatttttgttcttcggcgctggtgaggctggtacgggtattgcagaactcatagctcttcagatgtcaaaagagacgggggttcctatcgaagaaacccgtaagaagatctggcttgtggacacgaaggggttgattgtgagctctcgcaaggaatccctccagcattttaaacaaccttgggctcatgatcatgaacctgtgcaagatctacttgatgctgtaaagatgatcaaaccaacggttttgattggatcttctggagtgcctaataaatttactcaagatgttgtcgaggctatggcttcattcaatgagaaacccgtcattttcgcactctccaaccctacctcgaactcggaatgcactgccgaacaagcgtacacgtggagtaagggacgagctattttcgcgagcgggagtccgtttgacccggttgaatatgaaggccaaacctacacctctggacaggcaaacaatgcttatattttccccggattcggtcttggccttgtcatgtctggggcgatccgtgtccatgacgacatgctacttgcagcttcggaagcattggcggagcaggtgacggaggagaacttcgagaagggccttatctaccctcccttcaccaacatcagaaagatatctgccaacattgctgcgaaggttgccgcgaaggcatatgaacttggtctctctggacatcttccacgtcccgagaaccttgttgaatacgcagagagctgtatgtacagcccggtctaccgcagctacaggtagcccatcggttttccgcgtcttccatggttccatgccgtcgcacttcttgtatgttgattacgtgatgaataacctggcgattacggtcgtcgtggctttgatttcgatggccgccgtgttgtgtgacctcaccattcattcttgttaacctgatgtaattgtaacctgtaagccattggtttctttccgggtgtcagtggccatttttcgcgtgctctttctactctctgctgcccaaagagagagctcatactgataggaaggtagagggaattcctcatgtttaattgtaccagtttgatacatatactactgaagtcttggaggtttgtccgagaccaaaaaaaaaaagtgttgtattatttacattgtttggagatttctccatctgttcttctctgttgtacctgaaacatatgaattgagattctgaaatgctcttatctccaaaaaaaaaaaaaaaaaaaaaaa

SEQ ID NO: 78013 - protein, 654 aa, Hydrilla verticillata
MFSSYALARTGHLSCNPCTELRPKVSKGGSSCVYQRTFVRCCGNGAPSRRVATASLEARNSVVLKEPEAMEGALNGSAVVDSPSAVSGGVRDTYGEDRATEDQLLTPWTASVASGNSLLRDPRLNKGLAFTEKERDAHYLRGLLPPVFLTQEIQEKKLMTNLRQYQVPLQRYMAMMDLQERNERLFYKLLIDNVEELLPVVYTPTVGEACQKYGSIFRRPQGLYISLREKGKILEVLKNWPERNIEVIVVTDGERILGLGDLGCQGMGIPVGKLALYTALGGVRPSACLPVTIDVGTNNENLLQDEFYIGLRQKRARGKEYAELIEEFMSAVKQNYGERVLVQFEDFANHNAFELLTKYSKSHLVFNDDIQGTASVVLAGLIASLKLVGGTLAEHTFLFFGAGEAGTGIAELIALQMSKETGVPIEETRKKIWLVDTKGLIVSSRKESLQHFKQPWAHDHEPVQDLLDAVKMIKPTVLIGSSGVPNKFTQDVVEAMASFNEKPVIFALSNPTSNSECTAEQAYTWSKGRAIFASGSPFDPVEYEGQTYTSGQANNAYIFPGFGLGLVMSGAIRVHDDMLLAASEALAEQVTEENFEKGLIYPPFTNIRKISANIAAKVAAKAYELGLSGHLPRPENLVEYAESCMYSPVYRSYR

SEQ ID NO: 78014 - DNA, 1954 bp, Zea mays
  CDS (7)..(1917)
gccaccatgctgtccacgcgcaccgccgccgtcgccgcctccgcgtcccccgcctccccgtggaaggtgggaggacggagcgagggcggcgccagctgcgacggatgccggacctacaggaacaccctgcggaggagggccgcgcccgccaaggtgcgcgccttgccgcccaggcgggtggacgcggtcgccatggtctccaacgcggagacggagacggaaaaggagcaggaggaggcggcggccgccagcgaggagctgcccgtcatgccctgggccacctacgtcgcaagcggttacacccttttgagggatccacaccacaacaagggtcttgctttcacagaggaggaaagggatggacactacttgcgtggactgcttcctccggcagtactatttcaggaactccaaattaagaagttcatgaacaccctgcggcagtaccagacccctttgcagcggtatatagctatgatgaaccttcaggaaacggacgagaggcttttctacaagcttttaattgataatgtggtggagctgcttccttttgtttacacaccaactgtaggtgaggcctgccagaagtatgggtccatctttggacgaccacagggtctgtatgtcagcctgaaggacaaggggaaggtcctagaagttctaaggaactggccacataggaacattcaagttatctgtgttactgatggtgagcgaatcttgggacttggagacttgggttgtcagggaatgggaattcctgtaggcaaacttgctctatacactgctcttggaggagttgacccatcagtttgcttgcctatcacaattgatgttggtacaaataacgagaagctgcttaatgatgagttctacattggactccggcaaaaacgtgcgactggcgaggagtatgatgagcttattgaagagttcatgtctgctgttaagcaattctatggtgagaaagtcctcattcagtttgaggactttgccaatcataatgcctttgatttgcttgaaaaatatagcaagagccatcttgttttcaatgatgatatccagggcacagcatcagtggtcattgcaggtttgttagcagcactcaagatggttggtgggaccctggcagagcagacttatttgttccttggtgctggggaggctggaactggtattgcagaacttattgctcttgagatttcgaaacagacgaatgctccacttgaagagtgccgcaagaaggtttggctggtggactcaaagggtttgattgttgactctcgtaaaggctcccttcagccattcaagaaaccttgggcgcatgagcacgagcccttgaaaaccttgtatgatgctgttcagtctatcaaacctacagttctgattgggacatctggagttggaagaacattcacaaaagaaatcattgaggccatgtcttccttcaacgagaggcctatcatcttttcactgtcaaacccaacctcgcattctgaatgcactgctgaacaagcatatacatggagtcagggccgttcaatctttgccagtggcagtccatttgcccccgtggagtacgaaggaaagacttttgtgcctgggcagtcgaacaatgcctacattttccctggactcggcctcggtcttgtgatctctggagccgtccgtgtccacgaggacatgcttctcgccgcctcgaaagcgctagctgatcaggccacacaggacaacttcgagaagggctccatcttcccacccttcaccagcatcagaaagatctctgcgcacatcgctgcagccgtggctgcaaaagcctacgagctcggtctggcgacccgtctgcctccccccagcgacctggtgaaatatgcagagaactgcatgtacactcccgtctaccgcaactaccggtagtgctgcggggatcaattttgcagtaataaaaaatcta

SEQ ID NO: 78015 - protein, 636 aa, Zea mays; identical to SEQ ID NO: 5940

SEQ ID NO: 78016 - DNA, 2139 bp, Sorghum bicolor
  CDS (19)..(1929)
tccgaactggacgccaccatgatctccgctcgcgccgccaccgtcgccgccgcgtcccccgcctccccgtggaagcggggaggaggacggagcgagggtgccggcagctgcgacggatgcagcacctacaggaagaccgtgcggaggagggccgccgccgccaaggtgcgcgccttgccgccgaagcgggtggaggcggtcgcgataggctccgccgcggagacggagacggaggaggtggtggtggaggtggcggcggccaacgaggagctgcccgtcatgccctgggccacctctgtcgcaagcggttacacccttttgagggatccacgtcacaacaagggtcttgctttcacggagaaggagagggatgcacactacttgcgtggactgcttcctccggcagttgtctctcaggaactccaaattaagaagttcatgaacaacctgcggcagtaccagctccctattcagtgctatatggccatgatgaaccttcaggagacggacgagaggcttttctacaagcttttgattgaaaatgtggtggagctgcttccttatgtttacacaccaactgtaggtgaggcctgccagaagtatgggtccatctttggacgaccacagggtctgtatgtcagcctgaaggacaaggggagggtcctagaagttctaaggaactggccacataggaacgttcaagttatctgtgtcactgatggtgagcgaatcttgggacttggagatttgggttgtcagggaatgggaattcctgtaggcaaacttgctctatacactgctcttggaggagttgatccatcagcttgtttgcctatcacaattgatgttggcacaaataatgagaaactgcttaatgatgagttctacattggactccgacaaaaacgtgcaaggggcgaggagtatgatgagcttatggaagagttcatggctgctgttaagacattctacggtgagaaagtcctcattcagtttgaggactttgccaatcataatgcctttgatttgcttgaaaaatacagcaagacccatcttgttttcaatgatgatatccagggcacagcatcagtggtccttgcaggtttgttagcagcactcaagatggttggtgggaccctggcagagcagacttatttgttccttggtgctggggaggctggaactggtattgcagaactcattgctcttgagatgtcgaaacagacgaaggctccaattgaagagtgccgcaagaaggtttggctggtggactcaaaggggttgattgttgactctcgtaaaagctcccttgcgccattcaaaaaaccatgggcacatgagcacgagcccttgacaaccttgtatgatgctgttcagtccatcaaacctacagttctgattgggacatctggagttggaagaacattcacaaaagaaattgttgaggccatggcttccatcaatgagaggcctatcatcttttcactgtcaaacccaacctcacattctgaatgtactgctgaacaagcatatacctggactcagggtcgtgcagtatttgccagtggcagtccatttgcccccgtggagtatgatgggaagacttttgtacctgggcagtcgaacaatgcctacatcttccctggactcggcctcggtcttgttatttctggagccgtccgtgtccacgaggacatgcttcttgccgcctcggctgcactagctgatcaggccacagaggagaactttgtcacgggatcgatcttcccacccttcaccaacatcagaaagatctctgcgtacattgctgcagccgttgctgcaaaagcttatgaactcggtttggcgacccgtctgcctccccccaaagacctggtggcatatgcagagagctgcatgtactctcctgtctaccgtaactaccagtagtgctgctggaatcaattttggagttataaaatatatcaacgcagatgatactgcaatgttgtagttatcgctgtttaatatagtccctgctgctaaccacccttgttgctggtgctgctggtcgacactgtacctttctatgcatatatgatatgttgtaacgttatgaaagcaaacaatcttttgtcccaaagtttgttattcaaaaaa

SEQ ID NO: 78017 - protein, 636 aa, Sorghum bicolor; identical to SEQ ID NO: 5942

SEQ ID NO: 78018 - DNA, 1854 bp, Mucor circinelloides
  CDS (1)..(1854)
  misc_feature (1329)..(1329): h is a, c or t
  misc_feature (1564)..(1564): b is g, c or t
  misc_feature (1566)..(1566): b is g, c or t
atgttgtcactcaaacgcatagcaaccactactaaaagcaatatatttcatcgggccctgttagctcaacgctcgtattcctatatcaatgctaacgaatactcagatcctcgacatgataagaatgtgcacgttatgcactctcgaggcgttaatcttcttcacgatccgttattatccaaaggtactgcctttagcatcgccgagagagagcgtctctctatccgtggtcttgttcctcctcgttgccaagaaatggacaaacaactcttgagaatcaagcgtaatcttgatgcttgtgaaaccccacttgcgaagttcgtatttttggctgcattacatgatagaaatgaaaccttgtattacaagattattatggaacatcttgaagaattggctggtattatctatacaccaacagttggacttgcaagtcaaatgtcgcattccatttaccgtcgctctcgtggcatgtacttttcaagtcaagaccgtggtcagatgtctgccatggtctataactggccacatgataaagtcgatgtcattgtagttactgatgggtcaagagtgctggggttgggtgatttaggagccaacggtatggagattccaattggaaaattaagtttgtacgtcgctgctggcggtattagaccaagagccgtgttgcctgttgtgttggatgtaggcacgaataaccaggacttgctaaacgaccctctgtatcttggtatgagtcaccctagattagaaggtgaagagtactactcattcattgatgagtgggtcactgccattacaagcagatggccagatactttgatccaattcgaagacttcaaatacccgcatgcgtacaatttactcgcaaaatatcgtaatcgtataacatgcttcaacgatgacattcaatccacctcatccatcaccttggctggtatattggcatcgctcaagtcaagaggaatgtcacaggaagacttgtccaatgagcgtatcatctgtgtgggagcaggatcagcaggtgtaggcgtatgcgaaggtatcatcgattgtatggtcgctcagggacgcgtaaagagcagagaagaagcctactcaaaaatatacatgcttgatcaatacggcttattgggtaatccaggtgtacatcttccatctgatgaagagcatggtcacccatatcaacctcgcaccactaaactagatgatcgacaatattgctatgtgaagcatgatctccgagatcaaatggggttggaggaactagtgagaaaggtgaagcccacagtgctgctaggacttacaggtattcaaggtgtctthtcagaagaagcagttcgagaaatggccaaacatcacgagcgtcctgtaatcttccccttgagtaatccagatacacatgcagaatgtactgcagaagaagcgttcaagtggacagacggtagagctatctttgcctcaggaagtccttttaaggatgttgaattacccaatggtaaaattggcagaacgaatcagtgtaataattcatatagttttcccgtaagtggattgggabtbggcatcactgtatctagagcaagcagagtgaccccaaacatgtttttggaaactgctcgtacaattgctgatatggctacaccttcacaattaaaagaaggcatcttattccctggtgtaagtcaattgagagaagttgctcttaatgtgggcacccgtgtctgtgaagtagcgttcgaagaaggttatgccaccgctaaattggaggaaggagaaatcttgagtgaagtcgttagaagctctgcttatcaaccagaatatgttcctctcgtataccgagatcattaa

SEQ ID NO: 78019 - protein, 617 aa, Mucor circinelloides
  misc_feature (443)..(443): The Xaa at location 443 stands for Leu, or Phe.
  misc_feature (522)..(522): The Xaa at location 522 stands for Leu, Phe, or Val.
MLSLKRIATTTKSNIFHRALLAQRSYSYINANEYSDPRHDKNVHVMHSRGVNLLHDPLLSKGTAFSIAERERLSIRGLVPPRCQEMDKQLLRIKRNLDACETPLAKFVFLAALHDRNETLYYKIIMEHLEELAGIIYTPTVGLASQMSHSIYRRSRGMYFSSQDRGQMSAMVYNWPHDKVDVIVVTDGSRVLGLGDLGANGMEIPIGKLSLYVAAGGIRPRAVLPVVLDVGTNNQDLLNDPLYLGMSHPRLEGEEYYSFIDEWVTAITSRWPDTLIQFEDFKYPHAYNLLAKYRNRITCFNDDIQSTSSITLAGILASLKSRGMSQEDLSNERIICVGAGSAGVGVCEGIIDCMVAQGRVKSREEAYSKIYMLDQYGLLGNPGVHLPSDEEHGHPYQPRTTKLDDRQYCYVKHDLRDQMGLEELVRKVKPTVLLGLTGIQGVXSEEAVREMAKHHERPVIFPLSNPDTHAECTAEEAFKWTDGRAIFASGSPFKDVELPNGKIGRTNQCNNSYSFPVSGLGXGITVSRASRVTPNMFLETARTIADMATPSQLKEGILFPGVSQLREVALNVGTRVCEVAFEEGYATAKLEEGEILSEVVRSSAYQPEYVPLVYRDH

SEQ ID NO: 78020 - DNA, 2064 bp, Lithospermum erythrorhizon
  CDS (49)..(1782)
ctggtgccgaattggcagtgggaatcaagaaaagaacaaataaagaaaatggagagtagtaatttgaaggatgttacaggtggagttgaggatgcttatggtgagcatcgtgccatcgaggaacaacttgttactccatggactgtctctgtagctagtggttattctttgctgagagacccccatcataacaaggggctagccttcactgagagggaacgagattctcattacttgcgtgggcttttgcctccagctgttgtaacccaagagcttcaggagaagaagttgatggaaaatattcgggaatatcagcttccgatacacaagtacatggccatgatgggactagaggagaggaatgagaggttgttttataagcttctgattgacaatgtagaggaactcctaccagttgtttatacaccaactgttggtgaggcttgccagaaatacggaagcatctttcgccgtcctcagggtctatatattagtttgaaagaaaaggggaagattcttgaagttcttaagaattggccagaaagggcaattcaagtcattgttgttactgatggtgagagaatcttgggacttggagaccttggatgccagggtatggggataccggtaggaaagttggcactttatactgcacttggaggagttagaccttcagcttgcctacctataaccatcgatgtgggcacaaataaccagcagctacttgatgatgagttttacattggtcttaagcaaagaagggcaactggggaggaatattatgagcttcttgaggagttcatgtcagctgtaaaacattgttacggtgaaaaagttctcgtgcagtttgaagattttgctaaccacaatgcatttgagctattatccaagtataggaatacccatttagtgtttaacgatgatatacaggggacagcatctgtggtgctttctgggcttatagcatccctaaagccactcggtggtaccttgggcgatcataccttcttgttccttggagccggagaggctggtactgggatagctgagctcatagctcttgaaatttcaaagcagacaaaggcgcccgtggaagaaacacgtaaaaagatctggttagttgactcaaagggattagtagttagttctcgcaaggagaagcttcaacatttcaagcagccttgggctcatgagaaagaaccaattggaaatcttttagatgctgtgaaggatatcaagccaacagtcttaatcggaacttctggcgttggtaggcaattcacaaaggaggttgttgaagccatggcttccttcaatgagaaacctctcattatggctctttctaacccaacatcacaagctgagtgcacagctgaagaagcttacacttggtctgagggccgtgccattttctccagtggaagtccatttgaccccgtggagtacaacggaaaagtttttgtacctggccaggccaacaactgctacatatttccaggacttggtttcgggttactcatttctggtgcgatcagagtgcacgatgacatgcttctagctgcatctgaagctcttgctaatcaagtgacagatgagcactatgccaaagggcttatctacccaccattttctgatatcagaaagatatcagcaaacattgcagccaaggttgctgctaaagcatatgaactcggtgttgcaactcgcctccctcgtcctgaaaacttggtcgagtatgctgaacgctgcatgtattcgcctatctaccgcacttatcgttgatcaatcactcgtatgtaattgtagagattgagagcttcttatgtccgccttattcaagttcagtttggcttttcaagatataatttttagtcagaatttttccagttattattttctttgcaagatgtaactcattgttgaatgcggcaagatgttatatcaaattatgttctagtgtgatataatcaagtgcttttggtaatttggaaataaaatgtttaaacactgtaaaattaaactattcatttttttttaaagtctcaaaaaaaaaaaaaaaaaaaa

SEQ ID NO: 78021 - protein, 577 aa, Lithospermum erythrorhizon; identical to SEQ ID NO: 5944

SEQ ID NO: 78022 - DNA, 1677 bp, Drosophila melanogaster; identical to SEQ ID NO: 5945
  CDS (1)..(1677)

SEQ ID NO: 78023 - protein, 558 aa, Drosophila melanogaster; identical to SEQ ID NO: 5946

SEQ ID NO: 78024 - DNA, 2021 bp, Flaveria pringlei
  CDS (42)..(1811)
aatatttgagatttgatcatttgaaagagtaaagaagaaagatggcgagcacattgaagcagatgaaggaaggagaatcggtggttgaccacagctccgccgtgggcggtggcgttgatgacgtctacggtgaagaccgtgcctccgaggaccaactcatcaccccgtggactgtttctgttgcaagtggatacactttgctgagggatccacaccataacaaggggcttgcattcacccagagggaaagagattcccattacttgcgtggtctgttgcctccggctgtagcaacacaggagcttcaggagaagaaattgatgcaaaatattcgcagttatgaagttcccttgcatagatatgtggctatgatggaactcgaggagcgaaatgagaggctgttctacaagcttcttattgataatgtggaagaacttctcccagttgtgtacactcccacagttggtgaggcttgccagaaatatgggagtatattcaagcgacctcagggtctctacattagtttaaaagagaagggaaagattcttgaggtactcaggaactggcctgagaggaatattcaagttattgtggtgacggatggtgagcgtatcttgggattgggagatcttgggtgtcagggaatgggaattccagttgggaaacttgctttatatacagcccttggaggagttaggccttctgcgtgcttgcctattacaattgatgtggggactaacaatcagaagcttttggatgatgagttctatattggtcttagacaaaagagggccactgggaaggaatattatgatttacttgaagagttcatgtctgcagtcaagcagaactatggtgaaaaggtcctcgtgcagtttgaagacttcgcaaaccacaatgcatttgagctgttggccaaatatagaaccagtcatttggtgttcaatgatgatatacaggggactgcatctgtggttcttgcaggtcttgttgcatcactaaaattacttggtggtagcttggctgatcacacattcttgttccttggtgctggggaagcagggactggtatagcagagcttatagctcttgaaatatcaacaaagacatatatacccattgacgaggctcgtaagaagatatggcttgtggactctaagggattaattgttagttctcgtaaagaaacccttcagcactttaagaaaccatgggctcatgaacacgagcctttgtcaactctcttagatgctgtcaaggccatcaaaccatctgttctaattggaacatctggggtaggacaaacgtttacgcaggacgtggttgaggccatggcagcctttaatgagagaccgctcattatggctctctccaatccaacctcacaagccgagtgcaccgctgaacaagcttacacctggacccagggccgtgcaatattttccagtggtagtccttttgatccttatgaatacaaaggcaacctcttcattcctggccaggcaaataatgcttacattttccctggacttggttttgggttggtcatctctggtgcaatccgtgtacatgatgagatgcttttggcagcatctgaagcattggctaatcaagtaacacaagagcactacgataaagggatgatttaccctccacttaccaacatcagaaagatttcagctcatattgctgcaaacgttgctgctaaagcatatgaccttggtttggcaacacgtcttccccgccctgctgatctggtgaagtatgctgagagttgtatgtacacccccaactaccgaagctacagataaacaattagctaactcctatgttgtccaaagtgtttgctctatccgagttttgttatcttgcttttgtgttcttctgctgtatgttgaaatctttatatattcagtggttatggtgtgaagtatgtatttagttcaattacaaaaaataagctttttaatcgttatattaattattatattaattatatgctaaaaaaaaaaaaaaaaaaa

SEQ ID NO: 78025 - protein, 589 aa, Flaveria pringlei
MASTLKQMKEGESVVDHSSAVGGGVDDVYGEDRASEDQLITPWTVSVASGYTLLRDPHHNKGLAFTQRERDSHYLRGLLPPAVATQELQEKKLMQNIRSYEVPLHRYVAMMELEERNERLFYKLLIDNVEELLPVVYTPTVGEACQKYGSIFKRPQGLYISLKEKGKILEVLRNWPERNIQVIVVTDGERILGLGDLGCQGMGIPVGKLALYTALGGVRPSACLPITIDVGTNNQKLLDDEFYIGLRQKRATGKEYYDLLEEFMSAVKQNYGEKVLVQFEDFANHNAFELLAKYRTSHLVFNDDIQGTASVVLAGLVASLKLLGGSLADHTFLFLGAGEAGTGIAELIALEISTKTYIPIDEARKKIWLVDSKGLIVSSRKETLQHFKKPWAHEHEPLSTLLDAVKAIKPSVLIGTSGVGQTFTQDVVEAMAAFNERPLIMALSNPTSQAECTAEQAYTWTQGRAIFSSGSPFDPYEYKGNLFIPGQANNAYIFPGLGFGLVISGAIRVHDEMLLAASEALANQVTQEHYDKGMIYPPLTNIRKISAHIAANVAAKAYDLGLATRLPRPADLVKYAESCMYTPNYRSYR

SEQ ID NO: 78026 - DNA, 1770 bp, Flaveria pringlei
  CDS (1)..(1770)
atggagagcatattgaagcagatgaaggaaggagagtcggtggttgaccccagctccgccgtgggcggtggcgttgatgacgtctacggtgaagaccgtgcctccgaggaccaactcatcactccgtggactgtttctgttgctagtggatacactttgctgagggatccacaccataacaaggggcttgcgttcaccgagagggaaagagattcccattacttgcgtggtctgttgcctccggccgtcgcaacacaggagcttcaggagaagaaattgatgcaaaatattcgcagttatgaagttcccttgcatagatatgtggctatgatggaactcgaggagcgaaatgagaggctgttctacaagcttcttattgataatgtggaagagcttctcccagttgtgtacactcccacagttggtgaggcttgccagaaatatgggagtatattcaagcgacctcagggtctctacattagtttaaaagagaagggaaagattcttgaggtactcaggaactggcctgagaggaatattcaagttattgtggtgacggatggtgagcgtatcttgggattgggagatcttgggtgtcagggcatgggaattccagttgggaaacttgctttatatactgcccttggaggagttaggccttctgcgtgcttgcctattacaattgatgtggggactaacaatcagaagcttctggatgatgagttttatattggtcttagacaaaagagggccactgggaaggaatattatgatttacttgaagagttcatgtctgcagtcaagcagaactatggtgaaaaggtcctcgtgcagtttgaagacttcgcaaaccacaatgcatttgagctgttggccaaatatagaaccagtcatttggtgtttaatgatgatatacaggggactgcatctgtggttcttgcgggtcttgttgcatcactaaaattacttggtggtagcttggctgatcacacattcttgttccttggtgctggggaagcagggactggtatagcagagcttatagctcttgaaatatcaacaaaggcaaatatacccattgatgaggctcgtaagaagatatggcttgtggactctaagggattaattgttagttctcgtaaagaaacccttcagcactttaagaaaccatgggctcatgaacacgagcctttgtcaactctcttagatgctgtcaaggccatcaaaccatctgttctaattggaacatctggggtaggacaaacttttacgcagaacgtggttgaggccatggcagcctttaatgagagaccgcttattatggctctctccaatccaacctcacaagccgagtgcaccgctgaacaagcttacacctggacccagggccgtgcaatattttccagtggtagtccttttgatccttatgaatacaatggcaacctcttcattcctggccaggcaaataatgcttacattttccctggacttggttttgggttggtcatctctggtgcaatccgtgtacatgacgagatgcttttggcagcatctgaagcattggctaatcaagtaacacaagagcactacgataaagggatgatttaccctccacttactaacatcagaaagatttcagctcatattgctgcaaatgttgctgctaaagcatatgaccttggtttggcaacacgtcttccccgccctactgatctggtgaagtatgctgagagttgtatgtacacccccaactaccgaagctacagataa

SEQ ID NO: 78027 - protein, 589 aa, Flaveria pringlei
MESILKQMKEGESVVDPSSAVGGGVDDVYGEDRASEDQLITPWTVSVASGYTLLRDPHHNKGLAFTERERDSHYLRGLLPPAVATQELQEKKLMQNIRSYEVPLHRYVAMMELEERNERLFYKLLIDNVEELLPVVYTPTVGEACQKYGSIFKRPQGLYISLKEKGKILEVLRNWPERNIQVIVVTDGERILGLGDLGCQGMGIPVGKLALYTALGGVRPSACLPITIDVGTNNQKLLDDEFYIGLRQKRATGKEYYDLLEEFMSAVKQNYGEKVLVQFEDFANHNAFELLAKYRTSHLVFNDDIQGTASVVLAGLVASLKLLGGSLADHTFLFLGAGEAGTGIAELIALEISTKANIPIDEARKKIWLVDSKGLIVSSRKETLQHFKKPWAHEHEPLSTLLDAVKAIKPSVLIGTSGVGQTFTQNVVEAMAAFNERPLIMALSNPTSQAECTAEQAYTWTQGRAIFSSGSPFDPYEYNGNLFIPGQANNAYIFPGLGFGLVISGAIRVHDEMLLAASEALANQVTQEHYDKGMIYPPLTNIRKISAHIAANVAAKAYDLGLATRLPRPTDLVKYAESCMYTPNYRSYR

SEQ ID NO: 78028 - DNA, 1821 bp, Arabidopsis thaliana
  CDS (1)..(1821)
atgtggaagaacattgctgggttgtcgaaggcagcggcagcggcaagaacacacggatctcggcggtgcttttccacagcgattcctggtccttgcatcgtccacaagcgtggtgctgatattcttcacgatccatggttcaataaggttgtgtgttttcctttgactgagagagatagattagggatacgaggcttgcttcctcctcgtgttatgacctgtgtacagcaatgtgatcgtttcattgagtcgtttcgttcgctagagaacaacacaaaaggagagcctgaaaacgttgttgcattagctaaatggaggatgttgaatagattgcatgaccgtaatgagactttgtactaccgagttcttattgataacatcaaagattttgcccccattatatacactcctacggttggacttgtttgtcagaactattctggtttgtatagaagaccaagaggaatgtacttcagcgccaaagacaaaggagagatgatgtctatgatttataactggcctgctccgcaggtagatatgattgtcatcactgatggtagccgtattttgggcttaggagaccttggagtacagggaattgggattcctattggaaagctcgacatgtatgtcgctgctgcaggaatcaatccacagagagttttgccaattatgttggatgtaggcacaaataatgaaaagctcctacagaatgatctctatttaggagtcagacaacctaggttggaaggagaggagtaccttgagattattgatgaatttatggaagctgcatttacacgttggccaaaggccgtcgtacagttcgaagatttccaagcgaaatgggctttcggaacattggaaagatatcggaagaaattttgcatgttcaatgatgatgtccagggaactgctggtgttgcactggctggactattgggaactgtaagagctcaaggtcggccgatatccgactttgtgaaccaaaagattgttgtggtgggagctggaagtgctgggcttggtgtaactaagatggcagtacaggcagttgccagaatggcaggtatcagcgagagtgaagcaacaaaaaacttttacctgatagataaagatggtcttgtcaccacggagaggacaaaacttgacccaggagctgtactttttgccaaaaatccagctgagatacgcgagggagcaagtatcgttgaagtggtgaagaaagtgaggccacatgttcttcttggtttatctggagttggtggtatctttaatgaagaagttctcaaggcgatgcgagaatctgactcatgcaagcctgccatttttgccatgtcgaatcccactttgaatgccgagtgcactgctgctgatgctttcaaacacgccggaggaaacattgtctttgcaagtggaagtccatttgagaacgttgaacttgagaatggtaaagtaggacatgtgaatcaggctaacaacatgtatttattcccggggatcgggctagggactcttctctctggtgcacgtatcgtaactgatggaatgctacaagcagcttctgaatgccttgcgtcctacatgaccgatgaagaagtccaaaaaggcatcctttacccttcaatcaacaacatccgacacataacagctgaagtcggggcagctgttctacgagctgcggtgactgatgacattgcagaaggacatggtgatgttggtcccaaagatctcagccacatgtctaaggaggatacagtgaattacattacacgcaacatgtggttccctgtttacagccctctcgttcacgagaaatag

SEQ ID NO: 78029 - protein, 606 aa, Arabidopsis thaliana
MWKNIAGLSKAAAAARTHGSRRCFSTAIPGPCIVHKRGADILHDPWFNKVVCFPLTERDRLGIRGLLPPRVMTCVQQCDRFIESFRSLENNTKGEPENVVALAKWRMLNRLHDRNETLYYRVLIDNIKDFAPIIYTPTVGLVCQNYSGLYRRPRGMYFSAKDKGEMMSMIYNWPAPQVDMIVITDGSRILGLGDLGVQGIGIPIGKLDMYVAAAGINPQRVLPIMLDVGTNNEKLLQNDLYLGVRQPRLEGEEYLEIIDEFMEAAFTRWPKAVVQFEDFQAKWAFGTLERYRKKFCMFNDDVQGTAGVALAGLLGTVRAQGRPISDFVNQKIVVVGAGSAGLGVTKMAVQAVARMAGISESEATKNFYLIDKDGLVTTERTKLDPGAVLFAKNPAEIREGASIVEVVKKVRPHVLLGLSGVGGIFNEEVLKAMRESDSCKPAIFAMSNPTLNAECTAADAFKHAGGNIVFASGSPFENVELENGKVGHVNQANNMYLFPGIGLGTLLSGARIVTDGMLQAASECLASYMTDEEVQKGILYPSINNIRHITAEVGAAVLRAAVTDDIAEGHGDVGPKDLSHMSKEDTVNYITRNMWFPVYSPLVHEK

SEQ ID NO: 78030 - DNA, 2362 bp, Ricinus communis
  CDS (73)..(1998)
tctttcgtatctctttagagagtgtttatagaacacagcgaaagactctgtctttcccacatttctttcgccatgatctccttgaaaaacagttttctgagtggctcgtgcagcagtcctgtaccagggaaacagagagcaggactcgtagtgcctacagctccttcttctctgaaagtagtagctttaaatcccaatagggaacgaaacggcagcattatgatggagagcacactacaagaaatgagagatggtgcttctgtgcttgacttagaccccaaatccaccgttgctggtggggtccgtgatgtgtatggtgaggatactgccactgaggatcagtttgtcactccttggtccctctctgttgctagtgggtattccttgttgcgagacccacaccacaacaaagggctcgctttcaatgataaagagagagatgcccactatttgcgtggccttcttcccccagcaatagtttctcaggagctccaggtgaagaaaatgatgcacataattcgtcaatatcaacttccattgcaaaagtacatggctatgatggatcttcaggagagaaatgaacgcttattctataagcttcttatccaaaatgttgaggagatgctccccattgtgtacactccaactgttggtgaggcatgccagaaatatggaagcatctttggtcgtcctcagggtctctacatcagcttgaaagaaaagggaagaattcttgaggtattgaggaactggcctgagaagaatattcaggtcattgttgtgactgatggtgagcgaattttggggctgggagaccttggatgtcagggtatggggatacctgtggggaaactttctttatatacagcacttggcggagttcgcccttcatcttgcttgcctgtaacaattgatgtgggaaccaacaatgagaagctgttaaatgacgagttctatataggtctcaggcaaagaagggctaccggacaggaatatgcagaactgctacatgaattcatgactgcggtcaaacagaattatggtgagagagtcctcgttcagtttgaagacttcgcaaaccataatgcttttgatttgcttgcaaaatatggtacaactcatcttgttttcaacgatgatattcagggcacagcatctgtggtcctagcagggcttgttgcagcactaaaattagttggtggatccttagctgatcacagattcttattccttggtgctggagaagctggcaccggaattgcagaactcatagccctggagatgtcaaaacagacaaacatgccagtggaagagactcgtaagaagatttggctggtggactcgaaggggttgattgttagttctcgtatggattcactccaacattttaagaggccctgggctcatgaacatgaacctattaagacacttctggatgctgttaatgacattaagccaacagttttaattggaacatcaggagtgggaagaacatttactaaagaagtagttgaggctatggcctccttcaatgagaaacctataattcttgctctttctaatccaacttcacaatccgaatgtactgctgaagaagcttatacatggagtcagggccgtgctatttttgctagtggaagcccatttgcccctgttgaatatgagggaaaggtttatgtgcctggtcaggcaaacaatgcatatatctttcctggatttggtctgggtttaattatgtcgggtacaatccgtgttcatgatgatatgcttctggcagcatcggaagctttggctgcacaggtgacccaggaaaactttgacaaggggctcatttacccaccattcacaaacatcagaaagatttcagcgaatattgctgccaatgtggctgctaaagcttatgaacttggattggcttctcgcctccctcaaccgaaggatctggtgaagtatgccgaaagctgtatgtacagccctgcctaccgaagttaccggtgaagtggaggaaggttcatacctctcccacctaaccacacctccaccttctccccaaggaagggaagaaaaccaaaaaaaatgtattaaagagaaaagagtagaaattcacgcttagtcacataatcagctgtttttaccattttttttcctccccttattattattctttttccaatgtttcaatcgttaatctcttctttaatacgttgtcatgtaagtcattttggtgggtaagcagtagcacatgataggtgctggtagttggatgcacgaaatggaatgtagcatgttatcgactttgaaaattctcatatgaacgtcaaattcaatagtgatctttgacttctcaaaaaaaaaaaaaaaa

SEQ ID NO: 78031 - protein, 641 aa, Ricinus communis; identical to SEQ ID NO: 5952

SEQ ID NO: 78032 - DNA, 1737 bp, Drosophila melanogaster; identical to SEQ ID NO: 5953
  CDS (1)..(1737)

SEQ ID NO: 78033 - protein, 578 aa, Drosophila melanogaster; identical to SEQ ID NO: 5954

SEQ ID NO: 78034 - DNA, 1945 bp, Apium graveolens
  CDS (37)..(1749)
aattagctaagttttactagcatttgaatattaagtatggcaactggtggtgatcaagatgtctatggtgaggattgtgcagctgaggatcagcttgttactccatggaccatctctgttgctagtggatatacattgttgagagatccacaccataacaaaggattggcttttactgaaaaagagagagatgctcattacctgcgtggccttctgcctcctgcaatcatcagccagcagcaacaggagaagaagttgatgcaaaatctgcgcagttatgaagttccactacatcgatacatggctatgatggaactacaggaaaggaatgagaggctattctacaagcttcttattgataatgtggaggaacttctccctgttgtctacactccaacggttggtgaagcttgccagaaatatggaagtatctttagacgcccccaaggactctacattagtctaaaagagaagggaaagattctcgaggtactgaaaaactggcctgagaagaatatccaagtcattgttgttactgatggtgagaggattttgggacttggggaccttggctgccagggaatgggaatacctgtggggaaacttgccttatacactgccctcggaggagtcagaccctcagcatgcttgcctataactattgatgtgggtacaaacaatgagtcgctgttgaataatgaattctacatcgggctcaaacagagaagggcaactgggaaggagtatgccgaccttttgcaagaattcatgacagcggtcaagcagaactatggtgaaaaagttcttgttcagtttgaagatttcgcaaaccacaatgcttttgagctattgtcgaaatatagtactacccatttggtcttcaatgatgatattcagggcacagcctctgtggttctatctggaattgtctcatcactcaagttgattggtgggatgttggctgatcacacatttctattccttggtgctggagaagcaggaactggtatagctgaacttatagcgcttgagatgtcgaagcagacaaaaattcatttggaagagacacgtaagaagatctggctcgtggactcgaagggattaatagttagccatcgcaaagaatcccttcaacatttcaagaaaccatgggctcatgaacatgaaccttgcacaaccctaattgatgctgtcaaggctattaagccaacagtcttgattggaacatcaggacaggggaagacattcactaaagaagttgtagaggctatggcttctttcaataagaaacctcttattatggctctctcaaacccaacctctcaagctgagtgcactgctgaagaagcttataactggtctgagggccgcgcagtgtttgccagtggaagtccatttgaccctgtgaaatacaataaccaactttacattcctggccaggcaaataacgcatatatctttcctggacttggacttggtttggttatgtctggtgcaatccgcatgcacgatgaaatgcttcttgcagcttctgaagctttggcctgtcaagtaacacaggaacactatgataagggaatgacattcccgccattttctaatatcagaacaatatccgctaacattgcagctaaagttgctgctaaagcatatgatcttggcttggcaacacgtcttcctcgaccagaagatctggtcaagtttgctgaaagctgcatgtatagtcccaactatcgcatttaccggtgaactgtcaattaacctatggctcttaccctcttataactaataaagttcctcgtgatcatgatgtttggttttcctctatgttaagtgagcttctgttcttcaaacctctgtatgtaatagtaattccaggttttgtattctacatttggaacttctaaataatcaggaaactaatgtgaatttggaataatcatcg

SEQ ID NO: 78035 - protein, 570 aa, Apium graveolens
MATGGDQDVYGEDCAAEDQLVTPWTISVASGYTLLRDPHHNKGLAFTEKERDAHYLRGLLPPAIISQQQQEKKLMQNLRSYEVPLHRYMAMMELQERNERLFYKLLIDNVEELLPVVYTPTVGEACQKYGSIFRRPQGLYISLKEKGKILEVLKNWPEKNIQVIVVTDGERILGLGDLGCQGMGIPVGKLALYTALGGVRPSACLPITIDVGTNNESLLNNEFYIGLKQRRATGKEYADLLQEFMTAVKQNYGEKVLVQFEDFANHNAFELLSKYSTTHLVFNDDIQGTASVVLSGIVSSLKLIGGMLADHTFLFLGAGEAGTGIAELIALEMSKQTKIHLEETRKKIWLVDSKGLIVSHRKESLQHFKKPWAHEHEPCTTLIDAVKAIKPTVLIGTSGQGKTFTKEVVEAMASFNKKPLIMALSNPTSQAECTAEEAYNWSEGRAVFASGSPFDPVKYNNQLYIPGQANNAYIFPGLGLGLVMSGAIRMHDEMLLAASEALACQVTQEHYDKGMTFPPFSNIRTISANIAAKVAAKAYDLGLATRLPRPEDLVKFAESCMYSPNYRIYR

SEQ ID NO: 78036 - DNA, 1815 bp, Drosophila melanogaster; identical to SEQ ID NO: 5961
  CDS (1)..(1815)

SEQ ID NO: 78037 - protein, 604 aa, Drosophila melanogaster; identical to SEQ ID NO: 5962

SEQ ID NO: 78038 - DNA, 1791 bp, Drosophila melanogaster
  CDS (1)..(1791)
atgagcaaacccgattcgaaactagataaatacgcgcagcgcgatcgcctgggcctttggggcactggtgacaatgaggtggtcggcagcctctccggattcacccgactcttggacaagcgctactcaaagggcctggccttcacacacgaggagcgccagcagttgggcatccatggcatgctgccctatgtggtccgtgagcccagtgagcaggtggagcactgccgcgctctgctggcgcgactggatcaggatctggacaagtacatgtacctgatcagcctatcggagcggaacgagcgtctgttctacaacgtgctcagctcagacatcgcctacatgatgccactggtgtacacgcccaccgtgggattggcctgccagcgctacagtttgatccaccagaacgccaagggcatgttcatatccatcaaggacaagggacacatctacgacgtgctaaagaactggccggaaacggatgtgcgtgccatcgttgtcacggacggcgagcgcatcctgggactgggagatctgggcgccaacggaatgggtatacccgtgggcaaactgtccctgtatacggccttggcgggcattaagccatcgcagtgcctgcccatcaccttggatgtgggcaccaataccgaatccatcctggaggatcccctgtacatcggtctgcgcgaacgcagggccactggagatctgtacgatgagttcatcgatgagttcatgcatgcctgcgttcgtcgctttggtcaaaactgcctaatccagttcgaggactttgccaacgccaatgccttcaggctgttgtccaaataccgcgactccttctgcaccttcaacgacgatattcaaggaaccgcgtcggtggccgtggctggtctgctggcctcgctaaagatcaagaagacccagctgaaggataacacgctgttgttcctgggcgccggagaagcggctcttggtattgccaacctgtgcctgatggccatgaaggtggagggtctcaccgaggaggaggccaaggcccgcatctggatggtggataggtgtcgatatataatcaaaatacatcctgatacttatagatgctttctatgtagccgtggtgtcatcacccgcgatcgtccaaagggcggactcaccgaacacaagctgcactttgcccagctgcacgaacccatcgatactttggcagaggcggtgcgaaaggtgcgtcccaatgtcctgattggagcggctgcgcagggcggcgccttcaaccaggagatccttgagctgatggccgatattaatgagacgccgatcatctttgcactgtccaatccgaccagcaaggcggagtgcaccgccgaggaggcgtatacgtacaccaaggggcgctgcatcttcgccagcggttcgccttttgctcctgtgacgtacaacaacaagaagttctatccgggtcagggcaacaactcgtacattttccctggcgtggcactgggtgttctgtgtgccggcatgctgaacattcccgagcaggtattcttggtcgccgccgagcgcttggcggagctggtctccaaggacgacctggccaagggcagcttgtatccaccactcagctccattgtcagctgttcgatggccattgccgaaaggattgtggagtacgcctacaaaaacggattggccactgttcgtccagagccggtcaataagctggcgttcatcaaggcccagatgtacgatctggactatccccgatccgtgcccgccacctataagatgtag

SEQ ID NO: 78039 - protein, 596 aa, Drosophila melanogaster
MSKPDSKLDKYAQRDRLGLWGTGDNEVVGSLSGFTRLLDKRYSKGLAFTHEERQQLGIHGMLPYVVREPSEQVEHCRALLARLDQDLDKYMYLISLSERNERLFYNVLSSDIAYMMPLVYTPTVGLACQRYSLIHQNAKGMFISIKDKGHIYDVLKNWPETDVRAIVVTDGERILGLGDLGANGMGIPVGKLSLYTALAGIKPSQCLPITLDVGTNTESILEDPLYIGLRERRATGDLYDEFIDEFMHACVRRFGQNCLIQFEDFANANAFRLLSKYRDSFCTFNDDIQGTASVAVAGLLASLKIKKTQLKDNTLLFLGAGEAALGIANLCLMAMKVEGLTEEEAKARIWMVDRCRYIIKIHPDTYRCFLCSRGVITRDRPKGGLTEHKLHFAQLHEPIDTLAEAVRKVRPNVLIGAAAQGGAFNQEILELMADINETPIIFALSNPTSKAECTAEEAYTYTKGRCIFASGSPFAPVTYNNKKFYPGQGNNSYIFPGVALGVLCAGMLNIPEQVFLVAAERLAELVSKDDLAKGSLYPPLSSIVSCSMAIAERIVEYAYKNGLATVRPEPVNKLAFIKAQMYDLDYPRSVPATYKM

SEQ ID NO: 78040 - DNA, 1989 bp, Zea mays; identical to SEQ ID NO: 5963
  CDS (1)..(1989)

SEQ ID NO: 78041 - protein, 662 aa, Zea mays; identical to SEQ ID NO: 5964

SEQ ID NO: 78042 - DNA, 2304 bp, Aloe arborescens
  CDS (229)..(1986)
ggcacgagaagccgccagctttttggtaatttcactcgttcagactagtctcaattcatttgttaaattgcaaaaacaccctattaaaaatcaaacgcaataatttcgtcaaaggtccacaccttcacatgttcaatcaatcaaaccgcgggtactcccactaactccggcaattaaaaaaagactcgcgtaggaaaagatcggatttttcgtttcggagtgaagactatgacaagcgatagtgcgtcggtgctcgatctcgatactaaaaccaccgttgggggtggagttgaggacgcgtacggtgaagatcaggcgactgaggagcagctcgtcacgccgtggaccatttcagttgccagtggctactctttgttgcgggatccacaccacaacaaagggcttgccttcacggagaaagagagagatgcccactacttgcgaggccttttgccacctgtttgcatcagtcaagagcttcaggagaagaagctcatgcgcagcctccgccagtatcaggtccccctccagcgttacatggcgatgatggatcttcaggaaagaaatgaaagacttttctacaagcttctgatcgataatgttgaggagttgcttccggttgtttacacgccaacagttggtgaggcttgccagaagtatggttgtatctttaggcgtccacaaggtctttatataagcttaaaagagaagggaaagattcttgaggtgttgaagaactggcctgagagaagcattcaagttatagtggttactgatggtgagcgaattttggggcttggagatcttggttctcaggggatgggaattcctgtaggaaagctctctctttacactgcccttggaggaattcatccatcttcctgcttacccgttacaattgatgtgggaacaaacaatgagcaattattgaatgatgagttctatattggattgaggcaaaagcgtgctactggccaggaatatgctgaattactacatgagttcatgactgccgtcaaacagaactatggagagaaagtcattgttcaatatgaagactttgccaaccacaatgcatttgaattgcttgcaaaatacagtaaaagccatcttgtatttaatgatgatattcagggtacagcatctgttgtccttgcaggtcttgttgcagcactgaaagtggttggcagaactttagcagaacacactttcttgtttcttggtgctggagaggctggtaccggaattgcagaactcatagctcttgaaatgtcaagacagacaaaagctccaatcgaggagactcggaagaagatttggcttgtagattctaagggtttgattgtgagctcacgcaaggaatcattgcagcactttaaaaaaccatgggcacatgaacatgaacctgtgaaaactcttttagatgctgtaaagaccatcaagccaacggtgttgataggatcatctggggtggggcaaactttcacaaaggaggttgctgaggccatgccctctttcaatgagaaaccagttattcttgctctatcaaatccaacatcacaatctgagtgtactgctgaacaagcatatagttggagcgagggccgggccatttttgccagtgggagtccatttgatccagttgaatacaatgggaagctcttcgtgccaggccaggcaaacaatgcatacattttccctggactcggtcttggtctggtgatctcaggagcaatacgtgtacatgatgaaatgcttcttgctgcttctgaagctctggctcagcaggtgacagaagagaatttcgctaatggactgatttatccacccttcaccataatcagaaagatctccgcccacattgcagctaatgtagctgctaaagcatatgaactaggtcttgctactcatctccctcgcccagcgaatcttgtgaaatatgcagaaagccgcatgtacagtccgctatatcgcagttacagataaattacgagagaaggccattgagactttgttgccgtaatttataccaatgttctgtctacctctgcagtttatacccgttagagttgttgtagtcgtgccagtgttagtttctatgcgtgcgttctgctgcgaagtctcgggtttcactttagcaaagcagttctatctatttgagctttgccctaagctgtcttacaatatattgcctgaaaccactatatttgtcctgagttttgttggatattcttacaataatgcctgaaaaacacgttctcaggtcgagcgggaatgcaaagtaatgtcgttttgtaaactatt

SEQ ID NO: 78043 - protein, 585 aa, Aloe arborescens; identical to SEQ ID NO: 5966

SEQ ID NO: 78044 - DNA, 1689 bp, Photobacterium profundum
  CDS (1)..(1689): transl_table=11
atgaacaacgataaaagacctttatacatcccctacgccggtcccgctttacttgaaacacctctgctaaataaaggtagtgcattctctatagaagaacgtatgttcttcaacttggaaggtctgcttcctgaagcaattgaatcgatagaagaacaaacagaacgtgcttatcaacaataccaaaagtttgataaagacatggataagcatatctatcttcgtaatatccaagatacaaacgaaaccttattctaccgtttggttgaaaatcacatcacagaaatgatgccgattatttatacgccaacagttggcgcggcttgtgaagatttctctaacatttaccgtcgtggtcgtggtctgtttatctcatacccgaaccgtgaccgcattgaagacatgctgaacaatgcctctcgtcaaaacgtaaaagttatcgtggtaaccgatggcgagcgtattcttggtcttggcgatcagggtatcggcggcatgggcattcccattggtaagctggcactttacaccgcttgtggtggtataagccctgcctacactctacccgttgtactggatgtaggtactaacaacccgcaacgtttatctgaccctatgtacatgggctggcgtcacacgcgtatttctgggcaagagtacgacaactttgttgatgagttcattcaagcggttaagcgacgttggcctgatgcgttaattcaatttgaagattttgcacaaaaaaacgcaatgccattgcttgaacgttacaaaaacaaaatatgctgtttcaacgatgacattcaaggtacagccgctgttactgtgggctcattacttgcggcgtgtaaagcggcgaaaagtaaactgtctgaacagcgaatttctttcttaggtgcaggttcagcaggttgtggtattgctgaagcgattattgcacaaatggtgtctgaaggtatttctgaagcacaagcacgcagccaagtattcatggtcgaccgttggggcttgctgattgatgacatgccaaacctgcttaatttccaacaagcactggttcagaagcgcgataccgtgaatgagtgggatctggcagataacaatgtttcactgcttgatgttatgcgtaatgcaaaacctacggtactaattggcgtatctggtgtaccgggtctatttagtgaagacgtgatccgtgagatgcatgcacactgcaagcgtccaatcgtattcccactatctaacccaactagccgtgtcgaagcaacaccagccgacatcataaactggactgacggcaacgcattggtagcaactggctcaccattcgaacctgttgtgcataacggtaaaacctacccaatcgcacaatgtaataacagctacatcttcccaggtattggtctaggtatactggcagtgaatgcacgccgtgttaccgatgaaatgctaatggcaagtagccgtgcattggcagaatgttcaccgcttgcaatcaatggccatggtgcattacttccgccactggaagacattcaaaaagtatcacgtaagatcgcatttgctgtcgcgaaaaaagccattgaacaaggtaaagcgccgaagaactctgatgaacgtattcttgataaaatcgatgctaacttctggcagtctgattaccgtaattacaaacgtacttctttctaa

SEQ ID NO: 78045 - protein, 562 aa, Photobacterium profundum
MNNDKRPLYIPYAGPALLETPLLNKGSAFSIEERMFFNLEGLLPEAIESIEEQTERAYQQYQKFDKDMDKHIYLRNIQDTNETLFYRLVENHITEMMPIIYTPTVGAACEDFSNIYRRGRGLFISYPNRDRIEDMLNNASRQNVKVIVVTDGERILGLGDQGIGGMGIPIGKLALYTACGGISPAYTLPVVLDVGTNNPQRLSDPMYMGWRHTRISGQEYDNFVDEFIQAVKRRWPDALIQFEDFAQKNAMPLLERYKNKICCFNDDIQGTAAVTVGSLLAACKAAKSKLSEQRISFLGAGSAGCGIAEAIIAQMVSEGISEAQARSQVFMVDRWGLLIDDMPNLLNFQQALVQKRDTVNEWDLADNNVSLLDVMRNAKPTVLIGVSGVPGLFSEDVIREMHAHCKRPIVFPLSNPTSRVEATPADIINWTDGNALVATGSPFEPVVHNGKTYPIAQCNNSYIFPGIGLGILAVNARRVTDEMLMASSRALAECSPLAINGHGALLPPLEDIQKVSRKIAFAVAKKAIEQGKAPKNSDERILDKIDANFWQSDYRNYKRTSF

SEQ ID NO: 78046 - DNA, 1689 bp, Vibrio vulnificus
  CDS (1)..(1689): transl_table=11
atgaataacgataaacgcccactctacatcccgttcgcgggtccggcgctactgagtaccccattactaaacaaaggcagcgctttttcagcagaagaacgcatctcttttaaccttgaaggtctgcttcctgaaaccacggaaacgattcaagagcaggttgaacgcgcatacatgcagtacaaagcgttcgagagtgacatggataagcacatctacctgcgcaatatccaagatactaacgaaaccttgttctatcgcttggtgcaaaatcacatcactgagatgatgccgatcatttacaccccgaccgtgggcgcggcatgtgaaaacttctccaatatttaccgccgtggccgtgggttattcgtttcttacgcaaaccgtgatcgtattgacgatattctgaacaatgcctctaaccataacgtaaaagtgattgtggtgactgatggtgagcgtattcttggtctgggtgaccaaggtatcggcggcatgggcattcctatcggtaagctttctctttacaccgcttgtggcgggatcagcccagcttacaccttgcctatcgtgttggatgtcggtaccaacaacccacaacgccttgctgacccgatgtacatgggctggcgtcacccgcgtattaccggtgcagattacgacgcgtttgttgaagagttcattcaagcggttcaacgtcgttggccagatgcacttattcagtttgaagacttcgcacagaaaaacgcgatgccgctacttgagcgttacaaaaaccgcatttgttgcttcaatgatgatatccaaggcaccgcggcagtaacggttggctccttgatggcagcgtgtcaagcagctggcagcaagctctctgagcaacgcattactttcctcggcgcaggttctgccggctgtggtattgccgaagcgatcattgcacaaatggtctcggaaggtatttcggataagaaagcgcgctctcaagttttcatggttgaccgttggggtttattgcaagaaggcatgccgaacctgctcgatttccaacaacgtctggtacaaaaacacagcgtgacggcgaaatgggaaaccgaagccaatggcttctcgctacttgatgtggtgaagaacgcaaaaccaactgtattgatcggggtttctggtgctcctggcttgtttactcaagaagtcattcaagagatgcacaagcactgccctcgtccaatcgtcttcccactgtctaacccaactagccgagtagaagcggtacctgcggatatcattcgctggacaaacggtgacgcattggtagccactggcagcccgttcgatcctgtgattcatgaaggcaaaacctacccaatcgtacagtgcaataacagttacatcttcccgggtatcggtttgggtgtcttggcagttaacgccaaacgcgtcacagacgaaatgttgatggaatccagccgcgcattggcgacgtgttctccgttggcaatcaatggtaaaggcgcgctcctgccaccacttgaagagatccacacagtatcaaaacgcattgcctacgcagtggcgaaaaaagccatcgaacaaggtgtggcgttggaaattgctgacgatgcgctgcaagtcgctattgaacaacatttttggcaaccggtataccgccgttacaaacgcacagcgttttaa

SEQ ID NO: 78047 - protein, 562 aa, Vibrio vulnificus
MNNDKRPLYIPFAGPALLSTPLLNKGSAFSAEERISFNLEGLLPETTETIQEQVERAYMQYKAFESDMDKHIYLRNIQDTNETLFYRLVQNHITEMMPIIYTPTVGAACENFSNIYRRGRGLFVSYANRDRIDDILNNASNHNVKVIVVTDGERILGLGDQGIGGMGIPIGKLSLYTACGGISPAYTLPIVLDVGTNNPQRLADPMYMGWRHPRITGADYDAFVEEFIQAVQRRWPDALIQFEDFAQKNAMPLLERYKNRICCFNDDIQGTAAVTVGSLMAACQAAGSKLSEQRITFLGAGSAGCGIAEAIIAQMVSEGISDKKARSQVFMVDRWGLLQEGMPNLLDFQQRLVQKHSVTAKWETEANGFSLLDVVKNAKPTVLIGVSGAPGLFTQEVIQEMHKHCPRPIVFPLSNPTSRVEAVPADIIRWTNGDALVATGSPFDPVIHEGKTYPIVQCNNSYIFPGIGLGVLAVNAKRVTDEMLMESSRALATCSPLAINGKGALLPPLEEIHTVSKRIAYAVAKKAIEQGVALEIADDALQVAIEQHFWQPVYRRYKRTAF

SEQ ID NO: 78048 - DNA, 1677 bp, Photobacterium profundum
  CDS (1)..(1677): transl_table=11
atgtacgaaaataataaaacgttatacctcccttatgcaggccctactctgctagaaaatgccctactcaacaaaggcagtgcattttcgccggaagagagacaaaacttcagcctgatgggactgctaccagcagcaatcgagtccattaccgaacaggaagaaagggcatacagccaatatcaaactttcaatgatgatatggataagcatatctacctacgcaatattcaagacaccaacgagactctctactatcgtttgattgataatcatatcgaagagatgatgccaattatttataccccgacggtaggtgctgcttgcgaacaattttccaatatttatcgtcgtggccgtggtctgttccttggctatcccgataaaggcaacatcgttgacatcttaaacaacgcagctcgtcaggatgtgaaaattatcgttattaccgatggcgaacgtattcttggtctgggcgaccaaggcattggcggcatgggtattcctatcggcaaactggcactatataccgcttgtggtggtatcaatcctgccaacacgttgccaatcgtattggatgttggcaccaataatactcaacttttatcagaccctatgtatatgggatggcgccatccacgcattactgggcaggagtatgatgactttgtagaagaatttattcaggccgtaaagagccgctggccaaatgcattaattcaattcgaagattttgctcagaaaaatgccatgcctctactcaaccgttataaagataaagtgtgctgcttcaatgatgatattcaaggaacagccgctgttaccgtaggcagcttacttgccgcctgcaaggccgccggttccgagctttccgaacaacgtattacctttgttggtgctggttctgcaggatgcgggattgcagaggctattgtggcacagatgatcgccgaagggctaagtgacagtgctgcgcgtgcgcgtatctttatggttgaccgctggggactactgaccgacaacatgcaaaacctactagacttccagcaaaagttagcccagaaaagtgccaccgtcagtcagtggaatgagactggtaacatttcgctgctagatgtagtaagcaatggtaagccaacagtcctgatcggtgttcccggcctgttcagccaagaggtgatcatggaaatgcatgcccactgtaagcgcccaattgtgcttccgctatcaaaccctaccagccgcgttgaagcaacaccttcagacattattcgctggacagaaggtgacgcactgatcgcaacaggcagcccatttgatcctgttatttttaatgaaaaaacctatcctatcgcccagtgcaacaacagttatatttttccgggcattggtcttggtgttctggcatccggcgcgacccgtgtcacggatgaaatgttgatggagagtagccgtgttttagccgaatgttcaccgcttgcccaaaatggcaatggtgctttgctgcctcctttaaaagatatccatcaggtttctcactgtattgctctggccgtggccaaaaaagctgttgagcaaaataaagcgcctcaacgtactgaaaagcaattacttgaaaaaatcgaaagttatttctggaagccggaatacttaaaatacaagcgtactgcgctataa

SEQ ID NO: 78049 - protein, 558 aa, Photobacterium profundum
MYENNKTLYLPYAGPTLLENALLNKGSAFSPEERQNFSLMGLLPAAIESITEQEERAYSQYQTFNDDMDKHIYLRNIQDTNETLYYRLIDNHIEEMMPIIYTPTVGAACEQFSNIYRRGRGLFLGYPDKGNIVDILNNAARQDVKIIVITDGERILGLGDQGIGGMGIPIGKLALYTACGGINPANTLPIVLDVGTNNTQLLSDPMYMGWRHPRITGQEYDDFVEEFIQAVKSRWPNALIQFEDFAQKNAMPLLNRYKDKVCCFNDDIQGTAAVTVGSLLAACKAAGSELSEQRITFVGAGSAGCGIAEAIVAQMIAEGLSDSAARARIFMVDRWGLLTDNMQNLLDFQQKLAQKSATVSQWNETGNISLLDVVSNGKPTVLIGVPGLFSQEVIMEMHAHCKRPIVLPLSNPTSRVEATPSDIIRWTEGDALIATGSPFDPVIFNEKTYPIAQCNNSYIFPGIGLGVLASGATRVTDEMLMESSRVLAECSPLAQNGNGALLPPLKDIHQVSHCIALAVAKKAVEQNKAPQRTEKQLLEKIESYFWKPEYLKYKRTAL

SEQ ID NO: 78050 - DNA, 1680 bp, Vibrio vulnificus
  CDS (1)..(1680): transl_table=11
atgtcaaagaaaatgtttatccgccaagcggggaataccttgttaaacactccgcttttaaataaaggcagtgctttcacattggaagagcgtaaaaacttcaatttgattggattattaccagccaatattgaaaccatcgatgaacaagtgagtcgcgcttatgagcagttctccttgttcaactccgcaatggaaaagcacatctacttacgtaatattcaagatacgaatgaaacgctgtacttccggttgatcaaccagcacatcgaagagatgatgccaatcatctataccccaacagtaggagaagcgtgccagaagttttcgcaaatctatcgtcgcaatcgtgggttgtttttaagttttgaagatcaagacgagttagaagcgattctcaataacgcgcccaatactcatgtcaaagtcattgtgattacggatggtgaacggattctcggtttaggtgatcaaggcattggtggtatggggatcccaatcggtaaactcgcgctctacaccgcttgtggtggtattagcccagagcatactttgccgatcgtgctagatgttggcaccaataactcggcgctgttgtcggaccctatgtacatgggatggcggcacccaagaattacaggtgaccaatatgacgattttgtcgatgactgtttgaaagctatccgccgtcgatggccaaatgcgttgattcaatttgaagattttgcacaagctaatgccatgccactgttgatgcgttatcaaaatcaattttgctgttttaatgatgatattcaaggtacggcatcggtcactgtaggtactctactcgctgcagcgcacgccacgggcaaaaagctctcagcacaaaaagtgttgtttgcaggtgcggggtcggccggatgtgggattgccgaagcgattgtcgcgcagatggtctcagaggggatctcggtgcagcaagcaagaagccaagtgtttatggtggatcgctgggggatgctggagcaagagatgcccaatctcttgccattccaaaagccgttagctcagcccgcatcattgagaacagagtggcaaattgaagcaaaccgcgagatcagtttgttggatgtcattcaacatgcgcatccggatgtattaattggtgtaactggtgtgcctggcctatttaaccaagagatcatagaagcgatggctgaggactgcgagcggccagtggtgatgccactttcaaatcctacgagccgtgtagaagcgaaaccggaagacatcttaatgtggacgcaaggtcaagcgattgtcgcaacagggagcccatttccagatgtcgtattagcgggtaagcgttaccctatcgcgcagtgcaacaacagttatatattccctggggttgggctcggtgtgattagtgcgaatgctcatcgagtcacgaatgaaatgcttcaacaagctagcattactttagcttcgttgtctcccatgcttaatggaggaaacatgttgcttccaccactgagcgagattcagaacgtatcacgcaaaattgccctagaggttgccaaaaaagcggtcgaacagggtaaagcgagtcatcgaactgaagaacggttgcttgagagaatcgatgaagaattttggtatgcgcagtattgtgaatatcgaagaattgcttcttag

SEQ ID NO: 78051 - protein, 559 aa, Vibrio vulnificus
MSKKMFIRQAGNTLLNTPLLNKGSAFTLEERKNFNLIGLLPANIETIDEQVSRAYEQFSLFNSAMEKHIYLRNIQDTNETLYFRLINQHIEEMMPIIYTPTVGEACQKFSQIYRRNRGLFLSFEDQDELEAILNNAPNTHVKVIVITDGERILGLGDQGIGGMGIPIGKLALYTACGGISPEHTLPIVLDVGTNNSALLSDPMYMGWRHPRITGDQYDDFVDDCLKAIRRRWPNALIQFEDFAQANAMPLLMRYQNQFCCFNDDIQGTASVTVGTLLAAAHATGKKLSAQKVLFAGAGSAGCGIAEAIVAQMVSEGISVQQARSQVFMVDRWGMLEQEMPNLLPFQKPLAQPASLRTEWQIEANREISLLDVIQHAHPDVLIGVTGVPGLFNQEIIEAMAEDCERPVVMPLSNPTSRVEAKPEDILMWTQGQAIVATGSPFPDVVLAGKRYPIAQCNNSYIFPGVGLGVISANAHRVTNEMLQQASITLASLSPMLNGGNMLLPPLSEIQNVSRKIALEVAKKAVEQGKASHRTEERLLERIDEEFWYAQYCEYRRIAS

SEQ ID NO: 78052 - DNA, 1689 bp, Colwellia psychrerythraea
  CDS (1)..(1689): transl_table=11
atgcctcaatctcaacgcccactttacatcccttatgccggtccatcattattagaaacccctttactgaacaagggcagtgcttttagcaaagaagaacgcggtagttttaacctaactgggcttttgccaccacgctttgaaagtattgatgaacaagcagagcgtgcatttcgtcagtacagttgttttcaaactaacatcaataagcatatttatttacgtgctatccatgataataatgaaacgttgttttttaaattggtacaaaataatctggccgaaatgatgcctattatttataccccaacggttggcgatgcttgtgagcagttttctgatatttaccgcagctcacgcggtttgtttatctcttatgaagatagatttaatattgatgacatgctgcgtaatgcgactaaaaataaagtaaaagtgattgtagttaccgatggtgaacgtattttgggtcttggcgatcaaggcattggcggtatgggtattccaatcggtaagctctctctttataccgcttgtggtggtattagcccagcgcatactttgccggtaatgcttgatgtaggtactaataaccagaaactattagatgaccctatgtacatgggtgctcgacataagcgtatcgatcaagattcctatgatgaatttttagagttatttatcagcgcagttaaacgtcgctggccaaatgttttgttgcaatttgaagatttcgcacagccaaatgcgatgcctttattgcaacgttataaagatagaatctgttgttttaatgatgatattcagggaactgcttcggtaactgttgggactttactggctgcttgtcgtagtaaaggctctaaactctcagagttgaatgttgcttttgttggtgcaggctctgcaggttgtggtattgccgaacaaattatcagccagatgatgaatgaaggccttggtgccgagcaagcccgtagccaagtgtttatggttgataggtttggtttgttaacgcagggtatgggcgaacttcgtgattttcagcaaaaactagtacaaagcaatgaagccatcgctgagtgggatattgctggagagtttgcctcacttgttgaagtaatgcacggcgctaaacctgatattcttattggtgtctctggccaagcgggattatttactgaaaaagttattaccgcgatgaagtctcattgtgagatgccgataatcttcccgttaagtaatccatctcgtcaagttgaagcaacacctagccaagttattaattggacacaagggcaagtaattattgcaacaggaagcccgtttgatcctattgagtatcaaggaaaaacgttcccaattgctcaatgtaataatagttacatcttccctggtgttggcttagctgttgttgcggcaaatatcagtcgaattaccgatgggatgttacaagtggcgagtgaaaccttagctgcggcatcaccgcttgcaaatggcgagtctgatgagttattgccaccgttaacgtctattgcacaattaagtagggatattgcttttgctattgctaaagtagcttataaacaaggattagcattggagctaactgatgatgagttgttagcaaaaatagagcataatttttggaaacctgaatatcgtcaataccgtagaacaagcttgtaa

SEQ ID NO: 78053 - protein, 562 aa, Colwellia psychrerythraea
MPQSQRPLYIPYAGPSLLETPLLNKGSAFSKEERGSFNLTGLLPPRFESIDEQAERAFRQYSCFQTNINKHIYLRAIHDNNETLFFKLVQNNLAEMMPIIYTPTVGDACEQFSDIYRSSRGLFISYEDRFNIDDMLRNATKNKVKVIVVTDGERILGLGDQGIGGMGIPIGKLSLYTACGGISPAHTLPVMLDVGTNNQKLLDDPMYMGARHKRIDQDSYDEFLELFISAVKRRWPNVLLQFEDFAQPNAMPLLQRYKDRICCFNDDIQGTASVTVGTLLAACRSKGSKLSELNVAFVGAGSAGCGIAEQIISQMMNEGLGAEQARSQVFMVDRFGLLTQGMGELRDFQQKLVQSNEAIAEWDIAGEFASLVEVMHGAKPDILIGVSGQAGLFTEKVITAMKSHCEMPIIFPLSNPSRQVEATPSQVINWTQGQVIIATGSPFDPIEYQGKTFPIAQCNNSYIFPGVGLAVVAANISRITDGMLQVASETLAAASPLANGESDELLPPLTSIAQLSRDIAFAIAKVAYKQGLALELTDDELLAKIEHNFWKPEYRQYRRTSL

SEQ ID NO: 78054 - DNA, 1698 bp, Escherichia coli O6
  CDS (1)..(1698): transl_table=11
atggaaccaaaaacaaaaaaacagcgttcgctttatatcccttacgctggccctgtattgctggaatttccgttgttgaataaaggcagcgccttcagcatggaagaacgccgtaacttcaacctgctggggttactgccggaagtggtcgaaaccatcgaagaacaagcggaacgagcatggatccagtatcagggattcaaaaccgaaatcgacaaacacatctacctgcgtaacatccaggacactaacgaaaccctcttctaccgtctggtaaacaatcatcttgatgagatgatgccagtcatttacaccccaaccgtcggcgcagcctgtgagcgtttttctgagatctaccgccgttcacgcggtgtgtttatctcttaccagaaccgccacaatatggacgatattctgcaaaacgtaccaaaccataatatcaaagtgattgtggtgactgacggcgaacgtattctggggcttggtgaccagggcatcggcgggatgggcattccgatcggtaaactgtcgctctataccgcctgtggcggcatcagtccggcctatacccttccggtggtgctggatgtcggcaccaacaaccaacagctgcttaacgatccgctgtatatgggctggcgtaatccgcgtatcactgacgacgaatactatgaatttgttgatgaatttatccaggctgtgaaacaacgctggccggacgtactgttgcagtttgaagacttcgcacaaaaaaatgcgatgccgttacttaaccgctatcgcaatgaaatttgttcttttaacgatgacattcagggcaccgcggcggtaacagtcggcacactgatcgcagccagccgcgcggcaggtggtcagttaagcgagaaaaaaatcgtcttccttggcgcaggttcagcgggatgcggcattgccgaaatgatcatcgcccagacccagcgcgaaggattaagcgaggaagcggcgcggcagaaagtctttatggtcgatcgctttggcctgctgaccgacaagatgccgaacctgctgcctttccagaccaaactggtgcagaagcgcgaaaatctcagtgactgggataccgacagcgatgtgctgtcactgctggatgtggtgcgtaatgtaaaaccagatattctgattggcgtctcaggacagaccgggctgtttacggaagagatcatccgtgagatgcataaacactgtccgcgtccgatcgtgatgccgctgtctaacccgacgtcacgcgtggaagccacaccgcaggacattatcgcctggactgaaggtaacgcgctggtcgccactggcagtccgtttaatccagtggtatggaaagataaaatctaccctatagcccagtgcaacaacgcctttattttcccgggcatcgggctgggtgttattgcttccggcgcgtcacgtatcaccgatgagatgctgatgtcggcaagtgaaatgcttgctcagtattcgccgctggtcctgaacggcgaaggtctggtactgccggaactgaaagatattcagaaagtctcccgcgcaattgcctttgcggttggcaaaatggcgcagcagcaaggcgtggcggtgaaaacgtctgccgaagctctgcaacaggccattgatgataatttctggcacgccgaataccgcgactaccgccgtacctccatctaa

SEQ ID NO: 78055 - protein, 565 aa, Escherichia coli O6
MEPKTKKQRSLYIPYAGPVLLEFPLLNKGSAFSMEERRNFNLLGLLPEVVETIEEQAERAWIQYQGFKTEIDKHIYLRNIQDTNETLFYRLVNNHLDEMMPVIYTPTVGAACERFSEIYRRSRGVFISYQNRHNMDDILQNVPNHNIKVIVVTDGERILGLGDQGIGGMGIPIGKLSLYTACGGISPAYTLPVVLDVGTNNQQLLNDPLYMGWRNPRITDDEYYEFVDEFIQAVKQRWPDVLLQFEDFAQKNAMPLLNRYRNEICSFNDDIQGTAAVTVGTLIAASRAAGGQLSEKKIVFLGAGSAGCGIAEMIIAQTQREGLSEEAARQKVFMVDRFGLLTDKMPNLLPFQTKLVQKRENLSDWDTDSDVLSLLDVVRNVKPDILIGVSGQTGLFTEEIIREMHKHCPRPIVMPLSNPTSRVEATPQDIIAWTEGNALVATGSPFNPVVWKDKIYPIAQCNNAFIFPGIGLGVIASGASRITDEMLMSASEMLAQYSPLVLNGEGLVLPELKDIQKVSRAIAFAVGKMAQQQGVAVKTSAEALQQAIDDNFWHAEYRDYRRTSI

SEQ ID NO: 78056 - DNA, 1725 bp, Escherichia coli; identical to SEQ ID NO: 77774
  CDS (28)..(1725): transl_table=11

SEQ ID NO: 78057 - protein, 565 aa, Escherichia coli
MEPKTKKQRSLYIPYAGPVLLEFPLLNKGSAFSMEERRNFNLLGLLPEVVETIEEQAERAWIQYQGFKTEIDKHIYLRNIQDTNETLFYRLVNNHLDEMMPVIYTPTVGAACERFSEIYRRSRGVFISYQNRHNMDDILQNVPNHNIKVIVVTDGERILGLGDQGIGGMGIPIGKLSLYTACGGISPAYTLPVVLDVGTNNQQLLNDPLYMGWRNPRITDDEYYEFVDEFIQAVKQRWPDVLLQFEDFAQKNAMPLLNRYRNEICSFNDDIQGTAAVTVGTLIAASRAAGGQLSEKKIVFLGAGSAGCGIAEMIISQTQREGLSEEAARQKVFMVDRFGLLTDKMPNLLPFQTKLVQKRENLSDWDTDSDVLSLLDVVRNVKPDILIGVSGQTGLFTEEIIREMHKHCPRPIVMPLSNPTSRVEATPQDIIAWTEGNALVATGSPFNPVVWKDKIYPIAQCNNAFIFPGIGLGVIASGASRITDEMLMSASETLAQYSPLVLNGEGMVLPELKDIQKVSRAIAFAVGKMAQQQGVAVKTSAEALQQAIDDNFWQAEYRDYRRTSI

SEQ ID NO: 78058 - DNA, 1689 bp, Idiomarina loihiensis
  CDS (1)..(1689): transl_table=11
atgccgcagacgcagcgtccgctttatattccgtattctggccctaatttgttggaaacccctttattgaataagggcagtgccttcagtaaggaagagcgtgccgcgtttaacctgacgggtttgttgccgcctcgttatgagagcattgaagagcaggcagaacgggcttacatgcaataccggagctttgaaacgcccattaacaagcatatttatctgcgcgctattcaggacaacaacgaaactctgttctatcgcttgctgacggatcatctggaagagatgatgccgattatctacaccccgactgtgggtgatgcctgtgagaaattctcagacatttaccgcagctcacgtggtttgtttatttcctattctgaacgtgatcagatagacgatattctgcgcaatgccactaagcaaaaagtgaaagtgattgtcgtgaccgacggcgaacgtattctgggcttgggtgatcagggtattggtggcatgggtattcctatcggaaaactgtcgctgtacaccgcttgcggcggcattagtcctgcctatacgctgccagtaatgctggatgttggtaccaataacgaaaagcttctggaagacccaatgtatatgggagctcgccataagcgcattgagcaggacgagtatgatgaattcctcgacaaatttataaaagcggtgaccagacgctggccgggcgtgatgctgcagtttgaggactttgctcaacctaacgccatgcctttattgcgtcgttaccgtgatgaagtttgctgttttaatgacgacattcagggcaccgcgtctgtgacggtgggcaccttactggcagcttgtcgccagaaaggcaaaaagcttagtgaacagaaggtggtgtttgttggtgctgggtctgcgggctgcggtattgcagaacagattatgattcagatgaccgccgaaggtttaacggaagagcaggcgaagagacaaatctttatggtcgatcgctttggtctggttatggataccatggatggcctgcgtgacttccagcaggcgctggcgcagaaaaccagcgatttaaacgcctgggaatacagtggtgagtacccgtcgctgctggatgtgatgcattgtgctgagcctgacattttaattggtgtgtctggtcaggcggggctctttaccgagcaagttatttcgaccatggcaaaaaatgtcgagcgtcccattattttcccattgagtaacccctctaaacatgtggaagcgcacccagcggatgtactgaagtggagtgaaggtaaagccattgtcgcaaccggaagcccttttggtgaagtagaatatgatggtcgtatatacccaatagcgcagtgtaacaacagttatatcttcccgggcattggtcttggggtgttatcggttaaatccgaacgcgttagtgatgaaatgctgcgtgtagcaagtaagacactggcgaatgcgtcacccagcgctaatggtaaaggtgaagccttgttgccagcctttaatgacttaactcagttaagcaaagatattgcttttgctgtgggcaaagtggctcaacaggaaggtttagcactggaaattgatgacgacacgctgcgtgagcgcatcgacaacaatttctggaaacccgaataccgcttctacaaacgcgtaagtatttaa

SEQ ID NO: 78059 - protein, 562 aa, Idiomarina loihiensis
MPQTQRPLYIPYSGPNLLETPLLNKGSAFSKEERAAFNLTGLLPPRYESIEEQAERAYMQYRSFETPINKHIYLRAIQDNNETLFYRLLTDHLEEMMPIIYTPTVGDACEKFSDIYRSSRGLFISYSERDQIDDILRNATKQKVKVIVVTDGERILGLGDQGIGGMGIPIGKLSLYTACGGISPAYTLPVMLDVGTNNEKLLEDPMYMGARHKRIEQDEYDEFLDKFIKAVTRRWPGVMLQFEDFAQPNAMPLLRRYRDEVCCFNDDIQGTASVTVGTLLAACRQKGKKLSEQKVVFVGAGSAGCGIAEQIMIQMTAEGLTEEQAKRQIFMVDRFGLVMDTMDGLRDFQQALAQKTSDLNAWEYSGEYPSLLDVMHCAEPDILIGVSGQAGLFTEQVISTMAKNVERPIIFPLSNPSKHVEAHPADVLKWSEGKAIVATGSPFGEVEYDGRIYPIAQCNNSYIFPGIGLGVLSVKSERVSDEMLRVASKTLANASPSANGKGEALLPAFNDLTQLSKDIAFAVGKVAQQEGLALEIDDDTLRERIDNNFWKPEYRFYKRVSI

SEQ ID NO: 78060 - DNA, 1698 bp, Salmonella paratyphi
  CDS (1)..(1698): transl_table=11
atggaaactacaaccaagaaagcacgttccctttatatcccttacgctggccctgtattgctggaattccccctgttaaacaaaggcagcgcttttagcgtagaagagcgccgcaacttcaatttgtcaggactgctgccggaggtcgtcgagtcgattgaagaacaggccgaacgcgcctggctccagtatcaggggtttaaaacagaaatcgataagcatatttacctgcgtaacatccaggataccaacgaaacgctcttttatcgactggtgcaaaaccatcttgaagagatgatgccggttatctataccccgaccgtgggcgcggcctgtgagcgcttctctgagatttatcgccgggcgcgcggcgtatttatctcttatccgaaccgtcacaatatggacgacattttgcagaatgtgcctaaccacaacattaaagttattgtggtgacggatggcgagcggattctggggcttggcgatcagggcatcggcggaatggggatacctatcggtaagctgtcattatacaccgcctgcggcggcattagtccggcctatacccttcccgttgtgctggatgtcggcaccaacaatcaacagttactcaacgatccgctctacatgggctggcgtcatccgcgcattaccgacgatgagtattatgcgtttgtcgatgagtttattcaggccgttaagcagcgctggccagatatcctgctacagttcgaagatttcgcgcagaaaaacgcaatgccgctgttgacgcgctatcgtgatgagatttgctcctttaacgatgatattcagggcaccgcagccgtgaccgtcggtacgttgatcgccgccagccgcgctgccggcagtcagcttagcgagcagaaaatcgttttcctcggcgcgggttcagccggatgtgggattgctgaacagatcatcgcgcagactcagcgtgaaggtttaagcgaagatgccgctcgacagaacgtttttatggtcgatcgcttcggcctgttgacggaccggatgcctaatttattgccgttccaggcaaaactggtgcagaaatgcgacaatctccagcactgggataccgaaaatgacgtgctgtcgctgctggatgtggtgcgtaacgtgaagccggatatcctgatcggggtttccggccagaccgggctctttactgaagagatcatccgcgagatgcataagcattgccctcgcccgatcgtcatgccgctctctaatcccacctctcgcgtggaggccacgccacaggacattatcgcctggacggaaggcaacgcgctggtggcaaccggcagcccattctcgccggtcatctggaaagataaggtttatccgatcgcacaatgtaataacgcctatattttccccggcatcggacttggggttatcgcttccggcgcatcgcgcattactgatgaaatgctgatgtcagccagtgagacgctggcgaaacattctccgctggtgaataacggcgaaggattagtgttaccagcgcttaaagacatccaggtcgtgtcgcgcgctatcgcttttgccgtaggcaaaatggcgcagcaacaaggcgtagcggtgaaaacctctgcggaagcgctgcaacaggcgattgacgataacttctggaaaccggaataccgcgactaccgtcggacttccatttaa

SEQ ID NO: 78061 - protein, 565 aa, Salmonella paratyphi
METTTKKARSLYIPYAGPVLLEFPLLNKGSAFSVEERRNFNLSGLLPEVVESIEEQAERAWLQYQGFKTEIDKHIYLRNIQDTNETLFYRLVQNHLEEMMPVIYTPTVGAACERFSEIYRRARGVFISYPNRHNMDDILQNVPNHNIKVIVVTDGERILGLGDQGIGGMGIPIGKLSLYTACGGISPAYTLPVVLDVGTNNQQLLNDPLYMGWRHPRITDDEYYAFVDEFIQAVKQRWPDILLQFEDFAQKNAMPLLTRYRDEICSFNDDIQGTAAVTVGTLIAASRAAGSQLSEQKIVFLGAGSAGCGIAEQIIAQTQREGLSEDAARQNVFMVDRFGLLTDRMPNLLPFQAKLVQKCDNLQHWDTENDVLSLLDVVRNVKPDILIGVSGQTGLFTEEIIREMHKHCPRPIVMPLSNPTSRVEATPQDIIAWTEGNALVATGSPFSPVIWKDKVYPIAQCNNAYIFPGIGLGVIASGASRITDEMLMSASETLAKHSPLVNNGEGLVLPALKDIQVVSRAIAFAVGKMAQQQGVAVKTSAEALQQAIDDNFWKPEYRDYRRTSI

SEQ ID NO: 78062 - DNA, 1689 bp, Shewanella oneidensis
  CDS (1)..(1689): transl_table=11
atggacgataataaacgccccctctatcttccgtttgcaggacctgccattcttgaagcgccattgattaacaagggcagtgcattttctgaagaagagcgaattttctttaacctcgaaggcttagtgccctatgccattgaaactattgaagaacaggcttcgcgcgcctacgatcagtttagaagtttcaataacgatctcgataagcacatttatctgcgcaacattcaagacaccaacgagacgctgttttatcgtttagtgcaaaatcatatcagcgaaatgatgccaattatctacacccctacagtaggtttggcctgtgagcgtttctcgaaaaactatcgccgtaaccgtggtctgttcatctcttatccgaataaagacaggattgatgacattctcaacaactcaacgcgccaaaaggtaaaaatcatcgtggtgaccgacggtgagcgcatcttaggcttaggcgaccaaggtattggtggcatggggatcccgattggtaaattgtcgctctacactagctgcggtgggatcagtcccgcgtacacactccctatcaccttagacgtaggtaccgacaatccacaattgttagaagatcctatgtacatgggttggcgccatccacgtattggcggcgaagaatatgccgaatttatcgaagcctttatgcaagccgtgcatgtacgttggccagataccctgatccaattcgaagactttgcccaaaaaaatgcgatgccaatccttgagcgttataaggaacgctactgctgctttaacgatgatattcaaggtactgccgcggtgactgtgggctcgttactcgccgcctgtaaagccgcgggtactgagcttaacaaacagcgtgtcgccttcttaggtgcgggtagcgcaggctgcggtattgccgaagccattgtggcgcaaatggtgtcagagggaattagcgatgagcaagcccgcagccaagtttgtatggttgaccgttggggcctgttgctcgataacatgccaaacctgttgccattccagcaaaaactggcacaaaaatgcgcagatattagtcattggaataacttcagcgacaatatttcgctgctcgatgttgtcaacaacgctaaacctacagtgttgattggcgtatcgggcgctccaggcctatttaccgaagaaattgtgcgcgcaatgcatagccactgtccgcggccgattatcttcccactgtcgaacccaacaagccgcgttgaagcgacgccaaaagacattctgcattggacttcgggccaagcattagtcgccaccggtagcccgttcgagcctgtggttgttgatggtgaaacctatgaaatcgcccagtgtaataacagctttatcttcccaggcattggtttaggcgtactcgcctcgggtgcccgtcacgtatcagatgcaatgctcatggcgtcgagccgcgcacttgccgaatgctcgcctttggcgattaatggctcagggccactcctgccaaaactggaagatattcactcagtgagtaagcatattgcgttcgccgtaggtaaagtggcgattgaacagggtttatccttacccgcgagtgatgagttactgatgcaatctatcgaagataatttctggaaaccagaataccgtcgctataagcgcacatcgttctaa

SEQ ID NO: 78063 - protein, 562 aa, Shewanella oneidensis
MDDNKRPLYLPFAGPAILEAPLINKGSAFSEEERIFFNLEGLVPYAIETIEEQASRAYDQFRSFNNDLDKHIYLRNIQDTNETLFYRLVQNHISEMMPIIYTPTVGLACERFSKNYRRNRGLFISYPNKDRIDDILNNSTRQKVKIIVVTDGERILGLGDQGIGGMGIPIGKLSLYTSCGGISPAYTLPITLDVGTDNPQLLEDPMYMGWRHPRIGGEEYAEFIEAFMQAVHVRWPDTLIQFEDFAQKNAMPILERYKERYCCFNDDIQGTAAVTVGSLLAACKAAGTELNKQRVAFLGAGSAGCGIAEAIVAQMVSEGISDEQARSQVCMVDRWGLLLDNMPNLLPFQQKLAQKCADISHWNNFSDNISLLDVVNNAKPTVLIGVSGAPGLFTEEIVRAMHSHCPRPIIFPLSNPTSRVEATPKDILHWTSGQALVATGSPFEPVVVDGETYEIAQCNNSFIFPGIGLGVLASGARHVSDAMLMASSRALAECSPLAINGSGPLLPKLEDIHSVSKHIAFAVGKVAIEQGLSLPASDELLMQSIEDNFWKPEYRRYKRTSF

SEQ ID NO: 78064 - DNA, 1698 bp, Shigella flexneri
  CDS (1)..(1698): transl_table=11
atggaaccaaaaacaaaaaaacagcgttcgctttatatcccttacgctggccctgtactgctggaatttccgttgttgaataaaggcagtgccttcagcatggaagaacgccgtaacttcaacctgctggggttactgccggaagtggtcgaaaccatcgaagaacaagcggaacgagcatggatccagtatcagggattcaaaaccgaaatcgacaaacacatctacctgcgtaacatccaggacaccaacgaaaccctcttctaccgtctggtaaacaatcatcttgatgagatgatgcctgttatttataccccaaccgtcggcgcagcctgtgagcgtttttctgagatctaccgccgttcacgcggcgtgtttatctcttaccagaaccgccacaatatggacgatattctgcaaaacgtgccgaaccataatattaaagtgattgtggtgactgacggtgaacgtattctggggcttggtgaccagggcatcggcgggatgggcattccgatcggtaaactgtcgctctataccgcctgtggcggcatcagcccggcgtatacccttccggtggtgctggatgtcggaacgaacaaccaacagctgcttaacgatccgctgtatatgggctggcgtaatccgcgtatcactgacgatgaatactatgaattcgttgatgaatttatccaggctgtgaaacaacgctggccggacgtgctgttgcagtttgaagactttgctcaaaaaaatgcgatgccgttacttaaccgctatcgcaatgaaatttgttcttttaacgatgacattcagggcactgcggcggtaacagtcggcacactgatcgcagccagccgcgcggcaggtggtcagttaagcgagaaaaaaatcgtcttccttggcgcaggttcagcgggatgcggcattgccgaaatgatcatcgcccagacccagcgcgaaggattaagcgaggaagcagcgcggcagaaagtctttatggtcgatcgctttggcctgctgacggacaagatgccgaacctgctgcctttccagaccaaactggtgcagaagcgcgaaaacctcagtgactgggataccgacagcgatgtgttgtcactgctggatgtggtgcgcaatgtaaaaccagatattctgattggcgtctcaggacagaccgggctgtttacggaagagatcatccgtgagatgcataaacactgtccgcgtccgatcgtgatgccgctgtctaacccgacgtctcgcgtggaagccacaccgcaggacattatcgcctggaccgaaggtaacgcgctggtcgccactggcagcccgtttaatcctgtggtatggaaagataaaatctaccctatcgcccagtgtaacaacgcctttattttcccgggcatcggcctgggtgttattgcttccggcgcgtcacgtatcaccgatgagatgctgatgtcggcaagtgaaacgcttgctcagtattcgccgctggtcctgaacggcgaaggtctggtactaccggaactgaaagatattcagaaagtctcccgcgcaattgcgtttgcggttggcaaaatggcgcagcagcaaggcgtggcggtcaaaacgtctgctgaagctttgcaacaagccattgacgataatttctggcaagccgaataccgcgactaccgccgtacctccatctaa

SEQ ID NO: 78065 - protein, 565 aa, Shigella flexneri
MEPKTKKQRSLYIPYAGPVLLEFPLLNKGSAFSMEERRNFNLLGLLPEVVETIEEQAERAWIQYQGFKTEIDKHIYLRNIQDTNETLFYRLVNNHLDEMMPVIYTPTVGAACERFSEIYRRSRGVFISYQNRHNMDDILQNVPNHNIKVIVVTDGERILGLGDQGIGGMGIPIGKLSLYTACGGISPAYTLPVVLDVGTNNQQLLNDPLYMGWRNPRITDDEYYEFVDEFIQAVKQRWPDVLLQFEDFAQKNAMPLLNRYRNEICSFNDDIQGTAAVTVGTLIAASRAAGGQLSEKKIVFLGAGSAGCGIAEMIIAQTQREGLSEEAARQKVFMVDRFGLLTDKMPNLLPFQTKLVQKRENLSDWDTDSDVLSLLDVVRNVKPDILIGVSGQTGLFTEEIIREMHKHCPRPIVMPLSNPTSRVEATPQDIIAWTEGNALVATGSPFNPVVWKDKIYPIAQCNNAFIFPGIGLGVIASGASRITDEMLMSASETLAQYSPLVLNGEGLVLPELKDIQKVSRAIAFAVGKMAQQQGVAVKTSAEALQQAIDDNFWQAEYRDYRRTSI

SEQ ID NO: 78066 - DNA, 1689 bp, Vibrio cholerae
  CDS (1)..(1689): transl_table=11
atgaataacgataaacgtccgctgtatatttcctacgcaggcccagctcttctcagtactcctctgctcaacaaaggtagtgcctttagcgcggaagaacgtgcttcttttaacctagaaggtttactgcccgaagcgacggaaaccattcaagaacaagtggtacgcgcataccaacagtaccgtggttttgaaagcgacatggataaacatatttatctgcgcaacattcaagacaccaatgagaccctattctaccgcttggtgcagaaccatatttccgagatgatgccaattatctataccccgacagttggtgcggcgtgtgagaacttctccaacatttatcgccgtggccgtggcttgtttatctcttacgctaaccgtgatcgtatcgatgacttgttgaacaatgccgctaaccacaacgtcaaagtgattgtggtgaccgatggcgagcgtattctcggccttggcgaccaaggtatcggcggtatggggattcctatcggtaaactgtcactttacaccgcttgtggtggcattagcccagcgtatacgcttcctgtggttctggatgtgggtacgaataacccgcaacgtcttgctgaccctatgtacatgggctggcgtcatccacgtatcactggacctgactacgacaactttgttgaagagtttatgcaagccgtgcaacgtcgctggccagatgcattgatccagtttgaagactttgcccaaaagaacgccatgccactgcttgagcgttacaaaaatcgcgtgtgctgttttaacgacgacattcaaggcacagcggcggtcaccgtcggctcactgcttgctgcctgtaaagcggcgggtagccagctttcacagcaacgtattaccttcttgggcgcgggctctgcaggctgcggtatcgcggaagcgatcattgcgcaaatggtgtctgaaggcatcagcgatgagcaagcgcgctcacaagtgtacatggtggatcgctggggcctgctcgaagaaggcatgccaaatttgctcgacttccaacagcgcctagtgcagaaaaaagccaacacgcaacattggacaacggaaaacaacggctactcgctgcatgatgtgatccgcaatgccaaaccgactgtactggttggtgtgtctggtgcgcccggtctgtttagtgaagagatcatcaaagagatgcatcagcactgtccacgccctattgtcttcccgctatctaacccaacaagccgtgttgaagctctgccgagcgatattatccgttggactaacggtgaggctttggttgcaacaggtagcccgtttgatcctgtgctgcatgaaggcaaaacttacccaattgtgcaatgtaacaacagctacattttcccgggtatcggtttaggggttttggcagcaaacgcacgccgcgttaccgacgaaatgctgatggaatcgagccgtgcactggcaagttgctcaccgctggccatcaatggtcatggaccattattgccgcctctggaatctatccactctgtttcgaagaagattgctttcgcagtagcgaaaaaagcgattgaacagggtgtggctccagaagtcaccgatgaagcgctggaagcctcaattgaacaacatttctggcaaccggtttaccgccgttataagcgcactgcgttttaa

SEQ ID NO: 78067 - protein, 562 aa, Vibrio cholerae
MNNDKRPLYISYAGPALLSTPLLNKGSAFSAEERASFNLEGLLPEATETIQEQVVRAYQQYRGFESDMDKHIYLRNIQDTNETLFYRLVQNHISEMMPIIYTPTVGAACENFSNIYRRGRGLFISYANRDRIDDLLNNAANHNVKVIVVTDGERILGLGDQGIGGMGIPIGKLSLYTACGGISPAYTLPVVLDVGTNNPQRLADPMYMGWRHPRITGPDYDNFVEEFMQAVQRRWPDALIQFEDFAQKNAMPLLERYKNRVCCFNDDIQGTAAVTVGSLLAACKAAGSQLSQQRITFLGAGSAGCGIAEAIIAQMVSEGISDEQARSQVYMVDRWGLLEEGMPNLLDFQQRLVQKKANTQHWTTENNGYSLHDVIRNAKPTVLVGVSGAPGLFSEEIIKEMHQHCPRPIVFPLSNPTSRVEALPSDIIRWTNGEALVATGSPFDPVLHEGKTYPIVQCNNSYIFPGIGLGVLAANARRVTDEMLMESSRALASCSPLAINGHGPLLPPLESIHSVSKKIAFAVAKKAIEQGVAPEVTDEALEASIEQHFWQPVYRRYKRTAF

SEQ ID NO: 78068 - DNA, 1698 bp, Yersinia pestis
  CDS (1)..(1698): transl_table=11
atggaacttgaatacgaaagtaagcgccccctgtacatcccctacgctggtccaatattgctggagttcccacttctcaataaaggcagtgcttttaccaatgatgagcgtaatcatttcaatctacatggcctattgccagaagcggttgaaaccattgaagagcaagcagagcgggcttaccgccagtatcaggattttaaaaacgacgacgataagcatatttatctgcgcaatattcaggataccaatgaaacgctgttttatcgtctgctagaagctcacctaagtgagatgatgccaattatctacaccccaaccgttggggaagcgtgtgagcacttttctgatatttatcgccgtgcacgcgggttatttatttcctatccgaaccgcgaacacattgatgacatgctacaaaatgccaccaaacaaaatgttaaggttatcgtcgtcactgatggcgagcgtattctgggccttggcgaccaaggtatcggcggtatgggtatcccaataggtaaattatcgttgtataccgcatgcggcggcattagcccagcctacacgttgcccgtagtacttgatgtcgggacaaataacccacaacggttgaatgacccactgtatatgggctggcgtcatccacgaatctccggtgacgagtactatgcatttgttgatgaatttattcaggcggtaaaacgtcgttggccaaatgtcttgttgcagtttgaagattttgcacagaaaaatgccaccccgctgctaaaccgctatcgcgatgaattatgctgtttcaatgatgatatacaagggaccgcggcagtcactctgggtagcctgattgccgccagccatgctgcgggtagccaactgcgcgaccaaacagtcaccttccttggtgctggttccgcgggttgtggtattgccgagcagatcatcgctcaaatgatgtcagagggcttaagcgaaatacaagctcgagcgcggatctttatggtcgaccggtttggtctgctgacagataaactgcctaacttgctcgatttccaaagtaaattggtacaaaaaagtgacgacctacaccactggaatctgcacaatgatgcgatttcattacttgatgttgtccgtaatgccaaaccaaccgtactcattggggtttcaggtcaaccagggctgtttactgaagagttgatccgtgaaatgcacagccattgcgcccggcctatcgtcatgccattgtctaacccaacatcacgggttgaagcccgaccagaagatattatcaactggaccgatggcgcggcactggttgccacaggtagcccattcccaccagtcagttataaagaaaaactgtatcctattgctcaatgtaataactcttacatcttccccggtatcggcttgggtgtattggcatctggtgcgagccgtgtcacggatggcatgttaatggctgccagccgggcattagcagagagctcaccactcgcacgtcatggcgaaggggccttactgcctaatatcgatgatattcaggcggtatcgaaagctatcgcaatgcgggtcggtcaagccgctcaattacaaggtgttgctattgtgacttcggaagaagcgttgtctaaagccattgagcacaattattggcaaccacagtaccgtagctataaacgcacctcgttttga

SEQ ID NO: 78069 - protein, 565 aa, Yersinia pestis
MELEYESKRPLYIPYAGPILLEFPLLNKGSAFTNDERNHFNLHGLLPEAVETIEEQAERAYRQYQDFKNDDDKHIYLRNIQDTNETLFYRLLEAHLSEMMPIIYTPTVGEACEHFSDIYRRARGLFISYPNREHIDDMLQNATKQNVKVIVVTDGERILGLGDQGIGGMGIPIGKLSLYTACGGISPAYTLPVVLDVGTNNPQRLNDPLYMGWRHPRISGDEYYAFVDEFIQAVKRRWPNVLLQFEDFAQKNATPLLNRYRDELCCFNDDIQGTAAVTLGSLIAASHAAGSQLRDQTVTFLGAGSAGCGIAEQIIAQMMSEGLSEIQARARIFMVDRFGLLTDKLPNLLDFQSKLVQKSDDLHHWNLHNDAISLLDVVRNAKPTVLIGVSGQPGLFTEELIREMHSHCARPIVMPLSNPTSRVEARPEDIINWTDGAALVATGSPFPPVSYKEKLYPIAQCNNSYIFPGIGLGVLASGASRVTDGMLMAASRALAESSPLARHGEGALLPNIDDIQAVSKAIAMRVGQAAQLQGVAIVTSEEALSKAIEHNYWQPQYRSYKRTSF

SEQ ID NO: 78070 - DNA, 1749 bp, Bacillus subtilis; identical to SEQ ID NO: 5971
  CDS (1)..(1749): transl_table=11

SEQ ID NO: 78071 - protein, 582 aa, Bacillus subtilis; identical to SEQ ID NO: 5972

SEQ ID NO: 78072 - DNA, 1701 bp, Bacillus subtilis
  CDS (1)..(1701): transl_table=11
gtgaaacaattcagagtaacaaacgaaggagacattcaaacaacattaagaggccttgaagtgctctctgttccttttttgaacaaaggtgttgcttttactgaggaagaaagaaaagaacttggtttaaaaggctttctgccgcccaaggtattaacaattgatgatcaggcgaaaagagcgtatgaacaatattccgcacagcctgacgatttgagcaaaaatgtctatttaacggcgctgcacgatcggaatgaaacgctgttttaccgcctgttaaatgaccatttaggggaaatgctcccgattgtctacacaccgacagtcggaacggcaattcagagatacagccatgaatacagaaaaccacgagggctctatctgtcaatcgatgacccggacggtatgaaagaagcttttaaacagtataaagatcaaagcgatacgatcgatttaattgttgcaactgatgcggaaggaattttaggaatcggtgactggggcgtcggaggaatcgcaatttctattggcaagctggcggtttatacagcggctgcgggcattgatccgagcagagtgctggctgttgttttagatgcggggacaaatcaggagagcctcttgaacgacccgctttatgtcggcaaccagcattccagagtgcgcggggaacgttatgaccaatttattgacgactacgttgcgctggcgagagaaacatttccgaatgcattgctgcattgggaggatttcggggcgaaaaacgcgcgaagcattttgaaacgctataaagataaagtgtgtaccttcaatgatgatatccaaggaactggcgctgtttctttggccgcagtcttatcctgtgcaaaagcgtctaaagttccgctgagagatcacagagttgttatattcggagcgggaacggcaggaatcggaattgccgaacagctgcgggaagcattggtgcgcgagggactgagtgaagaagaatcatacaagcgcttctggtgcatagacaggaacgggctgttaacagatgatatggatcagcttcttgatttccaaaagccgtatgcccgttcggctgatgaagtgaaggattatcagcggaacggagacggcggaggcattgatcttcttgaagtggttcggcaggcgaaaccgacgatcctgatcggcacatctacggtttccggcgctttcactgaagaaattgtaaaagaaatggcgtcacatgtgaaacggccggcgattttgccaatgtcaaatccgacaactctttctgaagcaaagccggaggatttaatcgaatggacagaaggccgtgcgctgatcacgacaggaagcccgttcccgccagttgaatataacggagttacgtatcatatcgggcaggcaaacaacgcgcttgtcttccctggtctcggtcttggaacgattgttacaaaatcaaaattaattaccgacggcatgtttgaagcatgtgcccgggcaatcgcaggtatggtcaatgtcggggtgcctggggcgccgatgcttccaaaagttgaagatttgcgcactgtttcggcaaccgttgctgttgaagttgcaaaaaccgcaatgaaggaaggcgtcgctacggaagagcctgaagacattatacaggcagtgcaggatgcgatgtggtatccggtatacaaaccgattcgcgcgatataa

SEQ ID NO: 78073 - protein, 566 aa, Bacillus subtilis
MKQFRVTNEGDIQTTLRGLEVLSVPFLNKGVAFTEEERKELGLKGFLPPKVLTIDDQAKRAYEQYSAQPDDLSKNVYLTALHDRNETLFYRLLNDHLGEMLPIVYTPTVGTAIQRYSHEYRKPRGLYLSIDDPDGMKEAFKQYKDQSDTIDLIVATDAEGILGIGDWGVGGIAISIGKLAVYTAAAGIDPSRVLAVVLDAGTNQESLLNDPLYVGNQHSRVRGERYDQFIDDYVALARETFPNALLHWEDFGAKNARSILKRYKDKVCTFNDDIQGTGAVSLAAVLSCAKASKVPLRDHRVVIFGAGTAGIGIAEQLREALVREGLSEEESYKRFWCIDRNGLLTDDMDQLLDFQKPYARSADEVKDYQRNGDGGGIDLLEVVRQAKPTILIGTSTVSGAFTEEIVKEMASHVKRPAILPMSNPTTLSEAKPEDLIEWTEGRALITTGSPFPPVEYNGVTYHIGQANNALVFPGLGLGTIVTKSKLITDGMFEACARAIAGMVNVGVPGAPMLPKVEDLRTVSATVAVEVAKTAMKEGVATEEPEDIIQAVQDAMWYPVYKPIRAI

SEQ ID NO: 78074 - DNA, 1944 bp, Flaveria pringlei; identical to SEQ ID NO: 5983
  CDS (1)..(1944)

SEQ ID NO: 78075 - protein, 647 aa, Flaveria pringlei; identical to SEQ ID NO: 5984

SEQ ID NO: 78076 - DNA, 2258 bp, Flaveria trinervia
  CDS (40)..(1986)
gagatattttgccctaattcacacctcttctctcgcaccatgatttccttgaactcttcatttcttgagaggagctccgttaccggaggctcgaggacgcaatcgcagtcgttgaggttgtcggcgaggcgtcctgtggtgacgtctatgctgaattccaacagtctaccggagagaaacgtcagcgtttcggtggatagtgctgtgagggatgtgaatgctccggtggcggtggaagttgatcgttctgttggtgaaaaaccatttgcagctgttggtggtggtgttgaggatatgtacggtgaggataccgccaccgaggatcattatatcactccgtggtctgtttctgtcgccagcggctattcgttgttgcgggacccacaccacaataaaggtctggcctttactgagaaagaacgagatgcccattttctacgtggtcttcttcctccggttgttgttaatcacgatcttcaggtaaaaaagatgatgcataatatccgccaatatcaagtacctctacagaggtaccaagccatgatggatcttcagcaaagaaatgagaggttattctacaagctattaattgagaatgttgaggagcttctcccaattgtatatacaccaaccgttggtgaagcatgccaaaaatacgggagcattttcgagaactcacagggtttatttattagtttaaaagacaagggtagaattcttgagatattgaagaattggccacataaaaaaattcaagttatagttgtcacagacggtgaacgaatcttaggtctaggagaccttggctgtcagggaatgggcatacctgtgggaaagcttgctctgtacacagctcttggaggagttcgcccttcagcttgtttgccgataaccattgatgttggcaccaataacgagaagttgttgaacgatgatgaattctacattggtttaaagcaaaagagagctgctgggcaggagtatgctgaacttatgaatgagttcatgtctgctgtcaagcagaattatggggaaaacctcctcattcagtttgaggattttgcaaaccacaacgcctttgatcttcttgaaaagtacagaaccacccatcttgtgtttaacgatgatatacaggggacagcttctgtggtgcttggagggcttatttctgcactaaaattagttggtggatctttggcagaccaaaaatttttattccttggagctggagaggctggcacaggcattgctgaactcatagctctggagatatcaaaacagacaaatattccattagaagagagccgcaagaaggtttggcttgtggactcaaagggtttgattgttagatcccgcctagattcactacagcatttcaagaagccctgggcccatgatcatgaacctgttaatgaattcttggatgctatcaagacaatcaggccaacagtgttaattggatcatcagggacaggacagactttcacaaaagaagttgttgaaactatgtcatcacttaatgagaaacctattattcttgctctttccaacccaacttcacaatctgaatgtactgctgagcaagcttatacctggagtgagggtcgtgctatattcgccagtgggagtccttttaagcctgttgaatataatggaaagctctatgtgtcaggccaggccaacaatgcatacattttccctggatttggtctgggcttgatcatttctggtgcaatccgtgttcatgatgacatgcttttagcagcctccgaggctccagctgaacaggtgacacaggaacattttgacaaagggctaatattcccaccattcaccagcatccgcaagatttctgctcatattgctgccaaggtggcagccaaagcatatgaacttggtttggcgagtcgtcttccccaaccagaaaatctagtagcttatgctgagagctgcatgtacagccccaaataccgcatctaccgttaagtttagcgggaaaaaaagacagttgatctgttgctgtgtgcaattttttaaagggtatggtgtcagatgcatgttgtaatgcttgttcatcaacacattatatgacttgcagttgctgatgatggaaacttaaagcttaatgactgacttttgtttattgcactgacaaataccggttgggttcttgttatcaggaatgctcattgtgtgtagctaaaagctggccgtttatagttttatagttttattgccctaaaaaaaaaaaaaaaaaa

SEQ ID NO: 78077 - protein, 648 aa, Flaveria trinervia; identical to SEQ ID NO: 5986

SEQ ID NO: 78078 - DNA, 2253 bp, Oryza sativa
  CDS (93)..(2012)
gatgcgctcgcttcctcttccccccagccatcggcgacgcgaggacgcgacgcgccccaccaaccaccaccgcctccgccgacctcgccgccatgctgtccgcgcgcgccgccgccaccgccgccgccgccgccgcctccccgctgtggaagcgcggcgagggtggcagcagcgggagcgggagcggatgcacgagctgcagggaggtgcggaggagggccgcggcggtgagggtccgtgcggcggcgccgaggagggtggaggcggtcgcgatggagtccgcggcggagaccgagaagaaggaggaggttgcggcggccggcggcggggttgaggacatggctaccgaggaggtgcccgtcacgccatgggccttctccgtcgcgagtggttacacccttttgagggatccacatcacaacaagggccttgcctttagtgagaaggagcgggatgctcattacttacgtggccttcttcctccggcagttgtgtctcaggatcttcaagtgaagaagatcatgcataatcttcgccagtacagtgtacctttgcagcgttacatggccatgatggatctccaggagaggaacgagaggctcttctacaagcttttgattgataatgtggaggagcttctccctgtggtgtatacaccaacagtaggtgaggcctgccagaagtatgggagcatatttagacaaccacagggtctctatgtcagcttgaaggacaagggaaaggttcttgatgtgctaaggaactggccagagagaaacattcaagttattgttgttactgatggtgagcgcattttggggcttggagatttgggttgtcagggaatgggtattcctgttggtaaactttctctgtacactgcccttggaggagttcgcccgtcagcttgtttacctatcacgattgatgttggtacaaacaatgagcaattgttgaatgatgaattctacattgggctccggcaaaggcgtgctactggcaaggagtaccatgagctcatggaagaatttatgagtgccgttaagcaaatctatggtgagaaagttctgatacagtttgaggacttcgccaatcacaacgcatttgatttgcttgcaaaatacagcaagagtcatcttgttttcaatgatgatatccagggaacagcatctgtggtccttgcaggtcttttatcatcactaaaggtggttggtggaaccctggctgaacacacttatttgttccttggtgctggtgaggctggaactggtattgcagaactcattgctcttgagatttcaaaacagacaaaggctccaattgaggagtgccgcaagaaggtttggctgctggattcaaaggggttgatcgttaactcacgaaaagaatccctccaggcatttaaaaagccttgggcacatgagcatgaacctgtaacgacactgttagatgctgtccagtccatcaaacctactgtgctgattggaacatccggagttggcaaaacttttactaaagaagttattgaggccatggcttcctttaacgagcgacccgtcattttctctctgtcaaaccccacatcacactctgagtgtactgctgaagaagcatataattggagccagggtcgtgcagtatttgccagcggcagtccgtttgaccctgtggagtacaatggaaagatacatgtgccaggccagtcgaacaatgcctacattttccctggattcggcctcggtgtcgtaatctctggagctgtccgtgttcacgaggatatgcttctagctgcctcggaaacactagctgatcaggccactcaggagaactttgagaagggatcgatcttcccgcccttcacaaacatcagaaagatttctgctcgcattgccgcaagcgtggctgcaaaagcctatgaacttggactggcgacccggctgcctcaacccagggatctggagaaatacgcagagagctgcatgtacacccccgtataccgcagctaccggtaacgccgcggaggtcaaattttgcagtaataaaacctaccaatgcagtaggggatactgctatgttgtgttgccattgtcgccgttggccgttgctgctgcaaggcattgtatctgtctatataaatcacctgttgtaacgttatggaagcaatctccatgtgtaccaccagtgtttcattctttgatcggttataaagagtgcaataagaacatagttttagctcccattgtaatgggcagc

SEQ ID NO: 78079 - protein, 639 aa, Oryza sativa; identical to SEQ ID NO: 6004

SEQ ID NO: 78080 - DNA, 2344 bp, Neocallimastix frontalis
  CDS (121)..(1899)
gaattccgaaataaatatataacttttaatatatataaatataaatttataaatctatatatttatattaatttttttgcttacccaattatcatttattttatataaataatagaaaaaatgctcgctccaattcaaactattgctcgtccagtttcttctattcttccagctactggtgctttagctgccaagagaactttcttcgctccatccgaagtttacaacaagaagcaagttattgttaccaagaagactggtttagatattcttaacgacccaaagttaaacaagggttccgctttcactgctgatgaaaaggaccgtcttggtattcgtggtttagttccaccaagaccacaatctcttgaagctcaatacaagcgttgcaagaccaaccttgacaagatctctgacccacttgaaaagttcatctaccttaaccatcttcaaaaccgtaacgaaactctttactacaagatgattctcgaaaacttcgttgaacttgctccaattatttacactccagttgtcggtgaagcttgtcaaaagttccacaagatcttcactcaaaccagaggtatgtacttctctactgctgaccgtggtcaaatgtctgctgttgctgctaactggccatacgatgatgttgatgttattgtcgttaccgatggttcccgtattcttggtcttggtgatcttggtgctggtggtatgcaaattccaattggtaagcttaccctttacgtctgtggtggtggtattaacccacgtaacgttcttccaatcgttcttgatgttggtaccaacaacaaggaactcttaaacgacccactctacctcggtatgcaacacccacgtcttcaaggtgaagaattccacgctttcgtcgatgaatgggtttctgctattactgaccgtttcccaaaggctgtcatccaattcgaagatttcatgatgccaaatgctcttgacttacttcttaagtacaaggaccaaatctgtatgttcaacgatgatatccaatctactggtgctattacccttgcttccgttcttgctactatgagagctcgtggtggtacattcgctgatattaagaaggaaaccttcttatgtcttggtgccggttcctctggtgttggtgtctgtgaaaccattgttgactgtattgttgccgaaggtgctactcgtgaagaagcctacgctcaattctacatgttcgatcacaagggtcttttaggtaagggtcgtgacgatttattaccatcccaacaagtcttcatgcgtaaggaaattgaaggtggtaagactccagctgaattacttaagaagattaagccaacttgtcttcttggtctttctacttgtccaaagcttttcaacaaggaaatgcttagctacgttgcttcttactgtgaaaagccaggtattttcccactttctaacccaacttctcgttctgaatgtactgctgaagaagctgttgaattcactgacggtaaccttatcttcgcttctggttctccattcgatccagttgaatggaagggtaagaccatccaaactaaccaatgtaacaactcctactccttcccaggtattggtttaggtcttgtttcttcccgtgctactcgtgttccattcgaaaccttccaagtttgtgctcgtgttattgcttctcttggtactccagaaatgcttgccactggtaagatcttcccagatcttgacaaccttcgtgccgtttctcttgaagttggtattgaagtcgctaagatggctgaacgtatgaacattgccacccaattcccaccaaagggtatggactggagagaatggttaaagcacaacatgtggcaaccagaatacccacacattgttgttaagaacctctaaatgatttaagagatttatattaataacaataacaataaaaatattaataaaaccaaaaaaaaaaaattaataaaaattgagagcaacaatttttttctaatcctattatcattatataaattaaatgatataaaataataataataataataattaatcatcttttttttttttttattattactttatttttttgttttaattatgctttgttccttttaaaaagattgaaagtaaaaagttaaaaaaagcaagttaaatacaagaaaaaagtatttaaatttagaaaagaaaaaaaaaagtaaaaaaattaaatgaatatatttttttataaaaaagcaagtttttttttaataaacaatgaaaaacaaaatgatagatttacttacaccatataattaattttatacccttaaagtagaaaaattatcccagagaaaaaaaa

SEQ ID NO: 78081 - protein, 592 aa, Neocallimastix frontalis
MLAPIQTIARPVSSILPATGALAAKRTFFAPSEVYNKKQVIVTKKTGLDILNDPKLNKGSAFTADEKDRLGIRGLVPPRPQSLEAQYKRCKTNLDKISDPLEKFIYLNHLQNRNETLYYKMILENFVELAPIIYTPVVGEACQKFHKIFTQTRGMYFSTADRGQMSAVAANWPYDDVDVIVVTDGSRILGLGDLGAGGMQIPIGKLTLYVCGGGINPRNVLPIVLDVGTNNKELLNDPLYLGMQHPRLQGEEFHAFVDEWVSAITDRFPKAVIQFEDFMMPNALDLLLKYKDQICMFNDDIQSTGAITLASVLATMRARGGTFADIKKETFLCLGAGSSGVGVCETIVDCIVAEGATREEAYAQFYMFDHKGLLGKGRDDLLPSQQVFMRKEIEGGKTPAELLKKIKPTCLLGLSTCPKLFNKEMLSYVASYCEKPGIFPLSNPTSRSECTAEEAVEFTDGNLIFASGSPFDPVEWKGKTIQTNQCNNSYSFPGIGLGLVSSRATRVPFETFQVCARVIASLGTPEMLATGKIFPDLDNLRAVSLEVGIEVAKMAERMNIATQFPPKGMDWREWLKHNMWQPEYPHIVVKNL

SEQ ID NO: 78082 - DNA, 2283 bp, Amaranthus hypochondriacus
  CDS (55)..(1926)
ggcacgaggacgattaaatttatgcggaattgaagaaattttgttgcaagaacaatgttggtgctttgtagtcgaagtagattgacatcgtcgttgatcagacggttgaaggatcaaattgcgaatgtctcaaatcatagatcgtttgctacttcggaaggtcatcgtcttgctattgttaataagcgtagtctagacattcttcaagatccttggttcaacaagggcaccgcattttccatgacagagcgtgacaggcttgatcttcgtggacttcttccaccaaatgtcatgactactgagcaacaaattgaacgatttacggctgacttgagggtacttgaactgacaacgaaggatggaccatctgatacttatgatttagcaaaatggaggattctcaaccgattgcatgacagaaatgaaacaatgtttttcaaagttttaattgagaatatcgaagaatacgctccaattgtgtctactcctacagttggtcttgtttgccagaaattcagtgggttatatagaaggccgcgaggaatgtattttagctccgatgatcgtggagaaatgatgtcaatggtatacaattggcctgcagaacaggttgatatgatagtggtgactgatggtagtagaattttgggacttggagatctaggagttcatggtattggtgttgcaattggaaaattagatttatatgttgctgctgcagggatcaacccacaaagagtgttaccggtgatgattgatgttggaaccaataatgaggatcttcttaagaaccctctatatttgggattgcaaaaaaagcgtcttgatggagaagagtatctagcagttatggatgaattcatggaggctgtttttactcgctggccgaatgtaattgtgcagtttgaagatattcagaacaagtgggctctcacattattgcagagatacaggcataaatacagaacgttcaatgttgatgtacaggggacttccggtgttgcaattgctgggcttctgggagctgtaagggctcaaggaaggccaatgattgacttccctaaacaaaagattgttgttgcaggagctggaagttcaggtgtgggcgttcttaatgctgctaggaaaacaatggcaaggatgttggggaatgatgagtctgcttttgacagagcaaggagccaattctgggtggttgatgacaagggattgattacagagaagcgcgctaatttagaccccgaggtccaaccatttgcatggaaagaaaatgaaattagtctccaaggattaaacgaaggggcaaagctggtggaagtggtccgccaggtaaaacctgatgtacttttgggattgtccgcatatggaggtttgttctcaaaggaggttttggaagctcttaaagattcaacatcaaccaggcctgcaatctttgcgatgtctaatcctacaaaaaatgctgagtgcacccccgaggaagcattctcaatagtaggtgaccatgttgtgtacgctagtggaagtccattcaaagatgtggatcttggaaatggcaagattgggcacgttaatcagggaaacaacatgtacctttttcctgggattggtctaggtgtcctcctttcaggctcgaggatcatctcagatagcatgtttcaagctgctgcagagcgtttagctggatatatgaccgatgaggaagttatcaatggcgtcatctacccttcaatatcaagaatacgtgacatcaccaaagaggtagcagcagccgtaattaaggaagctgtagaagaggaccttgcagaaggctatcgtgacatggatgctagggagcttcaaaaattaaatgaggagcaaattcttgaatatatagagaagaacatgtggaatccggaataccctacactagtgtacaagaaacgctgaaggctaaagaatgaggatttgaatatggttgttgtagtgaaccgaatcggaaacttgagaagcaatgcagggtcttctctaatagttgataacttcttttttcacctgaaagagtcgagttttagtttttgttgcttatctatctcttgcatcatgaattttttgtcggtttttcattattaacggcattattttcaataaaggtcttggctttgaagtgaagataacgcgtatgatgcacattgaatgttaaataatggttgtttttagaaccaacacctatactatttctatggagtcatgtatgaattgttgtttattgatatttgatgatgtccataaaatgtcattgaagat

SEQ ID NO: 78083 - protein, 623 aa, Amaranthus hypochondriacus
MLVLCSRSRLTSSLIRRLKDQIANVSNHRSFATSEGHRLAIVNKRSLDILQDPWFNKGTAFSMTERDRLDLRGLLPPNVMTTEQQIERFTADLRVLELTTKDGPSDTYDLAKWRILNRLHDRNETMFFKVLIENIEEYAPIVSTPTVGLVCQKFSGLYRRPRGMYFSSDDRGEMMSMVYNWPAEQVDMIVVTDGSRILGLGDLGVHGIGVAIGKLDLYVAAAGINPQRVLPVMIDVGTNNEDLLKNPLYLGLQKKRLDGEEYLAVMDEFMEAVFTRWPNVIVQFEDIQNKWALTLLQRYRHKYRTFNVDVQGTSGVAIAGLLGAVRAQGRPMIDFPKQKIVVAGAGSSGVGVLNAARKTMARMLGNDESAFDRARSQFWVVDDKGLITEKRANLDPEVQPFAWKENEISLQGLNEGAKLVEVVRQVKPDVLLGLSAYGGLFSKEVLEALKDSTSTRPAIFAMSNPTKNAECTPEEAFSIVGDHVVYASGSPFKDVDLGNGKIGHVNQGNNMYLFPGIGLGVLLSGSRIISDSMFQAAAERLAGYMTDEEVINGVIYPSISRIRDITKEVAAAVIKEAVEEDLAEGYRDMDARELQKLNEEQILEYIEKNMWNPEYPTLVYKKR

SEQ ID NO: 78084 - DNA, 2251 bp, Solanum tuberosum
  CDS (29)..(1909)
cttcactgtctttcttcgatccagaaaaatggcgattttttccaatcaaatgcgactttcctcaactcttctgaagcgtttacaccaaagagttgctgctgctgtgaattcatcttcttcaagaaattttactacaacggaaggtcaccgtcccaccattgttcacaagcggagtcttgatattcttcacgatccatggtttaacaagggaacagcattctcatttactgaacgtgatcgtcttcacattcgtggcttactgcctccaaacgtgatgtcttttgaacaacaaattgcacggttcatggctgacttgaagaggcttgaagtacaagctagagatggtccatctgacccatatgttttggccaagtggcgcatacttaatcgcttgcacgatagaaatgagactttgtactacaaggttctaatggaaaatattgaggaatatgcacccatagtgtatactcctacagttggtcttgtttgccagaagtacagtggattgttcagacgtccgaggggaatgtacttcagtgccgaagatcgtggggaaatgatgtcaatggtttacaattggccagctgatcaggttgacatgattgttgtaactgatggaagtagaatattgggtcttggagatctcggaattcagggaattggtattgcaattgggaagctggatctgtatgtggctgctgctgggatcaaccctcaaagagtactgcctgtaatgattgatgttggaactgacaacgagaatctcttgaaagaccctttatatttgggactgcaagatcatcggcttgacggagaggagtatattgaagtaattgatgaatttatggaggctgtttttactcgttggccccatgtgattgtgcagtttgaagattttcaaagcaagtgggcctttaagctgttgcagcgttatagaaacaactacagaatgtttaatgatgatatccagggaactgcaggagttgctattgctggtcttctgggagcagtaagagcacagggaagaccaatgattgatttcccaaaaatgaagattgtggtggcgggtgctggaagtgcaggaataggggttcttaatgctgctaggaagacaatggcaagaatgctagggaatactgaaattgcttttgaaagtgcaaggagtcagttctgggtggttgatgccaagggattaattactgaggcacgtgaaaatgttgatcccgatgctcgcccgtttgccagaaagatcaaagagattgaacgtcaaggtctaagtgaaggtgcaactctcgcggaagtggtacgcgaagtgaagccagatgtacttcttggtttatctgcttgtggaggcttgttttcaaaagaggtactggaagcccttaagcattcaacttcaacccggcctgcaatttttccaatgtcaaacccaacgagaaatgctgaatgcacacctgaggaagcattttctattctcggtgagaacattatatttgcaagtggaagcccattcaaggatgtggatcttggaaacggtcatgttggacactgcaaccaagcaaacaacatgttcctttttcctggaataggacttggtactcttctgtctggatctagaatcgtttcagatggcatgttacaggctgcagctgagtgtttggctgcatatattacagaggaggaggtactcaaggggattatatacccttcgatatccaggatacgcgatataacaaaggaggtggctgcagctgtggtgaaagaagctatagaagaggatctggctgaaggataccgtgaaatggacagccgagagttacggaaacttgatgaggcacaaatatctgagttcgtggagaacaatatgtggagtcctgattatccaacactggtttacaagaaagattgatcatctatagctgcttgcaaagcttcatcttttcatgtttctcgcaacatcagcaagggcgtgatggatcaaatacgatcatggacattttgttacatgatgggatcatgtaaatttaacatccagtaatatcccattcttccaacatttgattggctgaggacttcttgatattatagcttttgttgagtagtccataaattggttgtctgtaaaagtgaataaatccccttctcctttcaattctgattttgagcttcgtcaacgcagacgatgtagtcttacgggctgttgctgcacagatgtactataaattgctctgtgatgtagatgttgtgtaaa

SEQ ID NO: 78085 - protein, 626 aa, Solanum tuberosum
MAIFSNQMRLSSTLLKRLHQRVAAAVNSSSSRNFTTTEGHRPTIVHKRSLDILHDPWFNKGTAFSFTERDRLHIRGLLPPNVMSFEQQIARFMADLKRLEVQARDGPSDPYVLAKWRILNRLHDRNETLYYKVLMENIEEYAPIVYTPTVGLVCQKYSGLFRRPRGMYFSAEDRGEMMSMVYNWPADQVDMIVVTDGSRILGLGDLGIQGIGIAIGKLDLYVAAAGINPQRVLPVMIDVGTDNENLLKDPLYLGLQDHRLDGEEYIEVIDEFMEAVFTRWPHVIVQFEDFQSKWAFKLLQRYRNNYRMFNDDIQGTAGVAIAGLLGAVRAQGRPMIDFPKMKIVVAGAGSAGIGVLNAARKTMARMLGNTEIAFESARSQFWVVDAKGLITEARENVDPDARPFARKIKEIERQGLSEGATLAEVVREVKPDVLLGLSACGGLFSKEVLEALKHSTSTRPAIFPMSNPTRNAECTPEEAFSILGENIIFASGSPFKDVDLGNGHVGHCNQANNMFLFPGIGLGTLLSGSRIVSDGMLQAAAECLAAYITEEEVLKGIIYPSISRIRDITKEVAAAVVKEAIEEDLAEGYREMDSRELRKLDEAQISEFVENNMWSPDYPTLVYKKD

SEQ ID NO: 78086 - DNA, 1806 bp, Solanum tuberosum; identical to SEQ ID NO: 5989
  CDS (1)..(1806)

SEQ ID NO: 78087 - protein, 601 aa, Solanum tuberosum; identical to SEQ ID NO: 5990

SEQ ID NO: 78088 - DNA, 2142 bp, Mesembryanthemum crystallinum
  CDS (86)..(1843)
ctggtttctgggcaattgtttgttgtagagattgttgctgaggttgaaggaaagagagagaaaaagggtgattgttagagaagtaatgggtggtagcaatgcattgaatgagatgaccaatggatctgatggtattactgggggtgttgctgatgtctatggtgaagagtttgccacccaggatcagcttgtcaccccttggagcttctctgttgcttgtggtcattcattgttgagagatccccagcacaacaaagggcttgcttttacagagaaagagagagatgcccacttcttgcgcggtctgttaccccctgtagttctgtcacaagagctccaggagaagaagttcttgacgactcttcgtcaatatcaagttcccttgcagaaatacatggccatgatggatcttcaggagaggaatgagaaactgttctacaaacttcttgttgaccatgtcgaagaactgcttcctcttgtttatacgccaactgttggtgagggatgccaaaagtatggaagtatttttagacgtccccaggggctattcatcagtttgaaggataagggaagaatccttgagcttttgagaaactggcctgaaaagaaaattcaagttattgtagttactgatggtgaacgcatactggggctaggagaccttggctgtcagggaatgggaatacctgttggaaaactttccttgtattcagcccttggtggagtctgcccatcagcatgcttgcctataacccttgatgttggcaccaacaatcagaagttgttagatgatgaattttacattggattgaagcagaagcgggctactggagaggaatatgctgagtttgtccaagaattcatgtctgcagttaagcaaaactatggggagaagatccttgtacagtttgaagattttgccaaccataacgcatttgagttgctggagaaataccgcaccactcacctcgtcttcaatgatgacattcagggtactgcttctgttgttcttgcaggacttattgcttctttaaaactactagggggaaccttggctgaccataaatttttgttcctcggtgctggagaagctggaacgggtattgcagagcttatagcccttgagatgtcaaagaagacaaaggctccagtagagcagatgaggaaaaagatttggcttgtcgactccaagggacttgttgttagctctaggaaggagacacttcagcagttcaaactaccttgggctcacgaacatgaacccattacaactcttatagatgctgtccaggcaatcaagcccacagtgttgattggtacttctggaaaagggaaacaatttaccaaggaggtcgttgaagccatggcaaatatcaatgcgaaacctctcattcttgctctatcaaatcctacttcacagtcagaatgtactgccgaagaagcctacacatggagtcagggacatgcaatatttgccagtggaagcccatttgaccctgttgaatatgaaggaagaacttttgtccctggccaggcaaataatgcttacattttccctgggtttggtttgggtctgatcatgtgtggtgcaatccgtgtccatgatgacatgctattggctgcctctgaggcactggcttcacaagttacaggagaacatttcataaagggacttatctacccaccattcaaggacatcagaaagatatcagctcacattgctgccggagtagctgcaaaagcttatgaacttggtttggctagtcggcttcctcaaccagccgatcttgttaagtttgccgagagctgcatgtacaaccctacttaccggagtttccgttgaaattctgggaagaatttttcttgcagttttggatctgtgcttccactgtgaagagtttttcgttactcttttttttttcacaatcattttgttgggttatcatataaatgtgtaatgtttgcagtttgttagtacctactaattagcaccatcctgtggtttagtcatctatcagacattttagacttgctttttagcatcaaaatccgagtgctgcattgaattgaaaataatttaaacgagagattatctgtttaaaaaaaaaaaaaaaaaaaaaaaaaaaaaaaaaaaaaaaaaaa

SEQ ID NO: 78089 - protein, 585 aa, Mesembryanthemum crystallinum; identical to SEQ ID NO: 5994

SEQ ID NO: 78090 - DNA, 1647 bp, Mycobacterium tuberculosis
  CDS (1)..(1647): transl_table=11
atgagcgacgcccgcgtgccacggatcccggccgcgttgtccgcaccaagtctcaaccgtggagtcggcttcacccacgcgcagcggcggcggctggggctgaccggccggcttccgtcggccgtgctcacgctcgaccaacaggccgaacgcgtatggcatcagttgcagagcttggccaccgagctgggccgcaacctgcttctcgaacagctgcactaccgccacgaggtgctgtacttcaaggtgctggccgaccatttgcccgaactgatgccggtggtgtacacgcccaccgttggcgaggcaatccaacgcttctccgacgaataccgcgggcaacgcggactgtttctgagcatcgacgaacccgacgaaatcgaggaagccttcaacacgttggggctggggcccgaggacgtcgacctgatcgtgtgcaccgatgccgaggcgatcctgggtatcggtgactggggtgtgggtggcatccagatcgctgtgggcaaattggccctctacaccgccggcggcggcgtcgatccgcgccgctgcctcgcggtgtctctggatgtcggcaccgacaatgagcagctgctggccgatccgttctatctgggcaatcgccacgcccggcggcgcggtcgggaatacgacgagttcgtcagtcgctatatcgaaacggctcaacggttatttccgcgtgccattctgcatttcgaggacttcgggccggcgaacgcgcggaagatcctagacacatacggcacggattactgcgtgttcaacgatgacatgcaaggaaccggcgcggtggtcttggccgccgtatacagcggtctgaaggttaccggtatcccgctgcgcgatcagacaatagtcgtcttcggcgcaggcaccgcagggatggggatcgccgatcagatccgggacgcgatggtggcagacggtgccacgctcgagcaggcggtgtcccagatctggccgatcgacaggccgggcctgttgttcgacgacatggatgacctgcgcgacttccaagtgccgtacgcgaaaaaccgccaccagctcggtgtggccgtcggggatcgggtcgggctgagcgacgcgatcaagatcgcatcgcccactatcctgctcggctgctcaacggtctacggagcgttcaccaaagaggtggtcgaggcgatgacggcgtcctgcaaacacccgatgatctttccgctgtccaacccgacgtcgcgcatggaagccatccccgccgacgtgctggcgtggtcgaatggcagggcgctgcttgccaccggcagcccagtcgccccagtggaattcgacgaaaccacctacgtcatcggtcaggccaacaacgtgttggcgtttcccggcatcggactgggcgtcattgtcgctggtgcccggttgataaccaggcgcatgctgcatgcagcagcgaaggccattgcgcaccaggccaatccgacaaatcccggagactcgctgttgccggatgtccaaaatctgcgggccatctcgacaacggtcgccgaagctgtctatcgggccgccgtccaagacggggtggcttccaggacgcacgacgacgtcaggcaggccatagtcgacaccatgtggctcccggcatatgactaa

SEQ ID NO: 78091 - protein, 548 aa, Mycobacterium tuberculosis
MSDARVPRIPAALSAPSLNRGVGFTHAQRRRLGLTGRLPSAVLTLDQQAERVWHQLQSLATELGRNLLLEQLHYRHEVLYFKVLADHLPELMPVVYTPTVGEAIQRFSDEYRGQRGLFLSIDEPDEIEEAFNTLGLGPEDVDLIVCTDAEAILGIGDWGVGGIQIAVGKLALYTAGGGVDPRRCLAVSLDVGTDNEQLLADPFYLGNRHARRRGREYDEFVSRYIETAQRLFPRAILHFEDFGPANARKILDTYGTDYCVFNDDMQGTGAVVLAAVYSGLKVTGIPLRDQTIVVFGAGTAGMGIADQIRDAMVADGATLEQAVSQIWPIDRPGLLFDDMDDLRDFQVPYAKNRHQLGVAVGDRVGLSDAIKIASPTILLGCSTVYGAFTKEVVEAMTASCKHPMIFPLSNPTSRMEAIPADVLAWSNGRALLATGSPVAPVEFDETTYVIGQANNVLAFPGIGLGVIVAGARLITRRMLHAAAKAIAHQANPTNPGDSLLPDVQNLRAISTTVAEAVYRAAVQDGVASRTHDDVRQAIVDTMWLPAYD

SEQ ID NO: 78092 - DNA, 1950 bp, Phaseolus vulgaris
  CDS (32)..(1801)
aattccgtaagagaagttgttggcagtgatcatgtcgagcatttccttgaaggagaacggtggtgaggtttctgtgaagaaggattatagcaatggtgggggtgtgagggacttgtatggcgaggacagtgccacagaggatcatcttatcactccatggaccttctctgtagccagtggatgcagtttgctgagagatccacgttacaacaaagggctggcctttactgagggagagagagatgctcattacttgcgtggccttttgcccccatctgtcttcaatcaggaacttcaggaaaagaggttgatgcacaatcttcgccagtatgaggttcctctgcataggtacatggccttgatggatcttcaggagaggaatgaaaggctgttctacaagcttctgatcgataatgttgcggaactgcttcctgttgtttacactccaacggttggagaagcatgccagaaatacggaagcatttttaggcgtcctcagggtctttatatcagtttgaaagaaaaaggcaagatccttgaagtactgaaaaactggccagaaaagagtattcaagttattgttgtgaccgatggtgagcgtatattaggactgggagatcttggctgccagggaatgggaattccggttgggaaactttctctctatactgctttaggaggtgttcgcccttcgtcttgcttgcctgttaccattgatgttggcacaaacaatgagaagttgctgaatgatgagttttacattgggcttagacaaaggcgtgcaactgggcaggaatatgcgacgtttctagacgagtttatgcgtgcagttaagcagaactatggagagaaagttctcgtacagtttgaggatttcgccaatcataatgcatttgatctgctggaaaaatacagctcatctcatcttgttttcaacgatgatatccagggtacagcgtctgttgtattagcaggattgcttgcatccctgaaattagttgggggaaccttagctgaccacaccttcttattcttgggtgctggagaggctggaactggtatagcagagctgattgctgttgaggtctcaaagcagacaaaagctccagtggaagagacccgcaagaagatatggcttgtggattcaaagggacttattgtcagctctcgtctggaatcacttcagcaattcaaaaagccttgggctcatgagcatgaacctgtgaagggacttctagaggctgtcaaggcaatcaagccaaccgttttgattggatcatctggagcagggaagacatttaccaaggaagtggttgaaaccatggcatccttgaatgagaaaccactcattcttgctctctccaacccaacttcacaatctgagtgcacagctgaagaggcttacacatggagcaagggtagagcaatctttgctagtggaagcccatttgaccctgttgaatatgaaggaaaactttttgttcctggacaggccaacaatgcttacatatttcccggttttggcttgggtttgatcatgtctggtgcaatccgtgtgcgtgatgagatgctcttggcagcctctgaagctttggctgcacaagtgtcagaggagaactatgataagggactgatttatcctccattcacaaacatcaggaagatatcagccaacattgctgctaaagtggcggctaaggcatatgatctaggtctggcttctcatctgaaaaggcctaaggatcttgtcaaatatgcagaaagttgcatgtacagcccaggctaccgaagctaccgttgagttttttttgatacacaataagcttcttaggaacagatttattgcattgcttgttaggcttgtggtataaggcatattgccatttgaactttcaatagttgcttattcttcaaggattttatttgtatcggggaataatatatattcgg

SEQ ID NO: 78093 - protein, 589 aa, Phaseolus vulgaris; identical to SEQ ID NO: 5996

SEQ ID NO: 78094 - DNA, 2077 bp, Populus trichocarpa
  CDS (153)..(1928)
agcaaaccactactccagaacttgttatttaatctctatatattttgctgtttctccctttgatttggaaagaaagaaaggtcaggtttaggtttcggttcggtttagtttgatattcgaagatcagcagagagagattaagtcaactgagaatggagagcacgctgaaggagatgagagacggagcttcggtgctcgacatggaccccaaatccactgtcggtggtggtgttgaggacgtttatggcgaggatcgtgccactgaggaccagcttgttactccctggaccatctccgttgccagtggatatactttgttgagggatccacatcacaacaaagggcttgctttcactgagaaagaaagagatgcacactacctgcgtggtcttcttcctccaacaactatctctcaacagcttcaggaaaagaaattgatgaacaccattagacaatatcaacttcctcttcaaaaatatacggccatgatggaacttgaggaaaggaatgaaaggttgttttataagcttttgatcgataatgttgaggaattgcttccggttgtttatacaccgacggttggggaagcttgccagaagtatggaagtattttcaagcgtcctcagggtctatatataagtttaaaagagaaggggaaagttcttgatgtgctgaaaaactggcctcagaagagtattcaagttattgttgttactgatggtgaaagaattttgggacttggggatcttggctgtcagggaataggcattcctgttgggaagttgtctctttacactgcacttggaggagttcgtccttcagcttgtttgcccgtaaccattgatgtgggtacgaacaacgagcaattgctgaaggatgaattctacattggactgagacaaaggagggcaactggccaggaatactctgaacttctccatgagttcatgactgctgtaaaacaaaattatggggagaaagttctgatacagtttgaagattttgctaaccacaatgcttttgatctgcttgcaaagtatggcacaactcatttagtcttcaatgatgatatacaggggacggctgctgttgttcttgcagggcttatttcagcactgaagttgctaggtggttccctggctgatcacactttcttgttccttggtgctggtgaagctggaactggtatagcagagcttatagctcttgagatgtcaagacggtcaaaaactcctttggaagagactcgcaagaagatttggctgacagattcaaagggtttgattgttagttctcgcaaggagtcattacaacacttcaagaaaccatgggctcatgaacatgaacccgttaaaggactcctagaagttgtcaaggcaatcaaaccaatagtcttgattggaacatccggagtgggaaaaacgtttactaaggaagtgattgaggccatggcttctttcaatgagaaacctctaattttggctctctccaacccaacctcacaatctgaatgtacagctcaagaagcctacacttggactaagggcaaagcaatttttgctagtggaagtccatttgatcctgttgagtacgagggaaaagtttttgttcctggccagtccaacaatgcttacattttccctggccttggcctgggtttggtcatctctggagctattcgtgttcatgatgatatgcttctggcagccgcggaagccttggctgggcaaattaaagaagagtacttggcaaaggggctgatttacccacctctatctaacatcagaaaaatctcagtccaaattgctgctaacgtagctgccaaggcatatgaacttggcctggctacacgtctcccccgtccagaaaaccttgtgaagcacgcagagagttgcatgtacagtcccgcctatagatattaccggtgaattgtctgtactgtgcttgtgcatttatgctttcttttggtgtgaagccgcgtgctgtcttgagagcaaccgctctaataagcaaaataaattgtctgggcttgtaatatcagtaccttgttaaactagtaaatggagctacatttcta

SEQ ID NO: 78095 - protein, 591 aa, Populus trichocarpa; identical to SEQ ID NO: 5998

SEQ ID NO: 78096 - DNA, 1698 bp, Schizosaccharomyces pombe; identical to SEQ ID NO: 5999
  CDS (1)..(1698)

SEQ ID NO: 78097 - protein, 565 aa, Schizosaccharomyces pombe; identical to SEQ ID NO: 6000

SEQ ID NO: 78098 - DNA, 2211 bp, Vitis vinifera
  CDS (38)..(1813)
cttcttcaggaaattctgagctccggtggtggtggtgatggagagcacgttgaaggacataagagatggcgcttcggtgctggacctggacccaaaggccaccgtgggtggtggcgttgaggacttgtacggggaggattttgccactgaggaccagctcgtcaccccttggactgtttccgttgccagtgggtattcgttgttgagggatcctcgccataacaagggtcttgcattcaatgataaagagagggatgcgcactacttatgtggtcttctacctccagtagtttccacccaagaacttcaggagaggaaattgatgaactctattcgtcaatatcaagttcctttgcaaaagtacatggccatgatggaccttcaggaaaggaatgaaaggctgttctacaagcttctcattgataatgttgaggaattgctcccggttgtctacactccaactgttggtgaggcttgccagaaatatgggagcatcttcaggcgcccacagggtctttacataagtttgaaagaaaagggaaagattctggaggtattgaagaactggcctgagaggagaattcaagttattgtcgtcactgatggtgagaggattctgggacttggggaccttggttgccaggggatggggatacctgtagggaaactttctctgtatacagcacttggaggtgttcgtccttcagcatgcttgcccataaccattgacgtgggaacaaacaatgaaaagctattggcgaatgagttctatattggtctcaaacaacggagagcaactgggaaggaatactctgaatttctgcaagagttcatgtcccctgtcaagcagaactatggagaaaaagttcttatacagtttgaagattttgcaaaccataatgcttttgacctgcttgcaaaatacggcacaactcatctcgctttcaatgatgatatacagggaacagcatctgtggttcttgcagggatagtttcagcactgcggttacttggtggtactttggccgatcacaaatttttgttccttggtgctggagaagctggaactgggatagcagagcttatagctcttgagatgtcgaaacagacaaaatgtcctatagaagagaccagaaagaagatttggcttgtggactcaaagggtttaattgttggctcccgtaaggattcacttcaacaatttaagaagccatgggctcatgaacatgaacctgttaaggatcttttagatgctgtcaaggtgatcaagccaaccgtcttgattggatcatctggagtaggaaaagcatttacaaaggaggttattgaggccatggcatcctgcaatgagaaacctctcattctggctctctccaacccaacctcacaatcagagtgtacagctgaagaagcttacacttggactcagggtcgtgcaatttttgctagcggaagtccatttgaccccgttgaatacaatggcaaaacttttgttcctggacaggctaacaatgcttacatctttcctggattgggtatgggcttggttatttctggtgctatccgtgttcatgacgagatgcttcttgcagcctcggaagccttggccaggcaagtaacacaagaaaactttgacaagggcttgatttacccaccattctccaatatcaggaaaatatcagcccacattgctgctaatgtagctgcaaaggcatatgaacttggtttggcgacccggctccctcaacctgagaatcttgtgaagtatgctgagagctgcatgtactctcctgtgtaccgcagttaccggtgaaccgttctcccaaaagagttcctatggtcttggcccatggcttgaagtgttgctgaattatgttgtatctctggttggtgtcttttcttcttgtggtgttctaagctttattcctgaagcagcatggttttgaggagttggaagagctgtacctaaataaatgaagttcttagctgctggtgtgtatctctcataaggtaagtagcttcaagctaaaattactatcatctatgtaataatctctaagggggtgtttcaaaagtcagtctcagaagtgcatgaagtcaatgtgtagcactagtaaattcatgtaaacagggattgggccacacctaatctcagctttcatgctttatttgctctttcctatctcaatcatcttcttttttttggtttcc

SEQ ID NO: 78099 - protein, 591 aa, Vitis vinifera; identical to SEQ ID NO: 6002

SEQ ID NO: 78100 - DNA, 1929 bp, Oryza sativa
  CDS (1)..(1929)
atgcgcgcccttcgctcccgcttccttccgctactagcacggcggtggcagtggcagtggcagtggcagtgggagttccagggacgtagagcagcgcggtgcggattgtgcggggaggcgcgggaggaggaggaggaggaggggaagatggagagcaccatgaaggggatccgcggggacaacgcgccgtgcgtgctggacctggacgacgcggcgacggtggggggcggcgtcggggacacctacggcgaggactgcgccaccgaggagcagctcgtcacgccgtggaccgtctccgtcgccagtggttacaatttgctgagggatcctcgctacaacaaggggcttgccttcaacgaaagggagcgcgaaacgcactacctccgtgggcttctgccaccagcaatcgtatcccaggagctccaggaaaggaaaatcatgcataacatccgacaataccagctgcctctgcagaaatacatggctatgatggacctccaggaggggaatgagaggcttttctacaagctcctcattgacaatgttgaggagctacttcctgtcgtttacactccaacagttggtgaggcctgccaaaagtatggatccatatttagccgtcctcagggtctttatatcagcttgaaggagaagggaaagatccttgaggtgctaaaaaactggccagagaggagcattcaggttatcgttgttactgatggtgagcgaattttggggcttggagatcttggctgccagggaatggggatccctgttggtaagcttgccctttacactgctctaggaggagtgcgtccatctgcttgtttgccaatcacattggatgttggtacaaataacgaggcgctgctgaatgatgagttctacattggcttaagacaaaagagggccactgctcaggagtatgctgattttcttcatgaattcatgactgccgtgaaacaaaactatggggagaaagtactcattcagtttgaggattttgcaaaccataatgcatttgaactccttgcaaaatatggaacaactcaccttgtattcaatgatgatattcagggaacagcttccgtggtcctttctgggcttgttgcagcactaaaattagttggtggttcattgtcggagcacagttacctgttcctgggagctggagaggctgggacaggcattgcagaacttatagctctcgagatatcaagacagaccaaagcaccaattgaggagtgccgcaagaaaatatggcttgttgattcaaagggcttgattgtcagttcacgaaaggagacccttcaacacttcaagaaaccatgggcccatgagcatgaacctgttggaaatctcttagatgcagtcaaaactatcaaaccaacagtattgattggcacatctggaaaggggcaaactttcactcaggaggttgttgaagccatttcctcatttaatgagaggcctgtcatttttgccttgtccaacccaacatctcagtctgagtgcaccgctgaacaagcgtacacatggagcaagggccgcgcggtgtttgcaagtggaagtccatttgatccggtggagtatgatggcaaaatatacgtgcctggccaggcaaacaacgcctacatcttcccagggtttggccttggtgtggtgatgtctggtgcaatccgtgttcatgatgacatgcttcttgcagcttcggaagcactggctcagcaggtcacacaagagaatttcgacaagggccttacttatcctcccttctcaaacatcagaaagatctctgcccacattgcagccaacgttgcagcaaaggcatatgaacttggtttggcaagcaggcgccctcggccaaaggacctggttaagtatgcagagagctgcatgtacagcccactttaccgcaactaccggtga

SEQ ID NO: 78101 - protein, 642 aa, Oryza sativa
MRALRSRFLPLLARRWQWQWQWQWEFQGRRAARCGLCGEAREEEEEEGKMESTMKGIRGDNAPCVLDLDDAATVGGGVGDTYGEDCATEEQLVTPWTVSVASGYNLLRDPRYNKGLAFNERERETHYLRGLLPPAIVSQELQERKIMHNIRQYQLPLQKYMAMMDLQEGNERLFYKLLIDNVEELLPVVYTPTVGEACQKYGSIFSRPQGLYISLKEKGKILEVLKNWPERSIQVIVVTDGERILGLGDLGCQGMGIPVGKLALYTALGGVRPSACLPITLDVGTNNEALLNDEFYIGLRQKRATAQEYADFLHEFMTAVKQNYGEKVLIQFEDFANHNAFELLAKYGTTHLVFNDDIQGTASVVLSGLVAALKLVGGSLSEHSYLFLGAGEAGTGIAELIALEISRQTKAPIEECRKKIWLVDSKGLIVSSRKETLQHFKKPWAHEHEPVGNLLDAVKTIKPTVLIGTSGKGQTFTQEVVEAISSFNERPVIFALSNPTSQSECTAEQAYTWSKGRAVFASGSPFDPVEYDGKIYVPGQANNAYIFPGFGLGVVMSGAIRVHDDMLLAASEALAQQVTQENFDKGLTYPPFSNIRKISAHIAANVAAKAYELGLASRRPRPKDLVKYAESCMYSPLYRNYR

SEQ ID NO: 78102 - DNA, 1713 bp, Oryza sativa; identical to SEQ ID NO: 6005
  CDS (1)..(1713)

SEQ ID NO: 78103 - protein, 570 aa, Oryza sativa; identical to SEQ ID NO: 6006

SEQ ID NO: 78104 - DNA, 1869 bp, Oryza sativa
  CDS (1)..(1869)
atggcggcggcgtccatctcgcggagcctcctccgccgatcccgctgcggcggcggggagcaccacctcctcctgctggcgcgcggcttcgtcacggcggagtgccaccgccccgtcgtgctccacaagcgcggctccgacatcctccacgacccatggttcaaccggggcacggggttctcgatgacggagagggaccgcctcggcctccgcggcctgctcccgcccaacgtcgtctcctcccagcagcagatcgaccgattcatgcttgacatgcaacggctgcagaaatatgcgagagatggcccatcggatacttacccgttagcaaaatggcgtatccttaacaggctgcatgacagaaatgaaacaatgtattacaaggtcttaatagataatattgaggaacatgcacctattgtttacacgccgactgttggacttgtttgtcaaaactatagtggtttatttagacggcctcggggaatgtattttagtgcagaagatcgtggggaaatgatgtccatggtgtacaactggccagctgaccaggttgacatgatagtagtgactgatggaagcaggatattgggcctgggtgatctcggggtgcatggtattggtattgccattggaaagttggatctatatgttgctgctgctggaataaatccccagagggttcttccggtcatgattgatgtgggaacaaacaatgagaagctcctcaaggatcctctgtatcttgggttacaagaacatcgtctggagggggaagaatatgtagcgattatcgatgaatttatggaagcggttttcgctcgctggccgaatgttattgtacagtttgaagatttccagagcaagtgggccttcaggttgttgcagcgttacaggaagacttatcggatgtttaatgatgacgttcagggaactgctggcgttgctatagctggtctcttaggagctgtaagagcacaaggaaggccaatgttagatttcccaaagcaaaagattgttgttgcaggggctggcagtgctgggattggtgttgtgaatgctgcaagccggactatggcaaggatgctgggaaacaatgaggttgcttttgagagtgccaggagtcaattctggatagtcgatgcccatggtctaataacagaggagcgcacaaacattgacccagatgcacggccttttgctaggagaaagagtgaactaggtcaccaaggcctaagtgaaggggcgagcttggttgaagtggttaaaaaggtgaagcctgatgtcatacttggattatctgctgttggtggtttgttctcaaaggaggttttagaagcattaaaagactcatcctcttcaagaccagcaattttcgcgatgtcaaatccaactaagaatgctgaatgtacacctgaagaagccttttcaattcttggtgaaaagatcatctttgccagtggaagcccatttagtgatgtggatcttggtaatggaaagattggccactcaaatcaagggaataacatgtatctctttcctggaatagggcttggaacccttctatctggagcacgggttatctcagacggaatgcttcaggctgcagctgaacgcttggcttcgtatatgaaagaagaggaagttctcgaagggatagtataccctccaatctccagaatacgtgatatcaccaaggaggtggcagcagcagttgtgaaggaagctgttgcagaggatctagctgagggatatcgtgacatggatgcacgtgaacttgcaagactcagtgaggaagaaacagttgagtatgtccagcagaacatgtggagtccagtttatccaacaatagtgtacaagaaagactag

SEQ ID NO: 78105 - protein, 622 aa, Oryza sativa
MAAASISRSLLRRSRCGGGEHHLLLLARGFVTAECHRPVVLHKRGSDILHDPWFNRGTGFSMTERDRLGLRGLLPPNVVSSQQQIDRFMLDMQRLQKYARDGPSDTYPLAKWRILNRLHDRNETMYYKVLIDNIEEHAPIVYTPTVGLVCQNYSGLFRRPRGMYFSAEDRGEMMSMVYNWPADQVDMIVVTDGSRILGLGDLGVHGIGIAIGKLDLYVAAAGINPQRVLPVMIDVGTNNEKLLKDPLYLGLQEHRLEGEEYVAIIDEFMEAVFARWPNVIVQFEDFQSKWAFRLLQRYRKTYRMFNDDVQGTAGVAIAGLLGAVRAQGRPMLDFPKQKIVVAGAGSAGIGVVNAASRTMARMLGNNEVAFESARSQFWIVDAHGLITEERTNIDPDARPFARRKSELGHQGLSEGASLVEVVKKVKPDVILGLSAVGGLFSKEVLEALKDSSSSRPAIFAMSNPTKNAECTPEEAFSILGEKIIFASGSPFSDVDLGNGKIGHSNQGNNMYLFPGIGLGTLLSGARVISDGMLQAAAERLASYMKEEEVLEGIVYPPISRIRDITKEVAAAVVKEAVAEDLAEGYRDMDARELARLSEEETVEYVQQNMWSPVYPTIVYKKD

SEQ ID NO: 78106 - DNA, 1863 bp, Oryza sativa; identical to SEQ ID NO: 6007
  CDS (1)..(1863)

SEQ ID NO: 78107 - protein, 620 aa, Oryza sativa; identical to SEQ ID NO: 6008

SEQ ID NO: 78108 - DNA, 1767 bp, Brassica napus; identical to SEQ ID NO: 6009
  CDS (1)..(1767)

SEQ ID NO: 78109 - protein, 588 aa, Brassica napus; identical to SEQ ID NO: 6010

SEQ ID NO: 78110 - DNA, 1767 bp, Brassica napus
  CDS (1)..(1767)
atgggaagtactccggctgaagtaccctgcgaggatgtcgccgataacagatccggcgtcggaggtggtatctccgacgtctacggcgaggatttagccaccttggaccagctcgtcactccttgggttacctccgtcgctagtggatactcgttgatgcgtgacccgagatacaacaaaggacttgcgttcactgataaagagagagatgctcattacttaactggtcttcttccccctgttgttattagccaggaagttcaggagaggaagctgatgcacaatctccgccaatacactgttcctctacagcgttacatggccctcatggatcttcaggaaaggaacgagaggttgttctataagcttttgattgacaacgtggaggagctgcttccagttgtgtacacaccaacagttggtgaggcttgccagaagtatggtagcattttcaggaagccacagggtctctacatcagcttgaatgagaagggcaagattcttgaagtgttgaagaactggcctcagagagggattcaagttattgttgtcactgatggtgagcgcattctcggtctcggagatcttggttgccagggaatgggaattccagtggggaagctttctctttacacagctttgggaggaatccgtccatcagcttgccttccaatcactattgatgtgggtacaaacaaccagaagttgctggatgatgaattctacattggccttaaacagagaagggcaactgggcaggagtatgcagactttctgcatgagttcatgtgcgctgtgaagcagaactacggagagaaagtgttggtgcagtttgaagattttgcaaaccacaatgcgtttgaccttctgtctaagtacatggatactcatcttgtcttcaatgacgatatccagggtactgcatcagtggtgcttgctgggcttattgccgctcagaaagtgcttggtaaaagccttgctgaccataccttcttgttcttgggtgccggagaggctggtactggtattgctgagttaattgctcttaaaatttctaaagagactggagctcccatcgaggagaccaggaagaagatttggcttgtggactccaagggactgatcgttagctcacgcaaagaatcacttcagcacttcaagcagccatgggcgcatgagtacgaacctgtcaaggacctcattggtgctgtgaatgcaatcaaaccaactgttctcattggaacctctggtgtgggtcaaactttcacaaaggaagtagtcgaggccatggctaccaacaacgagaaaccgttgattcttgctctctcaaaccctacttctcaagctgagtgtaccgcagaacaggcttacacatggaccgagggtcgtgcaatctttggtagtggaagcccgtttgatcccgttgagtacaacggcaaaacttacttgcctggccaggcaaacaactgttacattttcccgggtctgggacttggtttgatcatgtccggtgctattcgtgtccgtgatgacatgctcctcgcagcttctgaagcattggcagctcaagtcactgaagagaatttcgccaacggtctgatctacccaccattctcaaacatcagagagatctctgctaacattgcagccagtgtggccgcaacaacctatgacctcggattggcgtcgaacctcccacgtgcgaaggatctggtgaagtttgccgagagctgcatgtacagccctgtctacagaaactaccgttaa

SEQ ID NO: 78111 - protein, 588 aa, Brassica napus
MGSTPAEVPCEDVADNRSGVGGGISDVYGEDLATLDQLVTPWVTSVASGYSLMRDPRYNKGLAFTDKERDAHYLTGLLPPVVISQEVQERKLMHNLRQYTVPLQRYMALMDLQERNERLFYKLLIDNVEELLPVVYTPTVGEACQKYGSIFRKPQGLYISLNEKGKILEVLKNWPQRGIQVIVVTDGERILGLGDLGCQGMGIPVGKLSLYTALGGIRPSACLPITIDVGTNNQKLLDDEFYIGLKQRRATGQEYADFLHEFMCAVKQNYGEKVLVQFEDFANHNAFDLLSKYMDTHLVFNDDIQGTASVVLAGLIAAQKVLGKSLADHTFLFLGAGEAGTGIAELIALKISKETGAPIEETRKKIWLVDSKGLIVSSRKESLQHFKQPWAHEYEPVKDLIGAVNAIKPTVLIGTSGVGQTFTKEVVEAMATNNEKPLILALSNPTSQAECTAEQAYTWTEGRAIFGSGSPFDPVEYNGKTYLPGQANNCYIFPGLGLGLIMSGAIRVRDDMLLAASEALAAQVTEENFANGLIYPPFSNIREISANIAASVAATTYDLGLASNLPRAKDLVKFAESCMYSPVYRNYR

SEQ ID NO: 78112 - DNA, 1911 bp, Zea mays; identical to SEQ ID NO: 6011
  CDS (1)..(1911)

SEQ ID NO: 78113 - protein, 636 aa, Zea mays; identical to SEQ ID NO: 6012

SEQ ID NO: 78114 - DNA, 1770 bp, Glycine max; identical to SEQ ID NO: 6013
  CDS (1)..(1770)

SEQ ID NO: 78115 - protein, 589 aa, Glycine max; identical to SEQ ID NO: 6014

SEQ ID NO: 78116 - DNA, 1902 bp, Glycine max; identical to SEQ ID NO: 6015
  CDS (1)..(1902)

SEQ ID NO: 78117 - protein, 633 aa, Glycine max; identical to SEQ ID NO: 6016

SEQ ID NO: 78118 - DNA, 1959 bp, Zea mays; identical to SEQ ID NO: 6017
  CDS (1)..(1959)

SEQ ID NO: 78119 - protein, 652 aa, Zea mays; identical to SEQ ID NO: 6018

SEQ ID NO: 78120 - DNA, 1989 bp, Zea mays; identical to SEQ ID NO: 6023
  CDS (1)..(1989)

SEQ ID NO: 78121 - protein, 662 aa, Zea mays; identical to SEQ ID NO: 6024

SEQ ID NO: 78122 - DNA, 1947 bp, Zea mays; identical to SEQ ID NO: 6025
  CDS (1)..(1947)

SEQ ID NO: 78123 - protein, 648 aa, Zea mays; identical to SEQ ID NO: 6026

SEQ ID NO: 78124 - DNA, 1782 bp, Zea mays; identical to SEQ ID NO: 6029
  CDS (1)..(1782)

SEQ ID NO: 78125 - protein, 593 aa, Zea mays; identical to SEQ ID NO: 6030

SEQ ID NO: 78126 - DNA, 1860 bp, Zea mays; identical to SEQ ID NO: 6031
  CDS (1)..(1860)

SEQ ID NO: 78127 - protein, 619 aa, Zea mays; identical to SEQ ID NO: 6032

SEQ ID NO: 78128 - DNA, 26 bp, Artificial sequence
  primer
atggatattcaaaaaagagtgagtga

SEQ ID NO: 78129 - DNA, 22 bp, Artificial sequence
  primer
ttagatggaggtacggcggtag

SEQ ID NO: 78130 - protein, 631 aa, Artificial sequence
  consensus sequence
  Variant (2)..(3): Xaa in position 2 to 3 is any amino acid
  Variant (5)..(5): Xaa in position 5 is any amino acid
  Variant (6)..(6): Xaa in position 6 is any or no amino acid
  Variant (10)..(10): Xaa in position 10 is any amino acid
  Variant (13)..(13): Xaa in position 13 is any amino acid
  Variant (14)..(15): Xaa in position 14 to 15 is any or no amino acid
  Variant (18)..(21): Xaa in position 18 to 21 is any amino acid
  Variant (23)..(23): Xaa in position 23 is any amino acid
  Variant (28)..(35): Xaa in position 28 to 35 is any amino acid
  Variant (37)..(49): Xaa in position 37 to 49 is any amino acid
  Variant (50)..(70): Xaa in position 50 to 70 is any or no amino acid
  Variant (72)..(83): Xaa in position 72 to 83 is any amino acid
  Variant (86)..(86): Xaa in position 86 is any amino acid
  Variant (88)..(88): Xaa in position 88 is any amino acid
  Variant (90)..(97): Xaa in position 90 to 97 is any amino acid
  Variant (99)..(100): Xaa in position 99 to 100 is any amino acid
  Variant (102)..(103): Xaa in position 102 to 103 is any amino acid
  Variant (110)..(110): Xaa in position 110 is any amino acid
  Variant (112)..(123): Xaa in position 112 to 123 is any amino acid
  Variant (124)..(124): Xaa in position 124 is any or no amino acid
  Variant (126)..(128): Xaa in position 126 to 128 is any amino acid
  Variant (130)..(149): Xaa in position 130 to 149 is any amino acid
  Variant (150)..(153): Xaa in position 150 to 153 is any or no amino acid
  Variant (161)..(161): Xaa in position 161 is any amino acid
  Variant (162)..(163): Xaa in position 162 to 163 is any or no amino acid
  Variant (167)..(167): Xaa in position 167 is any amino acid
  Variant (170)..(170): Xaa in position 170 is any amino acid
  Variant (172)..(173): Xaa in position 172 to 173 is any amino acid
  Variant (175)..(176): Xaa in position 175 to 176 is any amino acid
  Variant (178)..(179): Xaa in position 178 to 179 is any amino acid
  Variant (183)..(184): Xaa in position 183 to 184 is any amino acid
  Variant (188)..(189): Xaa in position 188 to 189 is any amino acid
  Variant (191)..(192): Xaa in position 191 to 192 is any amino acid
  Variant (194)..(196): Xaa in position 194 to 196 is any amino acid
  Variant (199)..(201): Xaa in position 199 to 201 is any amino acid
  Variant (208)..(209): Xaa in position 208 to 209 is any amino acid
  Variant (212)..(212): Xaa in position 212 is any amino acid
  Variant (213)..(213): Xaa in position 213 is any or no amino acid
  Variant (215)..(216): Xaa in position 215 to 216 is any amino acid
  Variant (218)..(218): Xaa in position 218 is any amino acid
  Variant (220)..(223): Xaa in position 220 to 223 is any amino acid
  Variant (225)..(226): Xaa in position 225 to 226 is any amino acid
  Variant (228)..(229): Xaa in position 228 to 229 is any amino acid
  Variant (231)..(236): Xaa in position 231 to 236 is any amino acid
  Variant (238)..(239): Xaa in position 238 to 239 is any amino acid
  Variant (241)..(251): Xaa in position 241 to 251 is any amino acid
  Variant (252)..(252): Xaa in position 252 is any or no amino acid
  Variant (254)..(255): Xaa in position 254 to 255 is any amino acid
  Variant (259)..(260): Xaa in position 259 to 260 is any amino acid
  Variant (261)..(261): Xaa in position 261 is any or no amino acid
  Variant (264)..(266): Xaa in position 264 to 266 is any amino acid
  Variant (268)..(269): Xaa in position 268 to 269 is any amino acid
  Variant (271)..(276): Xaa in position 271 to 276 is any amino acid
  Variant (277)..(278): Xaa in position 277 to 278 is any or no amino acid
  Variant (287)..(288): Xaa in position 287 to 288 is any amino acid
  Variant (290)..(304): Xaa in position 290 to 304 is any amino acid
  Variant (305)..(307): Xaa in position 305 to 307 is any or no amino acid
  Variant (309)..(316): Xaa in position 309 to 316 is any amino acid
  Variant (320)..(320): Xaa in position 320 is any amino acid
  Variant (323)..(323): Xaa in position 323 is any amino acid
  Variant (327)..(348): Xaa in position 327 to 348 is any amino acid
  Variant (349)..(355): Xaa in position 349 to 355 is any or no amino acid
  Variant (357)..(358): Xaa in position 357 to 358 is any amino acid
  Variant (359)..(376): Xaa in position 359 to 376 is any or no amino acid
  Variant (379)..(401): Xaa in position 379 to 401 is any amino acid
  Variant (402)..(420): Xaa in position 402 to 420 is any or no amino acid
  Variant (422)..(429): Xaa in position 422 to 429 is any amino acid
  Variant (431)..(432): Xaa in position 431 to 432 is any amino acid
  Variant (434)..(434): Xaa in position 434 is any amino acid
  Variant (436)..(436): Xaa in position 436 is any amino acid
  Variant (438)..(440): Xaa in position 438 to 440 is any amino acid
  Variant (441)..(442): Xaa in position 441 to 442 is any or no amino acid
  Variant (444)..(450): Xaa in position 444 to 450 is any amino acid
  Variant (452)..(457): Xaa in position 452 to 457 is any amino acid
  Variant (458)..(458): Xaa in position 458 is any or no amino acid
  Variant (460)..(460): Xaa in position 460 is any amino acid
  Variant (462)..(463): Xaa in position 462 to 463 is any amino acid
  Variant (469)..(471): Xaa in position 469 to 471 is any amino acid
  Variant (473)..(483): Xaa in position 473 to 483 is any amino acid
  Variant (485)..(488): Xaa in position 485 to 488 is any amino acid
  Variant (490)..(490): Xaa in position 490 is any amino acid
  Variant (495)..(496): Xaa in position 495 to 496 is any amino acid
  Variant (498)..(503): Xaa in position 498 to 503 is any amino acid
  Variant (504)..(512): Xaa in position 504 to 512 is any or no amino acid
  Variant (514)..(514): Xaa in position 514 is any amino acid
  Variant (517)..(519): Xaa in position 517 to 519 is any amino acid
  Variant (523)..(523): Xaa in position 523 is any amino acid
  Variant (527)..(538): Xaa in position 527 to 538 is any amino acid
  Variant (539)..(540): Xaa in position 539 to 540 is any or no amino acid
  Variant (542)..(544): Xaa in position 542 to 544 is any amino acid
  Variant (546)..(548): Xaa in position 546 to 548 is any amino acid
  Variant (551)..(561): Xaa in position 551 to 561 is any amino acid
  Variant (562)..(566): Xaa in position 562 to 566 is any or no amino acid
  Variant (568)..(575): Xaa in position 568 to 575 is any amino acid
  Variant (577)..(579): Xaa in position 577 to 579 is any amino acid
  Variant (581)..(582): Xaa in position 581 to 582 is any amino acid
  Variant (584)..(586): Xaa in position 584 to 586 is any amino acid
  Variant (588)..(591): Xaa in position 588 to 591 is any amino acid
  Variant (592)..(593): Xaa in position 592 to 593 is any or no amino acid
  Variant (595)..(606): Xaa in position 595 to 606 is any amino acid
  Variant (607)..(628): Xaa in position 607 to 628 is any or no amino acid
  Variant (630)..(630): Xaa in position 630 is any amino acid
LXXPXXNKGXAFXXXERXXXXLXGLLPXXXXXXXXQXXXXXXXXXXXXXXXXXXXXXXXXXXXXXXXXXXLXXXXXXXXXXXXNEXLXYXXXXXXXXEXXPXXYTPTVGXAXXXXXXXXXXXXXGXXXSXXXXXXXXXXXXXXXXXXXXXXXXIVVTDGEXXXILGXGDXGXXGXXIXXGKLXXYTAXXGXXPXXXLPXXXDVGTNNXXLLXXDXXYXGXXXXRXXGXXYXXXXXXFXXAXXXXXXXXXXXXFXXEDFXXXNAXXXLXXYXXXXXXXXFNDDIQGTXXVXXXXXXXXXXXXXXXXXXLXXXXXXXXGAGXAGXGIAXXXXXXXXXXXXXXXXXXXXXXXXXXXXXDXXXXXXXXXXXXXXXXXXXXGLXXXXXXXXXXXXXXXXXXXXXXXXXXXXXXXXXXXXXXXXXXLXXXXXXXXPXXLXGXSXXXXXFXXXXXXXMXXXXXXXPXIXXLSNPTXXXEXXXXXXXXXXXGXXXXAXGSPFXXVXXXXXXXXXXXXXXXQXNNXXXFPGXGLGXXXXXXXXXXXXXXMXXXAXXXLAXXXXXXXXXXXXXXXXPXXXXXXXXSXXXAXXVXXXAXXXXXXAXXXXXXXXXXXXXXXXXXXXXXXXXXXXXXXXXXPXY

SEQ ID NO: 78131 - protein, 22 aa, Artificial sequence
  protein pattern
  Variant (4)..(4): Xaa in position 4 is Ile or Leu
  Variant (7)..(7): Xaa in position 7 is any amino acid
  Variant (9)..(10): Xaa in position 9 to 10 is any amino acid
  Variant (12)..(12): Xaa in position 12 is Ile, Met or Val
  Variant (13)..(13): Xaa in position 13 is Ala, Asp, Gly, Asn or Gln
  Variant (15)..(15): Xaa in position 15 is any amino acid
  Variant (16)..(16): Xaa in position 16 is Ile, Leu or Val
  Variant (20)..(20): Xaa in position 20 is any amino acid
  Variant (21)..(21): Xaa in position 21 is Ile, Leu, Met or Val
ILGXGDXGXXGXXIXXGKLXXY

SEQ ID NO: 78132 - protein, 17 aa, Artificial sequence
  protein pattern
  Variant (2)..(2): Xaa in position 2 is Ala, Ile, Leu or Val
  Variant (3)..(3): Xaa in position 3 is Ile or Val
  Variant (4)..(4): Xaa in position 4 is Phe, Leu or Met
  Variant (5)..(5): Xaa in position 5 is Ala, Pro or Ser
  Variant (6)..(6): Xaa in position 6 is Leu or Met
  Variant (11)..(13): Xaa in position 11 to 13 is any amino acid
  Variant (15)..(16): Xaa in position 15 to 16 is any or no amino acid
PXXXXXSNPTXXXEXXA

SEQ ID NO: 78133 - protein, 33 aa, Artificial sequence
  protein pattern
  Variant (2)..(3): Xaa in position 2 to 3 is Phe or Tyr
  Variant (4)..(4): Xaa in position 4 is any amino acid
  Variant (5)..(5): Xaa in position 5 is Phe, Ile, Leu or Val
  Variant (6)..(6): Xaa in position 6 is Ile, Leu or Val
  Variant (7)..(9): Xaa in position 7 to 9 is any amino acid
  Variant (10)..(10): Xaa in position 10 is Ile, Leu, Met or Val
  Variant (11)..(14): Xaa in position 11 to 14 is any amino acid
  Variant (15)..(15): Xaa in position 15 is Gly, Pro or Ser
  Variant (16)..(16): Xaa in position 16 is any amino acid
  Variant (17)..(17): Xaa in position 17 is Ile or Val
  Variant (22)..(22): Xaa in position 22 is any amino acid
  Variant (24)..(28): Xaa in position 24 to 28 is any amino acid
  Variant (29)..(32): Xaa in position 29 to 32 is any or no amino acid
LXXXXXXXXXXXXXXXXYTPTXGXXXXXXXXXY

SEQ ID NO: 78134 - protein, 23 aa, Artificial sequence
  protein pattern
  Variant (2)..(2): Xaa in position 2 is Ile or Val
  Variant (3)..(3): Xaa in position 3 is any amino acid
  Variant (5)..(7): Xaa in position 5 to 7 is any amino acid
  Variant (8)..(8): Xaa in position 8 is Ile, Leu or Met
  Variant (9)..(9): Xaa in position 9 is Ala or Pro
  Variant (10)..(10): Xaa in position 10 is Ile or Val
  Variant (11)..(11): Xaa in position 11 is any amino acid
  Variant (12)..(12): Xaa in position 12 is Ile, Leu or Val
  Variant (17)..(17): Xaa in position 17 is any or no amino acid
  Variant (19)..(21): Xaa in position 19 to 21 is any amino acid
  Variant (22)..(22): Xaa in position 22 is any or no amino acid
GXXPXXXXXXXXDVGTXNXXXXL

SEQ ID NO: 78135 - protein, 19 aa, Artificial sequence
  protein pattern
  Variant (9)..(9): Xaa in position 9 is any or no amino acid
  Variant (11)..(13): Xaa in position 11 to 13 is any amino acid
  Variant (14)..(14): Xaa in position 14 is Ala, Gly, Ile, Leu or Val
  Variant (15)..(15): Xaa in position 15 is Ala, Gly, Ser or Thr
  Variant (16)..(18): Xaa in position 16 to 18 is any amino acid
  Variant (19)..(19): Xaa in position 19 is Ala, Cys, Gly, Ser, Thr or Val
FNDDIQGTXAXXXXXXXXX

SEQ ID NO: 78136 - protein, 16 aa, Artificial sequence
  protein pattern
  Variant (2)..(2): Xaa in position 2 is Ala, Cys, Gly or Ser
  Variant (5)..(7): Xaa in position 5 to 7 is any amino acid
  Variant (8)..(8): Xaa in position 8 is Phe or Tyr
  Variant (11)..(11): Xaa in position 11 is Phe, Ile, Leu or Val
  Variant (13)..(13): Xaa in position 13 is Phe, Leu or Met
  Variant (15)..(15): Xaa in position 15 is any amino acid
  Variant (16)..(16): Xaa in position 16 is Ile, Leu or Val
QXNNXXXXPGXGXGXX

SEQ ID NO: 78137 - protein, 23 aa, Artificial sequence
  protein pattern
  Variant (3)..(4): Xaa in position 3 to 4 is any or no amino acid
  Variant (6)..(7): Xaa in position 6 to 7 is any or no amino acid
  Variant (9)..(11): Xaa in position 9 to 11 is any amino acid
  Variant (14)..(17): Xaa in position 14 to 17 is any amino acid
  Variant (18)..(18): Xaa in position 18 is Ile or Leu
  Variant (19)..(19): Xaa in position 19 is any amino acid
  Variant (21)..(22): Xaa in position 21 to 22 is any amino acid
NKXXGXXFXXXERXXXXXXGXXP

SEQ ID NO: 78138 - DNA, 342 bp, Escherichia coli
  CDS (1)..(342): transl_table=11
atgaaaatcactctcagcaaacgaatcggcctgctcgctattctgctgccttgcgcactggcattgagcacaactgttcatgccgaaactaacaaactggtgattgagtctggcgacagtgcacaaagccgccagcacgccgctatggaaaaagagcaatggaatgacacgcgcaatctgcgccagaaagtgaataaacgcactgaaaaagagtgggataaagccgacgccgcttttgataaccgcgataaatgtgagcaaagcgccaacatcaatgcctactgggagcccaatactttgcgctgcctggaccgtcgaactggccgcgttattaccccctaa

SEQ ID NO: 78139 - protein, 113 aa, Escherichia coli
MKITLSKRIGLLAILLPCALALSTTVHAETNKLVIESGDSAQSRQHAAMEKEQWNDTRNLRQKVNKRTEKEWDKADAAFDNRDKCEQSANINAYWEPNTLRCLDRRTGRVITP

SEQ ID NO: 78140 - DNA, 342 bp, Escherichia coli O157:H7 EDL933
  CDS (1)..(342): transl_table=11
atgaaaatcactctcagcaaacgaatcgacctgctcgcttttctgctgccttgcgcactggcattgagcacaactgttcatgccgaaactaacaaactggtgattgagtctggcgacagtgcacaaagccgccagcacgccgctatggaaaaagagcaatggaatgacacgggcaatctgcgccagaaagtgaataaacgcactgaaaaagagtgggataaagccgacgccgcttttgataaccgcgataaatgcgagcaaagcgccaacatcaatgcctactgggagccaaatactttgcgctgcctggaccgtcgaactggccgcgttattaccccctaa

SEQ ID NO: 78141 - protein, 113 aa, Escherichia coli O157:H7 EDL933
MKITLSKRIDLLAFLLPCALALSTTVHAETNKLVIESGDSAQSRQHAAMEKEQWNDTGNLRQKVNKRTEKEWDKADAAFDNRDKCEQSANINAYWEPNTLRCLDRRTGRVITP

SEQ ID NO: 78142 - DNA, 363 bp, Photorhabdus luminescens subsp. laumondii TTO1
  CDS (1)..(363): transl_table=11
atgaatatttgtaattctttgatattaaaagccatgccagctatcgctctggcaataccattgttatggcaaacgccagcattggcggcaacttgtacttctggaagtacctgcgtcacagtgaatggcaacggagattctgtgctcgataaagaagccgctcgtcaaagcaaagaacaatggaatgaaacaaagaatcttcgcactaaagttaataaacgtgccgagaaagagttcgacaagttcgataaagccattgatgctcgtgatacatgtatgaaaagtaccaatatcaatgcttattgggaacccaataccgaacgttgtttagacagcaatacaggtatgcccatcagaccgtaa

SEQ ID NO: 78143 - protein, 120 aa, Photorhabdus luminescens subsp. laumondii TTO1
MNICNSLILKAMPAIALAIPLLWQTPALAATCTSGSTCVTVNGNGDSVLDKEAARQSKEQWNETKNLRTKVNKRAEKEFDKFDKAIDARDTCMKSTNINAYWEPNTERCLDSNTGMPIRP

SEQ ID NO: 78144 - DNA, 351 bp, Erwinia carotovora subsp. atroseptica SCRI1043
  CDS (1)..(351): transl_table=11
atgaaccactactctttttcctctttgattcgggccctcatcccgctttctctggttatcgtttctgctgtctggcagcctgccgcactggcggatacgcgtcacatcattgtcgattcgggcgacagcgcgttgtcgaaagaagcggcgcgtcaaagcaaagagcaatgggattcaacccgctcgctgcgtaataaagttaataaccgcgttgagaaagaattcgataaaactgaaaaatccattgatgggcgtgagaagtgcaacgcgagctataacgtcaatgcttattgggaaaatacgaccgatcgctgcctcgatcgtcgtacaggtcgtccggttgccccataa

SEQ ID NO: 78145 - protein, 116 aa, Erwinia carotovora subsp. atroseptica SCRI1043
MNHYSFSSLIRALIPLSLVIVSAVWQPAALADTRHIIVDSGDSALSKEAARQSKEQWDSTRSLRNKVNNRVEKEFDKTEKSIDGREKCNASYNVNAYWENTTDRCLDRRTGRPVAP

SEQ ID NO: 78146 - DNA, 375 bp, Yersinia pseudotuberculosis
  CDS (1)..(375): transl_table=11
atgatgaaaattaacaacctgcctcgcctgatacgtgcttttttgccagcaaccctgctgatgttgccattagtatggcaaacacctgccttggcacaatctgcaagttgtactcagggcagtacttgtgtttctgtcggtggcaacaatgatcccatgtcaaaagagcaagcgcgccaaagtcagcaacagtgggatgaaacaaatcgcttacgtaacaagatgaataatcgggtcgaaaaggactttgataaaaatgatcgggcagtcgatgcgaaagataattgtgagcgtagcgataatctaaacgcttattgggaacctaatactcagcgttgcctggatcgtttatctggccgtaaaattaatccgtaa

SEQ ID NO: 78147 - protein, 124 aa, Yersinia pseudotuberculosis
MMKINNLPRLIRAFLPATLLMLPLVWQTPALAQSASCTQGSTCVSVGGNNDPMSKEQARQSQQQWDETNRLRNKMNNRVEKDFDKNDRAVDAKDNCERSDNLNAYWEPNTQRCLDRLSGRKINP

SEQ ID NO: 78148 - DNA, 25 bp, Artificial sequence
  primer
atgaaaatcactctcagcaaacgaa

SEQ ID NO: 78149 - DNA, 21 bp, Artificial sequence
  primer
ttagggggtaataacgcggcc

SEQ ID NO: 78150 - protein, 124 aa, Artificial sequence
  consensus sequence
  Variant (2)..(2): Xaa in position 2 is any amino acid
  Variant (4)..(7): Xaa in position 4 to 7 is any amino acid
  Variant (8)..(10): Xaa in position 8 to 10 is any or no amino acid
  Variant (12)..(15): Xaa in position 12 to 15 is any amino acid
  Variant (17)..(17): Xaa in position 17 is any amino acid
  Variant (20)..(22): Xaa in position 20 to 22 is any amino acid
  Variant (24)..(26): Xaa in position 24 to 26 is any amino acid
  Variant (28)..(30): Xaa in position 28 to 30 is any amino acid
  Variant (32)..(40): Xaa in position 32 to 40 is any amino acid
  Variant (41)..(48): Xaa in position 41 to 48 is any or no amino acid
  Variant (52)..(53): Xaa in position 52 to 53 is any amino acid
  Variant (55)..(57): Xaa in position 55 to 57 is any amino acid
  Variant (59)..(61): Xaa in position 59 to 61 is any amino acid
  Variant (66)..(67): Xaa in position 66 to 67 is any amino acid
  Variant (69)..(70): Xaa in position 69 to 70 is any amino acid
  Variant (73)..(73): Xaa in position 73 is any amino acid
  Variant (77)..(77): Xaa in position 77 is any amino acid
  Variant (79)..(79): Xaa in position 79 is any amino acid
  Variant (83)..(83): Xaa in position 83 is any amino acid
  Variant (86)..(86): Xaa in position 86 is any amino acid
  Variant (88)..(88): Xaa in position 88 is any amino acid
  Variant (90)..(90): Xaa in position 90 is any amino acid
  Variant (92)..(92): Xaa in position 92 is any amino acid
  Variant (95)..(95): Xaa in position 95 is any amino acid
  Variant (97)..(98): Xaa in position 97 to 98 is any amino acid
  Variant (100)..(100): Xaa in position 100 is any amino acid
  Variant (102)..(102): Xaa in position 102 is any amino acid
  Variant (111)..(111): Xaa in position 111 is any amino acid
  Variant (117)..(117): Xaa in position 117 is any amino acid
  Variant (121)..(121): Xaa in position 121 is any amino acid
  Variant (123)..(123): Xaa in position 123 is any amino acid
MXIXXXXXXXRXXXXAXLLXXXLXXXTXXXAXXXXXXXXXXXXXXXXXGDSXXSXXXAXXXKEQWXXTXXLRXKVNXRXEKEXDKXDXAXDXRDXCXXSXNXNAYWEPNTXRCLDRXTGRXIXP

SEQ ID NO: 78151 - protein, 58 aa, Artificial sequence
  protein pattern
  Variant (2)..(2): Xaa in position 2 is any amino acid
  Variant (5)..(5): Xaa in position 5 is Asp or Asn
  Variant (6)..(6): Xaa in position 6 is Asp, Glu or Ser
  Variant (8)..(8): Xaa in position 8 is any amino acid
  Variant (9)..(9): Xaa in position 9 is Asn or Ser
  Variant (12)..(12): Xaa in position 12 is Asn, Gln or Thr
  Variant (16)..(16): Xaa in position 16 is any amino acid
  Variant (18)..(18): Xaa in position 18 is Ala, Thr or Val
  Variant (22)..(22): Xaa in position 22 is Phe or Trp
  Variant (25)..(25): Xaa in position 25 is any amino acid
  Variant (26)..(26): Xaa in position 26 is Asp or Glu
  Variant (27)..(27): Xaa in position 27 is any amino acid
  Variant (28)..(28): Xaa in position 28 is Ala or Ser
  Variant (29)..(29): Xaa in position 29 is Phe or Ile
  Variant (31)..(31): Xaa in position 31 is Ala, Gly or Asn
  Variant (33)..(33): Xaa in position 33 is Asp or Glu
  Variant (34)..(34): Xaa in position 34 is any amino acid
  Variant (36)..(37): Xaa in position 36 to 37 is any amino acid
  Variant (39)..(39): Xaa in position 39 is any amino acid
  Variant (41)..(41): Xaa in position 41 is Ile or Val
  Variant (47)..(47): Xaa in position 47 is Asn or Pro
  Variant (48)..(48): Xaa in position 48 is Asn or Thr
  Variant (50)..(50): Xaa in position 50 is any amino acid
  Variant (55)..(55): Xaa in position 55 is Arg or Ser
  Variant (56)..(56): Xaa in position 56 is Asn or Arg
KXQWXXTXXLRXKVNXRXEKEXDKXXXXXDXRXXCXXSXNXNAYWEXXTXRCLDXXTG

SEQ ID NO: 78152 - protein, 11 aa, Artificial sequence
  protein pattern
  Variant (2)..(4): Xaa in position 2 to 4 is any amino acid
  Variant (5)..(5): Xaa in position 5 is Ile or Val
  Variant (6)..(6): Xaa in position 6 is any amino acid
  Variant (7)..(7): Xaa in position 7 is Asp, Glu or Gly
  Variant (8)..(8): Xaa in position 8 is Asn or Ser
TXXXXXXXGDS

SEQ ID NO: 78153 - protein, 17 aa, Artificial sequence
  protein pattern
  Variant (2)..(2): Xaa in position 2 is any amino acid
  Variant (3)..(3): Xaa in position 3 is any or no amino acid
  Variant (5)..(5): Xaa in position 5 is any amino acid
  Variant (6)..(6): Xaa in position 6 is any or no amino acid
  Variant (8)..(8): Xaa in position 8 is Ile, Leu or Pro
  Variant (9)..(9): Xaa in position 9 is Ala or Pro
  Variant (10)..(11): Xaa in position 10 to 11 is any amino acid
  Variant (13)..(14): Xaa in position 13 to 14 is any amino acid
  Variant (15)..(15): Xaa in position 15 is Ala, Pro or Val
  Variant (16)..(16): Xaa in position 16 is any amino acid
  Variant (17)..(17): Xaa in position 17 is Ala or Val
LXXRXXLXXXXLXXXXX

SEQ ID NO: 78154 - DNA, 618 bp, Escherichia coli
  CDS (1)..(618): transl_table=11
atgaccacacaatatggattttttatcgattccagccgctgtactggctgtaaaacctgcgaactggcgtgcaaagattttaaagatcttggcccggaagtcagtttccgccgtatttatgaatacgctggcggcgactggcaggaagataatggcgtctggcaccagaacgtgttcgcttattatctctccatctcctgtaaccattgcgatgaccccgcatgtacaaaagtctgccccagcggcgcaatgcataagcgtgaagatggctttgtggtggttgatgaagatgtttgtatcggctgccgctactgccacatggcttgtccgtacggcgcgccacagtacaatgctgaaaaagggcacatgacgaagtgcgatggttgttattcgcgcgtcgccgaggggaaacaacccatatgtgtcgaatcctgcccgctgcgtgcacttgagttcggtccaattgaagagctgcgccagaagcacggcactcttgctgccgtcgcgccactgccgcgcgcgcatttcacaaaacccaatatcgttatcaaacctaacgccaacagccgcccgaccggcgataccactggttatctggctaatccggaggaagtgtaa

SEQ ID NO: 78155 - protein, 205 aa, Escherichia coli
MTTQYGFFIDSSRCTGCKTCELACKDFKDLGPEVSFRRIYEYAGGDWQEDNGVWHQNVFAYYLSISCNHCDDPACTKVCPSGAMHKREDGFVVVDEDVCIGCRYCHMACPYGAPQYNAEKGHMTKCDGCYSRVAEGKQPICVESCPLRALEFGPIEELRQKHGTLAAVAPLPRAHFTKPNIVIKPNANSRPTGDTTGYLANPEEV

SEQ ID NO: 78156 - DNA, 618 bp, Klebsiella pneumoniae subsp. pneumoniae MGH 78578
  CDS (1)..(618): transl_table=11
atgacaactcagtatggattttttattgattccgcccgttgcaccggttgcaaaacctgcgaactggcctgtaaggactacaagaacctgaccccggaggtcagctttcgccgcatctatgaatatgccggcggcgactggcaggaggacaacggcgtctggcagcagaacgtgtttgcctattacctctccatcgcctgtaaccactgtgaagatccggcctgcaccaaggtctgtccgagcggcgcgatgcataagcgcgaagacggttttgtggtggtcaacgaagaggtatgcattggctgccgctactgccatatggcctgcccgtacggcgccccgcagtataacgccgacaaaggccatatgaccaagtgcgatggctgtcacgagcgcgtcgccgaggggaaaaagccgatctgcgtcgagtcctgcccgctgcgggcgttggatttcgggccgattgccgaactgcgcgctaagcacggccagctggccgcggtagcgccgctgtcgtcggcgcactttacccggccgagtatcgttatcaaacctaacgccaatgcccggccgtgtggcgataccaccggttacctggcgaacccgaaggaggtgtga

SEQ ID NO: 78157 - protein, 205 aa, Klebsiella pneumoniae subsp. pneumoniae MGH 78578
MTTQYGFFIDSARCTGCKTCELACKDYKNLTPEVSFRRIYEYAGGDWQEDNGVWQQNVFAYYLSIACNHCEDPACTKVCPSGAMHKREDGFVVVNEEVCIGCRYCHMACPYGAPQYNADKGHMTKCDGCHERVAEGKKPICVESCPLRALDFGPIAELRAKHGQLAAVAPLSSAHFTRPSIVIKPNANARPCGDTTGYLANPKEV

SEQ ID NO: 78158 - DNA, 618 bp, Klebsiella pneumoniae subsp. pneumoniae MGH 78578
  CDS (1)..(618): transl_table=11
atgagcacgcaatatggattctttatcgactccgctcgctgtaccggatgcaaaacctgcgagctggcctgtaaggactacaagaacctgactccggaggtcagcttccgccggatctatgagtatgccggcggcaactggcaggaggacaacggcgtctggcagcagaacgtgtttgcctattacctctccatcgcctgtaaccactgcgaagatccggcctgcaccaaggtctgtccgagcggcgcgatgcataagcgcgaagacggttttgtggtggtcaacgaagaggtatgcattggctgccgctactgccatatggcctgcccgtacggcgccccgcagtacaacgccgacaaaggccatatgaccaagtgcgatggctgtcacgagcgtgtcgccgaggggaaaaagccgatctgcgtcgagtcctgcccgctgcgggcgttggatttcgggccaattgccgaactgcgcgctaagcacggccagctggccgcggtagcgccgctgccgtcggcgcactttacccggccgagtatcgttatcaaacctaacgccaatgcccggccgtgtggcgataccaccggttacctggcgaacccgaaggaggtgtga

SEQ ID NO: 78159 - protein, 205 aa, Klebsiella pneumoniae subsp. pneumoniae MGH 78578
MSTQYGFFIDSARCTGCKTCELACKDYKNLTPEVSFRRIYEYAGGNWQEDNGVWQQNVFAYYLSIACNHCEDPACTKVCPSGAMHKREDGFVVVNEEVCIGCRYCHMACPYGAPQYNADKGHMTKCDGCHERVAEGKKPICVESCPLRALDFGPIAELRAKHGQLAAVAPLPSAHFTRPSIVIKPNANARPCGDTTGYLANPKEV

SEQ ID NO: 78160 - DNA, 765 bp, Aquifex aeolicus VF5
  CDS (1)..(765): transl_table=11
atgcctcagtacgcgctcgttatagatttgaacacctgtgttggttgtcacgcctgtgcgacgaattgcaaagagtggaacactcaggcggctttcgggcccttatccgattacgacccctacggaagggaagcttcaggagtctggtacaacaggatattcacttacgaaacgggagagttccccgaaacgcaggtctttcaccttccaaaatcatgtctccactgtcaggacgctccctgcgttcccgtttgccctacgggagcaagctacaaaagggaacaggacggaatagttctcgtgaactacgacgactgtataggttgtaagctatgttcctgggcatgtccttacggttgcagggagtttgacgaggcggacaaggtaatgaagaagtgtaccctctgtatagacaggatttacgacgagacacttcctcccgaacacagacagcccgcgtgcgttctcacttgtcccgcgagggcgaggttcttcggagacatagaagacccaaacagcgaggtttacaaactcattaaggaaagaaacggatttgtcctcttccccgatatgggaacgaacccggcaaaccactacctcccgagacaggaaacgaggataaaccttgaagagtttgaaaagcacatactaaagcccgacaacccgctcttcctggaagttatgaggagacaccacacctcttcaaaggctcaagcacaggaaacacctcaagaggaagtaacacattctgaagaattaccataa

SEQ ID NO: 78161 - protein, 254 aa, Aquifex aeolicus VF5
MPQYALVIDLNTCVGCHACATNCKEWNTQAAFGPLSDYDPYGREASGVWYNRIFTYETGEFPETQVFHLPKSCLHCQDAPCVPVCPTGASYKREQDGIVLVNYDDCIGCKLCSWACPYGCREFDEADKVMKKCTLCIDRIYDETLPPEHRQPACVLTCPARARFFGDIEDPNSEVYKLIKERNGFVLFPDMGTNPANHYLPRQETRINLEEFEKHILKPDNPLFLEVMRRHHTSSKAQAQETPQEEVTHSEELP

SEQ ID NO: 78162 - DNA, 621 bp, Pasteurella multocida subsp. multocida str. Pm70
  CDS (1)..(621): transl_table=11
atgagtgttcagtatggcttttattttgactcagatcgttgcaccggctgtaagacttgtgaattagcctgcaaagactataaagacctcgataccaacgtgaattttcgtcgcatttatgaatatgcaggtggtgactggcaacagcaggcaaatggatgttggcaacataatgtttttgcttattatttatcgatttcctgtaatcactgcgacaatcctgcttgtgtgtcagtttgtccaacgggtgcaatgcataaaacagaagatggctttgtcatcgtgaatgaagcaatctgtattggttgtcgttattgtcatatggcttgtccttatgatgcaccacaatatgatgcaatgaaagggcatatgactaaatgcgatggctgccattcacgtatattggaagggaaaaaaccgatttgtgttgatgcgtgtccattacgggctctagattttgcgcccattgatgaactacgcaaaacctatggtgatttagcggcgattgcgccattaccctcgccagaacatactgcgccaaatttggtgattaagaccaataaaaatgcgcgtccaacgggggatacaaccggttttttagcgaatccaagggaggtgtaa

SEQ ID NO: 78163 - protein, 206 aa, Pasteurella multocida subsp. multocida str. Pm70
MSVQYGFYFDSDRCTGCKTCELACKDYKDLDTNVNFRRIYEYAGGDWQQQANGCWQHNVFAYYLSISCNHCDNPACVSVCPTGAMHKTEDGFVIVNEAICIGCRYCHMACPYDAPQYDAMKGHMTKCDGCHSRILEGKKPICVDACPLRALDFAPIDELRKTYGDLAAIAPLPSPEHTAPNLVIKTNKNARPTGDTTGFLANPREV

SEQ ID NO: 78164 - DNA, 618 bp, Escherichia coli O157:H7 EDL933
  CDS (1)..(618): transl_table=11
atgacaacccagtatggattttttattgattccagccgttgcaccggttgcaaaacctgcgagctggcttgtaaagactacaaagatttgatgccagaagtcagcttccgccgcatttatgaatatgctggtggcgactggcaggaagataacggtgtctggcaccagaacgtgtttgcctactatctgtcgatttcgtgcaaccactgcgaagatccggcttgtactaaagtctgcccgagcggtgcgatgcataaacgtgaagatggttttgttgtggtcgatgaagatgtgtgcattggctgccgctactgccatatggcttgcccgtatggcgcaccgcaatataacgaaacgaaaggccatatgaccaaatgcgatggttgttatgaccgtgttgcggagggtaaaaagccgatctgtgttgaatcttgtccgctgcgggcgctggatttcggccctatcgacgagctgcgtaaaaaacatggcgatctggcggccgttgcgccgttgccgcgagctcactttaccaaaccgaatattgtgatcaaacccaatgccaatagccgcccgaccggggataccactggctatctggcaaacccgaaggaggtgtga

SEQ ID NO: 78165 - protein, 205 aa, Escherichia coli O157:H7 EDL933
MTTQYGFFIDSSRCTGCKTCELACKDYKDLMPEVSFRRIYEYAGGDWQEDNGVWHQNVFAYYLSISCNHCEDPACTKVCPSGAMHKREDGFVVVDEDVCIGCRYCHMACPYGAPQYNETKGHMTKCDGCYDRVAEGKKPICVESCPLRALDFGPIDELRKKHGDLAAVAPLPRAHFTKPNIVIKPNANSRPTGDTTGYLANPKEV

SEQ ID NO: 78166 - DNA, 987 bp, Escherichia coli O157:H7 EDL933
  CDS (1)..(987): transl_table=11
  misc_feature (309)..(309): s is g or c
gtgaacagacgtaattttattaaagcagcctcctgcggggcattgctgacgggcgcgctgccgtctgtcagtcatgcggctgctgaaaaccgcccgccaattccgggatcgctggggatgttgtacgactcgaccttgtgcgtaggctgccaggcttgcgtcaccaagtgtcaggatatcaacttccctgaacgtaacccgcaaggggaacagacctggtcgaacaacgacaaactgtcgccgtataccaataacatcattcaagtgtggaccagcggcacaggggtcaacaaagaccaggaggagaasggctacgcgtacattaagaaacagtgtatgcactgcgtcgatccgaactgtgtctctgtgtgcccggtctctgcactgaaaaaagatccgaaaaccggcattgtccattacgacaaagacgtgtgcaccggttgccgttactgcatggtcgcctgtccgtacaacgtgccgaagtacgactacaacaacccgtttggtgcgctgcataagtgcgagctgtgcaaccagaaaggtgtggaacgtctcgataaaggcggtctgcctggctgcgtagaagtgtgcccggcgggcgcggtgatttttggtacgcgtgaagagctgatggcggaggcgaaaaaacgtctggcgctgaagcctggcagcgaataccactatccgcgtcagacgctgaaatctggcgacacttacctgcatacggtgccgaaatattatccgcatctgtacggcgagaaagagggcggcggtactcaggttctggtactgacgggtgtgccttatgaaaatctcgacctgccgaaactggacgatctttctaccggtgcgcgttccgaaaatattcaacacaccctgtataaaggcatgatgctaccactggctgtgctggcgggcttgaccgtgctggttcgtcgcaacaccaaaaacgaccatcacgacggaggagacgatcatgagtcatga

SEQ ID NO: 78167 - protein, 328 aa, Escherichia coli O157:H7 EDL933
  misc_feature (103)..(103): The Xaa at location 103 stands for Asn, or Lys.
MNRRNFIKAASCGALLTGALPSVSHAAAENRPPIPGSLGMLYDSTLCVGCQACVTKCQDINFPERNPQGEQTWSNNDKLSPYTNNIIQVWTSGTGVNKDQEEXGYAYIKKQCMHCVDPNCVSVCPVSALKKDPKTGIVHYDKDVCTGCRYCMVACPYNVPKYDYNNPFGALHKCELCNQKGVERLDKGGLPGCVEVCPAGAVIFGTREELMAEAKKRLALKPGSEYHYPRQTLKSGDTYLHTVPKYYPHLYGEKEGGGTQVLVLTGVPYENLDLPKLDDLSTGARSENIQHTLYKGMMLPLAVLAGLTVLVRRNTKNDHHDGGDDHES

SEQ ID NO: 78168 - DNA, 618 bp, Salmonella enterica subsp. enterica serovar Typhi str. CT18
  CDS (1)..(618): transl_table=11
atgacaacccagtatggattttttattgattccagccgttgcaccggttgcaaaacctgcgaactggcctgcaaggactacaaagatctcactcccgacgtcagcttccgccgcatttatgagtatgcgggcggtgactggcaggaagataacggcgtctggcaccagaacgtctttgcctactatctctccatctcctgtaaccactgcgaagacccggcctgtaccaaagtctgcccgagcggcgcgatgcacaagcgcgatgacggttttgtggtggtgaatgaagaggtctgtatcggctgccgctactgccacatggcctgcccgtacggcgcgccgcagtacaacgcggccaaaggtcatatgaccaagtgcgacggctgttatgaccgggtggcggaaggcaagaaaccgatttgcgtggaatcctgcccgctgcgggcgctggatttcggcccgatagacgaactgcgcaaaaaacacggtgagctggctgccgtcgcgccgttgccgcgcacgcatttcacgaagccgaatattgtgattaaacccaacgccaacagccgcccgaccggggacaccaccggttatctggccaatccgaaggaggtataa

SEQ ID NO: 78169 - protein, 205 aa, Salmonella enterica subsp. enterica serovar Typhi str. CT18
MTTQYGFFIDSSRCTGCKTCELACKDYKDLTPDVSFRRIYEYAGGDWQEDNGVWHQNVFAYYLSISCNHCEDPACTKVCPSGAMHKRDDGFVVVNEEVCIGCRYCHMACPYGAPQYNAAKGHMTKCDGCYDRVAEGKKPICVESCPLRALDFGPIDELRKKHGELAAVAPLPRTHFTKPNIVIKPNANSRPTGDTTGYLANPKEV

SEQ ID NO: 78170 - DNA, 618 bp, Salmonella typhimurium LT2
  CDS (1)..(618): transl_table=11
atgacaacccagtatggattttttattgattccagccgttgcaccggttgcaaaacctgcgaactggcctgcaaggactacaaagatttgaccccggatgtcagcttccgccgcatttatgagtatgcgggcggcgactggcaggaagataacggcgtctggcaccagaacgtctttgcctactatctctccatctcctgtaaccactgcgaagacccggcctgcaccaaagtctgcccgagcggcgcgatgcacaagcgcgatgacggttttgtggtggtgaacgaagaggtctgtatcggttgccgctactgccacatggcctgcccgtacggcgcgccgcagtacaacgcggccaaaggtcatatgaccaagtgcgatggctgttatgaccgggtggcggaaggtaagaaaccgatttgcgtcgaatcctgcccgctgcgggcgctggactttggtcctatcgatgaactgcgcaaaaaacacggtgagctggctgccgtcgcgccgttgccgcgcgcgcatttcacgaagccgaatattgtgattaaacccaacgccaacagccgcccgaccggggacaccaccggttatctggccaatccgaaggaggtataa

SEQ ID NO: 78171 - protein, 205 aa, Salmonella typhimurium LT2
MTTQYGFFIDSSRCTGCKTCELACKDYKDLTPDVSFRRIYEYAGGDWQEDNGVWHQNVFAYYLSISCNHCEDPACTKVCPSGAMHKRDDGFVVVNEEVCIGCRYCHMACPYGAPQYNAAKGHMTKCDGCYDRVAEGKKPICVESCPLRALDFGPIDELRKKHGELAAVAPLPRAHFTKPNIVIKPNANSRPTGDTTGYLANPKEV

SEQ ID NO: 78172 - DNA, 753 bp, Salmonella typhimurium LT2
  CDS (1)..(753): transl_table=11
atgtggacgggagtcaatatggacagcagtaaacggcaatttctccagcagcttggcgtcctgaccgctggcgcctcgctggttccgctggctgaagcgaaatttcctttttcgccggagcggcatgaaggctctccccgacaccgttacgccatgcttatcgatctgcggcgttgtatcggctgtcagtcctgtaccgtaagttgcactattgaaaaccaaacgccgcaaggcgcgtttcgtacgacggtgaaccaataccaggtccagcgtgaaggtagtcaggaagtcacgaatgtgctgttgccgcgtctgtgcaaccattgcgataaccccccctgtgtgccggtctgcccggtacaagccacctttcagcgggaagatggcattgtggtggtggataacaaacgctgcgtcggctgcgcctattgtgtccaggcgtgtccttacgacgcccgatttatcaatcatgaaacgcaaactgccgataaatgcacgttttgcgtccatcgtctggaagccggactgttacccgcttgcgtagagtcctgcgtcggcggcgcgcgtattattggcgatatcaaagatccccatagccgcatcgccaccatgcttcatcagcatcgcgacgctatcaaggtattaaagccggaaaacggcacgtcgccccatgttttctacctgggtctggacgacgcctttgtcaccccattaatgggccgtgcgcagcccgcgctttggcaggaggtctga

SEQ ID NO: 78173 - protein, 250 aa, Salmonella typhimurium LT2
MWTGVNMDSSKRQFLQQLGVLTAGASLVPLAEAKFPFSPERHEGSPRHRYAMLIDLRRCIGCQSCTVSCTIENQTPQGAFRTTVNQYQVQREGSQEVTNVLLPRLCNHCDNPPCVPVCPVQATFQREDGIVVVDNKRCVGCAYCVQACPYDARFINHETQTADKCTFCVHRLEAGLLPACVESCVGGARIIGDIKDPHSRIATMLHQHRDAIKVLKPENGTSPHVFYLGLDDAFVTPLMGRAQPALWQEV

SEQ ID NO: 78174 - DNA, 618 bp, Salmonella typhimurium LT2
  CDS (1)..(618): transl_table=11
atgacaacccagtatggattttttattgattccagtcgttgcaccggttgcaaaacctgcgaactggcctgcaaggactacaaagatctcactcccgacgtcagcttccgccgcatttatgagtatgcgggcggtgactggcaggaagataacggcgtctggcaccagaacgtctttgcctattatctctccatttcatgcaaccactgcgaagacccggcctgtaccaaagtctgcccgagcggcgcgatgcacaagcgcgatgacggttttgtggtggtgaacgaagaggtctgtatcggctgccgctactgccacatggcctgcccgtacggcgcgccgcagtacaacgcggccaaaggtcatatgaccaagtgcgacggctgttatgaccgtgtcgctgacggcaagaaaccgatttgcgtggagtcctgcccgctgcgggcactggactttggcccgatagacgaactgcgtaaaaaacacggtgagctggctgccgtcgcgccgttgccgcgcgcgcatttcacgaagccgaatattgtgattaaacccaacgccaacagccgcccgaccggggacactaccggttatctggccaatccgaaggaggtataa

SEQ ID NO: 78175 - protein, 205 aa, Salmonella typhimurium LT2
MTTQYGFFIDSSRCTGCKTCELACKDYKDLTPDVSFRRIYEYAGGDWQEDNGVWHQNVFAYYLSISCNHCEDPACTKVCPSGAMHKRDDGFVVVNEEVCIGCRYCHMACPYGAPQYNAAKGHMTKCDGCYDRVADGKKPICVESCPLRALDFGPIDELRKKHGELAAVAPLPRAHFTKPNIVIKPNANSRPTGDTTGYLANPKEV

SEQ ID NO: 78176 - DNA, 630 bp, Salmonella typhimurium LT2
  CDS (1)..(630): transl_table=11
atgagtcagtttacacattacccgccggtgagcgataaacaactgggatttttcatcgactcctcacgctgctccggttgtaaagcctgccaggtggcctgcaaagacaaaaacaatctggaagtaggccgtcgtttccgccgcgtctatgaagtcaagggcggaagtttcatcccgaccgggcagggtggggtcagcaataacgtatttgcttatacgctttccatttcctgcaaccactgtgcggaccctgtctgcaccaaaaattgcccgactaccgctatgcataaacgcccgggtgacggcattgtgcgcgttgataccgacaaatgcgtcggctgtggctattgcgcctggtcctgcccttatggcgcgccgcagcttaacgagcagaccggccaaatgtctaagtgcgacatgtgcgttgatttactggcgaaaggtgaaccgcccgtctgtgttgcgacctgtccgctggaggccatcaagtttggtccgattgatgaactgcgcgcgaagtacggtagcgtatgcgacgttaacgggctgccagattcatccataaccaaacctaatctggttgtcaaagcgcatcagggcgcagaaaaagagggtaaacgccatgcatga

SEQ ID NO: 78177 - protein, 209 aa, Salmonella typhimurium LT2
MSQFTHYPPVSDKQLGFFIDSSRCSGCKACQVACKDKNNLEVGRRFRRVYEVKGGSFIPTGQGGVSNNVFAYTLSISCNHCADPVCTKNCPTTAMHKRPGDGIVRVDTDKCVGCGYCAWSCPYGAPQLNEQTGQMSKCDMCVDLLAKGEPPVCVATCPLEAIKFGPIDELRAKYGSVCDVNGLPDSSITKPNLVVKAHQGAEKEGKRHA

SEQ ID NO: 78178 - DNA, 987 bp, Salmonella typhimurium LT2
  CDS (1)..(987): transl_table=11
gtgaacagacgtgactttattaaagcagcctccggtggagcattgctgttgggcgccgcgccgtctgtcagccatgcggctgcagaaaaccgtccgccgattccaggttcgctgggtatgctgtatgactccactctgtgcgtgggctgtcaggcctgcgtcacaaagtgtcaggatatcaacttcccggcgcgtaacccggaaggggagcagacctggtcgaacaacgacaagctgtcgccgtataccaataacattattcaggtatggcgtagcggtacgggcgtgaacaaagatcaggaagagaacggctatgcctacatcaagaaacagtgtatgcactgcgtcgatcctaactgcgtttccgtttgcccggtgtcggcgctgaaaaaagatccgaaaaccggcatcgtccactatgacaaagatgtctgcaccggctgccgttactgtatggttgcctgcccgtacaacgtacctaagtacgactacaacaacccgtttggcgcgcttcacaagtgtgagttgtgtaaccagaaaggcgttgagcgtctggataaaggcggtttgcctgggtgtgtggaagtttgtccggcaggggccgtcattttcggtactcgtgaagagctgatggcggaagcgaaaaaacgtctggccctcaaaccaggcagtgaatatcactatccgcgccagacgttgaaaacggacgacacctatctgcatacggtgcctaaatactacccacacctctacggtgaaaaagagggcggtggtactcaggtgctggtgctgacaggcgttccttatgaagatctggatctgccgaagctggatgacctttcaaccggagcgcgctccgagcatgttcaacacacgctttataaaggcatgatactacccctggctgcgctggcgggcttaaccgtgctggttcgtcgtaatagcaaaaacgaccatcacgatggaggagacgatcatgagtcatga

SEQ ID NO: 78179 - protein, 328 aa, Salmonella typhimurium LT2
MNRRDFIKAASGGALLLGAAPSVSHAAAENRPPIPGSLGMLYDSTLCVGCQACVTKCQDINFPARNPEGEQTWSNNDKLSPYTNNIIQVWRSGTGVNKDQEENGYAYIKKQCMHCVDPNCVSVCPVSALKKDPKTGIVHYDKDVCTGCRYCMVACPYNVPKYDYNNPFGALHKCELCNQKGVERLDKGGLPGCVEVCPAGAVIFGTREELMAEAKKRLALKPGSEYHYPRQTLKTDDTYLHTVPKYYPHLYGEKEGGGTQVLVLTGVPYEDLDLPKLDDLSTGARSEHVQHTLYKGMILPLAALAGLTVLVRRNSKNDHHDGGDDHES

SEQ ID NO: 78180 - DNA, 627 bp, Salmonella typhimurium LT2
  CDS (1)..(627): transl_table=11
atgaaacagtatggcttttatgttgactcctcgcgctgttcaggctgtaaaacctgccaggtaagctgcaaggataataaagatctggatgtcggtccgaaactgcgccgcgtctatgaatatggcggcggaagctgggtgaaagagggggaaagctggcatcacgacacctttacctactacctctctattgcttgtaaccattgcgatgagccggtatgtgtctccggctgtccgaccggggcgatgcataaacgcaaagaagatggtctggtcgtggtggatgacagcgtatgcgtcggctgtcgttattgtgaaatgcgctgcccctacggcgcgccgcagtttgatacgcaggcgaacgtgatgcgtaagtgcgacggttgtcttgaccgactggagaacaatctgcgccctatttgtgtggattcttgcccgcagcgagcgctggatttcggccctgtcgatgaattacgggcaaaatatggcacggagaatcaaatcgcgccgctaccttcggcgtcgttcacccatcctaacctcattattaaaccgcatccgaaagcgagacccacgggcgatacggaaggcgcaatcatgaacattcgggaggtgcgccatgcatga

SEQ ID NO: 78181 - protein, 208 aa, Salmonella typhimurium LT2
MKQYGFYVDSSRCSGCKTCQVSCKDNKDLDVGPKLRRVYEYGGGSWVKEGESWHHDTFTYYLSIACNHCDEPVCVSGCPTGAMHKRKEDGLVVVDDSVCVGCRYCEMRCPYGAPQFDTQANVMRKCDGCLDRLENNLRPICVDSCPQRALDFGPVDELRAKYGTENQIAPLPSASFTHPNLIIKPHPKARPTGDTEGAIMNIREVRHA

SEQ ID NO: 78182 - DNA, 618 bp, Shigella flexneri 2a str. 301
  CDS (1)..(618): transl_table=11
atgaccacacaatatggattttttatcgattccagccgctgtactggctgtaaaacctgcgaactggcgtgcaaagattttaaagatcttggcccggaagtcagtttccgccgtatttatgaatatgctggctgcgactggcaggaagataatggcatctggcaccagaacgtgttcgcttattatctctccatctcctgtaaccattgcgatgaccccgcatgtacaaaagtctgccccagcggcgcaatgcataagcgtgaagatggctttgtggtggttgatgaagatgtttgtatcggctgccgctactgccacatggcttgtccgtacggcgcaccacagtacaatgctgaaaaagggcacatgacgaagtgcgatggttgttattcgcgcgtcgccgaggggaaacaacccatatgcgtcgaatcctgcccgctgcgtgcacttgagttcggtccaattgaagagctgcgccagaagcacggcactctggctgccgtcgcgccactgccgcgcgcgcatttcacaaaacccaatatcgttatcaaacctaacgccaacagccgcccgaccggcgataccactggttatctggctaatccggaggaagtgtaa

SEQ ID NO: 78183 - protein, 205 aa, Shigella flexneri 2a str. 301
MTTQYGFFIDSSRCTGCKTCELACKDFKDLGPEVSFRRIYEYAGCDWQEDNGIWHQNVFAYYLSISCNHCDDPACTKVCPSGAMHKREDGFVVVDEDVCIGCRYCHMACPYGAPQYNAEKGHMTKCDGCYSRVAEGKQPICVESCPLRALEFGPIEELRQKHGTLAAVAPLPRAHFTKPNIVIKPNANSRPTGDTTGYLANPEEV

SEQ ID NO: 78184 - DNA, 675 bp, Shewanella oneidensis MR-1
  CDS (1)..(675): transl_table=11
atgactcaacaaacacaatatggtttctatttcgatagcagcaaatgtactggctgtaaaacttgtcatattgcctgtaaggaccgcatgactggcttggttcgtgcaaaagacgatgtgatgaataatggtgtcgctaatttgcccggtattatttggcgccgtgtttatgaatatggcggcggcaattggtcgcaaaatgtcgatggtagttttgagcaaaatgtctttgcctactacatgtctattggttgtaaccattgcagccagcctgtgtgtgttaaagcctgcccaacaggtgcaatgcataagcgccgcgaagatggcttagtccaagttgccactgaactatgtattggttgtgaaagttgtgcgagggcttgcccatatgatgcaccacagctggatatcgagcgtaaggtgatgaccaagtgtgatggttgcagcgatagacttgctgaaggtaaaaagcctatttgcgttgattcttgtcctttacgggcacttgactttgacactatggataatttacgagcgaaatatggagagggggatggtcatattgctcccttaccatcgccatcgattacttcgccaaacttgattatcaaggccaatcgaaatggtcaaccagttggtggtagtgggcaattattaaaccctgcagaagtgtaa

SEQ ID NO: 78185 - protein, 224 aa, Shewanella oneidensis MR-1
MTQQTQYGFYFDSSKCTGCKTCHIACKDRMTGLVRAKDDVMNNGVANLPGIIWRRVYEYGGGNWSQNVDGSFEQNVFAYYMSIGCNHCSQPVCVKACPTGAMHKRREDGLVQVATELCIGCESCARACPYDAPQLDIERKVMTKCDGCSDRLAEGKKPICVDSCPLRALDFDTMDNLRAKYGEGDGHIAPLPSPSITSPNLIIKANRNGQPVGGSGQLLNPAEV

SEQ ID NO: 78186 - DNA, 618 bp, Shewanella oneidensis MR-1
  CDS (1)..(618): transl_table=11
atgcaagaaccaacccaatacggtttttatgtcgataccactaagtgcagtggttgcaaaacgtgtcaagtggcctgtaaggatcgcagtgatatcgaggtcggtaaacagtggcgcagaacctacgaatattgtggtggaaattggactgctgatgggcagggtgcttaccatcaagatgtatttgcctattatatttcaataagttgcaaccattgtagcaatccggtgtgtgttaaagcttgccctacgggggctatgtataaagagcgcagcactggcttagtgaaagtgaatcaggatctgtgtattggctgcgaaagctgtgctcgtgcttgtccttatgatgcaccacagatcgatccacaacgtaaagtgatgactaagtgtgatggttgcagcgaccgtgttgccaagggcctcaaaccaagttgtgtgatgtcctgcccgcagcgcgccttagattttggtttaattgccgagttaaagcaacagtatggcaacgatagcgatatatcaggtttgccatcatcttctattactcacccaaatttagtgttaaaggtgcatgctaaatcagggcagcgtggggagattattaacatcacagaagtgtaa

SEQ ID NO: 78187 - protein, 205 aa, Shewanella oneidensis MR-1
MQEPTQYGFYVDTTKCSGCKTCQVACKDRSDIEVGKQWRRTYEYCGGNWTADGQGAYHQDVFAYYISISCNHCSNPVCVKACPTGAMYKERSTGLVKVNQDLCIGCESCARACPYDAPQIDPQRKVMTKCDGCSDRVAKGLKPSCVMSCPQRALDFGLIAELKQQYGNDSDISGLPSSSITHPNLVLKVHAKSGQRGEIINITEV

SEQ ID NO: 78188 - DNA, 630 bp, Vibrio parahaemolyticus RIMD 2210633
  CDS (1)..(630): transl_table=11
atgagcacagcgaagcagtatggcttttacattgattcaagcaaatgtactggctgcaaaacatgtcagctctcttgtaaagacaacaaagatctgggtatcgaccgtaacttccgtcgtgtttacgaatatgtaggcggcaactggacagaagaaaacggcgcgttccgtcaaaatgtgtttgcgtactacctatcgatctcttgtaaccactgtactaaccctgcgtgtaccaaggtttgtccatctggtgcaatgcacaagcgtgaagaagacggctttgtcgttgtcgatgaaagcgtgtgtatcggctgtaaatcttgtcacatggcgtgtccttacggcgcacctcaatacagcgaagaaaaaggtcacatgactaagtgtgatggctgttatgaacgtgtcgcagaaggcttaatgccaatctgtgtggacagctgcccattgcgtgcgattgagtttggtccaattgatgagctacgcgcgaaatacggttcaaacgcggatgtggcaccattgccagattctcgcattacgagcccgaacctgatcgtgaagctaaatccaaatggtcgtccaaccaatgaccgcactggtttcctacagaatccaagagaggtgaaataa

SEQ ID NO: 78189 - protein, 209 aa, Vibrio parahaemolyticus RIMD 2210633
MSTAKQYGFYIDSSKCTGCKTCQLSCKDNKDLGIDRNFRRVYEYVGGNWTEENGAFRQNVFAYYLSISCNHCTNPACTKVCPSGAMHKREEDGFVVVDESVCIGCKSCHMACPYGAPQYSEEKGHMTKCDGCYERVAEGLMPICVDSCPLRAIEFGPIDELRAKYGSNADVAPLPDSRITSPNLIVKLNPNGRPTNDRTGFLQNPREVK

SEQ ID NO: 78190 - DNA, 618 bp, Shigella flexneri 2a str. 2457T
  CDS (1)..(618): transl_table=11
atgaccacacaatatggattttttatcgattccagccgctgtactggctgtaaaacctgcgaactggcgtgcaaagattttaaagatcttggcccggaagtcagtttccgccgtatttatgaatatgctggcggcgactggcaggaagataatggcatctggcaccagaacgtgttcgcttattatctctccatctcctgtaaccattgcgatgaccccgcatgtacaaaagtctgccccagcggcgcaatgcataagcgtgaagatggctttgtggtggttgatgaagatgtttgtatcggctgccgctactgccacatggcttgtccgtacggcgcaccacagtacaatgctgaaaaagggcacatgacgaagtgcgatggttgttattcgcgcgtcgccgaggggaaacaacccatatgcgtcgaatcctgcccgctgcgtgcacttgagttcggtccaattgaagagctgcgccagaagcacggcactctggctgccgtcgcgccactgccgcgcgcgcatttcacaaaacccaatatcgttatcaaacctaacgccaacagccgcccgaccggcgataccactggttatctggctaatccggaggaagtgtaa

SEQ ID NO: 78191 - protein, 205 aa, Shigella flexneri 2a str. 2457T
MTTQYGFFIDSSRCTGCKTCELACKDFKDLGPEVSFRRIYEYAGGDWQEDNGIWHQNVFAYYLSISCNHCDDPACTKVCPSGAMHKREDGFVVVDEDVCIGCRYCHMACPYGAPQYNAEKGHMTKCDGCYSRVAEGKQPICVESCPLRALEFGPIEELRQKHGTLAAVAPLPRAHFTKPNIVIKPNANSRPTGDTTGYLANPEEV

SEQ ID NO: 78192 - DNA, 774 bp, Bordetella bronchiseptica RB50
  CDS (1)..(774): transl_table=11
atgcacaacgcgccctcctccgaccggccgcccgcgcccggcaaacgcggttttctcaaggaattgctggggctggccgccacggccaccgtcatccccatcgcccccgaagcgcgcgccggcatgaacgcccagccgccgcgccggcccggcgccgcgggcaagcgctacggcatggtggtcgacctgcgcaaatgcatcggctgccaggcctgcacggtcagctgttcgatggaaaacctgccgcccatcgggcaattccgcaccaccgtgctgcagtacgaggtgctgcccgacgatggcggcccctgttcgatggtgatgctgccgcgcctgtgcaaccactgcgacaacccgccgtgcgtgccggtgtgtccggtgcaggccaccttccagcgcgaggacggcatcgtgctggtggacaacgaacgctgcgtgggctgcggctattgcgtgcaggcctgcccctacgacgcccgcttcatcaaccacgagacccagaccgccgacaagtgcacgttctgcgagcaccgcctggaggcgggcctgctgccggcctgcgtggagagctgcgtgggcggggcgcgcgtcatcggcgacctgaacgaccccgccagcgccgtctcgcgcctgctggccgagcaccgcgacgaggtcaaggtgctcaagcccgacatgcgcaccgatccgcatgtgtattacatcggcctgcccgacgcgttcgtcaaccagatcgatggccaggccggcgtgcgcctggccggccggcactga

SEQ ID NO: 78193 - protein, 257 aa, Bordetella bronchiseptica RB50
MHNAPSSDRPPAPGKRGFLKELLGLAATATVIPIAPEARAGMNAQPPRRPGAAGKRYGMVVDLRKCIGCQACTVSCSMENLPPIGQFRTTVLQYEVLPDDGGPCSMVMLPRLCNHCDNPPCVPVCPVQATFQREDGIVLVDNERCVGCGYCVQACPYDARFINHETQTADKCTFCEHRLEAGLLPACVESCVGGARVIGDLNDPASAVSRLLAEHRDEVKVLKPDMRTDPHVYYIGLPDAFVNQIDGQAGVRLAGRH

SEQ ID NO: 78194 - DNA, 654 bp, Wolinella succinogenes DSM 1740
  CDS (1)..(654): transl_table=11
atggaaaaaaatcaacaatttggattctatctcgaccagacaagatgcgtgggctgtcgaacctgtcaaatggcttgcaaggatggcaaagattctccactgggagtgaattttagacgcgtagtggagttcgagggaggcgcttggctcaccgaaaatccagacacccccacacccgtgggtgtcttcgcctactacacctccatagcgtgcaatcattgcgacgatcccgcctgtatcaaagcctgcccaacgggcgcgatgcacaaagggctatatggaattgtcgaggtgaatcaaagtcgctgtatcggctgtaaagcctgcgcgatggcctgtccttatggagcgccccaatttgactcacgccaaggacacatgagcaagtgcgatggttgcaaaactcgtttggaggagaatctagccccactttgcgtggaatcatgcccctttagagcgcttgaggcaggccctatcacagagcttagagccaagcatggccacgctgcttccatcgccccccttcccccttatgagcgcacccgtcccaatctctgcctcaaaccagagaaaaattcccagccctcaggtgattctagaggcattttccatcttccacaaaaccattcggaggtgaatcatgacattgtctaa

SEQ ID NO: 78195 - protein, 217 aa, Wolinella succinogenes DSM 1740
MEKNQQFGFYLDQTRCVGCRTCQMACKDGKDSPLGVNFRRVVEFEGGAWLTENPDTPTPVGVFAYYTSIACNHCDDPACIKACPTGAMHKGLYGIVEVNQSRCIGCKACAMACPYGAPQFDSRQGHMSKCDGCKTRLEENLAPLCVESCPFRALEAGPITELRAKHGHAASIAPLPPYERTRPNLCLKPEKNSQPSGDSRGIFHLPQNHSEVNHDIV

SEQ ID NO: 78196 - DNA, 588 bp, Thermus thermophilus HB27
  CDS (1)..(588): transl_table=11
atgccccgctacgccatggccattgacctaagcctctgcgtgggctgcgccgcctgcgccgtggcctgcaagatggaaaacgaggtccctcccggggtcttcaacctctggatccgggagcgggaggtgggggaataccccaacctggtggtggagttccgccccgagcagtgcctgcactgcgaaaaccccccttgcgtgcccgtctgccccacgggggccagctaccaaaccaaagacggcctggtgctggtagaccccaaaaagtgcatcgcctgcggggcctgcattgccgcctgcccctacgatgcccgctacctgcacccggcaggttacgtgagcaagtgcaccttctgcgcccaccggctggaaaagggcaaggtgccggcctgcgtggagacctgccccacctactgccgcacctttggcgacctggaggacccggaaagccccgtggccaaggcccttaaggcggcagagcgggtggacgtgctaaggcccgagcagggtacaaggcccaagctcttctacctgaacgccccttccaagaaggggctcacccgggaaagcgaggtgcaccatggctga

SEQ ID NO: 78197 - protein, 195 aa, Thermus thermophilus HB27
MPRYAMAIDLSLCVGCAACAVACKMENEVPPGVFNLWIREREVGEYPNLVVEFRPEQCLHCENPPCVPVCPTGASYQTKDGLVLVDPKKCIACGACIAACPYDARYLHPAGYVSKCTFCAHRLEKGKVPACVETCPTYCRTFGDLEDPESPVAKALKAAERVDVLRPEQGTRPKLFYLNAPSKKGLTRESEVHHG

SEQ ID NO: 78198 - DNA, 642 bp, Propionibacterium acnes KPA171202
  CDS (1)..(642): transl_table=11
atgggagagaagaactatacggcaaaaggagccaagtacggcttcttctttgaccagacactgtgcaccgggtgcaaagcctgccaaatcgcctgcatcgacaaacacgacctgcccacgggggtgcggtggcgccgagtcgtcgagtacagcggaggaacttggcagatctcgggggacactttcaacccctcagtcttcacctactacacgtcagtctcatgcaaccactgcgaggacccgatctgcatgaaagtctgccctaccacggcaatgtcccgccgcgatgacggcaccgtctacgtcgaccaagacaagtgcgtgggatgtcgatactgtgagtgggcgtgcccgtatagcgcaccgcagtaccgcaaggacactggccgaatgagcaaatgcgatctgtgctacgactatcgcagtaagggtaaagagccagcctgtgtagccgcttgcccgtcgcgagctctggattggggacctatcgatgagctgcgcagcacatacggcaatgaggacgccatcgctccactgcctgatccttcggtaaccaaaccgcacctagtgatcactgcgcatcgtgacgcccagaggtgggacgagggcaccggcgagatcgctaataccaaggagatctga

SEQ ID NO: 78199 - protein, 213 aa, Propionibacterium acnes KPA171202
MGEKNYTAKGAKYGFFFDQTLCTGCKACQIACIDKHDLPTGVRWRRVVEYSGGTWQISGDTFNPSVFTYYTSVSCNHCEDPICMKVCPTTAMSRRDDGTVYVDQDKCVGCRYCEWACPYSAPQYRKDTGRMSKCDLCYDYRSKGKEPACVAACPSRALDWGPIDELRSTYGNEDAIAPLPDPSVTKPHLVITAHRDAQRWDEGTGEIANTKEI

SEQ ID NO: 78200 - DNA, 618 bp, Yersinia pseudotuberculosis IP 32953
  CDS (1)..(618): transl_table=11
atgacaacgcaatatggtttttacatcgactccagccgttgtacagggtgtaaaacgtgcgagttggcctgcaaagactttaaaaatctctcaccggatgtcagctttagacgtatttacgaatacgctggcggtgattggcagcaggataacgggacatggcaccagaatgtgttcgcttactacctgtctatcgcctgtaaccactgtagtgaccccgcctgtactaaggtgtgtccgagtggtgctatgcataagcgtaatgatggttttgtggtggttaacgaagatatctgcatcggttgccgctactgccatatggcctgcccttacggtgcgccgcaatatgatgctgaaaaagggcacatgaccaagtgcgacggttgttacgaacgggtggcggtagggaagaaacctatctgtgtcgattcctgtccactgcgtgcattggatatggcccctatcgatgaattacgcgaaaaatacggtgatttagctgaaattgcgcctctgcctgccgctcacttcacgctgccgaatatcgtactaaaacctaatgccaacagccgcccggtcagagataccaccggtcatctggcaaacccgaaggaggtataa

SEQ ID NO: 78201 - protein, 205 aa, Yersinia pseudotuberculosis IP 32953
MTTQYGFYIDSSRCTGCKTCELACKDFKNLSPDVSFRRIYEYAGGDWQQDNGTWHQNVFAYYLSIACNHCSDPACTKVCPSGAMHKRNDGFVVVNEDICIGCRYCHMACPYGAPQYDAEKGHMTKCDGCYERVAVGKKPICVDSCPLRALDMAPIDELREKYGDLAEIAPLPAAHFTLPNIVLKPNANSRPVRDTTGHLANPKEV

SEQ ID NO: 78202 - DNA, 651 bp, Symbiobacterium thermophilum IAM 14863
  CDS (1)..(651): transl_table=11
atgacgacacagctcggctttcacgtggacatggagaagtgcatcggctgcaaggcatgcgaggcggcctgcaaggacttctaccggctgccgcccgagatccgctggcgccgggtgcgctccttcgagacgggcgagtttcccaaggccatccgggtccacctgagcctggcctgcaaccactgcgaggatccggcctgcatgaagggctgcccggtggaagcgtacaccaagcgggctgacggtctggtgatccacgaccccaccgcctgcatcggctgccaatactgcacctggacctgcccgtatagcgtgccccagttcgaccccgagcagggcgtggtctccaagtgcaacggctgctaccaactggtggaccagggccagctgccccgctgcgtccaggcctgcctgaccggtgcgctcagcttcggcgaggtggtggcccacgaggcgcagaagcggcaggcggtgcggcaggcgccgggcttcccggacccgtcggtcacccggccggcaacccggttcgcctggccggagaaagggccgcagcctgatcgtcaggtacgggtcgcgccacctgccggtgacgggacgagcgtcgggggtgcggcggaaaccgtggtggccgcggcgggggaggtgcggtag

SEQ ID NO: 78203 - protein, 216 aa, Symbiobacterium thermophilum IAM 14863
MTTQLGFHVDMEKCIGCKACEAACKDFYRLPPEIRWRRVRSFETGEFPKAIRVHLSLACNHCEDPACMKGCPVEAYTKRADGLVIHDPTACIGCQYCTWTCPYSVPQFDPEQGVVSKCNGCYQLVDQGQLPRCVQACLTGALSFGEVVAHEAQKRQAVRQAPGFPDPSVTRPATRFAWPEKGPQPDRQVRVAPPAGDGTSVGGAAETVVAAAGEVR

SEQ ID NO: 78204 - DNA, 597 bp, Symbiobacterium thermophilum IAM 14863
  CDS (1)..(597): transl_table=11
atgcaatacgggttcttcatcgatgccaagtactgcgccggatgcaagacctgccagatcgcctgtaaggaccgggcgagcctcgaggttggccagctgttccgcaaggtggtgaactacgaggacggcggctgggtgcagcgcggtgaaggctgggtccacaacgtcacctcgtactggttctccatcagctgcaaccactgcgccgatccggcctgcgtgtacgtctgccccaccggggcgatgtacaagcggtccgacaacggcctcgtgctcgtgaaccaggacgactgcgtggggtgccagagctgcgtctgggcctgcccgtacgacgccccccagtacaaccctgaggtgggcagggtgcacaagtgcgacggctgcatcgaccgggtggaggccgggcagcggccggtctgcgtggacgcctgcccgtaccagctgatcgacttcggcgacatcgaggaactgcgggccaagcacggcggcacggcctgggtgcaggggctggccgatccgtcccgtacccgcccgtccctcctggtcaacccgccgaccggggccatcagctcgccgattggagggagccgcaagtga

SEQ ID NO: 78205 - protein, 198 aa, Symbiobacterium thermophilum IAM 14863
MQYGFFIDAKYCAGCKTCQIACKDRASLEVGQLFRKVVNYEDGGWVQRGEGWVHNVTSYWFSISCNHCADPACVYVCPTGAMYKRSDNGLVLVNQDDCVGCQSCVWACPYDAPQYNPEVGRVHKCDGCIDRVEAGQRPVCVDACPYQLIDFGDIEELRAKHGGTAWVQGLADPSRTRPSLLVNPPTGAISSPIGGSRK

SEQ ID NO: 78206 - DNA, 768 bp, Azoarcus sp. EbN1
  CDS (1)..(768): transl_table=11
atgagcgacgcacacgacgaccaacctaacggacgccgcaagttcgtcacggccctggccgcaggcgcgacagcgaccgcggtggctttgacggccagggccaagcccgaggaccggggcgcggccagcgaaggaaaggccatccagtacggcatgctgatcgatgtgcgtcgctgcatcggttgccattcctgcaccgtcgcctgcaagagcgagcacgacgtgccggccggggtgaaccgcagctgggtcgagtacgtggagaagggcgaatatccgaacgtcgcccgcagtttcctgccgcggctgtgcaaccactgctcggtcccgcagtgcgttagcgtgtgcccgacgggcgccacttacaagcgcccggaggatggcgtggtggtcgtcgactccggggtctgcatcggctgcaagtactgcatccaggcctgcccttacgacgcgcgctttctcaatcctcataccggctttgccgacaagtgcgatttctgtatcggccgcgtgaccaacgggctggtaccggcctgcgtcgagacctgcatcggcggcgcgcgcatcttcggcgaagtgagtgaccctgacagcacgatctcccggctgatcgcgaaaaatcccgtcaccgtgttgcggcgggagatgggaaccatgcccaacgtgtattacatcggcgcggaccactccgacgagagcgacgcccgtcgcccggaggtgcgctatgtccgcgtcacgacccaccgcccgcagctcaagaggagatga

SEQ ID NO: 78207 - protein, 255 aa, Azoarcus sp. EbN1
MSDAHDDQPNGRRKFVTALAAGATATAVALTARAKPEDRGAASEGKAIQYGMLIDVRRCIGCHSCTVACKSEHDVPAGVNRSWVEYVEKGEYPNVARSFLPRLCNHCSVPQCVSVCPTGATYKRPEDGVVVVDSGVCIGCKYCIQACPYDARFLNPHTGFADKCDFCIGRVTNGLVPACVETCIGGARIFGEVSDPDSTISRLIAKNPVTVLRREMGTMPNVYYIGADHSDESDARRPEVRYVRVTTHRPQLKRR

SEQ ID NO: 78208 - DNA, 711 bp, Azoarcus sp. EbN1
  CDS (1)..(711): transl_table=11
atgagtgaagaactcagggtctcgccgatcgagaccagggaggtgccgggcaagcgccggttcgcgatggtggtcgacacgcgtcgctgcatcggctgcatggcctgccaggtggcgtgcaaggctgagtacgacaccccgctcggggtcaatcgcacctgggtgccgtacaaggtggtcggcaagtaccccaacgtgaagaagcacttcctgccgcggctgtgcaaccactgcgacgatccgccctgcgtccgcagctgcccggtggaggccaccttcaaggtggacgacggcggcttcgtgctgcaacgctacgagcgctgcatcggctgccgtagctgcatggcggcctgcccctacaacgcgcgcttcatgctgccctcgcaccggacctacacgccgatcaccaaggtggtcgacaaatgcaccttctgcttccatcgcgtcacccagaacctggtgccggcctgcgtgcagacctgcatcgggcgctcgcgcatcttcggcgacctcaacgatcccaacagcgaggtttcgtatctggtggcgacccacgccacccaggtgctgcgccccgaggaaggaaccaagccgcacgtcttctacatcggcgccgatcgcaatgcgaccgagttcccgcgcgacgcctaccgccaacccgaggtgatggagcaggagcgcaccgcgttcaagcgccacttcgacatctga

SEQ ID NO: 78209 - protein, 236 aa, Azoarcus sp. EbN1
MSEELRVSPIETREVPGKRRFAMVVDTRRCIGCMACQVACKAEYDTPLGVNRTWVPYKVVGKYPNVKKHFLPRLCNHCDDPPCVRSCPVEATFKVDDGGFVLQRYERCIGCRSCMAACPYNARFMLPSHRTYTPITKVVDKCTFCFHRVTQNLVPACVQTCIGRSRIFGDLNDPNSEVSYLVATHATQVLRPEEGTKPHVFYIGADRNATEFPRDAYRQPEVMEQERTAFKRHFDI

SEQ ID NO: 78210 - DNA, 618 bp, Haemophilus influenzae 86-028NP
  CDS (1)..(618): transl_table=11
atggaacaatatggtttttattttgattctgaacgctgcacaggctgtaaaacttgtgaattagcctgtaaggattacaaagatcttggcacagaagtcaattttcgtcgtatttatgaatatacaggtggtcagtggaatcaacaagcagatggatgctggcatcaaaatatatttgcttattatatgtctatttcttgtaatcattgtgcagatcctgcttgtacaaaagtttgcccaactggtgcaatgcacaaaaatgcagatggtttcgtgatcgtcaatgaagaaatttgtatcggttgtcgttattgccatatggcatgtccttatgatgcaccgcaatatgatgcacaaaaaggtcatatgacaaaatgtgatggatgttattctcgcgtaaaatcaggtcaaaaaccgatttgtgctgatgcctgcccactacgagcattggatttcgctcctattgatgaacttcgagcaaaatacggcactcaagcctccatcgcaccactaccaccggctgatatcactcaaccaaatttagttgtaaaacccaataaacacgctcgtttaagtggcgatacaagtgggttcttaggaaacccaagagaggtgtaa

SEQ ID NO: 78211 - protein, 205 aa, Haemophilus influenzae 86-028NP
MEQYGFYFDSERCTGCKTCELACKDYKDLGTEVNFRRIYEYTGGQWNQQADGCWHQNIFAYYMSISCNHCADPACTKVCPTGAMHKNADGFVIVNEEICIGCRYCHMACPYDAPQYDAQKGHMTKCDGCYSRVKSGQKPICADACPLRALDFAPIDELRAKYGTQASIAPLPPADITQPNLVVKPNKHARLSGDTSGFLGNPREV

SEQ ID NO: 78212 - DNA, 738 bp, Thiobacillus denitrificans ATCC 25259
  CDS (1)..(738): transl_table=11
atgtccgacaacccttccccctcccgccgcgccttcctgcaggcgatcccggcgatcaccgcgggtctcgcgctgccggcgaccgcacgcgcggcgccccacaaacaccactgggcgatgctggtcgacgtccgcaagtgtatcggctgtcaggcctgcaccgtcgcgtgcatcatggaaaacgcgctaccggaaaacagtttccgcacgctcgcctccacctacgtcgtgcagcaggagaccgagggccggaccacggccggcacctacatgctgccgcgcctgtgcaaccactgcgagaatccgccctgcgtgccggtctgcccggtcggcgcgacgttcaagcgtgacgacggcatcgtcgtcgtcgacggcgaccgctgcgtcggctgcgcctactgcgtccaggcctgcccctacgacgcgcgcttcatcaaccacgaaacgaacaaggccgacaagtgcaccttctgtgcgcaccgggtcgacgcgggcctgctgccggcctgcgtcgaaacctgcgtcggcggcgcccgcgtcttcggcgatctgaacgacgccaagggcgaattgcggcgcagcctcaacgcggcgaagaagaacggcgacgccatcaaggtgctcaagcccgaagccggcacccgccccaatgttttctacgtcggtctcgacgaccggttccagggacgcgtcgagggcgaggcagccctctggcaacccactgcccacggagtctga

SEQ ID NO: 78213 - protein, 245 aa, Thiobacillus denitrificans ATCC 25259
MSDNPSPSRRAFLQAIPAITAGLALPATARAAPHKHHWAMLVDVRKCIGCQACTVACIMENALPENSFRTLASTYVVQQETEGRTTAGTYMLPRLCNHCENPPCVPVCPVGATFKRDDGIVVVDGDRCVGCAYCVQACPYDARFINHETNKADKCTFCAHRVDAGLLPACVETCVGGARVFGDLNDAKGELRRSLNAAKKNGDAIKVLKPEAGTRPNVFYVGLDDRFQGRVEGEAALWQPTAHGV

SEQ ID NO: 78214 - DNA, 642 bp, Carboxydothermus hydrogenoformans Z-2901
  CDS (1)..(642): transl_table=11
gtgagctcagacaagaaatgggcaatggtaattgatttgcaaaaatgtattggctgtgatacctgtacggtggcctgcaaagccgaaaaccgtacgccaccgggaatatcgtacaatgttgtcattgaagaggagaaggggattttccccaatgttactaaaattcatattccaagaccgtgtatgcaatgtgaccgacctgcttgtgttcaagtttgtccggtaaaagcaacctataaaatggaaaacggaattgttgccatcgactatgaccgctgtattggttgccgctattgtgttgtaagctgtccttacggagccaggtcttttgattttggtgaggattacagccgggagatgattggctacaacgaagtgcaggcgccggaatacggtatctaccgcggcaaacgggagaaaggtaaatcgccaatagggaatgttcgcaaatgtatgttttgctaccaccggttacagcgaggagaagaaccggcctgtgttgaggtttgtttgggagatgcccgttattttggcgatcttaacgatccggaaagtgtggtatccaaattagctgcaagccccagggccttcgttcttcaggaagaaatgggaaccaaaccaagggtcatttatctgaaataa

SEQ ID NO: 78215 - protein, 213 aa, Carboxydothermus hydrogenoformans Z-2901
MSSDKKWAMVIDLQKCIGCDTCTVACKAENRTPPGISYNVVIEEEKGIFPNVTKIHIPRPCMQCDRPACVQVCPVKATYKMENGIVAIDYDRCIGCRYCVVSCPYGARSFDFGEDYSREMIGYNEVQAPEYGIYRGKREKGKSPIGNVRKCMFCYHRLQRGEEPACVEVCLGDARYFGDLNDPESVVSKLAASPRAFVLQEEMGTKPRVIYLK

SEQ ID NO: 78216 - DNA, 588 bp, Moorella thermoacetica ATCC 39073
  CDS (1)..(588): transl_table=11
atggccggtcaactaggttttcatgtacagcaggaccgctgcatcggctgctttacctgccagatagcctgtaaggataaaaacgacctggaggtagggcagctattcaggcgtgtccgtgagattgccgggggcggttatacggaaaccggcaataatgcctttagagccgacgtctatgcctactggatctctttgagctgtaaccactgccaggacccgccctgtgttaagaactgtcccaccggggccatgcaaaagcgacccgaggacggtatcgtcttcgtcgaccagaataaatgtatcggctgccgctactgcgtctggagctgcccctacggggcgccccagtataacccccagatcggtaaggtagggaagtgcgacttctgccgcgatctcctggccaaaggggaacaaccggcgtgcgtagccgcctgtcccatgcgggtactggatttcggccccctggacgagctcaaaaagaaatacggcggtaccaaccagattaaaggcctgcctgaccccaacactactaaaccttcaattttaataactccccaccgggatgcagccctggggaaatag

SEQ ID NO: 78217 - protein, 195 aa, Moorella thermoacetica ATCC 39073
MAGQLGFHVQQDRCIGCFTCQIACKDKNDLEVGQLFRRVREIAGGGYTETGNNAFRADVYAYWISLSCNHCQDPPCVKNCPTGAMQKRPEDGIVFVDQNKCIGCRYCVWSCPYGAPQYNPQIGKVGKCDFCRDLLAKGEQPACVAACPMRVLDFGPLDELKKKYGGTNQIKGLPDPNTTKPSILITPHRDAALGK

SEQ ID NO: 78218 - DNA, 573 bp, Desulfitobacterium hafniense Y51
  CDS (1)..(573): transl_table=11
atggcaaaacagtatggattttatatggatcaatccaattgtataggatgctttacctgtcagattgcttgtaaagataaaaatgacttggaagtggggcagtgctggcgcaaagtccacgaattccaagggggcgataccatcctggaaggcggggtgtatcgcagcaatgtcttcgcctactggctgtctatgagctgcaaccactgccaggaacctaaatgtgtgcaaaactgcccggctggagccatgtataaacgggaagaagacggaatcgttctggtggaccaaaataaatgcctgggctgtggctactgcacctggtcctgcccctacggcgctcccaaattggcagggaaaaccgtttccaaatgcaacttctgtatcgatttactggaacaaggcaagaatcccgcctgtgtcgatgcctgcatcatgcgggtcattgagtttgggccaatcgacgaattgcgtgccaaatacggcaatgtggacgaagtcaaagggttgccttcagcccagatcaccaaaccatgtatcgtcatcagccctcataaaaaagcaattgagtag

SEQ ID NO: 78219 - protein, 190 aa, Desulfitobacterium hafniense Y51
MAKQYGFYMDQSNCIGCFTCQIACKDKNDLEVGQCWRKVHEFQGGDTILEGGVYRSNVFAYWLSMSCNHCQEPKCVQNCPAGAMYKREEDGIVLVDQNKCLGCGYCTWSCPYGAPKLAGKTVSKCNFCIDLLEQGKNPACVDACIMRVIEFGPIDELRAKYGNVDEVKGLPSAQITKPCIVISPHKKAIE

SEQ ID NO: 78220 - DNA, 573 bp, Desulfitobacterium hafniense Y51
  CDS (1)..(573): transl_table=11
ttgatgagtgtacagtatggtttttatattaaccaaagcagatgcagcggctgtcatgcctgtcagaccagttgcaatgataaaaatgatctggaaccaggccgtcttttccggcgcatcaaggaaaccgacggcggggaatttaccccttttaatcaaggatacgctcacaatgcctatgctttttttacatccatctcctgcaatcattgtgagcatccgaaatgcacggaagcttgccccagcggtgcaatgcacaaggatccggaaaccggtattgtctctgtgaatcaaaaccgctgtatcggctgccgctattgcacatgggcttgcccctatggcgcaccccaatacaacaaagaagccggccggatgtccaaatgtgacttctgcgcagatttgctcagtcaaggtgagactcccgtatgtgtggccgcctgtccctatgaagctcttgattacggccccattgaagaattgcgggcgaagtacggcacactggccgattctccggatttaccctcatcagatgagacccaccctaatatagtcctcaaacctcataagagataa

SEQ ID NO: 78221 - protein, 190 aa, Desulfitobacterium hafniense Y51
MMSVQYGFYINQSRCSGCHACQTSCNDKNDLEPGRLFRRIKETDGGEFTPFNQGYAHNAYAFFTSISCNHCEHPKCTEACPSGAMHKDPETGIVSVNQNRCIGCRYCTWACPYGAPQYNKEAGRMSKCDFCADLLSQGETPVCVAACPYEALDYGPIEELRAKYGTLADSPDLPSSDETHPNIVLKPHKR

SEQ ID NO: 78222 - DNA, 573 bp, Desulfitobacterium hafniense Y51
  CDS (1)..(573): transl_table=11
atggcaaatcaatacggtttttatgtagatcagcacaattgcattggctgttttacctgtcagattgcctgtaaggataaaaatgatttggcagacggcttgcgctggcgaaaggttcatgaatttaccggcggctcctgcatcgaagaaaacggcgtattcaaaagcaatgtctttgcttactggctctctctgggctgcaatcattgtgaacatcctaaatgtgcggagaattgtcccaccggcgccatgtacaaacgggaggaagatggtatcgtcttggtggatcaggataagtgcataggctgcggttactgtacctggtcctgcccttatgaagtgccccaggttgccggaaagacagcatccaaatgcaacttctgcattgatctgcaaaaggaaggaaaaaatccggcctgtgtcgatgcttgcattatgcgggtattgaaattcggcccccttgatgaactgcgagctgaatatggagaaattgctcaggtcaaagggttgcccagtgccgatatcaccaaaccttccttggttattacgccccataaggctgcaataaagtag

SEQ ID NO: 78223 - protein, 190 aa, Desulfitobacterium hafniense Y51
MANQYGFYVDQHNCIGCFTCQIACKDKNDLADGLRWRKVHEFTGGSCIEENGVFKSNVFAYWLSLGCNHCEHPKCAENCPTGAMYKREEDGIVLVDQDKCIGCGYCTWSCPYEVPQVAGKTASKCNFCIDLQKEGKNPACVDACIMRVLKFGPLDELRAEYGEIAQVKGLPSADITKPSLVITPHKAAIK

SEQ ID NO: 78224 - DNA, 939 bp, Rubrobacter xylanophilus DSM 9941
  CDS (1)..(939): transl_table=11
ttgaccgagaccagggagaacatcatccccggctccggctggtccgacgcctacaacatcgagggcgtcgaccggccggagacccgccccgtcataccgctcgggcagaagagctacggaagcgaggaagagccccgcatgggcttcttcaccgacaccaccgtctgcatcgggtgcaaggcctgcgaggtggcctgcaaggagtggaacgacgtcccggacaccatcggccagctcaccggcgagtcctacgacaacaccagcgcgctgggggccaacacctggcggcacgtggcgtttatcgagcagcgcaagccggtgaaggtgcaggaggccggcctggagggcctcgaggagccctccgggggcgacgaagacggcttccggtggctgatgagctccgacgtgtgcaagcactgcaccgaggccccctgcctggacgtctgcccgacgggggccatcttccgcaccgagttcgggacggtggtggtgcaggaggacgtgtgcaacggctgcggctactgcatcccggcctgccccttcggggtgctcgaccgccggcagggcgacgggcgggtgtggaagtgcaccctctgctacgaccggctcaagggccacatggagcccgcctgcgcccaggcctgcccgacggactcgatccagttcggccccctcgacgagctgcgcgagaaggccaacggccggctggagatggtccacgaggcgggcgtcaccgacgcccgcctctacggggccgacgaggggggctacgggatgggggccttcttcctcctgctcgacgacccggaggtctacgggctcccgcccgacccggaggtggtcacccgcaagacgaagagcctgtggggggcggccgcggcggcggccggggcgctcgccctcggggtggcggcggccttcgcggggggcgcccgatga

SEQ ID NO: 78225 - protein, 312 aa, Rubrobacter xylanophilus DSM 9941
MTETRENIIPGSGWSDAYNIEGVDRPETRPVIPLGQKSYGSEEEPRMGFFTDTTVCIGCKACEVACKEWNDVPDTIGQLTGESYDNTSALGANTWRHVAFIEQRKPVKVQEAGLEGLEEPSGGDEDGFRWLMSSDVCKHCTEAPCLDVCPTGAIFRTEFGTVVVQEDVCNGCGYCIPACPFGVLDRRQGDGRVWKCTLCYDRLKGHMEPACAQACPTDSIQFGPLDELREKANGRLEMVHEAGVTDARLYGADEGGYGMGAFFLLLDDPEVYGLPPDPEVVTRKTKSLWGAAAAAAGALALGVAAAFAGGAR

SEQ ID NO: 78226 - DNA, 738 bp, Haemophilus somnus 129PT
  CDS (1)..(738): transl_table=11
gtgattatgtacataagcaaaagacgttttttgaaaaacttatcagtactaactattgggcaggcttttatccctttttctcaagcgaattttcagccggaaagaaaagagggtaatgaagctcatcgctatgccatgttagttgatttacgccgttgtatcggttgccaatcttgtacggtgagttgttcggtggaaaatcaaacaccgcttggcgagtttcgcactaccgtacgtcaatatgaagtcaccaatgaacagaatattaccaataatgttctacttcctcgattatgcaaccattgtgataaccctccttgtgtgccggtttgccctgtacaagcaacttatcagcgtaaagacggtattgttgtgattgataacaaacgctgtattggttgtgcttattgtgtacaagcttgtccttatgatgctcgttttatcaattcagaaactaaaactgcagataaatgtactttttgtactcatcgtttagaagcaggattattacctgcctgtgtagagagttgtgtgggaggagctcgtattattggggatttacgggatccaaccagtacaatcagtaaaatggtagatgaatttaaggatgatttgaaggttttaaaaccggatcacagtaccattccacatgtattttatctaggtttagatgatgcttttgtgaatgaagttaacggtcaaccaatgttatggcaagataaggagaaagcagaatga

SEQ ID NO: 78227 - protein, 245 aa, Haemophilus somnus 129PT
MIMYISKRRFLKNLSVLTIGQAFIPFSQANFQPERKEGNEAHRYAMLVDLRRCIGCQSCTVSCSVENQTPLGEFRTTVRQYEVTNEQNITNNVLLPRLCNHCDNPPCVPVCPVQATYQRKDGIVVIDNKRCIGCAYCVQACPYDARFINSETKTADKCTFCTHRLEAGLLPACVESCVGGARIIGDLRDPTSTISKMVDEFKDDLKVLKPDHSTIPHVFYLGLDDAFVNEVNGQPMLWQDKEKAE

SEQ ID NO: 78228 - DNA, 660 bp, Shewanella sp. MR-4
  CDS (1)..(660): transl_table=11
atgacacaagaaacacaatatggtttttactttgacagcagcaaatgtactggatgtaaggcgtgccatatcgcctgtaaagaccgcatgacgggacttatccgtgcaaatgatggcaacggtagcgttgccaatcttcctggggtgctgtggcgccgcgtcaccgaatacggtggtggcaactggagccagaatgccgatggaagttttgagcaaaacgtttttgcatattacacatcaataggttgtaaccattgcagcgaacccgtttgcgttaaagcctgcccgacgggtgccatgcataaacgcaaagacaacggcctagtgttagtggagtcatccatctgtattggctgtggcagctgcgcaagagcctgtccctatgacgcgccacaattagatactcagcgtaaagtcatgaccaagtgtgatggttgttatgatcgactcgccgacggcaaaaaaccgatttgcgtcaatgcctgtccattgcgggcactcgattttgacactatggaaaacctaaaagccaaatatggtgaaggtgacgggcacattgcgccgctgccctcgtcatctatcacctctcccaatctgattgtcaaaaagaacccaaatgcacaatcgggtgggcaagtgctgaattggtctgaaatttaa

SEQ ID NO: 78229 - protein, 219 aa, Shewanella sp. MR-4
MTQETQYGFYFDSSKCTGCKACHIACKDRMTGLIRANDGNGSVANLPGVLWRRVTEYGGGNWSQNADGSFEQNVFAYYTSIGCNHCSEPVCVKACPTGAMHKRKDNGLVLVESSICIGCGSCARACPYDAPQLDTQRKVMTKCDGCYDRLADGKKPICVNACPLRALDFDTMENLKAKYGEGDGHIAPLPSSSITSPNLIVKKNPNAQSGGQVLNWSEI

SEQ ID NO: 78230 - DNA, 756 bp, Shewanella sp. ANA-3
  CDS (1)..(756): transl_table=11
atggacaagagtaaacgtcagtttctcggaaaaatggccagtgtgagcgtcggcgccgcgctcattcccgtcgtgcaagtgcaagcccaaccggctcaaactgcaactacgagtaaacgctacggcatggtgattgatctgcgccgctgcgtcggctgtcaggcctgtaccgtggcgtgcaccttcgaaaacctgccacccttggggcaatttcgtaccacagtgcagcaatacgaagtgtcgcaacaggattctgctacgccgcccgcatttttgatgttgccaagactgtgtaatcactgtgaaaacccgccttgcatcccaatttgccccacgggtgccaccttccaacgcccagatggcattgtggtcgtcaacaacgaatggtgcgtcggttgtggctattgtgtacaagcttgcccctacgatgcgcgctttatcaaccatgagaccaacacagccgataaatgcaccttctgcgcacacaggctcgaagctggactcttacccgcctgtgtcgaaacctgtgtcggcgaagcaagggtgattggcgatctaaacgatcctcacagccacataagccagttactcaaggctaatcaagcggatatcaaggtgctcaagcccgatgccaatacagcacctagagtgttttacatcggcatgaacagcgcctttgaagatcgcattaacggccaagcccccgttcgcaccctactgacagactctggcgaggagatccaccatggtcattaa

SEQ ID NO: 78231 - protein, 251 aa, Shewanella sp. ANA-3
MDKSKRQFLGKMASVSVGAALIPVVQVQAQPAQTATTSKRYGMVIDLRRCVGCQACTVACTFENLPPLGQFRTTVQQYEVSQQDSATPPAFLMLPRLCNHCENPPCIPICPTGATFQRPDGIVVVNNEWCVGCGYCVQACPYDARFINHETNTADKCTFCAHRLEAGLLPACVETCVGEARVIGDLNDPHSHISQLLKANQADIKVLKPDANTAPRVFYIGMNSAFEDRINGQAPVRTLLTDSGEEIHHGH

SEQ ID NO: 78232 - DNA, 621 bp, Acidovorax sp. JS42
  CDS (1)..(621): transl_table=11
atggcccgcatgaaatttatctgtgatgcagagcgctgcatcgaatgcaacagctgcgtgacagcgtgcaagaacgagcatgaagtgccctggggtgtgaaccgccgccgcgtggtgaccctgaatgacggcgtgcccggtgaaaagtccatctcggtcgcctgcatgcactgcagcgatgcgccttgcatggcggtgtgccccgtgaactgcttctaccgcaccgaagaaggtgtggtgctgcacgataaggatgtctgcatcggctgtggctattgcagctatgcatgcccgttcggtgcgccgcagttcccctcgcagggcacttttggtgtgcgcggcaagatggacaagtgcaccttctgtgccggtggtcccgaggagcacggcagccaggccgagttcgagaagtacggacgcaaccgcctggccgagggcaagctgcccgcctgtgccgaaatgtgctccaccaaggcgctgctggccggtgacggcgacgtggtcgccgacatcttccgcacccgcgtggtccagcgcggcaagggcgccgaggtctggggctggggcacggcctatggttccaagcaggccggccagccgccggcgggagcaaagtcatga

SEQ ID NO: 78233 - protein, 206 aa, Acidovorax sp. JS42
MARMKFICDAERCIECNSCVTACKNEHEVPWGVNRRRVVTLNDGVPGEKSISVACMHCSDAPCMAVCPVNCFYRTEEGVVLHDKDVCIGCGYCSYACPFGAPQFPSQGTFGVRGKMDKCTFCAGGPEEHGSQAEFEKYGRNRLAEGKLPACAEMCSTKALLAGDGDVVADIFRTRVVQRGKGAEVWGWGTAYGSKQAGQPPAGAKS

SEQ ID NO: 78234 - DNA, 1020 bp, Magnetospirillum magnetotacticum MS-1
  CDS (1)..(1020): transl_table=11
atgaccatcaccagacgcaattttctggcgacggcggcggcgggtggaacagcggcagccgccgcctgcgccaccctcgccccctccggcgcccaggcgcgggaaagccatcaggttcccgagaacgccgtcggcctgctttacgacgccaccttgtgcatcggctgcaaggcctgcatgtcggcgtgcaaggaggccaacagcctgccgctggaagacaatatcggcgagaagctgtgggacacgccgctggagctttccggcaagacctacaacgtcatcaagatctatcagtccggcaccatggaaaataaggacaaggccgagaacggctttgcccatatcaagcgctcctgcctgcactgcgccgatccgtcctgcgtgtcggcctgccccgtctcggccatgcagaagcggcctaccgacggtgtcgtgacctataacaaggacgcctgcatcggctgccgctactgcgtcgccgcctgccccttcggcgttccccagttccagtacgacacacccacgccgcagatcgccaagtgccagctgtgcaagcacaggatggaacagggcaagtatgccgcctgcgcggaaagctgccccaccggcgccaccattttcggctcctacaaggcgctttcggaagagatcgagcggcgccgggccatgaagccgggcgagcccaatctgttcccccgccgcacccccgattcgggcgacacgcacgaaaaggccgcgccggaatatgtggactatgtctacggccagaaggacgcggggggcacccaggtgcgctacctgtccggggtcgccttcgacaagctggccctgcccatgggcctgcccgaacggtcctacgccgcagattccgagacccttcagcacaccctctatggcgggatgatcctgccggtggtggcgctggccggtctggtcaccgctgcctggaagggctcgaaggaccaccacgacgacgatgatttcgacatgttcgatcatccggaaggggggcacaagtaa

SEQ ID NO: 78235 - protein, 339 aa, Magnetospirillum magnetotacticum MS-1
MTITRRNFLATAAAGGTAAAAACATLAPSGAQARESHQVPENAVGLLYDATLCIGCKACMSACKEANSLPLEDNIGEKLWDTPLELSGKTYNVIKIYQSGTMENKDKAENGFAHIKRSCLHCADPSCVSACPVSAMQKRPTDGVVTYNKDACIGCRYCVAACPFGVPQFQYDTPTPQIAKCQLCKHRMEQGKYAACAESCPTGATIFGSYKALSEEIERRRAMKPGEPNLFPRRTPDSGDTHEKAAPEYVDYVYGQKDAGGTQVRYLSGVAFDKLALPMGLPERSYAADSETLQHTLYGGMILPVVALAGLVTAAWKGSKDHHDDDDFDMFDHPEGGHK

SEQ ID NO: 78236 - DNA, 633 bp, Photobacterium sp. SKA34
  CDS (1)..(633): transl_table=11
atgacacctaagaaacaatatggcttttacatcgattccagtaagtgtactggttgtaaaacctgtcagctttcatgtaaagataataaagatctaggtatagaccgtaacttccgccgtatttatgaatatgttggtggtaactggagtgaaaataacggcgtttttcgccaagatgttttctcttactatctttcaatttcatgtaatcactgttctgatcctgcatgtacaaaagtttgcccatccggtgcaatgcataagcgtgaagaagatggtctagttgttgttaacgaagatgtctgcattggttgtaaatactgtcatatggcttgtccatacggtgcaccacaatacagtgaagaaaaaggtcacatgacgaagtgtgacggctgttttgaacgtgttgctgaagggctaatgcctatttgtgttgatagttgtccactgcgtgccatcgaatttggtgagattagtgaactgcgtaaaaaatatggtagtaacgcaaattgtgcaccgttaccagattcaagcattacgcacccgaatttgatcattaagttaaatcctaatggtaaacctgttggtgatactagcggatttttacaaaaccctagagaggttaaatcatga

SEQ ID NO: 78237 - protein, 210 aa, Photobacterium sp. SKA34
MTPKKQYGFYIDSSKCTGCKTCQLSCKDNKDLGIDRNFRRIYEYVGGNWSENNGVFRQDVFSYYLSISCNHCSDPACTKVCPSGAMHKREEDGLVVVNEDVCIGCKYCHMACPYGAPQYSEEKGHMTKCDGCFERVAEGLMPICVDSCPLRAIEFGEISELRKKYGSNANCAPLPDSSITHPNLIIKLNPNGKPVGDTSGFLQNPREVKS

SEQ ID NO: 78238 - DNA, 570 bp, Desulfitobacterium hafniense DCB-2
  CDS (1)..(570): transl_table=11
atgagtgtacagtatggtttttatattaaccaaagcagatgcagcggctgtcatgcctgtcagaccagttgcaatgataaaaatgatctggaaccaggccgtcttttccggcgcatcaaggaaaccgacggcggggaatttaccccttttaatcaaggatacgctcacaatgcctatgctttttttacatccatctcctgcaatcattgtgagcatccgaaatgcacggaagcttgccccagcggtgcaatgcacaaggatccggaaaccggtattgtctctgtgaatcaaaaccgctgtatcggctgccgctattgcacatgggcttgcccctatggcgcaccccaatacaacaaagaagccggccggatgtccaaatgtgacttctgcgcagatttgctcagtcaaggtgagactcccgtatgtgtggccgcctgtccctatgaagctcttgattacggccccattgaagaattgcgggcgaagtacggcacactggccgattctccggatttaccctcatcagatgagacccaccctaatatagtcctcaaacctcataagagataa

SEQ ID NO: 78239 - protein, 189 aa, Desulfitobacterium hafniense DCB-2
MSVQYGFYINQSRCSGCHACQTSCNDKNDLEPGRLFRRIKETDGGEFTPFNQGYAHNAYAFFTSISCNHCEHPKCTEACPSGAMHKDPETGIVSVNQNRCIGCRYCTWACPYGAPQYNKEAGRMSKCDFCADLLSQGETPVCVAACPYEALDYGPIEELRAKYGTLADSPDLPSSDETHPNIVLKPHKR

SEQ ID NO: 78240 - DNA, 987 bp, Escherichia coli B
  CDS (1)..(987): transl_table=11
gtgaacagacgtaattttattaaagcagcctcctgcggggcattgctgacgggcgcgctgccgtctgtcagtcatgcggctgctgaaaaccgcccgccaattccgggatcgctggggatgttgtacgactcgaccttgtgcgtaggctgccaggcttgcgtcaccaagtgtcaggatatcaatttccctgaacgtaacccgcaaggggaacagacctggtcgaacaacgacaaactgtcgccgtataccaataacatcattcaggtgtggaccagcggcacaggggtcaacaaagaccaggaggagaacggctacgcgtacattaagaaacagtgtatgcactgcgtcgatccgaactgtgtctctgtgtgcccggtctctgcactgaaaaaagatccgaaaaccggcattgtccattacgacaaagacgtgtgcaccggttgccgttactgcatggtcgcctgtccgtacaacgtgccgaagtacgactacaacaacccgtttggtgcgctgcataagtgcgagctgtgcaaccagaaaggtgtggaacgtctcgataaaggcggtctgcctggctgcgtagaagtgtgcccggcgggcgcggtgattttcggtacgcgtgaagagctgatggcggaggcgaaaaaacgtctggcgctgaagcctggcagcgaataccactatccgcgtcagacgctgaaatctggcgacacttacctgcatacggtgccgcaatattatccgcatctgtacggcgagaaagagggcggcggtactcaggttctggtactgacgggtgtgccttatgaaaatctcgacctgccgaaactggacgatctttctaccggtgcgcgttccgaaaatattcaacacaccctgtataaaggcatgatgctaccactggctgtgctggcgggcttaaccgtgctggttcgtcgcaacaccaaaaacgaccatcacgacggaggagacgatcatgagtcatga

SEQ ID NO: 78241 - protein, 328 aa, Escherichia coli B
MNRRNFIKAASCGALLTGALPSVSHAAAENRPPIPGSLGMLYDSTLCVGCQACVTKCQDINFPERNPQGEQTWSNNDKLSPYTNNIIQVWTSGTGVNKDQEENGYAYIKKQCMHCVDPNCVSVCPVSALKKDPKTGIVHYDKDVCTGCRYCMVACPYNVPKYDYNNPFGALHKCELCNQKGVERLDKGGLPGCVEVCPAGAVIFGTREELMAEAKKRLALKPGSEYHYPRQTLKSGDTYLHTVPQYYPHLYGEKEGGGTQVLVLTGVPYENLDLPKLDDLSTGARSENIQHTLYKGMMLPLAVLAGLTVLVRRNTKNDHHDGGDDHES

SEQ ID NO: 78242 - DNA, 774 bp, Moritella sp. PE36
  CDS (1)..(774): transl_table=11
atggactcaagtaaacgacgcttaatgacccgcctcggcgcattaaccgctggtgctgcaatcatcccggtgtcggcggctaacccgttcaccaccaccattatcagaaacaatcaagcgccagaccgtaaaggtcataccggtaagcgttatgccatggttgttgatttacgtaagtgtgtgggctgccaagcgtgtactgtcggttgtagcattgagaaccaagcccctattggtcaattccgtaccacggtaaaacaatacgaagtcaccttagatgacggtagcagtgaattacaaaatgtaaaatcatttaccttaccgcgcttatgtaatcactgcgaaaacccaccttgtgtgaaagtatgtccggtacaggccacgtttcaacgtgaagatggcattgtcatggttgataacgagcgttgcgtggcgtgtgcttactgcgttcaggcttgcccttacgatgcccgttttatcaatgaagaaaccctcaccgcggataaatgtactttctgtgcccatcgcttagaagtcggattattacccgcatgcgtagaaacttgcgttggcggggcccgcattattggtgatatcaaagatccaaatagccaaatcagccagctcatgcgtgaccatcaagatgatatcaaggtattaaagccagaagaaaatacccagccacatgtgttctacatcggcatggatgacgcgttcaccagtaaggttgccggcaaagtcgccatctacgatccagcaggagataacgcatga

SEQ ID NO: 78243 - protein, 257 aa, Moritella sp. PE36
MDSSKRRLMTRLGALTAGAAIIPVSAANPFTTTIIRNNQAPDRKGHTGKRYAMVVDLRKCVGCQACTVGCSIENQAPIGQFRTTVKQYEVTLDDGSSELQNVKSFTLPRLCNHCENPPCVKVCPVQATFQREDGIVMVDNERCVACAYCVQACPYDARFINEETLTADKCTFCAHRLEVGLLPACVETCVGGARIIGDIKDPNSQISQLMRDHQDDIKVLKPEENTQPHVFYIGMDDAFTSKVAGKVAIYDPAGDNA

SEQ ID NO: 78244 - DNA, 630 bp, Oryza sativa subsp
  CDS (1)..(630)
atgagtcagtttaaacactacgcgccggtgagcgataaacagctgggtttttatatcgactcctcccgctgttcgggctgcaaggcctgtcaggtggcgtgcaaagataaaaataaccttgaggttggacgtcgtttccgccgcgtttatgaagtcaacggcggaaatttcattccaaccgggcaggggggcgtcagcaataacgtttttgcttacacgctctctatttcttgtaaccactgtgcggacccggtctgcaccaaaaactgcccgactaccgcgatgcacaagcgtccgggcgacggcatcgtgcgcgtcgatacggacaagtgcgttggctgcggctactgcgcatggtcatgtccttacggcgcgccgcagctcaatgagcagaccggacagatgtcgaaatgcgatttttgcgtggatctccaggcaaagggggagcagccagtctgtgtggcgacttgtccgctcgaagcgatcaaattcggacccattgatgaacttcgggagaaatacggcgcggtctgcgatgtgaaaggtttgcctgattcttccatcacacaaccgaacctggtaatcaaagcgcatcagggtgcagagaaagaggggaagcgtcatgcatga

SEQ ID NO: 78245 - protein, 209 aa, Oryza sativa subsp
MSQFKHYAPVSDKQLGFYIDSSRCSGCKACQVACKDKNNLEVGRRFRRVYEVNGGNFIPTGQGGVSNNVFAYTLSISCNHCADPVCTKNCPTTAMHKRPGDGIVRVDTDKCVGCGYCAWSCPYGAPQLNEQTGQMSKCDFCVDLQAKGEQPVCVATCPLEAIKFGPIDELREKYGAVCDVKGLPDSSITQPNLVIKAHQGAEKEGKRHA

SEQ ID NO: 78246 - DNA, 660 bp, Campylobacter jejuni
  CDS (1)..(660): transl_table=11
atgaaattagaagaaaattcacaatttggttttatgctagatcaaagcaaatgcgtaggctgtaggacttgctcactttcttgcaaggattataaaaacatgcctgtgggaattaattttcgccgtgtgtttgagactgaagggggaaattggacagctaaagaagatgggagttttgagcaaagtgtttttgcttactacacttctatttcttgcaatcattgttctaatccatcttgtcttaaagcttgtccaactggcgcaacaatgaaaataaaatggggaatagtagcaatcgatgatagtatgtgtataggctgcaaagcttgtgctatggcatgtccttatggcgcacctcaatttaaccatgaaagtggtcatatgagcaaatgcgatgatgggtgttatgagagattaaaagaaggtaaaaatccaatttgcgtggactcttgtccttttagagcattaaaagcaggagatataacaaaactgagagaagaacatggaaatttagcctctatcacacctttacctgatgcttctatcacgcatccaaatttatgtatagtgcctgaaaaacatagtttaccttcaggtaataaaagtacgatttttcatctacctcaaaactaccaaggagttaaaaatgacatcatttaa

SEQ ID NO: 78247 - protein, 219 aa, Campylobacter jejuni
MKLEENSQFGFMLDQSKCVGCRTCSLSCKDYKNMPVGINFRRVFETEGGNWTAKEDGSFEQSVFAYYTSISCNHCSNPSCLKACPTGATMKIKWGIVAIDDSMCIGCKACAMACPYGAPQFNHESGHMSKCDDGCYERLKEGKNPICVDSCPFRALKAGDITKLREEHGNLASITPLPDASITHPNLCIVPEKHSLPSGNKSTIFHLPQNYQGVKNDII

SEQ ID NO: 78248 - DNA, 978 bp, Rhodovulum sulfidophilum
  CDS (1)..(978): transl_table=11
atggtaaaacgtcaaatcagcatggtcctcgacctcaacaagtgcatcggctgccagacctgcacttcggcctgcaagctgcaatggaccaaccgaaacggccgcgaatacatgtactggaacaatgtcgagacccatccggggcccggctatccgcgcaactacgaacattcgggcggcggcttcgacgaggagggcgcgctgaagatcggcatcacgccctcggccgaggattacggcatcccctgggaatacaattacgaagaggcgctgatgaccgggaccgatccctggctgcgtcccaacgtcaagcccacctggggcgccaactggaacgaggacgagggccggggcgaataccccaattcctactatttctacctgccccggatctgcaaccactgcgccaatccgggctgtctggcggcctgcgcgcgcaacgccatctacaagcggcaggaggacggcatcgtcctggtcgaccaggagcgctgccgcggctatcgctactgcatcaccgcctgcccctacaagaaggtctatttcaacgagcagatctcgaaggcggagaaatgcatcttctgctatccgcggatcgaaaagggcctgcccaccgcctgtgccaagcaatgcgtcggccgtatccgtttcatcggctatctcgacgacgaggcggggcccgtgcacctgctggtcgagcgctacaaggtggcgatcccgctgcatcccgaatggggcaccaaacccagtgtcttctacgtaccgccgctggcaccgccccggatcggcgatgacggcgaaccgaccgaggagacgcgggtgcctctcgcctatctcaaggagctgttcggcgaggcggtcgtgcccgcgcttgagacgctgaagaccgagcgcgccaagaagcagtcgggtgccgaaagcgagctgatggacacgctcatcggctatcgccaccccgaaatgttcaagctgagctga

SEQ ID NO: 78249 - protein, 325 aa, Rhodovulum sulfidophilum
MVKRQISMVLDLNKCIGCQTCTSACKLQWTNRNGREYMYWNNVETHPGPGYPRNYEHSGGGFDEEGALKIGITPSAEDYGIPWEYNYEEALMTGTDPWLRPNVKPTWGANWNEDEGRGEYPNSYYFYLPRICNHCANPGCLAACARNAIYKRQEDGIVLVDQERCRGYRYCITACPYKKVYFNEQISKAEKCIFCYPRIEKGLPTACAKQCVGRIRFIGYLDDEAGPVHLLVERYKVAIPLHPEWGTKPSVFYVPPLAPPRIGDDGEPTEETRVPLAYLKELFGEAVVPALETLKTERAKKQSGAESELMDTLIGYRHPEMFKLS

SEQ ID NO: 78250 - DNA, 618 bp, Haemophilus influenzae
  CDS (1)..(618): transl_table=11
atggaacaatatggtttttattttgattctgaacgttgcacaggctgtaaaacttgtgaattagcctgtaaggattacaaagatcttggcacagaagtcaattttcgtcgtatttatgaatatacaggtggtcagtggaatcaacaagcagatggatgctggcatcaaaatatatttgcctattatatgtctatttcttgtaatcattgtgcagatcctgcttgtacaaaagtttgcccaactggtgcaatgcacaaaaatgcagatggtttcgtgatcgtcaatgaagaaatttgtatcggttgtcgttattgtcatatggcgtgtccttatgatgcaccgcaatatgatgcacaaaaaggtcatatgacaaaatgtgatggatgttattctcgcgtaaaatcaggtcaaaaaccgatttgtgttgatgcctgcccactacgagcattggatttcgctcctattgatgaacttcgaacaaaatatggcacacaagcctccatcgcaccactaccaccgactgatatcactcaaccaaatttagtggtaaaacccaataaatacgctcgtttaagtggcgatacaagtgggttcttaggaaacccaagagaggtgtaa

SEQ ID NO: 78251 - protein, 205 aa, Haemophilus influenzae
MEQYGFYFDSERCTGCKTCELACKDYKDLGTEVNFRRIYEYTGGQWNQQADGCWHQNIFAYYMSISCNHCADPACTKVCPTGAMHKNADGFVIVNEEICIGCRYCHMACPYDAPQYDAQKGHMTKCDGCYSRVKSGQKPICVDACPLRALDFAPIDELRTKYGTQASIAPLPPTDITQPNLVVKPNKYARLSGDTSGFLGNPREV

SEQ ID NO: 78252 - DNA, 618 bp, Shigella flexneri
  CDS (1)..(618): transl_table=11
atgacaacccagtatggattttttattgattccagccgttgcgccggttgcaaaacctgcgagctggcttgtaaagactacaaagatttgacgccagaagtcagtttccgccgcatttatgaatatgctggcggcgactggcaggaagataacggtgtctggcaccagaacgtgtttgcctactatctgtcgatttcgtgcaaccactgcgaagatccggcttgtactaaagtctgcccgagcggtgcgatgcataaacgcgaagatggttttgttgtggtcgatgaagatgtatgcattggctgccgttactgtcatatggcttgcccgtatggcgcaccgcaatataacgaaacgaaaggccatatgaccaaatgcgatggttgttatgaccgtgttgcggagggtaaaaagccgatctgtgttgaatcttgcccgctgcgggcgctggatttcggccctatcgacgagctgcgtaaaaaacatggcgatctggcggccgttgcgccgttgccgcgagctcactttaccaaaccgaatattgtgatcaaacccaatgccaatagccgcccgaccggggataccactggctatctggcaaacccgaaggaggtgtga

SEQ ID NO: 78253 - protein, 205 aa, Shigella flexneri
MTTQYGFFIDSSRCAGCKTCELACKDYKDLTPEVSFRRIYEYAGGDWQEDNGVWHQNVFAYYLSISCNHCEDPACTKVCPSGAMHKREDGFVVVDEDVCIGCRYCHMACPYGAPQYNETKGHMTKCDGCYDRVAEGKKPICVESCPLRALDFGPIDELRKKHGDLAAVAPLPRAHFTKPNIVIKPNANSRPTGDTTGYLANPKEV

SEQ ID NO: 78254 - DNA, 672 bp, Escherichia coli O157
  CDS (1)..(672): transl_table=11
atgacctggtctcgtcgccagtttctcaccggcgtcggcgtgctggcagccgtcagcggcaccgcagggcgcgtggtggcgaaaacgttgaatatcaatggggtgcgttacggcatggtgcatgacgagtcgttatgcatcggctgtaccgcctgtatggatgcttgtcgggaagtgaacaaggtgccggaaggcgtctcgcgcctgacgattattcgtagcgagccgcagggcgaatttcctgatgtgaaatatcgcttcttccgtaagtcttgccagcactgcgatcatgcgccgtgcgttgacgtctgcccgaccggtgcatcttttcgcgatgctgccagtgggattgtcgatgttaatccggatctctgcgtcggttgtcagtactgcatcgccgcctgtccgtaccgcgtgcgctttattcatccggtcacgaagacagcggacaaatgcgatttctgccgtaagaccaatttgcaggccggtaagcttcccgcgtgcgttgaggcttgcccgacgaaggcgctgacgtttggcaatctggacgatcccaacagtgagatttcgcaactgctgcgccagaagcccacttaccgctacaagctggcgctgggaaccaaaccgaagctgtaccgcgtaccgtttaaatacggggaggtgagccaatga

SEQ ID NO: 78255 - protein, 223 aa, Escherichia coli O157
MTWSRRQFLTGVGVLAAVSGTAGRVVAKTLNINGVRYGMVHDESLCIGCTACMDACREVNKVPEGVSRLTIIRSEPQGEFPDVKYRFFRKSCQHCDHAPCVDVCPTGASFRDAASGIVDVNPDLCVGCQYCIAACPYRVRFIHPVTKTADKCDFCRKTNLQAGKLPACVEACPTKALTFGNLDDPNSEISQLLRQKPTYRYKLALGTKPKLYRVPFKYGEVSQ

SEQ ID NO: 78256 - DNA, 576 bp, Wolinella succinogenes
  CDS (1)..(576): transl_table=11
atggcaaaaaaatatggaatgatccacgatgagaatctatgcatcggttgccaagcgtgcaatatcgcctgtcgatctgaaaacaagattcctgatagtgtttaccgattgcaagtctgggtgcagggccccaagaagctacctgatggaacactcagcttcaactatcaccgacaatcttgcgttcagtgtgaaaacaccccctgcgtgagtgtctgccccaccaaggcctcttacgtgaatgaagatgggattgtgagcgtcaatgtcgatctttgcgttggatgcctctattgcatcgcggcgtgtccctatcaggcgcgatatgtggatcctgtgaccaaggctcccgataagtgcaacttctgtaaagatacgcgtctagcgcgtggcgaagagcctgcgtgtgtgaccgtctgccctacagatgcgcttacttttggtgatatgagtgatcccaaaagcaaaatcaataaagtgttggcgtccaagccgacccttcgccccaaagaatccttgggaactaaacccaagctctttatcgtgcctaacaagagaggaggaatcgagtcatga

SEQ ID NO: 78257 - protein, 191 aa, Wolinella succinogenes
MAKKYGMIHDENLCIGCQACNIACRSENKIPDSVYRLQVWVQGPKKLPDGTLSFNYHRQSCVQCENTPCVSVCPTKASYVNEDGIVSVNVDLCVGCLYCIAACPYQARYVDPVTKAPDKCNFCKDTRLARGEEPACVTVCPTDALTFGDMSDPKSKINKVLASKPTLRPKESLGTKPKLFIVPNKRGGIES

SEQ ID NO: 78258 - DNA, 23 bp, Artificial sequence
  primer
atgaccacacaatatggattttt

SEQ ID NO: 78259 - DNA, 23 bp, Artificial sequence
  primer
ttacacttcctccggattagcca

SEQ ID NO: 78260 - protein, 301 aa, Artificial sequence
  consensus sequence
  Variant (2)..(4): Xaa in position 2 to 4 is any amino acid
  Variant (6)..(8): Xaa in position 6 to 8 is any amino acid
  Variant (10)..(10): Xaa in position 10 is any amino acid
  Variant (13)..(14): Xaa in position 13 to 14 is any amino acid
  Variant (16)..(18): Xaa in position 16 to 18 is any amino acid
  Variant (20)..(50): Xaa in position 20 to 50 is any amino acid
  Variant (51)..(125): Xaa in position 51 to 125 is any or no amino acid
  Variant (127)..(127): Xaa in position 127 is any amino acid
  Variant (130)..(131): Xaa in position 130 to 131 is any amino acid
  Variant (133)..(133): Xaa in position 133 is any amino acid
  Variant (135)..(137): Xaa in position 135 to 137 is any amino acid
  Variant (140)..(141): Xaa in position 140 to 141 is any amino acid
  Variant (143)..(148): Xaa in position 143 to 148 is any amino acid
  Variant (149)..(149): Xaa in position 149 is any or no amino acid
  Variant (151)..(151): Xaa in position 151 is any amino acid
  Variant (153)..(153): Xaa in position 153 is any amino acid
  Variant (155)..(158): Xaa in position 155 to 158 is any amino acid
  Variant (160)..(160): Xaa in position 160 is any amino acid
  Variant (163)..(163): Xaa in position 163 is any amino acid
  Variant (166)..(167): Xaa in position 166 to 167 is any amino acid
  Variant (172)..(172): Xaa in position 172 is any amino acid
  Variant (174)..(182): Xaa in position 174 to 182 is any amino acid
  Variant (183)..(215): Xaa in position 183 to 215 is any or no amino acid
  Variant (218)..(226): Xaa in position 218 to 226 is any amino acid
  Variant (227)..(243): Xaa in position 227 to 243 is any or no amino acid
  Variant (245)..(246): Xaa in position 245 to 246 is any amino acid
  Variant (248)..(248): Xaa in position 248 is any amino acid
  Variant (249)..(254): Xaa in position 249 to 254 is any or no amino acid
  Variant (257)..(258): Xaa in position 257 to 258 is any amino acid
  Variant (260)..(262): Xaa in position 260 to 262 is any amino acid
  Variant (264)..(266): Xaa in position 264 to 266 is any amino acid
  Variant (268)..(284): Xaa in position 268 to 284 is any amino acid
  Variant (285)..(292): Xaa in position 285 to 292 is any or no amino acid
  Variant (294)..(298): Xaa in position 294 to 298 is any amino acid
  Variant (300)..(300): Xaa in position 300 is any amino acid
GXXXDXXXCXGCXXCXXXCXXXXXXXXXXXXXXXXXXXXXXXXXXXXXXXXXXXXXXXXXXXXXXXXXXXXXXXXXXXXXXXXXXXXXXXXXXXXXXXXXXXXXXXXXXXXXXXXXXXXXXXXXXCXHCXXPXCXXXCPXXAXXXXXXXGXVXVXXXXCXGCXYCXXACPYXAXXXXXXXXXXXXXXXXXXXXXXXXXXXXXXXXXXXXXXXXXXKCXXXXXXXXXXXXXXXXXXXXXXXXXXGXXPXXXXXXXCVXXCXXXAXXXGXXXXXXXXXXXXXXXXXXXXXXXXXLXXXXXTXP

SEQ ID NO: 78261 - protein, 25 aa, Artificial sequence
  protein pattern
  Variant (2)..(2): Xaa in position 2 is any amino acid
  Variant (4)..(4): Xaa in position 4 is any or no amino acid
  Variant (6)..(9): Xaa in position 6 to 9 is any amino acid
  Variant (10)..(10): Xaa in position 10 is any or no amino acid
  Variant (12)..(12): Xaa in position 12 is any amino acid
  Variant (13)..(13): Xaa in position 13 is Ala or Gly
  Variant (15)..(16): Xaa in position 15 to 16 is any amino acid
  Variant (18)..(20): Xaa in position 18 to 20 is any amino acid
  Variant (23)..(23): Xaa in position 23 is Phe or Tyr
  Variant (24)..(24): Xaa in position 24 is any amino acid
  Variant (25)..(25): Xaa in position 25 is Ala, Cys or Val
GXVXVXXXXXCXXCXXCXXXCPXXX

SEQ ID NO: 78262 - protein, 17 aa, Artificial sequence
  protein pattern
  Variant (2)..(2): Xaa in position 2 is any amino acid
  Variant (5)..(5): Xaa in position 5 is Ala, Asp, Glu, Gln, Ser or Thr
  Variant (6)..(6): Xaa in position 6 is any amino acid
  Variant (8)..(8): Xaa in position 8 is any amino acid
  Variant (10)..(12): Xaa in position 10 to 12 is any amino acid
  Variant (15)..(15): Xaa in position 15 is Ala, Ser, Thr or Val
  Variant (16)..(16): Xaa in position 16 is Glu, Gly, Gln, Ser or Thr
CXHCXXPXCXXXCPXXA

SEQ ID NO: 78263 - protein, 19 aa, Artificial sequence
  protein pattern
  Variant (2)..(2): Xaa in position 2 is Phe, Leu or Met
  Variant (3)..(4): Xaa in position 3 to 4 is any amino acid
  Variant (5)..(5): Xaa in position 5 is Asp, Asn or Gln
  Variant (6)..(8): Xaa in position 6 to 8 is any amino acid
  Variant (10)..(10): Xaa in position 10 is any amino acid
  Variant (13)..(13): Xaa in position 13 is any amino acid
  Variant (14)..(14): Xaa in position 14 is Ala, Ser or Thr
  Variant (16)..(18): Xaa in position 16 to 18 is any amino acid
GXXXXXXXCXGCXXCXXXC

SEQ ID NO: 78264 - protein, 19 aa, Artificial sequence
  protein pattern
  Variant (2)..(3): Xaa in position 2 to 3 is any amino acid
  Variant (5)..(5): Xaa in position 5 is any amino acid
  Variant (8)..(8): Xaa in position 8 is Ala, Asp, Glu, Asn, Gln or Thr
  Variant (9)..(9): Xaa in position 9 is Ala, Ser, Thr or Val
  Variant (11)..(11): Xaa in position 11 is Ile, Leu, Pro or Val
  Variant (12)..(17): Xaa in position 12 to 17 is any amino acid
  Variant (18)..(18): Xaa in position 18 is Ala, Asp or Gly
  Variant (19)..(19): Xaa in position 19 is Asp, Glu, Asn, Pro or Thr
GXXPXCVXXCXXXXXXXXX

SEQ ID NO: 78265 - DNA, 408 bp, Escherichia coli
  CDS (1)..(408): transl_table=11
atgcgtcttcttcataccatgctgcgcgttggcgatttgcaacgctccatcgatttttataccaaagtgctgggcatgaaactgctgcgtaccagcgaaaacccggaatacaaatactcactggcgtttgttggctacggcccggaaaccgaagaagcggtgattgaactgacctacaactggggcgtggataaatacgaactcggcactgcttatggtcacatcgcgcttagcgtagataacgccgctgaagcgtgcgaaaaaatccgtcaaaacgggggtaacgtgacccgtgaagcgggtccggtaaaaggcggtactacggttatcgcgtttgtggaagatccggacggttacaaaattgagttaatcgaagagaaagacgccggtcgcggtctgggcaactaa

SEQ ID NO: 78266 - protein, 135 aa, Escherichia coli
MRLLHTMLRVGDLQRSIDFYTKVLGMKLLRTSENPEYKYSLAFVGYGPETEEAVIELTYNWGVDKYELGTAYGHIALSVDNAAEACEKIRQNGGNVTREAGPVKGGTTVIAFVEDPDGYKIELIEEKDAGRGLGN

SEQ ID NO: 78267 - DNA, 1185 bp, Oryza sativa
  CDS (78)..(953)
atcgcgatacctcctccttcccgtcgaaccctctccagtctccactccactgaatcctcccacctcggctcgaaggaatggcaagcggtagtgaagctgagaagtcacctgaggttgtgctggagtggcctaagaaggacaagaagaggcttctacatgctgtttaccgtgttggagatttggatcgcaccattaaatgttacacagaatgctttggaatgaaattactgaggaaaagagatgtgcctgaagagaaatatacgaatgcatttcttgggtttggacctgaggacaccaactgtgcacttgaattgacatacaattatggtgttgataagtacgacattggagcaggatttgggcatttcgctattgcaactgaggacgtgtacaaattggctgagaaaattaaatccagttgttgctgcaagatcactcgtgaacctggtcctgtcaagggaggatccactgtgattgcctttgcacaggatcctgacggttacacgtttgagcttatccagaggggtccaacacctgagcctctttgccaagttatgcttcgtgtgggtgaccttgatcgctccatcaagttctacgagaaggcccttggtatgaagctgctgaggaagaaggatgtacctgactataagtataccattgccatgttgggctatgctgatgaggataagacaactgttattgagttgacatacaactatggtgtcacagaatataccaagggcaacgcatatgctcaggttgctattggcactgaagatgtctacaagagtgctgaggctgttgagttggttacaaaagaactagggggaaagattttgcggcagccaggtccactaccagggctcaacacaaagattgcctctttccttgaccctgatggctggaaagtggttttggttgataacgccgacttcctgaaggaactccagtgaagatgagagatggcccaagttctgtgctaggaggcaaagcacaaaccttacgtagtaatgccagtgcaatgtaataaagaagcggtttccgctctatgaacaagaataaattctggcacatgcgttgtgcttatgctagtactgtctgggtttggctgtaaatccgctatgcattgctacctgtatcagcatgactgttggagtgttgttgataacaaggaccagtttgtgc

SEQ ID NO: 78268 - protein, 291 aa, Oryza sativa
MASGSEAEKSPEVVLEWPKKDKKRLLHAVYRVGDLDRTIKCYTECFGMKLLRKRDVPEEKYTNAFLGFGPEDTNCALELTYNYGVDKYDIGAGFGHFAIATEDVYKLAEKIKSSCCCKITREPGPVKGGSTVIAFAQDPDGYTFELIQRGPTPEPLCQVMLRVGDLDRSIKFYEKALGMKLLRKKDVPDYKYTIAMLGYADEDKTTVIELTYNYGVTEYTKGNAYAQVAIGTEDVYKSAEAVELVTKELGGKILRQPGPLPGLNTKIASFLDPDGWKVVLVDNADFLKELQ

SEQ ID NO: 78269 - DNA, 1261 bp, Glycine max
  CDS (36)..(1073)
ccacgcgtccgtccacattcacttcactcagtaaaatgtcttcttcaattcgtccctcactttcttccttcatgttgccctccctcgcctcttgcaacccttctcaaaagctctctctttttcgtcttggtagcggcattagacagtttcataagtttggcctcaaagcttctaggtttttgagacatgatgataagtgcatgagagtgatggcattcggaaacatgtccacagctgctacacaagaaaatgtgctagattgggtcaaacatgacaagagaagaatgcttcatgttgtgtatcgtgttggggacttggacaagagcataaaattttatagagagtgccttggaatgaagttgctcagaaagcgtgacatgcaagagcagaaatataccaatgcctttcttggatatgggcctgaggatgcacactttgttgttgaactgacatacagttacgggattgagaagtatgacattggagatggatttggccattttggtattgctattgatgatatttcaagaatagtggaacttgttagagccaagggtggaaaaattactagagagcctagtcctgtcaagggaggcaacacaacaattgcatatattgaagatcctgatggttatcaatttgaacttttggaaagggttccctctccggagcctttgtgcaaagtaatgcttcgagtgggtgatcttgatcgttccattaaattttatgagaaggcttttggtatggagctacttcgaacccaagatgatccagagtttaagagtacaatagcaatactgggttatggtccaaaggaaaaaaacactgtcctggaattgacttacaactatggagtcccagattatgataaaggagatgcttatgctcagattacaataggcacagatgatgtgtacaaaactgcagaagcaatcaaacttgcaggagggaagattactcgggaacctggacctgtacctggtatcaaaacgaagatcccattgtgtgttgatcctgatggttggaaaactgtttttgtagataatgttgactttcgtagggagttggaatagttttttgagtcatcatcatggcaattttgggagactaaatatcaaaacaatggcgcagaggaaatggtattctttgttgaagtttttttgagttagtgaatgtatcatacgcaagtccattttttgtaggtcatggacaaatgattcttgcaacttaaacaatttcaattacacatggttttgccaat

SEQ ID NO: 78270 - protein, 345 aa, Glycine max
MSSSIRPSLSSFMLPSLASCNPSQKLSLFRLGSGIRQFHKFGLKASRFLRHDDKCMRVMAFGNMSTAATQENVLDWVKHDKRRMLHVVYRVGDLDKSIKFYRECLGMKLLRKRDMQEQKYTNAFLGYGPEDAHFVVELTYSYGIEKYDIGDGFGHFGIAIDDISRIVELVRAKGGKITREPSPVKGGNTTIAYIEDPDGYQFELLERVPSPEPLCKVMLRVGDLDRSIKFYEKAFGMELLRTQDDPEFKSTIAILGYGPKEKNTVLELTYNYGVPDYDKGDAYAQITIGTDDVYKTAEAIKLAGGKITREPGPVPGIKTKIPLCVDPDGWKTVFVDNVDFRRELE

SEQ ID NO: 78271 - DNA, 1321 bp, Oryza sativa
  CDS (1)..(1038)
atgagagctctccccatggccgccggccgcgccgccgccgtcgccgcctgcgcctcgccggccgtcccgcggaggtcgctgctcctctccaccgccgccgcagcgctgcagccggagccggtgaggctgacccggggcgcgagcgccgcgcccaagctccgggcctcgccgccggacgccgcgcaggcggcggcggccttcggcagcaaggaggaggccttcgcctgggccaagagcgacaaccggcggctgctccacgtcgtctaccgcgtcggcgacatcgacagaacaatcaagttctacacggagtgccttgggatgaagctgctgaggaagcgcgacatcccggaggagaagtacaccaacgccttcctcggctatggcgcggaggacaaccacttcgtcgtcgagctcacctacaactatggcgtcgacaagtatgacatcggggcaggtttcggtcactttggcatcgccgtcgacgatgtggcgaagacggtggagctgataagggcgaaaggagggaaggtgaccagggagcccggccctgtcaagggcggcaagacggtgatcgccttcgtcgaggacccagatggctacaagtttgagatccttgagaggccagggactccagagcccctgtgccaggtgatgctccgtgtcggtgatcttgatcgggccataagcttctatgagaaggcctgtggcatggagctgctaaggaagagagataaccctgaatacaagtacacagtggcaatgatggggtatggtcctgaagacaagaatgctgtgctggagctgacatacaactatggtgtcactgaatatgacaaggggaatgcatatgcccagatcgcgatcggaaccgacgacgtctacaagacggcggaggtggtgaagctgttcggagggcaggtggtgcgggagccagggccattgccggggatcaacaccaagatcacgtccatcctggaccctgatggctggaaatcggtgtttgtcgacaacatcgactttgcaaaggaactggagtaaacctgttcagaaaccgggtgccagttctgtttgttgaatgactagtgaccagagataaatcttgcttggttgcaatcactgtaaatgagctcgaactccatgaccaagaaattttggtgtctgaataaataacagagcatgaggtttcgtcccaaaaaaaaaaaaaaaaagcacaaaacataacttataggaatagaagaaaagacctagctacctgatcttttgtactagcttgactaattaataatgaaatatattgtttgaagcaatcaaccagttgttt

SEQ ID NO: 78272 - protein, 345 aa, Oryza sativa
MRALPMAAGRAAAVAACASPAVPRRSLLLSTAAAALQPEPVRLTRGASAAPKLRASPPDAAQAAAAFGSKEEAFAWAKSDNRRLLHVVYRVGDIDRTIKFYTECLGMKLLRKRDIPEEKYTNAFLGYGAEDNHFVVELTYNYGVDKYDIGAGFGHFGIAVDDVAKTVELIRAKGGKVTREPGPVKGGKTVIAFVEDPDGYKFEILERPGTPEPLCQVMLRVGDLDRAISFYEKACGMELLRKRDNPEYKYTVAMMGYGPEDKNAVLELTYNYGVTEYDKGNAYAQIAIGTDDVYKTAEVVKLFGGQVVREPGPLPGINTKITSILDPDGWKSVFVDNIDFAKELE

SEQ ID NO: 78273 - DNA, 790 bp, Sorghum bicolor
  CDS (48)..(788)
gccggccgggccggagattctattctattctataaaggtcttgcacgatgatgtctggttgggctccggctgcctactatacgctcgtcctgctgctcctgcttgttctaggtgttgtcactgctcagagcagcaacggtggtgttggtcgtagccgcaggcaggaggagcaggcagtaagcgaggtgtcgtttgggaatcttgctcatgcatcatcccctatggagtccatcgctctttcatcaggaatggcaactggtagtgaagcctcgaagccagctgaggtgccagctgagactgtgcttgactggcataaacaggacaacaagaggatgctccacgcggtttaccgtgtcggggatctggaccgcacaatcaaatactacacggaatgctttgggatgaaactgctgaggaaaagggatattcctgaagagaagtacaccaacgccttccttggctttggaccagaggacaccaactttgcagttgaattgacttacaactatggcgttgacaagtatgacattggaacgggctttgggcattttgcaatcgctaatgaggatgtgtacaagttggctgagaatattaaatccaagggtggcaagatcacccgcgaacctggtcctgtcaagggaggatccactgttattgccttcgcacaggaccctgatggctacatgtttgagcttatccagagggctgagacacccgagcctctttgccaggtcatgcttcgtggtggtgaccttgagcgttctatcaggtttatgagaaagccctaggt

SEQ ID NO: 78274 - protein, 246 aa, Sorghum bicolor
MMSGWAPAAYYTLVLLLLLVLGVVTAQSSNGGVGRSRRQEEQAVSEVSFGNLAHASSPMESIALSSGMATGSEASKPAEVPAETVLDWHKQDNKRMLHAVYRVGDLDRTIKYYTECFGMKLLRKRDIPEEKYTNAFLGFGPEDTNFAVELTYNYGVDKYDIGTGFGHFAIANEDVYKLAENIKSKGGKITREPGPVKGGSTVIAFAQDPDGYMFELIQRAETPEPLCQVMLRGGDLERSIRFMRKP

SEQ ID NO: 78275 - DNA, 1488 bp, Zea mays
  CDS (126)..(1148)
ccctcgggtcggccgggaactcctcgaggccggcctgtggcggggacagttgtccaaaccaaatacattgaggatagcacgagaaaggggcgccaagcaaaccgggtcggccagcagacactgccatgaggactctactacctgtggccgccggccgcgggaccgtcgcctgcgcggccacgcccgtcccccggaggtcgctgctcctctccaccgctgccgcaggtgcggcgctgcagccggagcaggtggctgggacgaggccgttgaggctgaccaggagcgtggccagcgccgtggcaaagcccaggacctcggccgacgaggccatctcgtgggcgaagaaggacaaccgccggctcctccacgtcgtctaccgggtcggcgacctcgacaagacgatcaagttctacaccgagtgcctggggatgaagctgctcaggaagagagacataccagaggagaagtacagcaacgcgttcctcgggtacgggcccgaggaatcgcatttcgtcgtcgagctcacttacaattacggggttgacaaatatgacataggcgaagggttcggccatttcggcatcgcagtcgaggacgtggccaagacggtagagctcataagagcaaaggctggaaaggtcatcagggaagccggtcctgtgaagggcggcgagaccgtcatcgccttcgtggaggaccccgacggctacaagtttgagatcatcgagaggcctggaactccggaacccttgtgccaggtgatgctccgcgtcggcgaccttgaccgtgccataagcttctatgagaaggcctgcggcatggaactgctccggaagcgagatagccctgagtacaagtacacagtggcaatgatgggtttcggccctgaagacaaggacgcggtgctggagctgacctacaactatggtgtcaccgagtatgccaaggggaatgcatatgcccagatcgccattggcaccgacgatgtctacaggaccgcggaggcggcgaagctgtccggaggccaggtggtgcgggagccggggcccttgccagggatcaacaccaagatcacagccatcctggaccctgatggctggaaattggtcttcgtcgacaacatggacttcgccaaggaactggagtagccacgccaacgacctcagacgccctgcaacaggattaactcgcactgctgttggtccgtaattaaaatgaaagctactagtgaaaccgcgaggtctgtttcgtgctcaattagcagtgcgcttttttttccgctcccggtcggtcgggccggcgtcctcgttcacgtgaacgatgacgatcagcctatggttgggagcgtttgcagcactttttctgggggcgctagagaacggggatgaatactgccgcgcctttgtaatctcgctttttgctcgatgcaacttaaaatcctgtccctgtctgtctatcacggaattaagaagcacgtgcgggagccgc

SEQ ID NO: 78276 - protein, 340 aa, Zea mays
MRTLLPVAAGRGTVACAATPVPRRSLLLSTAAAGAALQPEQVAGTRPLRLTRSVASAVAKPRTSADEAISWAKKDNRRLLHVVYRVGDLDKTIKFYTECLGMKLLRKRDIPEEKYSNAFLGYGPEESHFVVELTYNYGVDKYDIGEGFGHFGIAVEDVAKTVELIRAKAGKVIREAGPVKGGETVIAFVEDPDGYKFEIIERPGTPEPLCQVMLRVGDLDRAISFYEKACGMELLRKRDSPEYKYTVAMMGFGPEDKDAVLELTYNYGVTEYAKGNAYAQIAIGTDDVYRTAEAAKLSGGQVVREPGPLPGINTKITAILDPDGWKLVFVDNMDFAKELE

SEQ ID NO: 78277 - DNA, 1486 bp, Zea mays
  CDS (120)..(1163)
aggcacactgatggccccgccagatccaagccgcgacccagacggcaagatagagcgagcgacctctcgattctccccatcccgccgtgcttcccgtcttcaccaaatccttcgccacgatggcgcgcctgctcatccccctccccttcgccgccgcctctgcctcatcgctccacctcgccgtctcccgccttcctctcgccgcggtctccgccgcgcgtcgcgagtgtctctttgggggaagggtggtaggaggagtggtgagggcgcccgcgaggctttctaagcgcgggttgtgcgccggcgcagaggctggcgactcggccgtcacggtggaggccatggaatgggtcaagaaggacaggaggcgcctgctccacgtcgtctaccgcgtcggggacctcgacaagacgatcaagttctacacggagtgcctgggcatgaaactgttgaggaagagggacattcccgaggagaggtacaccaatgcctttctggggtacgggcctgaggattcacattttgttgtggagctcacttacaattatggtgtggagagctataacatcgggactggttttggccactttggaattgctgttgaggatgttgcaaaaacagtggaacttattaaagcaaaaggaggaacagtcacaagggagccaggtcctgtcaaaggtgggaaatcagtaattgcctttattgaggatcctgatggttacaagtttgagcttatagaaagagggcctactcccgagcctttgtgccaggtaatgcttcgagtgggagatcttgatcgtgctataaatttctatgagaaggcatttggcatggaacttcttcgcaagcgagacaattctgagtacaagtatacgattgcgatgatgggatatggtccagaagacaaaaatgctgtattggagttgacctacaactatggggtgaaggaatatgataagggaaatgcttatgcacagattgctattagtactgatgatgtctacaaaactgcggaagcaattagagtaaatggtggacaaattactcgtgaacctggcccattacctggcatcaccaccaagataactgcatgcacagatccagatggctggaaaacagtgtttgtcgataacatagattttctgaaggagttggaagaatgagctttgctagagatctcaacttggtacatcaagctccatacggttgcaccccgtgagttccatgcatgacctgcaaaatctttgtaaagccacagcctcaaactgaggattgtagataggtcgtccaatctacggcatcatcgcaattgatagttgatagagcattagattttccttgcagatctatatagatgcgcaaccgtttttgtattatgcattttaatgcataagttcaatggaaatgattcatgggtaagaaaatcgtcttctttcaagcggcaatataagggctggtttggtgacttgaaaaaaaaaaaaaaaaa

SEQ ID NO: 78278 - protein, 347 aa, Zea mays
MARLLIPLPFAAASASSLHLAVSRLPLAAVSAARRECLFGGRVVGGVVRAPARLSKRGLCAGAEAGDSAVTVEAMEWVKKDRRRLLHVVYRVGDLDKTIKFYTECLGMKLLRKRDIPEERYTNAFLGYGPEDSHFVVELTYNYGVESYNIGTGFGHFGIAVEDVAKTVELIKAKGGTVTREPGPVKGGKSVIAFIEDPDGYKFELIERGPTPEPLCQVMLRVGDLDRAINFYEKAFGMELLRKRDNSEYKYTIAMMGYGPEDKNAVLELTYNYGVKEYDKGNAYAQIAISTDDVYKTAEAIRVNGGQITREPGPLPGITTKITACTDPDGWKTVFVDNIDFLKELEE

SEQ ID NO: 78279 - DNA, 1400 bp, Zea mays
  CDS (23)..(1099)
ccggaacaacccagcagccatcatgtcgcgcaggctataccaacacgcagcggtgatgtctgcttgggctccggctgcctatacgctcgtcttgctccttcatcttctagcaggtgctgtcgtcactgctaagaccaacaatggtgttgatcctggtcctaggcagcaggagccctctatgcccgtggactccagcggtgacgaagccctctctgcgttgacctggatggcaaccggtagtgaagcctcgaaggcagctgaggctgtggttgactggcataaacacgacagcaagaggatgctccatgcggtttaccgtgttggggatctggaccgcacaatcaagtactacacggaatgctttgggatgaaactgctgaggaaaagggatgttcctgatgagaagtacaccaatgccttccttggctttgggccagagaacaccaactttgcagttgaattgacatacaactatggcgttgacaagtatgacattggaacgggctttgggcatttcgcaattgctaatgatgatgtgtacaagttagctgagaatatcaaatccaagggtggtaagatcacccgcgaacctggtcctgtcaagggaggatccactgttattgccttcgcacaggatcctgatggctacatgtttgagcttatccagagggctgacacacctgagcctctttgccaggtcatgcttcgtgttggtgaccttgagcgttctatcaagttttatgagaaggccctagggatgaagctcctaaggaagaaggatgtacctgattacaagtataccattgccatgttgggctatgctgatgaggacaagacaactgttctggagctgacgtacaactacggagtcacagaatacagcaagggcaatgcatatgctcaggttgccattggcaccaatgatgtgtacaagagcaccgaggcggttgatctggcgaccaaagaactaggtggcaagattttgcggcagccagggcctctacctgggatcaacactaagatcgcctcttttgttgatccagatggctggaaagtggttctggttgacaacaccgacttcctcaaggaactccactgaaggctcgggatacccaggtgctgtgctaggatgtagtaatgcttgtctgtggtgtaataagatgtgggtggtttgtttctgccctgatgaacttataatactgaatgttgctacagaggttgtgcttctgccagtgaggtttgggatttgctatgtaactgtgcctgcgggctccgattctggcgctgttcgtacactgtagaagccagtgaatcccaataaacccagcttcacaggctcctcttaaaaaaaaaaaaaaaaaaaaaaaaaaaaaaaagtactctgcgttgttaccactgct

SEQ ID NO: 78280 - protein, 358 aa, Zea mays
MSRRLYQHAAVMSAWAPAAYTLVLLLHLLAGAVVTAKTNNGVDPGPRQQEPSMPVDSSGDEALSALTWMATGSEASKAAEAVVDWHKHDSKRMLHAVYRVGDLDRTIKYYTECFGMKLLRKRDVPDEKYTNAFLGFGPENTNFAVELTYNYGVDKYDIGTGFGHFAIANDDVYKLAENIKSKGGKITREPGPVKGGSTVIAFAQDPDGYMFELIQRADTPEPLCQVMLRVGDLERSIKFYEKALGMKLLRKKDVPDYKYTIAMLGYADEDKTTVLELTYNYGVTEYSKGNAYAQVAIGTNDVYKSTEAVDLATKELGGKILRQPGPLPGINTKIASFVDPDGWKVVLVDNTDFLKELH

SEQ ID NO: 78281 - DNA, 1281 bp, Zea mays
  CDS (128)..(1000)
gcgagaagcccagaaggtgagaagatagatagagagagagagagtgatcggtacaaggatcaccgctgtgcctgcgcgtgctgcttcaccgaatcgagtcagaccctgtccgaatccgagccaagggatggcaaccggtagtgaggcctcgaaggcagctgaggctgtggttgactggcataaacaggacagcaagaggatgctccatgcggtttaccgtgttggggatctggaccgtacaatcaagtactacacggaatgctttgggatgaaactgctgaggaaaagggatgttcctgatgagaagtacaccaacgccttccttggctttgggccagagaacaccaactttgcagttgaattgacatacaactatggcgttgacaagtatgatattggaacgggctttgggcatttcgcaattgctaatgatgatgtgtacaagttagctgagaatatcaaatccaagggtggcaagatcacccgcgaacctggtcctgtcaagggaggatccactgttattgccttcgcacaggatcctgatggctacatgtttgagcttatccagagggccgacacacctgagcctctttgccaggtcatgcttcgtgttggtgaccttgagcgttctatcaagttttatgagaaggccctagggatgaagctcctaaggaagaaggatgtacctgattacaagtataccattgccatgttgggctatgctgatgaggacaagacaactgttctggagctgacgtacaactatggagtcacagaatacagcaagggcaatgcatatgctcaggttgccattggcaccaatgatgtgtacaagagcgccgaggcggttgatctggcgaccaaagaactaggtggcaagattttgcggcagccagggcctctacctgggatcaacactaagatcgcctcttttgttgatccagatggctggaaagtggttctggttgacaacaccgacttcctcaaggaactccactgaaggctcgggatacccaggtgctgtgctaggatgtagtaatgcttgtctgtggtgtaataagatgtgggtggtttgtttctgccctgatgaacttataatactgaatgttgctacagaggttgtgcttctgccagtgaggtttgggatttgctatgtaactgtgcctgcgggctccgattctggcgctgttcatacactgtagaagccagtgaatcccaataaacccagcttcacaggcaaaaaaaaaaaaaaaaaaaaaaaaaaaaaaaaaaaacaaccac

SEQ ID NO: 78282 - protein, 290 aa, Zea mays
MATGSEASKAAEAVVDWHKQDSKRMLHAVYRVGDLDRTIKYYTECFGMKLLRKRDVPDEKYTNAFLGFGPENTNFAVELTYNYGVDKYDIGTGFGHFAIANDDVYKLAENIKSKGGKITREPGPVKGGSTVIAFAQDPDGYMFELIQRADTPEPLCQVMLRVGDLERSIKFYEKALGMKLLRKKDVPDYKYTIAMLGYADEDKTTVLELTYNYGVTEYSKGNAYAQVAIGTNDVYKSAEAVDLATKELGGKILRQPGPLPGINTKIASFVDPDGWKVVLVDNTDFLKELH

SEQ ID NO: 78283 - DNA, 1000 bp, Glycine max
  CDS (42)..(884)
agacaccgacacagatctgtcttccgaagcaggaactaaatatggctgacttgttggaatggtcaaagcaagataagaaacgaatgcttcatgtcgtctaccgtgttggtgaccttgatcgcaccatcaaattttacacagaatgtttaggaatgaagcttttgaggcaaagagatatcccagaggagaaatatgctaatgcttttcttggatttggccctgaagaatcccattttgttgttgaattaacatataattatggggttacctcgtatgacattggcgatggctttggacattttgcaattgcaactcaggacatttataaattggttgagcacatcagggccaagggtggaaacatcacaagggaacctggtccagttcaaggtggaactactgttatcgcctttgttaaggatcctgatggttatacttttggacttatccaaagacctacagtccatgacccattttgtcaagtaatgcttcgtgttggtgatttagagcgctcaattaagttttatgaaaaggctttgggcatgaaggtggtgaggaaggttgataagcctgagtacaagtacactatagctatgctcgggtatggagaggagcacgagacaactgtgttggagttgacatataactatggtgtgactgaatactctaagggaaatgcttatgcacagattgccattggtactgatgatgtatataagagtgctgaggtagttaaccaagtcataaaagaggttggagggaagattactcggcaaccagggccaattcctggccttaatacaaaaaccacttcgtttttagatccagatggatggaaaactgtcttggttgacaacgttgatttcttggaagaactgaagtgaagagcaagctttatatgaaataagtagtcctgctgcttttgtatgaataagttgtctcgcattttatcattgtgcgttttgtatcagtaccagtcatcaacttgttttcttgcttt

SEQ ID NO: 78284 - protein, 280 aa, Glycine max
MADLLEWSKQDKKRMLHVVYRVGDLDRTIKFYTECLGMKLLRQRDIPEEKYANAFLGFGPEESHFVVELTYNYGVTSYDIGDGFGHFAIATQDIYKLVEHIRAKGGNITREPGPVQGGTTVIAFVKDPDGYTFGLIQRPTVHDPFCQVMLRVGDLERSIKFYEKALGMKVVRKVDKPEYKYTIAMLGYGEEHETTVLELTYNYGVTEYSKGNAYAQIAIGTDDVYKSAEVVNQVIKEVGGKITRQPGPIPGLNTKTTSFLDPDGWKTVLVDNVDFLEELK

SEQ ID NO: 78285 - DNA, 1000 bp, Glycine max; identical to SEQ ID NO: 78283
  CDS (84)..(884)

SEQ ID NO: 78286 - protein, 266 aa, Glycine max
MLHVVYRVGDLDRTIKFYTECLGMKLLRQRDIPEEKYANAFLGFGPEESHFVVELTYNYGVTSYDIGDGFGHFAIATQDIYKLVEHIRAKGGNITREPGPVQGGTTVIAFVKDPDGYTFGLIQRPTVHDPFCQVMLRVGDLERSIKFYEKALGMKVVRKVDKPEYKYTIAMLGYGEEHETTVLELTYNYGVTEYSKGNAYAQIAIGTDDVYKSAEVVNQVIKEVGGKITRQPGPIPGLNTKTTSFLDPDGWKTVLVDNVDFLEELK

SEQ ID NO: 78287 - DNA, 932 bp, Arabidopsis thaliana
  CDS (157)..(633)
aactcttccactctccagtcacagccacagagtacccggaggccaaagagatttgatcagctttgtgtgttttccatggcgtcggaagcgagggaatcaccagcaaacaatcctggcttgtcaacgaatcgagatgaggctacaaaaggatacatcatgcaacagactatgtttcggatcaaggaccctaaggctagtcttgacttttactcacgtgtgctggggatgtcattgctgaagaggctggatttctctgagatgaaatttagtttgtacttcctgggctacgaggatactacaacagctccaaccgatccaacagagagaacggtttggacatttggtcaaccggcaacaattgaattgactcacaactggggtacagagagtgatcctgagtttaaaggttatcacaatgggaactctgagcctcgtggatttgggcacattggggttaccgttgatgatgtgcacaaggcatgcgagagatttgaagaattgggagtagagtttgccaagaaaccaaacgatggaaagatgaagaatatagccttcattaaggatcctgatggctactggatcgagatctttgatctcaagactatcggaactactaccgtaaacgcagcttgatctcaagactatcggaactactaccgtaaacgcagcttgatctcaagactatcgggactactaccggaaacgcagcttgaggaagtagcgattgcgctatttgtgttcttttgctcattccacccgagtgtgtgcatacagttaaagaattttcatgtttcatcgaataatcggaacaagatggtcgttgtttatcaatgtggtctgtttcttgacatatatataatgagctaggtcgttatcattgttaaaaataacatacacgtccattattaatgacaatcagtttggtactgttc

SEQ ID NO: 78288 - protein, 158 aa, Arabidopsis thaliana
MQQTMFRIKDPKASLDFYSRVLGMSLLKRLDFSEMKFSLYFLGYEDTTTAPTDPTERTVWTFGQPATIELTHNWGTESDPEFKGYHNGNSEPRGFGHIGVTVDDVHKACERFEELGVEFAKKPNDGKMKNIAFIKDPDGYWIEIFDLKTIGTTTVNAA

SEQ ID NO: 78289 - DNA, 1418 bp, Arabidopsis thaliana
  CDS (84)..(1136)
aatctccgacggaggaaaagtagccaccgcttgacgaatcattcatcaacacacgcagagagctctgaatctcgaggaagaagatggtgaggatcattcctatggctgcttcctccattcgaccttccctcgcctgcttctctgattctcctcgcttccccatctccctcctctccagaaatctctctcgcactctccatgttcctcaatcacagctttttggtttaacttctcataagcttttgagaagaagtgtaaactgtttaggagttgctgaatctggtaaagcagctcaagctactacacaagatgatcttctcacctgggttaagaatgataagagaagaatgcttcatgttgtttatcgtgttggcgatatggaccggacgataaagttttatactgaatgtcttgggatgaagcttctacgtaagcgtgatataccagaagagaagtatactaatgctttccttggttatggaccggaagattcacactttgtgattgagcttacttataattatggagttgacaagtatgacattggggctggttttggtcactttggtattgcggtcgatgatgtggcgaaaactgtagagcttgtgaaagccaaagggggaaaagtaagccgggagcctggtcctgtcaaaggtggcaaaactgtaatagcattcattgaagatcctgatggttacaaatttgaactcttggaaagaggtcctacaccagaacctctttgccaagttatgctccgtgttggtgatctcgatagggccataaagttctatgagaaggcttttggaatggaacttctgcgaacaagagacaacccagagtacaagtacacaatagccatgatgggatatggtccagaagataaatttcctgtcctagagctgacatataactatggtgtcactgaatatgataaaggaaatgcttatgctcagatagcaatagggacggatgatgtgtacaaaactgcagaagctataaaactctttgggggaaaaatcacgagggagcctggtcccttaccaggtattagcacgaagatcaccgcgtgtctggatcctgatggttggaaatcggtatttgtggacaacattgactttctcaaagaactggagtgagaggagaaagcagaagagaggcaacaaatgcacgaaaatggcttatgagggagacaggaggagaggccttgttgtgaattacatcagtttggggtttgatataatctctctcagtgctgaatatttttatcaaagtgaatgatttgtttttcagaatatagtgtagttgtttaatttacagtataaaagcctatgttgcgtctttgtatattagttccacttaacattaattgccaataaataagatgataagtgaatgatattcaagaaaaaatcttatgc

SEQ ID NO: 78290 - protein, 350 aa, Arabidopsis thaliana
MVRIIPMAASSIRPSLACFSDSPRFPISLLSRNLSRTLHVPQSQLFGLTSHKLLRRSVNCLGVAESGKAAQATTQDDLLTWVKNDKRRMLHVVYRVGDMDRTIKFYTECLGMKLLRKRDIPEEKYTNAFLGYGPEDSHFVIELTYNYGVDKYDIGAGFGHFGIAVDDVAKTVELVKAKGGKVSREPGPVKGGKTVIAFIEDPDGYKFELLERGPTPEPLCQVMLRVGDLDRAIKFYEKAFGMELLRTRDNPEYKYTIAMMGYGPEDKFPVLELTYNYGVTEYDKGNAYAQIAIGTDDVYKTAEAIKLFGGKITREPGPLPGISTKITACLDPDGWKSVFVDNIDFLKELE

SEQ ID NO: 78291 - DNA, 1418 bp, Arabidopsis thaliana; identical to SEQ ID NO: 78289
  CDS (102)..(1136)

SEQ ID NO: 78292 - protein, 344 aa, Arabidopsis thaliana
MAASSIRPSLACFSDSPRFPISLLSRNLSRTLHVPQSQLFGLTSHKLLRRSVNCLGVAESGKAAQATTQDDLLTWVKNDKRRMLHVVYRVGDMDRTIKFYTECLGMKLLRKRDIPEEKYTNAFLGYGPEDSHFVIELTYNYGVDKYDIGAGFGHFGIAVDDVAKTVELVKAKGGKVSREPGPVKGGKTVIAFIEDPDGYKFELLERGPTPEPLCQVMLRVGDLDRAIKFYEKAFGMELLRTRDNPEYKYTIAMMGYGPEDKFPVLELTYNYGVTEYDKGNAYAQIAIGTDDVYKTAEAIKLFGGKITREPGPLPGISTKITACLDPDGWKSVFVDNIDFLKELE

SEQ ID NO: 78293 - DNA, 1418 bp, Arabidopsis thaliana; identical to SEQ ID NO: 78289
  CDS (348)..(1136)

SEQ ID NO: 78294 - protein, 262 aa, Arabidopsis thaliana
MLHVVYRVGDMDRTIKFYTECLGMKLLRKRDIPEEKYTNAFLGYGPEDSHFVIELTYNYGVDKYDIGAGFGHFGIAVDDVAKTVELVKAKGGKVSREPGPVKGGKTVIAFIEDPDGYKFELLERGPTPEPLCQVMLRVGDLDRAIKFYEKAFGMELLRTRDNPEYKYTIAMMGYGPEDKFPVLELTYNYGVTEYDKGNAYAQIAIGTDDVYKTAEAIKLFGGKITREPGPLPGISTKITACLDPDGWKSVFVDNIDFLKELE

SEQ ID NO: 78295 - DNA, 1213 bp, Glycine max
  CDS (61)..(936)
aaagccaaaagaaaccaaaccgaatcaagccgattatctgccggatcgaatttccgagggatggcaaccggtagcgaagctggaaagcccgcggaggtcgtgctggagtggcctaagcaggacaaaaagaggatgctgcatgctgtttaccgtgtgggagatctggaccgtaccattaagtgttacacagaatgctttgggatgaagctgttgaggaaaagagatgttcctgaagagaagtacaccaatgcgtttcttgggtttggacctgaggacactaattttgcacttgagctgacttacaagtatggtgttgacaagtatgacattggagcgggctttggacattttgccatcgcaaatgaggatgtgtacaagctggctgagacaattaaatcatcttcttgttgtaagatcactcgtgaacctggtcctgtcaagggagggtccactgtgattgcctttgcacaagacccagatggttacatgttcgagcttatccagaggggtccgacgcctgagcctctctgtcaagttatgcttcgtgttggtgaccttgatcggtctatcatgttctacgagaaggcccttgggatgaagcttctgaggaaaaaagatgtgcctcagtacaagtacacaattgccatgatgggctatgccgaggaggataagaccactgttctggagttgacatacaactatggtgtcacagaatataacaagggcaatgcatatgctcaggttgctattggcactgacgatgtgtacaagagtgctgaagcagttgagctggttaccaaagaactaggtggaaagattctacggcagcctgggccactaccggggctgaacacgaagatcacctctttccttgaccccgatggctggaaagtggttctggtggatcatgcggacttcctcaaggaactccactaaagatcagcaggccccacgcccgggagttgttgaagaggcaaaccttatgcagcaatggtctttgatgtaataaaatggcagcctcttccgctcgaccaacaaaaataaaagctactgtaccaccgaatacctatgccgtgattggcctagttagaggacttgctctgtacagtatgtgctatgatcgctgaacatgaatactcctactactgagatgggtctgcatgcgcagtcggagagtggtttccaatgatctgatatgttttctacctctgtt

SEQ ID NO: 78296 - protein, 291 aa, Glycine max
MATGSEAGKPAEVVLEWPKQDKKRMLHAVYRVGDLDRTIKCYTECFGMKLLRKRDVPEEKYTNAFLGFGPEDTNFALELTYKYGVDKYDIGAGFGHFAIANEDVYKLAETIKSSSCCKITREPGPVKGGSTVIAFAQDPDGYMFELIQRGPTPEPLCQVMLRVGDLDRSIMFYEKALGMKLLRKKDVPQYKYTIAMMGYAEEDKTTVLELTYNYGVTEYNKGNAYAQVAIGTDDVYKSAEAVELVTKELGGKILRQPGPLPGLNTKITSFLDPDGWKVVLVDHADFLKELH

SEQ ID NO: 78297 - DNA, 1213 bp, Glycine max; identical to SEQ ID NO: 78295
  CDS (133)..(936)

SEQ ID NO: 78298 - protein, 267 aa, Glycine max
MLHAVYRVGDLDRTIKCYTECFGMKLLRKRDVPEEKYTNAFLGFGPEDTNFALELTYKYGVDKYDIGAGFGHFAIANEDVYKLAETIKSSSCCKITREPGPVKGGSTVIAFAQDPDGYMFELIQRGPTPEPLCQVMLRVGDLDRSIMFYEKALGMKLLRKKDVPQYKYTIAMMGYAEEDKTTVLELTYNYGVTEYNKGNAYAQVAIGTDDVYKSAEAVELVTKELGGKILRQPGPLPGLNTKITSFLDPDGWKVVLVDHADFLKELH

SEQ ID NO: 78299 - DNA, 1352 bp, Zea mays subsp. mays
  CDS (111)..(1058)
gcacgagaccattacctagaacatcctaatcgaaaagagaaaataataattaaaaaaaagcagtgaaccttctcgcgctcggcagttggcagtcctgtcctgtggaccgtatgacgtgtttatttatgggcggcgccttcgtctccactccccaccggaggaaggaagcgagaagaccagaagggatggcaaccggtagtgaagcctcgaaggcagctgaggctgtggttgactggcataaacacgacagcaagaggatgctccatgcggtttaccgtgttggggatctggaccgcacaatcaagtactacacggaatgctttgggatgaaactgctgaggaaaagggatgttcctgatgagaagtacaccaatgccttccttggctttgggccagagaacaccaactttgcagttgaattgacatacaactatggcgttgacaagtatgacattggaacgggctttgggcatttcgcaattgctaatgatgatgtgtacaagttagctgagaatatcaaatccaagggtggtaagatcacccgcgaacctggtcctgtcaagggaggatccactgttattgccttcgcacaggatcctgatggctacatgtttgagcttatccagagggctgacacacctgagcctctttgccaggtcatgcttcgtgttggtgaccttgagcgttctatcaagttttatgagaaggccctagggatgaagctcctaaggaagaaggatgtacctgattacaagtataccattgccatgttgggctatgctgatgaggacaagacaactgttctggagctgacgtacaactatggagtcacagaatacagcaagggcaatgcatatgctcaggttgccattggcaccaatgatgtgtacaagagcgccgaggcggttgatctggcgaccaaagaactaggtggcaagattttgcggcagccagggcctctacctgggatcaacactaagatcgcctcttttgttgatccagatggctggaaagtggttctggttgacaacaccgacttcctcaaggaactccactgaaggctcgggatacccaggtgctgtgctaggatgtagtaatgcttgtctgtggtgtaataagatgtgggtggtttgtttctgccctgatgaacttataatactgaatgttgctacagaggttgtgcttctgccagtgaggtttgggatttgctatgtaactgtgcctgcgggctccgattctggcgctgttcgtacactgtagaagccagtgaatcccaataaacccagcttcacaggctcctcttatcccgtagaccctagttgtttttgggtggagctggagccactgacccc

SEQ ID NO: 78300 - protein, 315 aa, Zea mays subsp. mays
MTCLFMGGAFVSTPHRRKEARRPEGMATGSEASKAAEAVVDWHKHDSKRMLHAVYRVGDLDRTIKYYTECFGMKLLRKRDVPDEKYTNAFLGFGPENTNFAVELTYNYGVDKYDIGTGFGHFAIANDDVYKLAENIKSKGGKITREPGPVKGGSTVIAFAQDPDGYMFELIQRADTPEPLCQVMLRVGDLERSIKFYEKALGMKLLRKKDVPDYKYTIAMLGYADEDKTTVLELTYNYGVTEYSKGNAYAQVAIGTNDVYKSAEAVDLATKELGGKILRQPGPLPGINTKIASFVDPDGWKVVLVDNTDFLKELH

SEQ ID NO: 78301 - DNA, 1352 bp, Zea mays subsp. mays; identical to SEQ ID NO: 78299
  CDS (126)..(1058)

SEQ ID NO: 78302 - protein, 310 aa, Zea mays subsp. mays
MGGAFVSTPHRRKEARRPEGMATGSEASKAAEAVVDWHKHDSKRMLHAVYRVGDLDRTIKYYTECFGMKLLRKRDVPDEKYTNAFLGFGPENTNFAVELTYNYGVDKYDIGTGFGHFAIANDDVYKLAENIKSKGGKITREPGPVKGGSTVIAFAQDPDGYMFELIQRADTPEPLCQVMLRVGDLERSIKFYEKALGMKLLRKKDVPDYKYTIAMLGYADEDKTTVLELTYNYGVTEYSKGNAYAQVAIGTNDVYKSAEAVDLATKELGGKILRQPGPLPGINTKIASFVDPDGWKVVLVDNTDFLKELH

SEQ ID NO: 78303 - DNA, 1352 bp, Zea mays subsp. mays; identical to SEQ ID NO: 78299
  CDS (186)..(1058)

SEQ ID NO: 78304 - protein, 290 aa, Zea mays subsp. mays
MATGSEASKAAEAVVDWHKHDSKRMLHAVYRVGDLDRTIKYYTECFGMKLLRKRDVPDEKYTNAFLGFGPENTNFAVELTYNYGVDKYDIGTGFGHFAIANDDVYKLAENIKSKGGKITREPGPVKGGSTVIAFAQDPDGYMFELIQRADTPEPLCQVMLRVGDLERSIKFYEKALGMKLLRKKDVPDYKYTIAMLGYADEDKTTVLELTYNYGVTEYSKGNAYAQVAIGTNDVYKSAEAVDLATKELGGKILRQPGPLPGINTKIASFVDPDGWKVVLVDNTDFLKELH

SEQ ID NO: 78305 - DNA, 853 bp, Arabidopsis thaliana
  CDS (182)..(658)
attttactcatttgagcagaccccgaactcttccactctccagtcacagccacagagtacccggaggccaaagagatttgatcagctttgtgtgttttccatggcgtcggaagcgagggaatcaccagcaaacaatcctggcttgtcaacgaatcgagatgaggctacaaaaggatacatcatgcaacagactatgtttcggatcaaggaccctaaggctagtcttgacttttactcacgtgtgctggggatgttattgctgaagaggctggatttctctgagatgaaatttagtttgtacttcctgggctacgaggatactacaacagctccaaccgatccaacagagagaacggtttggacatttggtcaaccggcaacaattgaattgactcacaactggggtacagagagtgatcctgagtttaaaggttatcacaatgggaactctgagcctcgtggatttgggcacattggggttaccgttgatgatgtgcacaaggcatgcgagagatttgaagaattgggagtagagtttgccaagaaaccaaacgatggaaagatgaagaatatagccttcattaaggatcctgatggctactggatcgagatctttgatctcaagactatcggaactactaccgtaaacgcagcttgatctcaagactatcggaactactaccgtaaacgcagcttgatctcaagactatcgggactactaccggaaacgcagcttgaggaagtagcgattgcgctatttgtgttcttttgctcattccacccgagtgtgtgcatacagttaaagaatttgtaatattacaccatcttttgaaatcaaagattcttacaaagc

SEQ ID NO: 78306 - protein, 158 aa, Arabidopsis thaliana
MQQTMFRIKDPKASLDFYSRVLGMLLLKRLDFSEMKFSLYFLGYEDTTTAPTDPTERTVWTFGQPATIELTHNWGTESDPEFKGYHNGNSEPRGFGHIGVTVDDVHKACERFEELGVEFAKKPNDGKMKNIAFIKDPDGYWIEIFDLKTIGTTTVNAA

SEQ ID NO: 78307 - DNA, 408 bp, Yersinia pestis
  CDS (1)..(408): transl_table=11
atgcgcttactccataccatgctccgcgtcggtgacctgcaacgttctatcgatttctacaccaaggtattagggatgcgtttactgcgtaccagcgaaaatactgaatataaatactcgttggcattcgtaggctatagcgatgaaagtaaaggttcggtgattgaactgacgtataactggggcgttgaccagtacgatatgggcaccgcattcggccatctggctctgggtgttgatgatgtcgccgcaacgtgtgatcaaattcgccaggcaggcggtaaagtcacccgcgaagctggcccggtaaaaggcggtaataccattattgcttttgttgaagatccagatggctacaaaattgagttaattgagaataagagcgcgggtgactgcctcggaaactga

SEQ ID NO: 78308 - protein, 135 aa, Yersinia pestis
MRLLHTMLRVGDLQRSIDFYTKVLGMRLLRTSENTEYKYSLAFVGYSDESKGSVIELTYNWGVDQYDMGTAFGHLALGVDDVAATCDQIRQAGGKVTREAGPVKGGNTIIAFVEDPDGYKIELIENKSAGDCLGN

SEQ ID NO: 78309 - DNA, 708 bp, Arabidopsis thaliana
  CDS (1)..(708)
atgagttcgtactcaatagcaagtgctatatctcgcatatcacctctaattcgtttcgttaaaccttattccaccggtttttctttcatcacttgcgcttgcaacagtacccggaggccaaagagatttgatcagctttgtgtgttttccatggcgtcggaagcgagggaatcaccagcaaacaatcctggcttgtcaacgaatcgagatgaggctacaaaaggatacatcatgcaacagactatgtttcggatcaaggaccctaaggctagtcttgacttttactcacgtgtgctggggatgtcattgctgaagaggctggatttctctgagatgaaatttagtttgtacttcctgggctacgaggatactacaacagctccaaccgatccaacagagagaacggtttggacatttggtcaaccggcaacaattgaattgactcacaactggggtacagagagtgatcctgagtttaaaggttatcacaatgggaactctgagcctcgtggatttgggcacattggggttaccgttgatgatgtgcacaaggcatgcgagagatttgaagaattgggagtagagtttgccaagaaaccaaacgatggaaagatgaagaatatagccttcattaaggatcctgatggctactggatcgagatctttgatctcaagactatcggaactactaccgtaaacgcagcttga

SEQ ID NO: 78310 - protein, 235 aa, Arabidopsis thaliana
MSSYSIASAISRISPLIRFVKPYSTGFSFITCACNSTRRPKRFDQLCVFSMASEARESPANNPGLSTNRDEATKGYIMQQTMFRIKDPKASLDFYSRVLGMSLLKRLDFSEMKFSLYFLGYEDTTTAPTDPTERTVWTFGQPATIELTHNWGTESDPEFKGYHNGNSEPRGFGHIGVTVDDVHKACERFEELGVEFAKKPNDGKMKNIAFIKDPDGYWIEIFDLKTIGTTTVNAA

SEQ ID NO: 78311 - DNA, 699 bp, Arabidopsis thaliana
  CDS (1)..(699)
atggctgaggcttctgatttgttggaatggcctaagaaggataaccgtcgttttctccatgttgtctaccgcgttggtgatcttgatcgcaccattgagttttacactgaggtctttggtatgaagctgttgaggaaaagagatatccctgaggagaagtattctaatgcttttcttggttttggacctgaaacatctaactttgttgtggagctcacatataactatggtgttagctcatatgatattggaactggctttgggcattttgccatttcaactcaagatgtttccaaactggttgagaacgtccgtgccaagggtggaaatgtgactagggaacctggtccagtcaaaggtggaggcagtgtcattgcgtttgtgaaggaccctgatggctacacttttgagctcatccagagaggtccaactcctgaacctttctgccaagtcatgcttcgtgttggtgatctcgaccgtgccatcaaattctatgaaaaggccctcgggatgagactcttgagaaagattgagagacctgagtacaagtacaccataggcatgatggggtatgctgaagaatacgagtcgatagttttggagctgacctataactacgacgtgactgagtacacaaagggcaatgcatatgcacaggcacagatgatgtgtacaaaagcggtgaagttattaagatag

SEQ ID NO: 78312 - protein, 232 aa, Arabidopsis thaliana
MAEASDLLEWPKKDNRRFLHVVYRVGDLDRTIEFYTEVFGMKLLRKRDIPEEKYSNAFLGFGPETSNFVVELTYNYGVSSYDIGTGFGHFAISTQDVSKLVENVRAKGGNVTREPGPVKGGGSVIAFVKDPDGYTFELIQRGPTPEPFCQVMLRVGDLDRAIKFYEKALGMRLLRKIERPEYKYTIGMMGYAEEYESIVLELTYNYDVTEYTKGNAYAQAQMMCTKAVKLLR

SEQ ID NO: 78313 - DNA, 855 bp, Bombyx mori
  CDS (1)..(855)
atggttagcggtcgtgctcttcatttcgtatttaaagtcgcagataggactttaacagcaaaattttatagggaaatcctcggaatgaaggttctccgccatgaagagtttagtgaaggatgtgaggcagcttgcaatggaccttatgcaaaccgatggagcaaaaccatggttggatatggccctgaagatacacattttgttgttgaactgacctacaactatggtgtaacgcattacgaacaaggaaatgatttccttggcatcacagtacagtcaagtgagagtctgaagagggcgcagactaacaactggccaattaaagaacataatggtctgaagtatgttgaggctcctggtggttacaaattctatattgtagacaagccccaaccagttgataaagatcccgttgtgaaagtttcattggcgagttcaaacttagcaaaatcaatagcctattggaacggtctactgactttgaagctctatgaaaaaactgacaaaactgctttactaggctatagtgatgatcaagctaaattggaacttgttgatattggtggaccaataaaccgcgcaaaggcatacgggcgcatagcattctcgtgtccattcgacgagcggccggtcatagacaagaagatccaagacgcaaacgagactatcctcactcccctcatatcgttggatacgcccggcaaggctaccgtgagggtcatcatcttagctgaccccgacggtcatgagatatgcttcgttgacgatgagagcttcagacaactgtcacaagtagacccctccagcgacgccgaactcgataagttcataaaatcagacaagtccagagcataa

SEQ ID NO: 78314 - protein, 284 aa, Bombyx mori
MVSGRALHFVFKVADRTLTAKFYREILGMKVLRHEEFSEGCEAACNGPYANRWSKTMVGYGPEDTHFVVELTYNYGVTHYEQGNDFLGITVQSSESLKRAQTNNWPIKEHNGLKYVEAPGGYKFYIVDKPQPVDKDPVVKVSLASSNLAKSIAYWNGLLTLKLYEKTDKTALLGYSDDQAKLELVDIGGPINRAKAYGRIAFSCPFDERPVIDKKIQDANETILTPLISLDTPGKATVRVIILADPDGHEICFVDDESFRQLSQVDPSSDAELDKFIKSDKSRA

SEQ ID NO: 78315 - DNA, 570 bp, Oryza sativa (japonica cultivar-group)
  CDS (1)..(570)
atgtcgacgtcgtcggggccgaaggaggcgccggcaaacaacccgggcctccaggcgccgtcggagaaggaccccgcgaccaagggctacttcatgcagcagacgatgttccgtgtaaaggatccaaaagtgagtctcgacttctactcgcgtgtgatgggcatgtcgttgctgaaaagattggattttcctgagatgaaattcagcttgtattttcttggttatgaggatgtggaatcggcccctactgatcctgtaaagaggactgtttggacttttgggcaaagggctacacttgagctcacacacaactggggcacagaaaatgatcctgaattcaaaggttaccataatgggaactcagaccctcgtggttttggtcatataggagtaactgttcacgatgtctataaggcgtgtgagcggttcgaacgtcttggggtagagtttgttaaaaagccagatgatggtaaaatgaagggcattgcatttatcaaagaccctgatggctactggattgaaatatttgacctgaacagaattggggcggtgactgcggaagcatcatga

SEQ ID NO: 78316 - protein, 189 aa, Oryza sativa (japonica cultivar-group)
MSTSSGPKEAPANNPGLQAPSEKDPATKGYFMQQTMFRVKDPKVSLDFYSRVMGMSLLKRLDFPEMKFSLYFLGYEDVESAPTDPVKRTVWTFGQRATLELTHNWGTENDPEFKGYHNGNSDPRGFGHIGVTVHDVYKACERFERLGVEFVKKPDDGKMKGIAFIKDPDGYWIEIFDLNRIGAVTAEAS

SEQ ID NO: 78317 - DNA, 441 bp, Mesorhizobium loti MAFF303099
  CDS (1)..(441): transl_table=11
atgcgctatctgcacaccatggtccgcgtcgccgacgtcgatgcctcgctcgatttctactgcaacaagctcgggctgaaggaggtccgccgctacgaaaacgagcagggccgtttcacgctgatcttcctcgccgcctccgaagacgagcaaagcggcatcaacgacaaggcgccgctgatcgaactcacctacaactgggatccggaagactacaagggcgggcgcaatttcggccacctcgcctatgaggtcgatgacatctacgccacctgccagcatctgatggacaatggcgtcaccatcaaccggccgccgcgcgacggcaatatggccttcatccggtcgccggacggcatctccatcgagcttctgcagaagggcccggcgaaagccaaggccgaaccctgggcttcgatggccaacaccggaagctggtag

SEQ ID NO: 78318 - protein, 146 aa, Mesorhizobium loti MAFF303099
MRYLHTMVRVADVDASLDFYCNKLGLKEVRRYENEQGRFTLIFLAASEDEQSGINDKAPLIELTYNWDPEDYKGGRNFGHLAYEVDDIYATCQHLMDNGVTINRPPRDGNMAFIRSPDGISIELLQKGPAKAKAEPWASMANTGSW

SEQ ID NO: 78319 - DNA, 852 bp, Arabidopsis thaliana
  CDS (1)..(852)
atggctgaggcttctgatttgttggaatggcctaagaaggataaccgtcgttttctccatgttgtctaccgcgttggtgatcttgatcgcaccattgagttttacactgaggtctttggtatgaagctgttgaggaaaagagatatccctgaggagaagtattctaatgcttttcttggttttggacctgaaacatctaactttgttgtggagctcacatataactatggtgttagctcatatgatattggaactggctttgggcattttgccatttcaactcaagatgtttccaaactggttgagaacgtccgtgccaagggtggaaatgtgactagggaacctggtccagtcaaaggtggaggcagtgtcattgcgtttgtgaaggaccctgatggctacacttttgagctcatccagagaggtccaactcctgaacctttctgccaagtcatgcttcgtgttggtgatctcgaccgtgccatcaaattctatgaaaaggccctcgggatgagactcttgagaaagattgagagacctgagtacaagtacaccataggcatgatggggtatgctgaagaatacgagtcgatagttttggagctgacctataactacgacgtgactgagtacacaaagggcaatgcatatgcacagattgcaataggcacagatgatgtgtacaaaagcggtgaagttattaagatagtcaaccaagagctaggaggaaagatcactagagaagccggacctcttcctggactcggcaccaagattgtctcattccttgatccagatggctggaaaacggttttggtggacaacaaagattttctcaaggaactggaatga

SEQ ID NO: 78320 - protein, 283 aa, Arabidopsis thaliana
MAEASDLLEWPKKDNRRFLHVVYRVGDLDRTIEFYTEVFGMKLLRKRDIPEEKYSNAFLGFGPETSNFVVELTYNYGVSSYDIGTGFGHFAISTQDVSKLVENVRAKGGNVTREPGPVKGGGSVIAFVKDPDGYTFELIQRGPTPEPFCQVMLRVGDLDRAIKFYEKALGMRLLRKIERPEYKYTIGMMGYAEEYESIVLELTYNYDVTEYTKGNAYAQIAIGTDDVYKSGEVIKIVNQELGGKITREAGPLPGLGTKIVSFLDPDGWKTVLVDNKDFLKELE

SEQ ID NO: 78321 - DNA, 408 bp, Pasteurella multocida subsp. multocida str. Pm70
  CDS (1)..(408): transl_table=11
atgcgaattttacatacaatgttgcgcgtaacaaatttagagcgttcaatccagttttaccaacaggttttaggtatgcgtttactgcgtacaagtgacaatccggagtataaatatacgttggcatttcttggttatgacgatgaagagaatgcctccgtattagaattaacctataactggggcgtgactgaatacgaactgggtacggcttatggtcatattgcgattggcgttgaggatatttatgcaacctgtgatgcggtacgacaagcaggcggtaaaatcacccgtgagcccggtccagtgaaaggtggaaaaacagtgattgcgtttgtcgaagatcctgatggttacaaaatcgaatttattgaaaataaacatgcgcaatctggcttaggtaattaa

SEQ ID NO: 78322 - protein, 135 aa, Pasteurella multocida subsp. multocida str. Pm70
MRILHTMLRVTNLERSIQFYQQVLGMRLLRTSDNPEYKYTLAFLGYDDEENASVLELTYNWGVTEYELGTAYGHIAIGVEDIYATCDAVRQAGGKITREPGPVKGGKTVIAFVEDPDGYKIEFIENKHAQSGLGN

SEQ ID NO: 78323 - DNA, 396 bp, Pseudomonas aeruginosa PAO1
  CDS (1)..(396): transl_table=11
atgcgaatcctgcacagcatgctccgcgtggccgatctcgaggccgcgctggagttctacacccgcgccctggacatgcgcctgctgcggcgccgggactatcccgaaggccgcttcaccctggccttcgtcggctaccaggacgagcgcgcggccgctgccctggagttgacccacaactgggaccgggacggctacacccagggcgacggctacggccacctggccatcgaggtcgaggatgccgccgtcacctgcgcccgggccagggcgctgggctatcgggtcacccgcgaggccgggctgatgcagcacggacgcagcgtgatcgccttcctcgaagacccggacggctacaaggtggaactgatccagaagggcacccagttcgattga

SEQ ID NO: 78324 - protein, 131 aa, Pseudomonas aeruginosa PAO1
MRILHSMLRVADLEAALEFYTRALDMRLLRRRDYPEGRFTLAFVGYQDERAAAALELTHNWDRDGYTQGDGYGHLAIEVEDAAVTCARARALGYRVTREAGLMQHGRSVIAFLEDPDGYKVELIQKGTQFD

SEQ ID NO: 78325 - DNA, 387 bp, Pseudomonas aeruginosa PAO1
  CDS (1)..(387): transl_table=11
atgcgcattctccataccatgatccgggtcggaaacatcgatcgctcgatcgatttctatacccgggtgctaggcatgaccctgctcaggaagaacgactatcccgacggccagttcaccctcgccttcgtcggctatggcaacgaagcggattccgcggtgatcgagcttacccacaactggggcgtggatgcctacgagatcggcaccggctacggccatatcgccatcgaggtcgacgacgcctaccaggcctgcgacgacatccgctacaacggcggccaggtcacccgcgaagccgggccgatgaagcacggtaccaccgtgatcgccttcgtgaccgacccggacggctacaagatcgaactgatccagaagtcttcctga

SEQ ID NO: 78326 - protein, 128 aa, Pseudomonas aeruginosa PAO1
MRILHTMIRVGNIDRSIDFYTRVLGMTLLRKNDYPDGQFTLAFVGYGNEADSAVIELTHNWGVDAYEIGTGYGHIAIEVDDAYQACDDIRYNGGQVTREAGPMKHGTTVIAFVTDPDGYKIELIQKSS

SEQ ID NO: 78327 - DNA, 531 bp, Pseudomonas aeruginosa PAO1
  CDS (1)..(531): transl_table=11
atgagtttcaacaccgaagtacagcccggcatctgcatggagccggacgccatcacccaggaatacgtgttcaaccacaccatgttgcgggtcaaggatccgaagcgctcgctcgacttctactcgcgggtgctcggcatgcgcctgctgcgtcgcctggatttcgaggaaggccgcttctccctgtatttcctcgccatgacccgtggcgaagaagtgcctgatgcggttgacgagcgccagcgatataccttcggacgccagtcggtcctcgagctgacccacaactggggcagcgagagcgacgacagccagtaccacaacggcaaccaggacccgcgcgggttcggccacatctgcttctcggtgcccgacctggtggcggcctgcgagcgtttcgagacgctcggggtgaacttcgtcaagccgctggaccgaggcatgaagaacgtggccttcatcagcgatcccgacggctactgggtggaaatcgtccaggccagcctgaacggcgagatgggacgcggctga

SEQ ID NO: 78328 - protein, 176 aa, Pseudomonas aeruginosa PAO1
MSFNTEVQPGICMEPDAITQEYVFNHTMLRVKDPKRSLDFYSRVLGMRLLRRLDFEEGRFSLYFLAMTRGEEVPDAVDERQRYTFGRQSVLELTHNWGSESDDSQYHNGNQDPRGFGHICFSVPDLVAACERFETLGVNFVKPLDRGMKNVAFISDPDGYWVEIVQASLNGEMGRG

SEQ ID NO: 78329 - DNA, 528 bp, Xylella fastidiosa 9a5c
  CDS (1)..(528): transl_table=11
atgcacccccaaaacttccaacatcagctcaaaaccatgccacaaccgccggacgaaacccgggacttcgtgttcaatcacaccatgctgcgggtcaaagacatcaacgcctctctggatttctacgctcgtatcctcggcttccgcctgatcgaccaacgggacttccccgaagcacaattcagcctgtacttcctcgcactgttaccccagacggtacacatctcagacaatgacgccgaacgccgcctgtggatgtccggaatccccggagtccttgaattgacccacaactacggaaccgaaacccaagaaggacagatctaccacgacggcaacaacgaaccgcgcggctttggccacatctgcatctccgtgcccgatctgtacagcgcctgcgcccgttttgacacactccaagtgccttatcaaaaacgcctaaccgatggccgcatgaaaaacatcgccttcatcaaagatccagacggctactgggtagaaatcatctccaacacaccgctgccataa

SEQ ID NO: 78330 - protein, 175 aa, Xylella fastidiosa 9a5c
MHPQNFQHQLKTMPQPPDETRDFVFNHTMLRVKDINASLDFYARILGFRLIDQRDFPEAQFSLYFLALLPQTVHISDNDAERRLWMSGIPGVLELTHNYGTETQEGQIYHDGNNEPRGFGHICISVPDLYSACARFDTLQVPYQKRLTDGRMKNIAFIKDPDGYWVEIISNTPLP

SEQ ID NO: 78331 - DNA, 432 bp, Streptococcus pneumoniae R6
  CDS (1)..(432): transl_table=11
atgagactggaacaggattgtccagtctttttaaaaataaaggagaaagatatggcttcaaaaatgctacacacttgcttacgagtagaaaatcttgaaaaatcaatcgcattttatcaagatgcttttggttttaaagaattgcgtcgcagagattttccagaccatgccttcacgattgtctatctaggtcttgagggtgatgactatgagttggagttgacttataactacgatcacggtccgtatgtggttggtgatgggtttgcccatatcgccctcagtacacctgatcttgaggcacttcatcaagaacacagtgcaaaaggctatgaagtgactgagccaaatggtctaccaggaactacaccaaactattactttgtcaaagaccctgatggatataaggtcgaagtcattcgtgaaaaataa

SEQ ID NO: 78332 - protein, 143 aa, Streptococcus pneumoniae R6
MRLEQDCPVFLKIKEKDMASKMLHTCLRVENLEKSIAFYQDAFGFKELRRRDFPDHAFTIVYLGLEGDDYELELTYNYDHGPYVVGDGFAHIALSTPDLEALHQEHSAKGYEVTEPNGLPGTTPNYYFVKDPDGYKVEVIREK

SEQ ID NO: 78333 - DNA, 441 bp, Sinorhizobium meliloti 1021
  CDS (1)..(441): transl_table=11
atgcggtatctgcatacaatggttcgcgtcaaagacctcgaccaggctcttcatttctattgcaagcttttcgggctccaagagattcgccggtacgagaacgagaaaggccgcttcacgctcgtctttctcgctgcccccggcgatgtcgaccgcgccaaggatgaagccgcgccctgcctggaactcacctataattgggatcccgaggaatatgccggcgggcggaacttcggccacctcgcctacgaggtcgacgatatctacgcattctgcaagcatctgatggacaacggcgtgacgatcaatcgtccgccgcgcgacggccacatggccttcgtccgctcgccggacggcatctcgatcgagatcctgcagaaaggcgaacacctggcggcccaggaaccctgggcttcgatggccaatacgggggtctggtaa

SEQ ID NO: 78334 - protein, 146 aa, Sinorhizobium meliloti 1021
MRYLHTMVRVKDLDQALHFYCKLFGLQEIRRYENEKGRFTLVFLAAPGDVDRAKDEAAPCLELTYNWDPEEYAGGRNFGHLAYEVDDIYAFCKHLMDNGVTINRPPRDGHMAFVRSPDGISIEILQKGEHLAAQEPWASMANTGVW

SEQ ID NO: 78335 - DNA, 495 bp, Caulobacter crescentus CB15
  CDS (1)..(495): transl_table=11
ttgccccacgcggggctgtgcctatatcggcgtgaggcaccttccaggagatccgccatgcgttacctgcacacgatgatccgcgtccgcgatctcgacgcctcgctgcggttctattgcaaggggcttgggctgcaggagatgtatcgcacggagaacgagaagggccgcttcaccttggtttttctcgccgctccggaggacgtggagctcgccaaggcgcgtaaggctcccctggttgaactcacctacaactgggacgacgaggaatacggcggcggtcgtaattttggccacctggcctatcgggtcgacgacatctacgagacctgccagcggctgatggacatgggggtgaccatcaaccgtcccccgcgcgatggtcacatggcgtttgtgcgctcacccgacaatatctcgattgagcttctgcaggacggcgacctgccgccagccgaaccgtgggtttcgatgccgaacgtcggggcctggtag

SEQ ID NO: 78336 - protein, 164 aa, Caulobacter crescentus CB15
MPHAGLCLYRREAPSRRSAMRYLHTMIRVRDLDASLRFYCKGLGLQEMYRTENEKGRFTLVFLAAPEDVELAKARKAPLVELTYNWDDEEYGGGRNFGHLAYRVDDIYETCQRLMDMGVTINRPPRDGHMAFVRSPDNISIELLQDGDLPPAEPWVSMPNVGAW

SEQ ID NO: 78337 - DNA, 390 bp, Listeria innocua Clip11262
  CDS (1)..(390): transl_table=11
atgactgcaaaaatgttacatacgtgtatccgcgtaaaaaatctaactgaatccattgctttttatgaaaaagcattagggttaaaagaagttcgtcgtaaagatttccctgatttcgaatttactttagtttatatggcgtttgaagaaggcggttttgaactagaattaacttacaactatgatcaaaaagaagcttacgatttaggaaacggctatggtcatttagctgttggtgttcctgatgtacgtgctttacttgaggaacataaagaagctggctacactgtcacagacttaaaaggacttccaggtgaagatccattctattacttcttaacagatccagatggttataaaacagaaatcattcaagatggcgctttataa

SEQ ID NO: 78338 - protein, 129 aa, Listeria innocua Clip11262
MTAKMLHTCIRVKNLTESIAFYEKALGLKEVRRKDFPDFEFTLVYMAFEEGGFELELTYNYDQKEAYDLGNGYGHLAVGVPDVRALLEEHKEAGYTVTDLKGLPGEDPFYYFLTDPDGYKTEIIQDGAL

SEQ ID NO: 78339 - DNA, 438 bp, Nostoc sp. PCC 7120
  CDS (1)..(438): transl_table=11
atgcgtttactacatacaatgctacgggtgggtaacctggaagagtctttgaaattctactgtgatgtcctgggcatgaagttactacggaaaaaggattacccaggaggagaatttaccctagcttttattggctacggcgatgagagtgataacacagttatagaactaacctacaattggggagtagagaagtacgaattaggtaatgcttacggtcatattgctcttggtgtagatgatatttatgccacctgtgagtctattaaaactcagggcggtaaggtggttagggaaccagggccaatgaagcatggctcgactgtgattgctttcgtcgaagacccagatggatacaagatagaactaatccagttgagtaatcaaggcgcgacagtgaaacaagattcatcagaacagctagtgaaacagggttag

SEQ ID NO: 78340 - protein, 145 aa, Nostoc sp. PCC 7120
MRLLHTMLRVGNLEESLKFYCDVLGMKLLRKKDYPGGEFTLAFIGYGDESDNTVIELTYNWGVEKYELGNAYGHIALGVDDIYATCESIKTQGGKVVREPGPMKHGSTVIAFVEDPDGYKIELIQLSNQGATVKQDSSEQLVKQG

SEQ ID NO: 78341 - DNA, 408 bp, Ralstonia solanacearum GMI1000
  CDS (1)..(408): transl_table=11
atgcgaatgctccacaccatgctgcgcgtcggcgacctgcaacgttccatcgacttctacaccaaggtgctcggcatgcacctgctgcgcaccagcgacaaccccgaatacaagtactcgctggccttcgtcggctacggcccggaaaccggcaacacggtgatcgagttgacctacaactacggcgtcagcgcatacgagctgggcacggcattcggccatctcgccatcgaggtcgataatgcggcgcaggcgtgcgagcagatccgcgcggcgggcggcaaggtcacgcgcgaggccggcccggtcaagggcggcagcaccatcatcgcgttcgtggaagacccggacggctacaagatcgaactgatccaggcccgctcgatgcccgatggcaaccgccactga

SEQ ID NO: 78342 - protein, 135 aa, Ralstonia solanacearum GMI1000
MRMLHTMLRVGDLQRSIDFYTKVLGMHLLRTSDNPEYKYSLAFVGYGPETGNTVIELTYNYGVSAYELGTAFGHLAIEVDNAAQACEQIRAAGGKVTREAGPVKGGSTIIAFVEDPDGYKIELIQARSMPDGNRH

SEQ ID NO: 78343 - DNA, 456 bp, Agrobacterium tumefaciens str. C58
  CDS (1)..(456): transl_table=11
atggagaggaataaaatgcggtatctgcacacgatggttcgcgtcaaagaccttggcgaatcacttaaattctacgtcgaccttctgggtctcacggaaatacgccgaatcgagaatgaaaaaggtcggtttacgctggtgtttctttccgcccgcgacgacattgctgcggcgaaggaaaacaaggcgccgtgcctggagctgacctataactgggataccgaggattatactggcggccgcaatttcggccacctcgcttatgaagtcgacaatatctacgacttctgcgcgcgtcttcagcagagcggcatcgtcatcaaccggccgccgcgcgacgggcacatggcttttgtgcgctcacctgatggtatttcattcgaaattttgcagaaaggcgaaagcctcgcaccagccgaaccgtggatatctatgcagaataccggttcctggtag

SEQ ID NO: 78344 - protein, 151 aa, Agrobacterium tumefaciens str. C58
MERNKMRYLHTMVRVKDLGESLKFYVDLLGLTEIRRIENEKGRFTLVFLSARDDIAAAKENKAPCLELTYNWDTEDYTGGRNFGHLAYEVDNIYDFCARLQQSGIVINRPPRDGHMAFVRSPDGISFEILQKGESLAPAEPWISMQNTGSW

SEQ ID NO: 78345 - DNA, 396 bp, Agrobacterium tumefaciens str. C58
  CDS (1)..(396): transl_table=11
atggccaagctgatccactcgatggtccgggtgctggacgaaaagcgttcggtggaattttacaaacaggctttcgggcttgagatcgcggaacgcgccgagttcgagaatttcacgctgatctatctcagcaatgccgagggcgatttcgagctggaactgaccgtcaaccgggctcgcgaagtgccctatgcgctgggcgacggttatggccatctcgccgtcagtgttgccgacgtggacgccgaacatcagcgtttcatcgggatcgggcttacccccggcaagatgatcgaagccgatcataagggccagcctttcgcaaaatactttttcatctgcgatccggatggttacaagatcgaagtgctgcagcgcggcgaccggttcaaataa

SEQ ID NO: 78346 - protein, 131 aa, Agrobacterium tumefaciens str. C58
MAKLIHSMVRVLDEKRSVEFYKQAFGLEIAERAEFENFTLIYLSNAEGDFELELTVNRAREVPYALGDGYGHLAVSVADVDAEHQRFIGIGLTPGKMIEADHKGQPFAKYFFICDPDGYKIEVLQRGDRFK

SEQ ID NO: 78347 - DNA, 522 bp, Brucella melitensis 16M
  CDS (1)..(522): transl_table=11
gtgagcgaaccaatcggttctccgtgcgttttcaagcagcgggcgcacgggcaacaaaactcggcaaccaaggaaaagactatgcgctatctgcacacgatggtccgcatccgcgacatcgacgaatctctcgatttttatgtaaacaagcttggccttgaagaaatccggcgcatcgaaaacgaaaagggccgcttcacgctgatcttcctcgcagccccctccgatacagatcgcgcccgggcggagcgcgcgcctgaactggaactgacctataactgggacccggaaacctataccggcgggcgcaatttcggccacctcgcctatatggtggacgatatctatgccacctgcgagaagctgaaaagcgccggcgtcaccatcaatcgcccgccgcgcgacggccatatggccttcatcaaatcccctgacggcatatccatcgagctgatccagaagggcgagcgccttgctccgcaggagccttgggcatctgccgaaaacatcggcacctggtga

SEQ ID NO: 78348 - protein, 173 aa, Brucella melitensis 16M
MSEPIGSPCVFKQRAHGQQNSATKEKTMRYLHTMVRIRDIDESLDFYVNKLGLEEIRRIENEKGRFTLIFLAAPSDTDRARAERAPELELTYNWDPETYTGGRNFGHLAYMVDDIYATCEKLKSAGVTINRPPRDGHMAFIKSPDGISIELIQKGERLAPQEPWASAENIGTW

SEQ ID NO: 78349 - DNA, 396 bp, Brucella melitensis 16M
  CDS (1)..(396): transl_table=11
atggccaaagccattcacacgatgatccgcgtgctcgacgcggacaaatccgttgccttctacaatcaggcattcggcctcgatattgccgagcggatcgacttcgagacattcacgctcatctatctgcgcaacgaagaggccgatttcgaggtcgagctgacggtcaataaggggcgcaccgagccttacaatctgggtgacggttacggccatctcgccgtggcggtggacgacgtcgacgccgagcatgcccgcttcagggaactgggcttcaaggccggcaatctggtggatttcaggaacaacggcgctctcctcgcccgcttcttcttcgtggaagacccggacggctacaagatcgaagtgctccagcgcgcggggaggtatgtttag

SEQ ID NO: 78350 - protein, 131 aa, Brucella melitensis 16M
MAKAIHTMIRVLDADKSVAFYNQAFGLDIAERIDFETFTLIYLRNEEADFEVELTVNKGRTEPYNLGDGYGHLAVAVDDVDAEHARFRELGFKAGNLVDFRNNGALLARFFFVEDPDGYKIEVLQRAGRYV

SEQ ID NO: 78351 - DNA, 381 bp, Clostridium perfringens str. 13
  CDS (1)..(381): transl_table=11
atggcaagcaaaatgttacacacatgcataagggtaaaagatttagataaatctttaaagttttataaggaagctctaggacttgttgaaacaagaagaagggattatccagaatataaattctctttagtttatctttcagataaagaagatggatatgaagtagaattaacttataactatgatcaagaaaagccatataatttaggaaatggctttagtcatatagctgtcggggtagaagatatagaagctgaaagagaaagacatatttctttaggatatgaggttacacctatgaaaggtctttcagatggagctgcaacatattattttgtaacagatccagatggatacaaggtagaggtaattaaactttag

SEQ ID NO: 78352 - protein, 126 aa, Clostridium perfringens str. 13
MASKMLHTCIRVKDLDKSLKFYKEALGLVETRRRDYPEYKFSLVYLSDKEDGYEVELTYNYDQEKPYNLGNGFSHIAVGVEDIEAERERHISLGYEVTPMKGLSDGAATYYFVTDPDGYKVEVIKL

SEQ ID NO: 78353 - DNA, 372 bp, Fusobacterium nucleatum subsp. nucleatum ATCC 25586
  CDS (1)..(372): transl_table=11
atgaaatttcattttttacatgaaaattttaatgttttagacttagaaaaaagtataaaattttatgacgaagctcttgggctaaaagttgtaagagaaaagtttgcagaagatggaagctataaaatagtctatttaggtgatggtataactcattttcaattagaattgacttggcttgctgataggacagaaaaatatgatttaggtgatgaagaatttcatttagcttttgaagttgacaactatgatgaagcatttaaaaagcatacagaaatgggttgtgttgtttttgtaaatgaaaaaatgggaatatattttataactgatcctgatggatattggttagaaattttaccacctaagaagtaa

SEQ ID NO: 78354 - protein, 123 aa, Fusobacterium nucleatum subsp. nucleatum ATCC 25586
MKFHFLHENFNVLDLEKSIKFYDEALGLKVVREKFAEDGSYKIVYLGDGITHFQLELTWLADRTEKYDLGDEEFHLAFEVDNYDEAFKKHTEMGCVVFVNEKMGIYFITDPDGYWLEILPPKK

SEQ ID NO: 78355 - DNA, 867 bp, Drosophila melanogaster
  CDS (1)..(867)
atgtcggccatatcgggacgcgccctgcactatgtgttcaaaatcggagatcgggcgaaaaacgccttcttctttcggcaaatcttgggaatgacggtgctgcggcatgaggagttcaaggagggatgcgacgcagcttgcaacgggccctatgacaatcggtggagcaaaacaatggtgggttatggacccgaaagttcgcatttcgtcatcgaactcacgtataactatggagtgagcagctacgaaatgggcaatgattttgggggcgtgaccatacactccaaggatatcctttcccgcgccgccgagcactcgtatcctgtgacacaggtgtctggaaaagccggtagtctgctgacctcgcccgatggctacaagttctatgtgatcgatcaggcctctgccagctctgatcctgtccaatcggtggagcttaatgtgagcaatcttcaaaactcgcgcaaatactggcacgatttgctgcaactgaaagttctcgaggagaacgaagcaagcgtgcgtttgagttacggtgaacagcaggcttcactggagatcacccagatctcagagccaattaatagagctaaggcctatggacgaatcgcctttgccattccggcggcccagcagccacctctccaagaagcggttaaagcagctggcggggccattctaacacctctgattaccctggatacgccaggaaaggccaccgttacggtggtaattctcggtgaccccgatggtcatgagatctgctttgtcgacgaggagggcttcggccagctatctcaggtggagtccgatggcgataagcgactggatcgaaacatcgaaaaggatcccttccaaccgaaatga

SEQ ID NO: 78356 - protein, 288 aa, Drosophila melanogaster
MSAISGRALHYVFKIGDRAKNAFFFRQILGMTVLRHEEFKEGCDAACNGPYDNRWSKTMVGYGPESSHFVIELTYNYGVSSYEMGNDFGGVTIHSKDILSRAAEHSYPVTQVSGKAGSLLTSPDGYKFYVIDQASASSDPVQSVELNVSNLQNSRKYWHDLLQLKVLEENEASVRLSYGEQQASLEITQISEPINRAKAYGRIAFAIPAAQQPPLQEAVKAAGGAILTPLITLDTPGKATVTVVILGDPDGHEICFVDEEGFGQLSQVESDGDKRLDRNIEKDPFQPK

SEQ ID NO: 78357 - DNA, 531 bp, Drosophila melanogaster
  CDS (1)..(531)
atgggcgacgtgacaggactgagcaatgcccaggcggacgagctgtgccagaagccggattcgtccaccaaggacttcctcttccagcaaaccatgtaccgcatcaaggatccacgcaagtcgctgcctttctacacgggcgtcctcgggatgaccttgctggtgaaactggacttccccgaggccaagttctcgctgtactttctggggtacgagaacgccaccgatgtgcctaaggatcccaagcagcgacgcagctgggcgctgagccgcaaggccaccattgagttgacccacaactggggcactgagagggatccggatcagaattaccacaccggcaacaccgatccacgtggtttcggacacattggaatcatggtgcccgacgtgtacgccgcctgccagcgcttccaggagcttggcgtggacttcgtgaagaagcccgacgacggccgcatgaagggactggccttcatcaaggaccccgacggctactggatcgagatcttcaatgcacactccgtctag

SEQ ID NO: 78358 - protein, 176 aa, Drosophila melanogaster
MGDVTGLSNAQADELCQKPDSSTKDFLFQQTMYRIKDPRKSLPFYTGVLGMTLLVKLDFPEAKFSLYFLGYENATDVPKDPKQRRSWALSRKATIELTHNWGTERDPDQNYHTGNTDPRGFGHIGIMVPDVYAACQRFQELGVDFVKKPDDGRMKGLAFIKDPDGYWIEIFNAHSV

SEQ ID NO: 78359 - DNA, 402 bp, Thermoanaerobacter tengcongensis MB4
  CDS (1)..(402): transl_table=11
gtgattaaaaaggtagaccacatagggatagcagtaaaaagcatagaagaagcgagaaagttttatgaagaagtactgggcttgaaagtgacagggatagaagaagttaaggagcagaaggtaaagacggcctttattccagttggggacagcgagatagagcttttagagtccacatcagaggatgggcctgtcgctaaatttatagaaaaaagaggggaaggcatacaccacatagcacttcaggtagatgacattgaaaaggcgttagaggagttgaagggaaaaggagtaaagcttatagatgaagtgccaaggtatggggcaggaggggcgaaaattgcctttgtccacccaaagaacgcaaatggagtattgttagagctttgcgagagagattaa

SEQ ID NO: 78360 - protein, 133 aa, Thermoanaerobacter tengcongensis MB4
MIKKVDHIGIAVKSIEEARKFYEEVLGLKVTGIEEVKEQKVKTAFIPVGDSEIELLESTSEDGPVAKFIEKRGEGIHHIALQVDDIEKALEELKGKGVKLIDEVPRYGAGGAKIAFVHPKNANGVLLELCERD

SEQ ID NO: 78361 - DNA, 402 bp, Thermoanaerobacter tengcongensis MB4
  CDS (1)..(402): transl_table=11
gtgattaaaaaggtagaccatatagggatagcagtaaagagcatagaagaagcgagaaagttttatgaagaagtgctgggcttgaaagtgacagggatagaagaagttaaggagcagaaggtaaagacggcctttattccagttggggagagcgagatagagcttttagagtccacatcagaggatgggcctgtcgctaaatttatagaaaaaagaggggaaggcatacaccacatagcacttcaggtagatgacattgaaaaggcgttagaggagttgaagggaaaaggagtaaagctcatagatgaagtgccaaggtatggggcaggaggggcgaaaattgcctttgtccacccaaagagcgcaaatggagtattgttggagctttgtgagaggaagtga

SEQ ID NO: 78362 - protein, 133 aa, Thermoanaerobacter tengcongensis MB4
MIKKVDHIGIAVKSIEEARKFYEEVLGLKVTGIEEVKEQKVKTAFIPVGESEIELLESTSEDGPVAKFIEKRGEGIHHIALQVDDIEKALEELKGKGVKLIDEVPRYGAGGAKIAFVHPKSANGVLLELCERK

SEQ ID NO: 78363 - DNA, 393 bp, Methanosarcina mazei Go1
  CDS (1)..(393): transl_table=11
atgtttaaacgtattgaccatgtggagattttaccgggtaatttcgaaaaatcgatggcgttctatcagaatgtactggagtttcgtctgttatcccggaaaccagtgaataccgggccgctgaaggagaccgcctatctgcagctgggcgataccgtcattgaattaatgcatgtgaaaaaccttgctcacatgccttcatccatgactgtgggctgccgcgcgattgccctggaagtagaatcaatggaaggagcgattaattaccttcgtggtcacggcgtctatattacctggggacctgtggatctgggcacatccattcgagccgagattaaagatcccgatggtcttgccatagaattgcgggaatggaggcataaatcctggtga

SEQ ID NO: 78364 - protein, 130 aa, Methanosarcina mazei Go1
MFKRIDHVEILPGNFEKSMAFYQNVLEFRLLSRKPVNTGPLKETAYLQLGDTVIELMHVKNLAHMPSSMTVGCRAIALEVESMEGAINYLRGHGVYITWGPVDLGTSIRAEIKDPDGLAIELREWRHKSW

SEQ ID NO: 78365 - DNA, 525 bp, Xanthomonas axonopodis pv. citri str. 306
  CDS (1)..(525): transl_table=11
atgcctttgaacgatctgcaacacgtgccaggcgccaatgacgcgcccgccgagacacacggcttcgtgttcaaccacaccatgctgcgcgtcaaggatgcaacgcagtcactggatttctatacgcgtgtcctgggcttccgcctgctcgacgcacgcgattttgccgacgcaaaattcagcctgtattttctcgcgctgctacccgaaggcaccgccattcccgatgacgacgcccagcgtcggctgtggatggcaggtatccccggcgtgctcgaactcacccataaccatggcaccgaaacccaggatggcccggtctatcacgacggcaacagcgacccgcgcggcttcggccatctctgtatctcggtgccggatatccatgccgcctgcgcacgtttcgacagcctcaacgtgccataccaaaaacgcctggaagacggccgcatgaagcacctggccttcatcaaggacccggatggttactgggtggagatcatttccaatacgccgttggcgtaa

SEQ ID NO: 78366 - protein, 174 aa, Xanthomonas axonopodis pv. citri str. 306
MPLNDLQHVPGANDAPAETHGFVFNHTMLRVKDATQSLDFYTRVLGFRLLDARDFADAKFSLYFLALLPEGTAIPDDDAQRRLWMAGIPGVLELTHNHGTETQDGPVYHDGNSDPRGFGHLCISVPDIHAACARFDSLNVPYQKRLEDGRMKHLAFIKDPDGYWVEIISNTPLA

SEQ ID NO: 78367 - DNA, 447 bp, Yersinia pestis KIM
  CDS (1)..(447): transl_table=11
ttgccagagcgtcgggcaaaatgtaaacagagggaaattatgcgcttactccataccatgctccgcgtcggtgacctgcaacgttctatcgatttctacaccaaggtattagggatgcgtttactgcgtaccagcgaaaatactgaatataaatactcgttggcattcgtaggctatagcgatgaaagtaaaggttcggtgattgaactgacgtataactggggcgttgaccagtacgatatgggcaccgcattcggccatctggctctgggtgttgatgatgtcgccgcaacgtgtgatcaaattcgccaggcaggcggtaaagtcacccgcgaagctggcccggtaaaaggcggtaataccattattgcttttgttgaagatccagatggctacaaaattgagttaattgagaataagagcgcgggtgactgcctcggaaactga

SEQ ID NO: 78368 - protein, 148 aa, Yersinia pestis KIM
MPERRAKCKQREIMRLLHTMLRVGDLQRSIDFYTKVLGMRLLRTSENTEYKYSLAFVGYSDESKGSVIELTYNWGVDQYDMGTAFGHLALGVDDVAATCDQIRQAGGKVTREAGPVKGGNTIIAFVEDPDGYKIELIENKSAGDCLGN

SEQ ID NO: 78369 - DNA, 396 bp, Brucella suis 1330
  CDS (1)..(396): transl_table=11
atggccaaagccattcacacgatgatccgcgtgctcgacgcggacaaatccgttgccttctacaatcaggcattcggcctcgatattgccgagcggatcgacttcgagacattcacgctcatctatctgcgcaacgaagaggccgatttcgaggtcgagctgacggtcaataaggggcgcaccgagccttacaatctgggtgacggttacggccatctcgccgtggcggtggacgacgtcgacgccgagcatgcccgcttcagggaactgggcttcaaggtcggcaatctggtggatttcaggaacaacggcgctctcctcgcccgcttcttcttcgtggaagacccggacggctacaagatcgaagtgctccagcgcgcggggaggtatgtttag

SEQ ID NO: 78370 - protein, 131 aa, Brucella suis 1330
MAKAIHTMIRVLDADKSVAFYNQAFGLDIAERIDFETFTLIYLRNEEADFEVELTVNKGRTEPYNLGDGYGHLAVAVDDVDAEHARFRELGFKVGNLVDFRNNGALLARFFFVEDPDGYKIEVLQRAGRYV

SEQ ID NO: 78371 - DNA, 411 bp, Shewanella oneidensis MR-1
  CDS (1)..(411): transl_table=11
atgtcacaactgttacacactatgatccgcgttggtaacttagagcgcagtattgctttttacactcaagtgcttggcatgaagctgctacgcacctcagaaaatccagaatacaaatattctttagccttcgtgggctacggtgaagagtcaacaggccaagccgtaattgaattgacctataactggggcacagaaaaatacgatctaggcacaggctttggccatattgccattggtgatgatgatatttatgctcgctgtgaagccattgctgccgcaggcggcaaagtgactcgcgccccaggccctgtcgcgggtggcaccacagaaatcgcctttgttgaagatcctgacggctataagattgaatttattcaaatgaagtcagcgacgcagggtttaggctaa

SEQ ID NO: 78372 - protein, 136 aa, Shewanella oneidensis MR-1
MSQLLHTMIRVGNLERSIAFYTQVLGMKLLRTSENPEYKYSLAFVGYGEESTGQAVIELTYNWGTEKYDLGTGFGHIAIGDDDIYARCEAIAAAGGKVTRAPGPVAGGTTEIAFVEDPDGYKIEFIQMKSATQGLG

SEQ ID NO: 78373 - DNA, 393 bp, Streptococcus mutans UA159
  CDS (1)..(393): transl_table=11
atgaaatttttacatacctgtatccgtgttaaggacttagacgcttcgcttaaattttatcaagaggcactagacttcaaagaagttcgccgcaatgattttcctgaatacaaatttactctggtttatctgcaactagaagacgaccccgactatgagttagaattaacttacaattacgatcacgaagcttatgaccttggcaatggctatggtcatatcgctgtcggtgttgatgaccttgaagcgactcatcaagcgcatcaaaaagccggctatactgtgacagacctttcaggtctgcccggtaagccaaagatgtactacttcatcacagaccccgatggctataagatcgaagttatccgtctcaaacaatttcaggaaaaataa

SEQ ID NO: 78374 - protein, 130 aa, Streptococcus mutans UA159
MKFLHTCIRVKDLDASLKFYQEALDFKEVRRNDFPEYKFTLVYLQLEDDPDYELELTYNYDHEAYDLGNGYGHIAVGVDDLEATHQAHQKAGYTVTDLSGLPGKPKMYYFITDPDGYKIEVIRLKQFQEK

SEQ ID NO: 78375 - DNA, 528 bp, Pseudomonas putida KT2440
  CDS (1)..(528): transl_table=11
atgagcctgcacgatctgcaaaccctgcctggcgtcaccgcgcaacctgacgccgccaccgcccagttcgtcttcaaccacaccatgctgcgggtcaaggacatcgagaagtcgctggacttctacacccgcgtgctgggcttccgcctggtggacaagcgtgacttccctgaagccgctttcagcctgtacttcctggccctggtcgaccctgcccagatccccgctgatgacaccgcccgccaccagtggatgaagtcgatccctggcgtgctggagctgacccacaaccatggcaccgaaaacgatgccgattttgcctaccacaatggcaacaccgacccacgcggctttggccacatctgcatttcggtacccgacgtccgcgccgcttgcgcgcgcttcgaggaactggaagtgccgttccagaaacgcctgcaggacggccgcatgaaccacctggccttcgtcaaggacccggacggttattgggtcgaagtgatccagccaaccgagctcgaaggctaa

SEQ ID NO: 78376 - protein, 175 aa, Pseudomonas putida KT2440
MSLHDLQTLPGVTAQPDAATAQFVFNHTMLRVKDIEKSLDFYTRVLGFRLVDKRDFPEAAFSLYFLALVDPAQIPADDTARHQWMKSIPGVLELTHNHGTENDADFAYHNGNTDPRGFGHICISVPDVRAACARFEELEVPFQKRLQDGRMNHLAFVKDPDGYWVEVIQPTELEG

SEQ ID NO: 78377 - DNA, 390 bp, Vibrio vulnificus CMCP6
  CDS (1)..(390): transl_table=11
atgttgcgtgtgggtaatttagataaatcgattcagttctacaccgaagttatgggcatgcaattgcttcgtaccaatgaaaacaaagagtatgaatatactttggcgtttctaggttacggtgacgaatcacaaggcgcagtcatcgagttaacttacaactggggtaaaacggagtacgaccttggcagtgcatttggtcacatcgcgattggcgtcgacgacatttatgttacttgcgatgccatcaaagccgctggcggtaatgtgactcgcgaacctggcccagtaaaaggcggcacaacccacatcgcctttgtgaaagatcctgatggctatatgattgagctgatccaaaacaaacaagcatcagcaggtttagaaggctaa

SEQ ID NO: 78378 - protein, 129 aa, Vibrio vulnificus CMCP6
MLRVGNLDKSIQFYTEVMGMQLLRTNENKEYEYTLAFLGYGDESQGAVIELTYNWGKTEYDLGSAFGHIAIGVDDIYVTCDAIKAAGGNVTREPGPVKGGTTHIAFVKDPDGYMIELIQNKQASAGLEG

SEQ ID NO: 78379 - DNA, 453 bp, Bradyrhizobium japonicum USDA 110
  CDS (1)..(453): transl_table=11
atgcgataccttcacaccatgctgcgcgtgcgcaatctcgatgtcgcgctgaagttttaccaggatgcgctgggcttgaaggaggtgcggcggatcgagaacgacaaggggcgcttcacgctggtgttcctgtgctcggcggacgatctcgaggcgctgaagaagcagccgcaaacgcgcggcgcgccgctggtcgagctcacctacaattgggacgaggagaagtacggcgaggatcgcttcttcggccatctcgcctatgaggtcgacgacatctacgccacttgcgagaagctgatgaaggccggcgtcaccatcaaccggccgccgcgcgacggcaacatggccttcgtccgttcgcccgatctgcactcgatcgagctcttgcagaagggcgagccgaaagcgccgcaggaaccgtggtcgtcgatgccgaacaccggccactggtag

SEQ ID NO: 78380 - protein, 150 aa, Bradyrhizobium japonicum USDA 110
MRYLHTMLRVRNLDVALKFYQDALGLKEVRRIENDKGRFTLVFLCSADDLEALKKQPQTRGAPLVELTYNWDEEKYGEDRFFGHLAYEVDDIYATCEKLMKAGVTINRPPRDGNMAFVRSPDLHSIELLQKGEPKAPQEPWSSMPNTGHW

SEQ ID NO: 78381 - DNA, 396 bp, Bradyrhizobium japonicum USDA 110
  CDS (1)..(396): transl_table=11
atggccaagcccgtccattccatgatccgcgtgctgaatgaggcgcgctcgctcgatttctaccagcgcgccttcggcctcgaagtcaccgaccacctgaagttctctgacttcgccctgatctatctgcgtcacccctcctcacctttcgaggtggagctgacggtgaatttcgatcgcaaggagccgtacgcgctcggcgacggctacggccatctcgccgtggtcgtcgacgatctcgatgccgagcatgcccgcttcgagcgcgagaagctcgcaccgggccccttgcgcgacttcaagcacggcggcaggacgctggcgcgcttcttcttcgtcagtgatcccgatggctacaagatcgaggtgatccagcggggcggacgtttcaactga

SEQ ID NO: 78382 - protein, 131 aa, Bradyrhizobium japonicum USDA 110
MAKPVHSMIRVLNEARSLDFYQRAFGLEVTDHLKFSDFALIYLRHPSSPFEVELTVNFDRKEPYALGDGYGHLAVVVDDLDAEHARFEREKLAPGPLRDFKHGGRTLARFFFVSDPDGYKIEVIQRGGRFN

SEQ ID NO: 78383 - DNA, 528 bp, Xylella fastidiosa Temecula1
  CDS (1)..(528): transl_table=11
atgcaccccaaaaacttccaacatcagctcaaaaccatcccacaacctccggaagaaacccgggacttcgtgttcaatcacaccatgctacgggtcaaagacatcaacgcttctctggatttctacgctcgcatactcggcttccgcctgatcgaccaacgggacttccccgaagcacaattcagcctgtacttcctcgcactgttaccccagacggtacacatctcagacaatgacaccgaacgccgcctgtggatgtccggcatccccggagtccttgaattgacccacaactacggaaccgaaacccaagaaggacagatctaccacaacggcaacagcgaaccgcgcggctttggccacatctgcatctccgtgcccgatctgtacagcgcctgcgcacgttttgacacactccaagtgccttatcaaaaacgcctaaccgatggccgtatgaaaaacatcgccttcatcaaagatccagacggctattgggtagaaatcatctccaacacaccgctgccataa

SEQ ID NO: 78384 - protein, 175 aa, Xylella fastidiosa Temecula1
MHPKNFQHQLKTIPQPPEETRDFVFNHTMLRVKDINASLDFYARILGFRLIDQRDFPEAQFSLYFLALLPQTVHISDNDTERRLWMSGIPGVLELTHNYGTETQEGQIYHNGNSEPRGFGHICISVPDLYSACARFDTLQVPYQKRLTDGRMKNIAFIKDPDGYWVEIISNTPLP

SEQ ID NO: 78385 - DNA, 522 bp, Pseudomonas syringae pv. tomato str. DC3000
  CDS (1)..(522): transl_table=11
atgagcttgcacgaactcaacacactaccgggcgtgacagccaaccctgaagcgcctacccggcagtttgtgttcaatcacaccatgctgcgcgtcaaggacatcacccaatcgctggacttctacacccgcgtgctgggcttcagcctggttgaaaaacgtgacttcccggaagctgagttcagcctgtatttccttgccctggtggacaaggcacaaatcccggacgacgacgctgcacgcaacgagtggatgaaatcgatcccgggcattctggagctgacccacaaccacgggacagaaagcgatgcgaacgcctcgtatcacaacggcaacagcgacccgcgcggctttggtcacatctgcgtgtccgtacccgacgtaaaggtcgcctgcgagcgcttcgaagcgttgggtgtggactttcagaaacgcctgtccgatggccgcatgaacagcctggcgttcatcaaggacccggacggctactgggtagagatcatccagccgacaccactctga

SEQ ID NO: 78386 - protein, 173 aa, Pseudomonas syringae pv. tomato str. DC3000
MSLHELNTLPGVTANPEAPTRQFVFNHTMLRVKDITQSLDFYTRVLGFSLVEKRDFPEAEFSLYFLALVDKAQIPDDDAARNEWMKSIPGILELTHNHGTESDANASYHNGNSDPRGFGHICVSVPDVKVACERFEALGVDFQKRLSDGRMNSLAFIKDPDGYWVEIIQPTPL

SEQ ID NO: 78387 - DNA, 387 bp, Vibrio parahaemolyticus RIMD 2210633
  CDS (1)..(387): transl_table=11
atgatacacaccatgatccgagtacgcgatctggaccgttccctacaattttaccgcgacgcacttgagctagagatcaaagaccaatacgtttttgatggtttctccctaacctatctagcaaatgaagaaacaggctttgaattagaacttacacacaaccacgaccaaagcgaagcttatactcacggttctggttacggccaccttgccgttagcgtggacgacatcgaacaagctcacaaacgaattaaatctctaggtattgaagcaggtgatatcaaagcgtttgaccaccagcaaaaacacttagcgaccttcttttttgtcaccgatcctgacggttacaaaattgagttcctgcaacgacagggacgctacctataa

SEQ ID NO: 78388 - protein, 128 aa, Vibrio parahaemolyticus RIMD 2210633
MIHTMIRVRDLDRSLQFYRDALELEIKDQYVFDGFSLTYLANEETGFELELTHNHDQSEAYTHGSGYGHLAVSVDDIEQAHKRIKSLGIEAGDIKAFDHQQKHLATFFFVTDPDGYKIEFLQRQGRYL

SEQ ID NO: 78389 - DNA, 387 bp, Vibrio parahaemolyticus RIMD 2210633
  CDS (1)..(387): transl_table=11
atgaagtttctccacacgatgatccgtgttgttgacctagacaaatctatcgagttttatacaaaagttctgggtatgagcgttttggatcgttttgaaaaccaagaataccgttactcactggtgtttgttggtagccctgatcaaccagatggcgcgaccatcgagctaacttataactgggataccggcagttacgacttaggtaacgcattcggacacatggcgcttgggtgtgaagacatttacgcagcttgcgaaaaaatcaaagcgcttggtggcaacgtcactcgcgaacccggcccaatgaaaggaggagaaacgcacatcgccttcattaaagatcccgacggctacccaatcgaactgattcaaactaaacaataa

SEQ ID NO: 78390 - protein, 128 aa, Vibrio parahaemolyticus RIMD 2210633
MKFLHTMIRVVDLDKSIEFYTKVLGMSVLDRFENQEYRYSLVFVGSPDQPDGATIELTYNWDTGSYDLGNAFGHMALGCEDIYAACEKIKALGGNVTREPGPMKGGETHIAFIKDPDGYPIELIQTKQ

SEQ ID NO: 78391 - DNA, 375 bp, Enterococcus faecalis V583
  CDS (1)..(375): transl_table=11
atgaaaatggctcatacatgtgtgcgtgtaaaagatttagaggcatcattagatttctatcaaaaagccttcaattttgaagaaagtcgccgtcgtgattttccagaaaataaatttactttggtttatttaactttaccaggagacgactacgaactagaactaacttataattatgatcatgaagcatacgatttaggaaacggttatggtcatatcgccatcagtacagatgatttagaaggattacacgaaaaacatcaagcggctggctttactgtcactgacttaaaaggcttacctggaactgcaccatcttattactttgttgtcgacccagatggttataaaatcgaagtcattcgtgaacgttaa

SEQ ID NO: 78392 - protein, 124 aa, Enterococcus faecalis V583
MKMAHTCVRVKDLEASLDFYQKAFNFEESRRRDFPENKFTLVYLTLPGDDYELELTYNYDHEAYDLGNGYGHIAISTDDLEGLHEKHQAAGFTVTDLKGLPGTAPSYYFVVDPDGYKIEVIRER

SEQ ID NO: 78393 - DNA, 453 bp, Streptomyces avermitilis MA-4680
  CDS (1)..(453): transl_table=11
atggcactccgcaccggccacgtcggcctgaacgtcaccgacctcgaccgctcgctcgccttctaccaggtcgcgctcggcttccggctgctcggcgagagcaaggaggaggaccgcaggtacgcgttcctgggcgccgagggcgaggacgaccgcccggtcctcacgctctggcagcaggcgcaggggtcgtacgacaccacgcgcgccggcctgcaccacctcgccctggaggtggacagcgtcgaacaggtgagggcgtacgagagctccctgcgcgcctacggggtggagttcgcctacgagggagtcgtcgcccaccgcgagggctcggcgtccggcggcatcttcttccacgaccccgacggcacccgcctggagatctacgcgccgagcggcacggacggcgcgccggccccctcggcgaccgctccgacgtgcggattcttctag

SEQ ID NO: 78394 - protein, 150 aa, Streptomyces avermitilis MA-4680
MALRTGHVGLNVTDLDRSLAFYQVALGFRLLGESKEEDRRYAFLGAEGEDDRPVLTLWQQAQGSYDTTRAGLHHLALEVDSVEQVRAYESSLRAYGVEFAYEGVVAHREGSASGGIFFHDPDGTRLEIYAPSGTDGAPAPSATAPTCGFF

SEQ ID NO: 78395 - DNA, 390 bp, Nitrosomonas europaea ATCC 19718
  CDS (1)..(390): transl_table=11
atgcgtattcttcataccatgttgcgggtaggcaatctggaacgttcgatccggttttataccgatgttctgggaatgcagatcctgcgccgcaaggactacccggagggaaaattcaccctcgcttttgtcggttatcaaagtgaaacagaaggtacggtactggaactgactcataactgggaaaccgatcactacgatctcggaacaggttttggacatattgccattgaagtcgacaatgcctatgaagcctgtgagaaagtccggaatcttggtggtcgcgttacgcgcgaagcaggtccgatgaagcatggggctaccgttatcgccttcatagaggatccggatggttacaaaatagagttcattcagaagaaaacagcatag

SEQ ID NO: 78396 - protein, 129 aa, Nitrosomonas europaea ATCC 19718
MRILHTMLRVGNLERSIRFYTDVLGMQILRRKDYPEGKFTLAFVGYQSETEGTVLELTHNWETDHYDLGTGFGHIAIEVDNAYEACEKVRNLGGRVTREAGPMKHGATVIAFIEDPDGYKIEFIQKKTA

SEQ ID NO: 78397 - DNA, 393 bp, Bacillus anthracis str. Ames
  CDS (1)..(393): transl_table=11
atgccagttagaagaatcgaacacgttggacttatggttgcagacttagaaacatctattactttttatgaaaaagtagttggcttacagctcattaaacgtatggggcacccgaatccagacttaaaactcgcttttttaggtgtggaagaatcaaaagagacaatactcgaattaattgaaggctacaactcttcccttccggcagaaggaaaagtacatcacatttgctttaaagtggattcattagaggatgaaattgaaagactaaagaaacatgcagtaaccttcttactaggagaagaaatcgaaacattaccagatggaacacgttacatattcttcgcgggtcctgatggagagtggattgagttttttgaaaccaagagataa

SEQ ID NO: 78398 - protein, 130 aa, Bacillus anthracis str. Ames
MPVRRIEHVGLMVADLETSITFYEKVVGLQLIKRMGHPNPDLKLAFLGVEESKETILELIEGYNSSLPAEGKVHHICFKVDSLEDEIERLKKHAVTFLLGEEIETLPDGTRYIFFAGPDGEWIEFFETKR

SEQ ID NO: 78399 - DNA, 402 bp, Prochlorococcus marinus subsp. marinus str. CCMP1375
  CDS (1)..(402): transl_table=11
atgcaattacttcatactatgcttcgtgtaaaagatcttgaagaatcgatttgcttttacacccaaatattgggcatgaggcttttaagacaaaaagattatccttcaggtcgcttcacactagcctttgtaggatatggagcagaaagcgaacattctgtccttgaactaactcacaactgggacaaaaacaattatcaattaggagatggctttggccatattgctataggggttaagaacatatataagacctgcatgaacattagaaataatggggggagagttactagggagcccggtcctatgaagcatgggcaaacaattattgctttcatcgaagacccaaatggctacaaaattgaattgattgatatttcatctcgagagattaaagattga

SEQ ID NO: 78400 - protein, 133 aa, Prochlorococcus marinus subsp. marinus str. CCMP1375
MQLLHTMLRVKDLEESICFYTQILGMRLLRQKDYPSGRFTLAFVGYGAESEHSVLELTHNWDKNNYQLGDGFGHIAIGVKNIYKTCMNIRNNGGRVTREPGPMKHGQTIIAFIEDPNGYKIELIDISSREIKD

SEQ ID NO: 78401 - DNA, 396 bp, Bordetella bronchiseptica RB50
  CDS (1)..(396): transl_table=11
atgcgcctgttgcataccatgctgcgcgtcggcaacctggataaatccatcgatttctataccagcgtgctgggcatgcgcgaactgcgccgcaaagactacccggatggccgcttcaccctggcctttgtcggctaccaggacgaaagcgaagccgccgccatcgagctgacccacaactgggacaccgagaaatacgacctgggcaccggctacggccacatcgccatcgaagtcgacaatgcctacgaggcctgtgacaaggtcaaggaaaaaggcggcaaggtcacccgcgaggccggccccatgaagcacggcaccacggtcatcgccttcgtcgaggatccggacggctacaagatcgagttcatccagaaaaagggtcgcaacgactga

SEQ ID NO: 78402 - protein, 131 aa, Bordetella bronchiseptica RB50
MRLLHTMLRVGNLDKSIDFYTSVLGMRELRRKDYPDGRFTLAFVGYQDESEAAAIELTHNWDTEKYDLGTGYGHIAIEVDNAYEACDKVKEKGGKVTREAGPMKHGTTVIAFVEDPDGYKIEFIQKKGRND

SEQ ID NO: 78403 - DNA, 390 bp, Prochlorococcus marinus subsp. pastoris str. CCMP1986
  CDS (1)..(390): transl_table=11
atgagaattttacacaccatgttgagagttggtgatttagataagtctattgatttttatgtaaatatattagggatgaatcttataagaaggaaagattatcctcatggagaatttactttagcttttgttggctatggttctgagaaagataatgcagtaattgagttgactcataattggagcaagaaatcagaagactacgagcttggaaataagtatggacatatcgctattggtgtaaaagatatatatgacatttgccagggattagaagataacggctgtaatgttacgactaaaccaaaaacgatgaaaaacagcacaactgttcttgcatttgttgaagatcctgatggatataagattgaacttattgaaagagattag

SEQ ID NO: 78404 - protein, 129 aa, Prochlorococcus marinus subsp. pastoris str. CCMP1986
MRILHTMLRVGDLDKSIDFYVNILGMNLIRRKDYPHGEFTLAFVGYGSEKDNAVIELTHNWSKKSEDYELGNKYGHIAIGVKDIYDICQGLEDNGCNVTTKPKTMKNSTTVLAFVEDPDGYKIELIERD

SEQ ID NO: 78405 - DNA, 402 bp, Prochlorococcus marinus str. MIT 9313
  CDS (1)..(402): transl_table=11
atgcggatgttgcacacgatgctgagggtgggggatttggatcgttctctgcgcttctacaccgaggttctaggcatgcatctgttgcggcgaaaggactacccctcaggtcgcttcaccttggcgtttgtcggttatggcaaggagagtgacaccactgtgctggagctcacacacaactgggaccaagatcactacgagttgggagagggctatggccatatcgccttgggcgtggaggatattcaatccacctgcttggccatctcaaagcgaggcgggcgtgtggtgcgagaacccgggcctatgcaacatggcagcaccgtgattgcctttgtggaagatcccgatggctacaaggtggagctgattcaattggcctctcgtgaggccgcgagctga

SEQ ID NO: 78406 - protein, 133 aa, Prochlorococcus marinus str. MIT 9313
MRMLHTMLRVGDLDRSLRFYTEVLGMHLLRRKDYPSGRFTLAFVGYGKESDTTVLELTHNWDQDHYELGEGYGHIALGVEDIQSTCLAISKRGGRVVREPGPMQHGSTVIAFVEDPDGYKVELIQLASREAAS

SEQ ID NO: 78407 - DNA, 399 bp, Synechococcus sp. WH 8102
  CDS (1)..(399): transl_table=11
atgcggatgctccacaccatgctccgggtcggggatctggaccgctccattgccttctacaccgatgtgctcggcatgaagctgctgcgccgcaaggagtaccccagtggacgcttcaccctggccttcctgggttacgggccggagtcagagcagacggtgctggagctcacccacaactgggacaccagctcctacgagctgggggatgcctacggccacatcgccctcggggtagaagacattcgcagcacctgtgccgccatcagcggtaagggcggccgggtggtgcgagagccggggccgatgaagcatggttccacggtgattgccttcgtggaggaccctgacggctacaaggtggagttgatcgagatgtcctcccgcgccgctgcatga

SEQ ID NO: 78408 - protein, 132 aa, Synechococcus sp. WH 8102
MRMLHTMLRVGDLDRSIAFYTDVLGMKLLRRKEYPSGRFTLAFLGYGPESEQTVLELTHNWDTSSYELGDAYGHIALGVEDIRSTCAAISGKGGRVVREPGPMKHGSTVIAFVEDPDGYKVELIEMSSRAAA

SEQ ID NO: 78409 - DNA, 390 bp, Chromobacterium violaceum ATCC 12472
  CDS (1)..(390): transl_table=11
atgagaatgcttcacaccatgctgcgcgtcggcaacctggatcgctcgatcgccttctaccaggaagtgctgggcatgaagctgctgcgccgcaacgactttccggaaggccgtttcacgctggccttcgtcggctacggcgacgaggccgagcacaccgtgctggagctgacccacaactgggacaccgaatcctacgatctgggcagcggctatggccacatcgccatcgaggtggacgacgcctacgccgcctgtgacatggcgcgcgccaagggcggcaaggtgacgcgcgaggccggcccgatgaagcacggcaccaccgtgatcgccttcatcgaggacccggacggctacaagatcgagttcatccagaaaggcagccgctaa

SEQ ID NO: 78410 - protein, 129 aa, Chromobacterium violaceum ATCC 12472
MRMLHTMLRVGNLDRSIAFYQEVLGMKLLRRNDFPEGRFTLAFVGYGDEAEHTVLELTHNWDTESYDLGSGYGHIAIEVDDAYAACDMARAKGGKVTREAGPMKHGTTVIAFIEDPDGYKIEFIQKGSR

SEQ ID NO: 78411 - DNA, 435 bp, Gloeobacter violaceus PCC 7421
  CDS (1)..(435): transl_table=11
gtgcggattcttcacacgatgctgcgggtgcgcgatctggaggcttccaaggctttctactgcgatgtattgggcatgaaactgctgcgccaaaaagactaccccgacggcaaatttaccctcgccttcgtgggctacggcagcgaggcggacagcgcggtgatcgaactgacccacaactgggagcgcgaccattacgacctgggcgacgccttcggccacatcgccctcggtgtcgaggacatttaccggacctgcagcgaactgaccgcccggggcggcaaagtcgtgcgccaacccggcccgatgcagcacggcagcacggtgattgcatttctggaagatcccgacggctacaagatcgaactcatccagaaaagtgcatcgccgcagactgcagaagaggtcgcaatggccagagccggcaattcttga

SEQ ID NO: 78412 - protein, 144 aa, Gloeobacter violaceus PCC 7421
MRILHTMLRVRDLEASKAFYCDVLGMKLLRQKDYPDGKFTLAFVGYGSEADSAVIELTHNWERDHYDLGDAFGHIALGVEDIYRTCSELTARGGKVVRQPGPMQHGSTVIAFLEDPDGYKIELIQKSASPQTAEEVAMARAGNS

SEQ ID NO: 78413 - DNA, 414 bp, Photorhabdus luminescens subsp. laumondii TTO1
  CDS (1)..(414): transl_table=11
atgcgtttactccataccatgatccgtgttggtgatctacaacgctccattaatttttacactgaagtgttaggcatgcgcctgttgcgcaccagtgaaaacaccgaatataaatactcactcgccttcgttggctacgctgatgaaagcgaaggagcagtaatcgagttgacctataattggggagttgaccattatgaaatggggaatgcctttggtcacatcgcattaggtgttgatgatgtcgcagccacttgcgaatctattcacaaagcaggtggtagcattacccgtgaagcgggtcctgtaaaaggcggaacaaccattattgctttcgttgaagatccagatggctacaaaattgaacttattgaaaacaaaaatgccagcaacgctctgggtaactcaatctga

SEQ ID NO: 78414 - protein, 137 aa, Photorhabdus luminescens subsp. laumondii TTO1
MRLLHTMIRVGDLQRSINFYTEVLGMRLLRTSENTEYKYSLAFVGYADESEGAVIELTYNWGVDHYEMGNAFGHIALGVDDVAATCESIHKAGGSITREAGPVKGGTTIIAFVEDPDGYKIELIENKNASNALGNSI

SEQ ID NO: 78415 - DNA, 396 bp, Vibrio vulnificus YJ016
  CDS (1)..(396): transl_table=11
atggtgaaaatgattcatactatgatccgcgtaagcgatctagagtgttctcttaagttctaccgcgatatacttgagctagaaatcaaggatcaatacatattcgacggcttttctcttatttacctcgggaactcagaaacagggttcgagcttgaactgacccacaatcatgaccaaagtgaaccgtacactcatggatcaggttatggtcaccttgcggttaacgttgaagatattgaagctgtacatcgccgcttaacgtcacttgatattgaggtcagtgatatcaaggtatttaattaccagcaaaaacatttagcaaccttctttttcgtcactgatcctgatggttacaaaattgaattcttacaacgacaaggtcgttacctttaa

SEQ ID NO: 78416 - protein, 131 aa, Vibrio vulnificus YJ016
MVKMIHTMIRVSDLECSLKFYRDILELEIKDQYIFDGFSLIYLGNSETGFELELTHNHDQSEPYTHGSGYGHLAVNVEDIEAVHRRLTSLDIEVSDIKVFNYQQKHLATFFFVTDPDGYKIEFLQRQGRYL

SEQ ID NO: 78417 - DNA, 417 bp, Vibrio vulnificus YJ016
  CDS (1)..(417): transl_table=11
atgtcaaatggtcgcattcttcacactatgttgcgtgtgggtaatttagataaatcgattcagttctacaccgaagttatgggcatgcaattgcttcgtaccaatgaaaacaaagagtatgaatatactttggcgtttctaggttacggtgacgaatcacaaggcgcagtcatcgagttaacttacaactggggtaaaacggagtacgacctcggcagtgcatttggtcacatcgcgattggcgtcgacgacatttatgttacttgcgatgccatcaaagccgctggcggtaatgtgactcgcgaacctggcccagtaaaaggcggcacaacccacatcgcttttgtgaaagatcctgatggctatatgattgagttgatccaaaacaaacaagcatcagcaggtttagaaggctaa

SEQ ID NO: 78418 - protein, 138 aa, Vibrio vulnificus YJ016
MSNGRILHTMLRVGNLDKSIQFYTEVMGMQLLRTNENKEYEYTLAFLGYGDESQGAVIELTYNWGKTEYDLGSAFGHIAIGVDDIYVTCDAIKAAGGNVTREPGPVKGGTTHIAFVKDPDGYMIELIQNKQASAGLEG

SEQ ID NO: 78419 - DNA, 804 bp, Rhodopseudomonas palustris CGA009
  CDS (1)..(804): transl_table=11
atgctggccgacctcatcgaagctccgacgcccgagcaacacttttcctcccctccgctgcggatggccgtcgctagcagcgagggcatccggatcgatcagcacttcggccaaaccgaactattccgggtttacgacgtgtcggcgagcggcgccgtggcggtcgagacccgcgacgtcaatcagcatgccgcaggcgacgaggaccgccgcgacaccatctgccggatgctaaaggactgccgcatcctgctggtggccaagatcggcatcacaccgcaggagaagctcgccggccacggcatcgaggcgatcgaccggttcgccggcaaggctgtcgaagcagcgctgacggaggtctacgtctcgaaatcggccgcaaaggcggatctgccgctcgacgcgtcgaccttccgcctgatgcacacgatgttacgggtcaccgaccttgcccggtcgatcgatttctatacccggttgctcggcatgatcgtgctggagcagcgcgagcacaagaagaaccaattcacccaaacctatctcggctacgcagccggcttttccggcatgacgttggagctggtgttcaactggagcgacgaccaagcgtacacgcacggtacttcgtacggtcacatcgccatcggcgtgaccggcattgccgcgctgtgcgatcgtttggcggcgcagggagtgaagatgccacgtccgccacgcgcgcagcgccacggcgaggcgatcgttgcattcatcgaggacccggacggtcaccgcatcaagttggtgcaggcgccgaacgcctga

SEQ ID NO: 78420 - protein, 267 aa, Rhodopseudomonas palustris CGA009
MLADLIEAPTPEQHFSSPPLRMAVASSEGIRIDQHFGQTELFRVYDVSASGAVAVETRDVNQHAAGDEDRRDTICRMLKDCRILLVAKIGITPQEKLAGHGIEAIDRFAGKAVEAALTEVYVSKSAAKADLPLDASTFRLMHTMLRVTDLARSIDFYTRLLGMIVLEQREHKKNQFTQTYLGYAAGFSGMTLELVFNWSDDQAYTHGTSYGHIAIGVTGIAALCDRLAAQGVKMPRPPRAQRHGEAIVAFIEDPDGHRIKLVQAPNA

SEQ ID NO: 78421 - DNA, 450 bp, Rhodopseudomonas palustris CGA009
  CDS (1)..(450): transl_table=11
atgcgctacctgcacaccatgctgcgcgtccgcaatctcgacaccgccctggaattcttcgtcggagcgctcggcctcaaggaggtccgccgcatcgacaacgacaagggcaagttcacgctgctgttcctgtgcgcgccggaagacgaagagctggtgaagcaatcgaagggacgccccgcccccacgatcgagctgacccacaattgggacgaagagagctacggcgaggaccggttcttcggtcatctcgcgttcgaggtcgacgacatctacgcgacctgcgagcggctgatgaagctgggcatcaccatcaaccgcccgccacgcgacggtcagatggcgttcgtgcgatcgccggatctgcagtcggtcgagctgctgcaaaagggcgaagccctgccgccgcaggagccatgggcctcgatgccgaacaccggccattggtaa

SEQ ID NO: 78422 - protein, 149 aa, Rhodopseudomonas palustris CGA009
MRYLHTMLRVRNLDTALEFFVGALGLKEVRRIDNDKGKFTLLFLCAPEDEELVKQSKGRPAPTIELTHNWDEESYGEDRFFGHLAFEVDDIYATCERLMKLGITINRPPRDGQMAFVRSPDLQSVELLQKGEALPPQEPWASMPNTGHW

SEQ ID NO: 78423 - DNA, 510 bp, Bdellovibrio bacteriovorus HD100
  CDS (1)..(510): transl_table=11
atgtcaaacatccctggggtgtgcgtgagccccgacaaagaaacacagaagtatgtattcaaccacaccatgcttagaatcaaagatcctaaagcctcgttggatttctacacccgcgttttggggatgaagctggtgcgcaaactggattttgcggaatggaagttttctttgtacttcctggcttatgttccggaaggcaccgatgttcccactgaaaatgaagccaatgcccgttatgcctttggtcgggaggctgttctggaactgacccataactggggcaccgaagaacaggaaaccaccccgtaccacaatggcaataccgagcctcgcgggtttggccatatctgtatttcagtcccggatattcaacaggcctgtgcgcgctttgaatccctgggtgtgaatttccaaaaacgtctgggcgagggtggtatgaaaaacatcgcttttgtcaaagatccggatcaatattggattgaggtggttcaaccaggtcttttgtaa

SEQ ID NO: 78424 - protein, 169 aa, Bdellovibrio bacteriovorus HD100
MSNIPGVCVSPDKETQKYVFNHTMLRIKDPKASLDFYTRVLGMKLVRKLDFAEWKFSLYFLAYVPEGTDVPTENEANARYAFGREAVLELTHNWGTEEQETTPYHNGNTEPRGFGHICISVPDIQQACARFESLGVNFQKRLGEGGMKNIAFVKDPDQYWIEVVQPGLL

SEQ ID NO: 78425 - DNA, 393 bp, Bacillus cereus ATCC 10987
  CDS (1)..(393): transl_table=11
atgccagttagaagaattgaacacgtcggacttatggttgcaaacctagaaacatctatcgcattttatgaagaagtagttggcttacaactcattaaacgtatgggacacccgaatccagacttaaaactcgcttttttaggtgtggaggaatcaaaagaaacgatactcgaattaattgaaggctacaactcttcccttccggcagaaggaaaagtacatcacatttgctttaaagtggattcattagaggatgaaatcgaaagaatacagaaacacggcgtaaccttcctactaggagaggaaattgaaacattaccagatggaacacgttacatattcttcgcgggtcctgatggagagtggattgagttttttgagacggagagataa

SEQ ID NO: 78426 - protein, 130 aa, Bacillus cereus ATCC 10987
MPVRRIEHVGLMVANLETSIAFYEEVVGLQLIKRMGHPNPDLKLAFLGVEESKETILELIEGYNSSLPAEGKVHHICFKVDSLEDEIERIQKHGVTFLLGEEIETLPDGTRYIFFAGPDGEWIEFFETER

SEQ ID NO: 78427 - DNA, 432 bp, Strongylocentrotus purpuratus
  CDS (1)..(432)
atgctatctttacctctacgattctatgttgtttttctcaggttactgacaaggcttgacttcccctccatggagttcaccctgttcttcatgggctttgccaatgaagctgatatccccaaggatgagaaggagagaattaaatggacattcatgcagcctggaacaatagagctcacatataactatggtacagactcggatgataaatttgaaggctaccataatggtaacaaggagcctaaaggatttggtcacattggtttatctgtacctgatgtgtatgctgcctgtgagaggtttgaaaagctaggagtgaacttcatcaagaagcctgatgcaggtaaaatgaagggactcgctttcattcaagatcccgatggatactggattgagatccttagtgccaacaacctggccaagacagaatga

SEQ ID NO: 78428 - protein, 143 aa, Strongylocentrotus purpuratus
MLSLPLRFYVVFLRLLTRLDFPSMEFTLFFMGFANEADIPKDEKERIKWTFMQPGTIELTYNYGTDSDDKFEGYHNGNKEPKGFGHIGLSVPDVYAACERFEKLGVNFIKKPDAGKMKGLAFIQDPDGYWIEILSANNLAKTE

SEQ ID NO: 78429 - DNA, 579 bp, Strongylocentrotus purpuratus
  CDS (1)..(579)
atggcagagcaagtgaattccttgcaagcggagcaggtcagtcagtactgtgcaacccctgacccatctacaaagggtttcatcatgcagcaaacaatgttccgcattcaagaccctcgcaaatctctcgatttctacacgcgtgtgctgggtatgagattattcacgagactggacttccctgagaggaagttttctttattcttccttggttacgccgaggagtcagctatcccaaaagatgagacgaagagaataagatggacctttatgcaacccgccaccatcgagctcagatatatttatggtactgatacagacgagacgtttacaggttaccataacggaaatacagaaccccagggattcggtcatataggattgtctgtaccagatgtgtatgctgcatgtgaaagattccgaacgcaaggagtaaagtttgtcatgaagcctgatgaaggcccgatgaaggggatggctttcattcaggatccagacggctactggatagagattctgtctgcggataaccttgctaaacaatgcggtaaaccagaatctacgcatgtttactactga

SEQ ID NO: 78430 - protein, 192 aa, Strongylocentrotus purpuratus
MAEQVNSLQAEQVSQYCATPDPSTKGFIMQQTMFRIQDPRKSLDFYTRVLGMRLFTRLDFPERKFSLFFLGYAEESAIPKDETKRIRWTFMQPATIELRYIYGTDTDETFTGYHNGNTEPQGFGHIGLSVPDVYAACERFRTQGVKFVMKPDEGPMKGMAFIQDPDGYWIEILSADNLAKQCGKPESTHVYY

SEQ ID NO: 78431 - DNA, 732 bp, Strongylocentrotus purpuratus
  CDS (1)..(732)
atggccatgagcatgacgagttcaataagtcgccttctcgctgcacgtagcttccgtacggctgtcgtatcacggagagcgtacagacttccggagtatcatttcctcttccagagaccagggcgggtaacaatcacaagagctaacgttagatctacagccactaccagagacgaaccaacgatggccgaatcaaagaatgctctcccggctgagaaggtagaagcatgctgctctgcacctgatgcatcaactcagggttttattatgcagcagacgatgtacagaattcgagatccacgcaagtcccttgatttctacaccagggtgctgggaatgaggttactgacaaggcttgacttcccctcaatggagttcaccctgttcttcatgggctttgccaatgaagctgatatccccaaggatgagaaggagaggattaaatggacattcatgcagcctggaacaatagaactcacatataactatggaacagaatcggatgataaatttgaaggctaccataatggtaacaaggaacctaaaggatttggtcacattggtttatctgtacctgatgtgtatgctgcctgtgagaggtttgagaagctaggagtgaacttcatcaagaagcctgatgatggtaaaatgaagggacttgctttcattcaagatcccgatggatactggattgagatccttagtgccaacaacctggccaagacagaatga

SEQ ID NO: 78432 - protein, 243 aa, Strongylocentrotus purpuratus
MAMSMTSSISRLLAARSFRTAVVSRRAYRLPEYHFLFQRPGRVTITRANVRSTATTRDEPTMAESKNALPAEKVEACCSAPDASTQGFIMQQTMYRIRDPRKSLDFYTRVLGMRLLTRLDFPSMEFTLFFMGFANEADIPKDEKERIKWTFMQPGTIELTYNYGTESDDKFEGYHNGNKEPKGFGHIGLSVPDVYAACERFEKLGVNFIKKPDDGKMKGLAFIQDPDGYWIEILSANNLAKTE

SEQ ID NO: 78433 - DNA, 858 bp, Nasonia vitripennis
  CDS (1)..(858)
atggtgaccggacgggctctacactttgttttcaaaattccggatcgcaagaccacggctaagttctaccgagagatcctgggaatgaaggttctccggcatgaggaatttactgaaggctgtgaggctgcctgcaatggaccttatgcaaatcggtggagtaagactatgattggttatggtccggaagatagccactttgtcgttgagctaacctacaactacggagtgagtcagtatgaatctggcaatgattttcaaggaataactattcgttcgaaggaaatcattcagagagctttggcacagaagtggcccgtggaagagcaagatggaaagtatgttctagaagcaccaggtggatacaagtactacatcattaacgaaccacaacctgttgatcaagatcctgttcaaaaggttaccctatcaagttcgaatctcaagcgcagtattgcatactggaaagatactctagagatgaaattagttgaagaaaatgacaagtctgcagtatttgaatatggaagcaagcaagcaaagcttgagcttaaagatattggtactgaagtaaaacacgcaaaggcttatggacgtattgcatttgctgtgccaaaagcagagctggaagttattcgcaaaaaaattaaagataccgacaacaaaattttgacagatcttatcagccttgacacgcctggaaaagctactgtcacagttattattttagctgatcctgatggccatgagatctgttttgttgacgaagaaggctttaaacagttatctgtgcctgattatccaagtgaagcgattctagacaggtacatcgaaaaagaagcaaataagacactgtga

SEQ ID NO: 78434 - protein, 285 aa, Nasonia vitripennis
MVTGRALHFVFKIPDRKTTAKFYREILGMKVLRHEEFTEGCEAACNGPYANRWSKTMIGYGPEDSHFVVELTYNYGVSQYESGNDFQGITIRSKEIIQRALAQKWPVEEQDGKYVLEAPGGYKYYIINEPQPVDQDPVQKVTLSSSNLKRSIAYWKDTLEMKLVEENDKSAVFEYGSKQAKLELKDIGTEVKHAKAYGRIAFAVPKAELEVIRKKIKDTDNKILTDLISLDTPGKATVTVIILADPDGHEICFVDEEGFKQLSVPDYPSEAILDRYIEKEANKTL

SEQ ID NO: 78435 - DNA, 534 bp, Anopheles gambiae str. PEST
  CDS (1)..(534)
atgagcgaaggactgaccgacaaggaagcgaaggagctgctgaagctgccggatgccgacacaaagaacttcctgttccagcaaacgatgtaccgcatcaaagatccgcgtgcatcgctcccgttctacaacgaggtgctcgggatgaacttgctctgcaagctggacttccccgaggccaagttttcgctgtactttatgggctacgaggacattgccaaccagccgtccgatcgtaaggaatgcgttcagtgggcaatgagccggaagggcacccttgaactcacccacaactggggtacggagaacgatgccgaatttaagtaccacaacggtaacagtgacccgcgcggctacggtcacatcggcatcatggtgccggacgtgaagaaggcgtgcgagcggttcgatcggttgggcgtcgagtacgtgaagcgcccggacgagggacgcatgaagggtttggcctttattaaggacccggacggctattggatcgagatcttcaacgcatcgacggtgcaaacgcactaa

SEQ ID NO: 78436 - protein, 177 aa, Anopheles gambiae str. PEST
MSEGLTDKEAKELLKLPDADTKNFLFQQTMYRIKDPRASLPFYNEVLGMNLLCKLDFPEAKFSLYFMGYEDIANQPSDRKECVQWAMSRKGTLELTHNWGTENDAEFKYHNGNSDPRGYGHIGIMVPDVKKACERFDRLGVEYVKRPDEGRMKGLAFIKDPDGYWIEIFNASTVQTH

SEQ ID NO: 78437 - DNA, 936 bp, Magnaporthe grisea 70-15
  CDS (1)..(936)
atgacggacattacctcatacaaattcaaccacacgatgcttaaggtcaaggacccgaaagcaagtattgctttctataaacatctcggaatggatctgttgtcagagtacaaggttccggatcacaaattggagctgtactttgttgccggcgactcggccatatccgcgtcgcacggaacgcaccagagcgatcgtgagggcgtgttggaattaagctacagctatgggatcgaaaacacatctggcggcgatcaagaacccagaggtctacgacccgtttgcttatccgtggataacgtcaaaactacctgcaaagccctatgcgatgctgggtatagaataaattgcaactctgaggaagagaccgctcatgtcctcgatcccgatgggttctggatcaagctcatcgctcatcgctcactgggtcgcatagacgataccgctaccgcggactgcaagggttccaaggtccatcatactatgattggtgtcagagacaaaaatgtgtctcggaagttctatgagcaggtcttcggcatgacgtggaagtacgaacagcacagcacccaggctggtcgcgataggttcttgctcggctgtggaaagccacataccagtgggccaagtgtcgacatctccaaaccggatgtcaagtgcgaagggcttctagagctgctttgcagcgaggacacaaagaacaaagacggcatggaacaccacaacggcaacctcgagccggatgatcctggtcacatttgcatttcagtagatgatgttcacgcggcttgcgagcgactcgaaagtctcggcgtacaatggcaaaagcgtctcatggacgggccattcagagtcgccttcgttcatgacccggatggaaatctgatcgaaataattcagaacgagatgtacaagcctgttaagcacgaggcgtga

SEQ ID NO: 78438 - protein, 311 aa, Magnaporthe grisea 70-15
MTDITSYKFNHTMLKVKDPKASIAFYKHLGMDLLSEYKVPDHKLELYFVAGDSAISASHGTHQSDREGVLELSYSYGIENTSGGDQEPRGLRPVCLSVDNVKTTCKALCDAGYRINCNSEEETAHVLDPDGFWIKLIAHRSLGRIDDTATADCKGSKVHHTMIGVRDKNVSRKFYEQVFGMTWKYEQHSTQAGRDRFLLGCGKPHTSGPSVDISKPDVKCEGLLELLCSEDTKNKDGMEHHNGNLEPDDPGHICISVDDVHAACERLESLGVQWQKRLMDGPFRVAFVHDPDGNLIEIIQNEMYKPVKHEA

SEQ ID NO: 78439 - DNA, 972 bp, Gibberella zeae PH-1
  CDS (1)..(972)
atggcttcaactacagagacaaacaactataagttcaatcattctatgattcgagtcaaggaccccaaggcctccactaaattctatgagttcctgggaatgagccttgtcaagaagctcgaattccctgataacaagtttgatctctacttctttggctacgactcgcccaatgccctgtctcacaataagagcacttttgacagacaaggtctcatcgagttgactcacaactacggcactgagaatgaccctgaatacaaggtgaacaatggtaaccaggatcctcatcgtggctttggccacacctgtatcgcggtcgacaacatccaggccgcctgccagcgaattgaagatgctggttacaagttccaaaagaagcttaccgatggccgcatgcgaaacattgctttcgtccttgaccctgatggttactgggtcgaggtcgtcgcccgaaacgactacaaggagaccgagaacgtgaaggagactgacgtgtcgacttacaccatgaaccacaccatgcttcgcgtcaaggatgctgaaaagtccctgaagtactaccaagaagtccttggcatgtctcgcctccgcacccttgagaaccccgaggctggcttcaacctttacttccttggctaccctggcgaccaacccttccccgagggccaggacgacaaggccatcacccaccgagagggtcttcttgagttgacttggaactacggcactgagaaggaagagaacttcaagtaccacgatggcaacagcgagccccagggctttggtcacatctgtgtctcggtggataacctcgaagctgcctgcaagcgttttgaggatatggacgtcagctggaagaagagacttacagacggacgcatgaagaatgttgcctttttgctggaccctgatggttactggattgagattgttcagaacgagaagttttccggaaaggagaacttctag

SEQ ID NO: 78440 - protein, 323 aa, Gibberella zeae PH-1
MASTTETNNYKFNHSMIRVKDPKASTKFYEFLGMSLVKKLEFPDNKFDLYFFGYDSPNALSHNKSTFDRQGLIELTHNYGTENDPEYKVNNGNQDPHRGFGHTCIAVDNIQAACQRIEDAGYKFQKKLTDGRMRNIAFVLDPDGYWVEVVARNDYKETENVKETDVSTYTMNHTMLRVKDAEKSLKYYQEVLGMSRLRTLENPEAGFNLYFLGYPGDQPFPEGQDDKAITHREGLLELTWNYGTEKEENFKYHDGNSEPQGFGHICVSVDNLEAACKRFEDMDVSWKKRLTDGRMKNVAFLLDPDGYWIEIVQNEKFSGKENF

SEQ ID NO: 78441 - DNA, 960 bp, Candida glabrata CBS 138
  CDS (1)..(960)
atgtcctacccacacaagattgctgctgctcacgatgacccaaccttgatgttcaaccacacatgtttgcgtatcaaggatcctgctaaaagtattcctttctaccaaaaacattttggtatggaattgctgaacaagcttgacttcccagagatgaagttcagtttgttcttcttgtctttccctaaggacaacgtcgctaagaatagcgaaggtaagaacgatgtgttcagcacttctggtatccttgaactaacacacaattggggatctgaaaacgatgccgacttcaagatctgcaatggtaatgaggaaccacaccgtgggtttggtcacatctgcttctcatatgctgacatcaacgctgcatgctctaagttagaagctgaaggtgtgtctttcaagaagagattgacagatggtagaatgaaagatatcgcctttgcattagatcctgatggttattggattgaattgattcgttatgacagagaaaactctccaaagaaggatgtcggttccagattcaaccataccatggttcgtgtcaaggatccaaaggcctccttggaattctaccaaaacgttctaggtatgaagctgctaagaactagtgagcatgaggctgctaaattcacgctatatttcctaggctacaaagtcagctccgaggataatgaattttctcatgaaggtgtcctagagttgacccataactggggtactgaaaacgaggcagacttcaaataccataacggcaatgacaagcctcagggctatggtcacatttgcgtgagttgtaaggacccagctaagttatgtaatgaaattgaacaaacgtatggcgataagattcaatgggctcctaaatttaaccaaggaaagttgaagaacatcgctttcctaaaagacccagatggatactctatcgaagttgtcccacatggtttaattgtttga

SEQ ID NO: 78442 - protein, 319 aa, Candida glabrata CBS 138
MSYPHKIAAAHDDPTLMFNHTCLRIKDPAKSIPFYQKHFGMELLNKLDFPEMKFSLFFLSFPKDNVAKNSEGKNDVFSTSGILELTHNWGSENDADFKICNGNEEPHRGFGHICFSYADINAACSKLEAEGVSFKKRLTDGRMKDIAFALDPDGYWIELIRYDRENSPKKDVGSRFNHTMVRVKDPKASLEFYQNVLGMKLLRTSEHEAAKFTLYFLGYKVSSEDNEFSHEGVLELTHNWGTENEADFKYHNGNDKPQGYGHICVSCKDPAKLCNEIEQTYGDKIQWAPKFNQGKLKNIAFLKDPDGYSIEVVPHGLIV

SEQ ID NO: 78443 - DNA, 1017 bp, Kluyveromyces lactis NRRL Y-1140
  CDS (1)..(1017)
atgttcaaggaaagattactcaacatcctcaagcatatacgaccaatgagtaccgaaactactgccaaatattatccaaaaattgttgagtctgcgcaagcggaccagagcttaaagctaaaccacacatgtttcagggtaaaggatccaaaggtcactgttgcgttctaccaggaacaatttggtatgaagctattagatcacaagaaattccctgacatgaagtttgatttatacttcttatcattccctaataagcagttttcgaacaactctcaaggtgccattgacgtctttagagaaaacggtattttggaattgacccacaattatggtactgaatctgatccagcatacaaggtgaacaacggtaatgaagaaccacaccgtgggtttggtcatatttgcttcagtgtctctaacctagaagctgaatgtgaaagattggaatccaatggcgtcaagttcaagaagagattgacagacggtagccaaaggaatattgctttcgcattagatcctaatgggtactggattgaattgattcaaaacaacgaatctggagaggggaacaactacaagttcaaccataccatggtaagagtcaaggatccaatcaaatcccttgaattctatcaaaacgtcctaggaatgaaaatccttgacgttagtgaccattcaaatgctaaattcacgctatacttcttaggctacgaaaatgatcaaaaaggaattgctcgtggttcaagagaaagtatcttggagttgacacataactgggggacagaaaatgatccagatttcgcttatcacaccggtaatactgaaccacaggggtacggccacatctgcatctcaaacaaggatccagctacgttgtgcgcagaaattgagaaactatacccagatatccaatggtctccaaagttcaatcaaggtaaaatgaagaatctcgccttcatcaaggaccctgatggatactccatcgaagtcgtcccatacggattgggcgtttga

SEQ ID NO: 78444 - protein, 338 aa, Kluyveromyces lactis NRRL Y-1140
MFKERLLNILKHIRPMSTETTAKYYPKIVESAQADQSLKLNHTCFRVKDPKVTVAFYQEQFGMKLLDHKKFPDMKFDLYFLSFPNKQFSNNSQGAIDVFRENGILELTHNYGTESDPAYKVNNGNEEPHRGFGHICFSVSNLEAECERLESNGVKFKKRLTDGSQRNIAFALDPNGYWIELIQNNESGEGNNYKFNHTMVRVKDPIKSLEFYQNVLGMKILDVSDHSNAKFTLYFLGYENDQKGIARGSRESILELTHNWGTENDPDFAYHTGNTEPQGYGHICISNKDPATLCAEIEKLYPDIQWSPKFNQGKMKNLAFIKDPDGYSIEVVPYGLGV

SEQ ID NO: 78445 - DNA, 972 bp, Debaryomyces hansenii CBS767
  CDS (1)..(972)
atgccttcattcaacaaatcgtttgtgatgaaccacacatgtcttcgtatcaaagatccaaaggtttcaattccattttataccgaaaacctaggtatgaaattgattgccaccttacctttcccagatagcaaattcacattgtacatgttggcatatgacaatggagacaataacaatgatgtaagttggtctgcgagagaaggcgtactcgaattgtgccataatcatggagttgaaaacgatgaatcctacacattgaataacggtaacggcgagaaattcagaggattcgggcatatctgcgtttctgttgataatattgaagctgctgaagctcagtttttaagcaagggggttaaattccagaaaaaattaagcgatggtagacaaaaaaacatcgcttttgccttggatccaaacggatactggattgaattaatcgaacatggccagggtaaagcttccgataagaccgattctactcattacaaactcaatcacacaatgattagggttaaggatcctaagaaatctttagatttctaccgtaatgttttgggaatgaaattgttttcgactagcgttcatgaaggtgcaaagttcaccctttactttttaggttacgaacatgatgcatctttcaaagaagacactctctcaagagatgaacaatccaagaaacaaggcttgatcgaattgacccataattggggtactgaatcggataacgacttcgaaggctaccacaacggtaactctactgagaatggtgctatccaaggctacggacacacctgtgtttcctgtagcgaccctggaaagttttgtaaagagattaatgaggagtttggtgaagctaatatagattgggctgttcaatggggtaaaggaggaataaagcaacttgctttcattagagatcctgatggatactccattgaaattataaactccgtatttaagcaataa

SEQ ID NO: 78446 - protein, 323 aa, Debaryomyces hansenii CBS767
MPSFNKSFVMNHTCLRIKDPKVSIPFYTENLGMKLIATLPFPDSKFTLYMLAYDNGDNNNDVSWSAREGVLELCHNHGVENDESYTLNNGNGEKFRGFGHICVSVDNIEAAEAQFLSKGVKFQKKLSDGRQKNIAFALDPNGYWIELIEHGQGKASDKTDSTHYKLNHTMIRVKDPKKSLDFYRNVLGMKLFSTSVHEGAKFTLYFLGYEHDASFKEDTLSRDEQSKKQGLIELTHNWGTESDNDFEGYHNGNSTENGAIQGYGHTCVSCSDPGKFCKEINEEFGEANIDWAVQWGKGGIKQLAFIRDPDGYSIEIINSVFKQ

SEQ ID NO: 78447 - DNA, 963 bp, Yarrowia lipolytica CLIB122
  CDS (1)..(963)
atggctgccaccgaccccaagaagtacctgtttaaccacaccatgctgcggatcaaggaccccaaggtctctgtgcccttctacgagaagcactttggcatgaaggtccttggtcactacaagtttgagcagttcaagttcgacatctactacctggcctacgaccatcccgagtctccctactacggcaagcccgtctgggaccgacagggagtcctggagctgacccacaactacggcaccgagaacgacgccaactacaagatcaacaacggcaacgtggagccccaccggggctttggacacatttgcttctcggtcgacaacattgagaaggtgtctgctgatctcgagaatggcggcgtcaagttccagaagaagctcaccgacggccgacagaaggatattgcctttgctctggaccccgatggatactggatcgagctcatcaccaatcacgaggccaagctggtggccaacgagaccaacccttcttcttaccgattcaaccacaccatgctgcgagtcaaggaccccaagaagtccattgagttctacactgaaaagctgggcatgcgactcttccgaacttccaagcacgagaacgccaagttcactctttatttcctttcttacgataaggactttgaggtgaacgacgcctcccgagccggcgaccgagaaggtctcctcgagctgacccacaactggggcaccgaggacgaggctgacttctcttaccacaacggaaacgccgagccccagggctttggccatctggctattactgttgacgacattgaggctgcctgtgagcggttcaacaagattggcgtcaagttcaagaagcagctggacgagggtggaatgaagtacattgccttcattctggatcccgatggatactggatcgaggtcattcctccctacaacctgcctcttgagaaccacgccaagatctag

SEQ ID NO: 78448 - protein, 320 aa, Yarrowia lipolytica CLIB122
MAATDPKKYLFNHTMLRIKDPKVSVPFYEKHFGMKVLGHYKFEQFKFDIYYLAYDHPESPYYGKPVWDRQGVLELTHNYGTENDANYKINNGNVEPHRGFGHICFSVDNIEKVSADLENGGVKFQKKLTDGRQKDIAFALDPDGYWIELITNHEAKLVANETNPSSYRFNHTMLRVKDPKKSIEFYTEKLGMRLFRTSKHENAKFTLYFLSYDKDFEVNDASRAGDREGLLELTHNWGTEDEADFSYHNGNAEPQGFGHLAITVDDIEAACERFNKIGVKFKKQLDEGGMKYIAFILDPDGYWIEVIPPYNLPLENHAKI

SEQ ID NO: 78449 - DNA, 552 bp, Apis mellifera
  CDS (1)..(552)
atgggtgaacacacaggattaacaaattgtgaagcacgtgaactttgtaagaagcctgatccagcaacaaatggttatataatgcaacaaacaatgtatcgtattaaagatccacgaaaatcattacctttctatactgaagtacttggtatgcagttattacagaaacttgattttcccgaaatgaagttttccttatattttttgggatatgaagatccaaaagatatacctactgataagagagaaagtattgaatggacatttagtcgtaaagcaactttagaacttactcataattggggaacagaaactgatcctgatcctacatatcataatgggaatactgaacctcgtggatttggtcatattggaattacagtacctgatgtagaaaaagcatgtgaaagatttgaaaaattaaatgtagaatttataaaaaaacctaatgatggtaagatgaaaggaattgcttttattaaagatccagatggctattggattgaaattttaaatccagtaaatattgcaaatatagtaccaattcaataa

SEQ ID NO: 78450 - protein, 183 aa, Apis mellifera
MGEHTGLTNCEARELCKKPDPATNGYIMQQTMYRIKDPRKSLPFYTEVLGMQLLQKLDFPEMKFSLYFLGYEDPKDIPTDKRESIEWTFSRKATLELTHNWGTETDPDPTYHNGNTEPRGFGHIGITVPDVEKACERFEKLNVEFIKKPNDGKMKGIAFIKDPDGYWIEILNPVNIANIVPIQ

SEQ ID NO: 78451 - DNA, 846 bp, Apis mellifera
  CDS (1)..(846)
atggtcactggacgagcacttcattttgtatttaaaataccagatcgaaaattaacaattaaattttatcgagaaattcttggaatgaaggtattacgacatgaggaatttgctgaaggttgcgaagcggcttgtaatggaccatatggaaatagatggagcaaaactatgataggatatggaacagaagatactcattttgtaatagaattaacttataattatgggattaaggaatataaaatgggaaatgattttaatggaataacaattcgatctaaagaagcactacaaagagcacattcagatgggtggccaataaaagaagaaaatggaatatttgttttacaagcacctggtggttacaaatattatgttattgatgaatcacaacccaaaaataaagatcctattgaaaaagtaactttgtttagttcaaatcttcaaaaaactattgcttattggaaaaatattttagaattaaaaatatttaatcaaactgagaaaagtgtactgttaggatatgatgaagatcaagcaaaaattgaatttatagatattggtactgaaattaatcatgctgcagcttatggacgcatagcattttcaattccttatgcagaacaaccagaaattcaaaagaaaattaaagataatggatatgaaatattaactgatttaatcactttagatactccaggaaaatcttctgtaagagtaattattcttgctgatccagatggtcatgaaatttgctttgtagatgatgaagcatttcgacaattatcaattccagactatgccagtgaagcagttttaaatagatatattgcaaaagaaaaataa

SEQ ID NO: 78452 - protein, 281 aa, Apis mellifera
MVTGRALHFVFKIPDRKLTIKFYREILGMKVLRHEEFAEGCEAACNGPYGNRWSKTMIGYGTEDTHFVIELTYNYGIKEYKMGNDFNGITIRSKEALQRAHSDGWPIKEENGIFVLQAPGGYKYYVIDESQPKNKDPIEKVTLFSSNLQKTIAYWKNILELKIFNQTEKSVLLGYDEDQAKIEFIDIGTEINHAAAYGRIAFSIPYAEQPEIQKKIKDNGYEILTDLITLDTPGKSSVRVIILADPDGHEICFVDDEAFRQLSIPDYASEAVLNRYIAKEK

SEQ ID NO: 78453 - DNA, 1086 bp, Aspergillus nidulans FGSC A4
  CDS (1)..(1086)
atggcgaccgatacatccacctacaagctcaaccataccatgcttcgggtcaaagaccccaagagatcggttgagttctacaagttccttggcctgaaccaagtccaacagctcgacttcccggacaacaagttctccctctactttctcgcctacaacgggccccagtccctccagggcgaccgtcactggacagaccgcaacgccgttctcgaactcacccacaactacggcaccgagaacgaccccaactacagcatcaccaacggaaacaccgagccgcaccggggctacggccacatcgccatctccgttgacaacatcgaggcagcctgccagcggctcgaggatgccgggtacgcgtttcagaagaagcttaccgagggtcgcatgaggcacattgcttttgttaaagatcccgatggctactgggttgagatcatcaagcgcagagacgaggctatgagtacgtctacggatccggcgacctacaggctgaaccataccatgctccgcgtaaaggacgccgaggccagtctcaagtattaccaggaagtcttgggtatgacgcttgtaaggacgatcgagaataaggaggctgcgttcaacctctacttcttgggatacccggcgtcgaacccgcaggcgactgagggcgccaataatccggttgccgagtgggaggggctgcttgagttgacgtggaactatggcactgagaagcaggagggcaaggtctaccacaacgggaacgacgagccgcagggattcggccatatatgtgtctccgtggacgatttgaacgcggcctgcgagcggttcgagtctttgaaagtgaactggaagaagcgtctgacggatggccgaatgaagaacgtcgcgttccttctcgacccagacggatactggatcgaggttattcagaacgaggctcttaagcgcaccagcaactggcgtattgttcaagcacgatgccgacctatatgggtgaaggacagcgctgtctccaacggaggcaccataactcacgagtacaagctgatcaagggatttgctcgtggtctcgaatttggtggcgggatttga

SEQ ID NO: 78454 - protein, 361 aa, Aspergillus nidulans FGSC A4
MATDTSTYKLNHTMLRVKDPKRSVEFYKFLGLNQVQQLDFPDNKFSLYFLAYNGPQSLQGDRHWTDRNAVLELTHNYGTENDPNYSITNGNTEPHRGYGHIAISVDNIEAACQRLEDAGYAFQKKLTEGRMRHIAFVKDPDGYWVEIIKRRDEAMSTSTDPATYRLNHTMLRVKDAEASLKYYQEVLGMTLVRTIENKEAAFNLYFLGYPASNPQATEGANNPVAEWEGLLELTWNYGTEKQEGKVYHNGNDEPQGFGHICVSVDDLNAACERFESLKVNWKKRLTDGRMKNVAFLLDPDGYWIEVIQNEALKRTSNWRIVQARCRPIWVKDSAVSNGGTITHEYKLIKGFARGLEFGGGI

SEQ ID NO: 78455 - DNA, 1029 bp, Candida albicans SC5314
  CDS (1)..(1029): transl_table=12
atgttcaaacgattcttctcttatacaccaagaactttcaagatggcaacattcaacaattcctttttgatgaaccacacgtgtcttcgtatcaaagacccaaaggtttcaattccgttttatactgaaaaattcggtatgaaattgattgccacctttccattcgctgattttacattgtatatgttgaactacgaaactgaagctaacaagcatctcaattggtctgccagagaaggtgtgttagaattatgtcacaatcatggtgttgaaaacgattcaaattataaattgaacaacggtaacggtgagaaagatcgtggatttggtcatatctgtatgtcagttgataacattgaagcatttcaagatcaattgttgaagagtgaagtaaagttccaaaagaagttgagtgatgggagacaaaagaacattgcttttgctttggacccagatggatattggattgaattgattgagaacggaatcaacaaggttgcaaataaaaccgaggtttcctcctacaaattgaaccatactatgatcagagtaaaggatcctaaaaagtcattggagttttaccgcgatgttttaggatttaaattgttgtctactagtgaacatgagggagctaaatttaccttatactttttaggttacgaccacgatccaaactttaaacaagatacattggttcgtaacgaacaagccaagagagaaggtgttattgaattgactcacaactggggaaccgaatccgatccagaattcaaaggctaccataacggtaacagtactgaaaatggtgctttgcaaggttttggacacacatgtgttagttgtgaagatcctgctaaattttgtcaagaattggaagagaagtttggtgacaaattagattggtctttgaaatgggatcaaggaaagatcaagaagattgccttcattagagacccagatggttattccattgaaattttaggacatgatttatttgctgactcatttaaagagcaagctaatttgtaa

SEQ ID NO: 78456 - protein, 342 aa, Candida albicans SC5314
MFKRFFSYTPRTFKMATFNNSFLMNHTCLRIKDPKVSIPFYTEKFGMKLIATFPFADFTLYMLNYETEANKHLNWSAREGVLELCHNHGVENDSNYKLNNGNGEKDRGFGHICMSVDNIEAFQDQLLKSEVKFQKKLSDGRQKNIAFALDPDGYWIELIENGINKVANKTEVSSYKLNHTMIRVKDPKKSLEFYRDVLGFKLLSTSEHEGAKFTLYFLGYDHDPNFKQDTLVRNEQAKREGVIELTHNWGTESDPEFKGYHNGNSTENGALQGFGHTCVSCEDPAKFCQELEEKFGDKLDWSLKWDQGKIKKIAFIRDPDGYSIEILGHDLFADSFKEQANL

SEQ ID NO: 78457 - DNA, 846 bp, Tribolium castaneum
  CDS (1)..(846)
atggctttcatcacaggtagggctctgcactatgtcttcaaagtcccagaccggaagcaaactgcgatattttatcgcgaaattttgggcatgaaagtcctgagacatgaggaatttgcggacgggtgtgaggctgtatgtaatggtccttacgcaaaccggtggagcaagaccatggtcggttacggtcccgaatcgacccatttcgccatggaactgacctacaactacggcgtaaagtcctacgagaagggcaacgacttccgtggcatcacaatccgcagcaaagaggccctgcagcgcgccaaagagaacaactggcccatcttagccggaaacatcctggaagcgccaggcggttacaaattccacataatcgacgaaccccaacccaccgatcgtgatccagtagtgaaagtaactttgtcttgttccaatttgaccaaatccatcaactactggaacggtgtcctgggcttgaagatattcgggcgcacggataagaccgtcctgctgggcttcaaagagagcgaggccaagctggagctggaggagattggcggcccggtcgagagagctaaagcgtacggacgtatcgccttttcctgcctggcggcagagcagccgaaaatcgccaagaaaatcgaggagcacaaacatacaattttcaagcctctgatctcgctggacacgcctggaaaggccacagtccgggtcattattttatgcgaccctgacggacacgaaatctgcttcgtggatgaggaggggttcagtcaactgtcgcaggttgaccccgatggtgataagctactcgatcggtacatcgcaagagataaatcgtaa

SEQ ID NO: 78458 - protein, 281 aa, Tribolium castaneum
MAFITGRALHYVFKVPDRKQTAIFYREILGMKVLRHEEFADGCEAVCNGPYANRWSKTMVGYGPESTHFAMELTYNYGVKSYEKGNDFRGITIRSKEALQRAKENNWPILAGNILEAPGGYKFHIIDEPQPTDRDPVVKVTLSCSNLTKSINYWNGVLGLKIFGRTDKTVLLGFKESEAKLELEEIGGPVERAKAYGRIAFSCLAAEQPKIAKKIEEHKHTIFKPLISLDTPGKATVRVIILCDPDGHEICFVDEEGFSQLSQVDPDGDKLLDRYIARDKS

SEQ ID NO: 78459 - DNA, 552 bp, Tribolium castaneum
  CDS (1)..(552)
atgggtgattcagcacagccccctatttcgcacgcccaggcggttgcactgtgcaagaatccgcccccggaaacaaaagattttctcttccaacaaacaatgtaccgtatcaaagaccctaaagtgagcatccctttttacacggaagtccttggaatgcgtcttttgcaaaaatatgattttccgtccatgaaatttacgctgtattttatgggatatgaagacccgaaggacatggaaggtgaattggggacccctgaacggggagagtgggtattttcgcgcaaagcaacgattgaactgactcataattggggctccgagagtgaccctgagtgtaagtaccacaacggtaattcggaccctcgcgggttcggtcatatcggtatcatggtccctgatgtgaacaaagcgtgcgaaaggttcgaaaaactgggagttaacttcgtcaaaaagccccaagatggcaaaatgaaagacctggcctttatcacggacccggacgggtattggattgaaatcttcaacaaaacaatggcccggaacttgtaa

SEQ ID NO: 78460 - protein, 183 aa, Tribolium castaneum
MGDSAQPPISHAQAVALCKNPPPETKDFLFQQTMYRIKDPKVSIPFYTEVLGMRLLQKYDFPSMKFTLYFMGYEDPKDMEGELGTPERGEWVFSRKATIELTHNWGSESDPECKYHNGNSDPRGFGHIGIMVPDVNKACERFEKLGVNFVKKPQDGKMKDLAFITDPDGYWIEIFNKTMARNL

SEQ ID NO: 78461 - DNA, 402 bp, Prochlorococcus marinus str. MIT 9303
  CDS (1)..(402): transl_table=11
atgcggatgttgcacacgatgctgagggtgggggatttggatcgttctctgcgcttctacaccgaggttctaggcatgcagctgttgcggcgaaaggactacccctcaggtcgcttcaccttggcgtttgtcggttatggcgaggagagtgacaccactgtgctggagctcacacacaactgggaccaagatcactacgagttgggagagggctatggccatatcgccttgggcgtggaggatattcaatccacctgcttggccatctcaaagcgaggcgggcgtgtggtgcgagaacccgggcctatgcaacatggcagcaccgtgattgcctttgtggaagatcccgatggctacaaggtggagctgattcaactggcctctcgtgaggccgcgagctga

SEQ ID NO: 78462 - protein, 133 aa, Prochlorococcus marinus str. MIT 9303
MRMLHTMLRVGDLDRSLRFYTEVLGMQLLRRKDYPSGRFTLAFVGYGEESDTTVLELTHNWDQDHYELGEGYGHIALGVEDIQSTCLAISKRGGRVVREPGPMQHGSTVIAFVEDPDGYKVELIQLASREAAS

SEQ ID NO: 78463 - DNA, 390 bp, Prochlorococcus marinus str. MIT 9301
  CDS (1)..(390): transl_table=11
atgcgtatcctacacacaatgttgagggttggagatttagataaatccattgatttctacgtcaatagattaggaatgaatttattgcgaaaaaaggattaccctcatggaaaattcactttggcatttgttggttatggctcagaaaaagaaaactcagtaattgaattaacttataactgggacaaaaaatctgaagactatgagcttggagataaatatggtcatatagctattggagtaaaagatattcatctaatttgccaaggattagaaaaaaatggttgtaaaataacaactaaacctaaaacaatgaaaaatagtactactgtcttggcttttgttgaggatcctgatggttataaaattgaacttattgaaagagattaa

SEQ ID NO: 78464 - protein, 129 aa, Prochlorococcus marinus str. MIT 9301
MRILHTMLRVGDLDKSIDFYVNRLGMNLLRKKDYPHGKFTLAFVGYGSEKENSVIELTYNWDKKSEDYELGDKYGHIAIGVKDIHLICQGLEKNGCKITTKPKTMKNSTTVLAFVEDPDGYKIELIERD

SEQ ID NO: 78465 - DNA, 393 bp, Bacillus thuringiensis serovar konkukian str. 97-27
  CDS (1)..(393): transl_table=11
atgccagttagaagaattgaacacgttggacttatggttgcaaacttagaaacatctatttccttttatgaaaaagtagtcggcttacagctcattaagcgaatggggcacccgaatccagacttaaaactcgcttttttaggtgtggaagaatcaaaagagacgatactcgaattaattgaaggctacaactcttcccttccggcagaaggaaaagtacatcacatttgctttaaggtagattcattagaggatgaaatcgaaagaatacagaaacacggcgtaaccttcctactaggagaagaaatcgaaacattaccggatggaacacgttacatattctttgcgggtcctgatggggaatggattgagttttttgagacggagagatag

SEQ ID NO: 78466 - protein, 130 aa, Bacillus thuringiensis serovar konkukian str. 97-27
MPVRRIEHVGLMVANLETSISFYEKVVGLQLIKRMGHPNPDLKLAFLGVEESKETILELIEGYNSSLPAEGKVHHICFKVDSLEDEIERIQKHGVTFLLGEEIETLPDGTRYIFFAGPDGEWIEFFETER

SEQ ID NO: 78467 - DNA, 402 bp, Acinetobacter sp. ADP1
  CDS (1)..(402): transl_table=11
atgcgaatgctgcatacaatgttgcgagtaggcaatttagaacaatcaatcaagttctatactgaagtcttaggtatgacattacttcgtaaacgtgattatgaggaaggccgctttactttagcatttgttggctatggtcaagaatccgatcatacagtactcgaacttacacataactgggatacttcaagttatgacctaggaaatggatatggtcatatcgcgattggtgttgaagatgcctacaaagcatgcgatctgattaaagaacgtggcggtaatgtcgttcgtgaagcgggcccaatgaaaggtggcgtgactgttattgcatttgttgaagatccagatggctacaaaattgagctgattcaacaagatgaaaatgcacgtaataattga

SEQ ID NO: 78468 - protein, 133 aa, Acinetobacter sp. ADP1
MRMLHTMLRVGNLEQSIKFYTEVLGMTLLRKRDYEEGRFTLAFVGYGQESDHTVLELTHNWDTSSYDLGNGYGHIAIGVEDAYKACDLIKERGGNVVREAGPMKGGVTVIAFVEDPDGYKIELIQQDENARNN

SEQ ID NO: 78469 - DNA, 408 bp, Erwinia carotovora subsp. atroseptica SCRI1043
  CDS (1)..(408): transl_table=11
atgcgtttacttcacaccatgctgcgtgttggcgatttacaacgttctattgatttctatacccagattttgggaatgcgcgtactgcgcaccagcgagaataccgagtacaaatacacgctagctttcgtcggttataccgaagagagcgagggtgcggttatcgagctgacctacaattggggcgtcgacagctacgatctgggcaatgcctatggtcatatcgcgttgggcgttgatgatgttgccgcaacatgtgagcgtatccgtaaggcaggtggcaatgtgacacgtgaggccggcccagtcaaaggcggcacgaccgttatcgcattcatcgaggatccagatggttataaaatcgaattgatcgaaaatgcccacgctggtagcggcatcggccactaa

SEQ ID NO: 78470 - protein, 135 aa, Erwinia carotovora subsp. atroseptica SCRI1043
MRLLHTMLRVGDLQRSIDFYTQILGMRVLRTSENTEYKYTLAFVGYTEESEGAVIELTYNWGVDSYDLGNAYGHIALGVDDVAATCERIRKAGGNVTREAGPVKGGTTVIAFIEDPDGYKIELIENAHAGSGIGH

SEQ ID NO: 78471 - DNA, 378 bp, Streptococcus pyogenes MGAS10394
  CDS (1)..(378): transl_table=11
atgaaagcattacatacctgtatccgcgtcaaagaccttgaccagtcggttgctttttacacaagcgccttcccttttaaggaaaactatcgtaaagattttccagatagtcaatttactcttgtttatctggctttagaaggagaaagttatgaattagaattaacctacaattatggtcatggcgactacgacttaggaaatggctatggtcatattgcccttggctctgaacattttgaagcagaccataaaaaacatcgacaagcaggttttccagttaccgatatcaaagaactggctgacaaatctgcccgctattatttcattcaggatccagatggctacaaaattgaagtcattgatttaaacaactaa

SEQ ID NO: 78472 - protein, 125 aa, Streptococcus pyogenes MGAS10394
MKALHTCIRVKDLDQSVAFYTSAFPFKENYRKDFPDSQFTLVYLALEGESYELELTYNYGHGDYDLGNGYGHIALGSEHFEADHKKHRQAGFPVTDIKELADKSARYYFIQDPDGYKIEVIDLNN

SEQ ID NO: 78473 - DNA, 408 bp, Yersinia pseudotuberculosis IP 32953
  CDS (1)..(408): transl_table=11
atgcgcttactccataccatgctccgcgtcggtgacctgcaacgttctatcgatttctacaccaaggtattagggatgcgtttactgcgtaccagcgaaaatactgaatataaatactcgttggcattcgtaggctatagcgatgaaagtaaaggttcggtgattgaactgacgtataactggggcgttgaccagtacgatatgggcaccgcattcggccatctggctctgggtgttgatgatgtcgccgcaacgtgtgatcaaattcgccaggcaggcggtaaagtcacccgcgaagctggcccggtaaaaggcggtaataccattattgcttttgttgaagatccagatggctacaaaattgagttaattgagaataagagcgcgggtgacggcctcggaaactga

SEQ ID NO: 78474 - protein, 135 aa, Yersinia pseudotuberculosis IP 32953
MRLLHTMLRVGDLQRSIDFYTKVLGMRLLRTSENTEYKYSLAFVGYSDESKGSVIELTYNWGVDQYDMGTAFGHLALGVDDVAATCDQIRQAGGKVTREAGPVKGGNTIIAFVEDPDGYKIELIENKSAGDGLGN

SEQ ID NO: 78475 - DNA, 393 bp, Bacillus cereus E33L
  CDS (1)..(393): transl_table=11
atgcctgttagaagaattgaacacgttggacttatggttgcaaacttagaaacatctattactttttatgaaaaagtagttggcttacagcttattaaacgaatgggacatccaaacccagacttaaaactcgcttttttaggtgtggaagaatcgaaggaaacgatactggaactcattgaaggttacaactcctctcttccggcagaaggaaaagtacatcacatttgctttaaagtagattcattaaaagaagaaatcgaaagactcaagaaacatggcgtaacatttttactaggagaagaaatcgaaacattaccggatggaacacgttacatattcttcgcgggtcctgatggagagtggattgagttttttgagacggagagataa

SEQ ID NO: 78476 - protein, 130 aa, Bacillus cereus E33L
MPVRRIEHVGLMVANLETSITFYEKVVGLQLIKRMGHPNPDLKLAFLGVEESKETILELIEGYNSSLPAEGKVHHICFKVDSLKEEIERLKKHGVTFLLGEEIETLPDGTRYIFFAGPDGEWIEFFETER

SEQ ID NO: 78477 - DNA, 411 bp, Mannheimia succiniciproducens MBEL55E
  CDS (1)..(411): transl_table=11
atgatgagaattctacacaccatgttacgcgtaggcgatttggatcgttccgtcaaattctatcaggatgttttgggtatgcgtttattacgtaccagcgaaaatcccgaatacaaatattcattggcctttttaggttatgacgacgaagataaaacggcggttatcgagctgacttataactggggcgtcactgaatacgaacttggctcggcatttggccatatcgccattggcgtggatgacattcacgccacttgtgaagcggtaaaagcgcacggcggcaaagtcacccgagaacccggtccggttaaaggcggttccaccgtgattgcttttgtggaagatccggacggttataaaatcgaatttatcgaaaataaaaatgcaaaagcggcattaggcaactaa

SEQ ID NO: 78478 - protein, 136 aa, Mannheimia succiniciproducens MBEL55E
MMRILHTMLRVGDLDRSVKFYQDVLGMRLLRTSENPEYKYSLAFLGYDDEDKTAVIELTYNWGVTEYELGSAFGHIAIGVDDIHATCEAVKAHGGKVTREPGPVKGGSTVIAFVEDPDGYKIEFIENKNAKAALGN

SEQ ID NO: 78479 - DNA, 441 bp, Legionella pneumophila subsp. pneumophila str. Philadelphia 1
  CDS (1)..(441): transl_table=11
atgaagtatttacataccatggttagagtttcgaatttagaacaatcgctcgatttttattgtaataaattgggtttgatagaagtaaaacgaactgaaaatgccaaaggccgttttaccttggtatttttagctgctcctgctgatatagagcaagttcaaacttcttatggaccaatgctagagttgacttataactgggatccggaggattacactgagggaagaaattttggccatttggcatatcatgtggatgatatctataaaatctgccaacatttacaggaatgtggtgttgtaattaataggccacccagagatggccacatggcttttattcgttctcctgataatatttctatcgagttattgcagaagggcgagcctttgccaaagcaggaaccttggttatctgcacccaatattggacattggtaa

SEQ ID NO: 78480 - protein, 146 aa, Legionella pneumophila subsp. pneumophila str. Philadelphia 1
MKYLHTMVRVSNLEQSLDFYCNKLGLIEVKRTENAKGRFTLVFLAAPADIEQVQTSYGPMLELTYNWDPEDYTEGRNFGHLAYHVDDIYKICQHLQECGVVINRPPRDGHMAFIRSPDNISIELLQKGEPLPKQEPWLSAPNIGHW

SEQ ID NO: 78481 - DNA, 390 bp, Burkholderia pseudomallei K96243
  CDS (1)..(390): transl_table=11
atgcgtttgcttcacacgatgctgcgagtcggcgatctcgaccgctcgatcaagttctacaccgagctgctcggcatgaaattgctgcgccgccaagattatccggacgggaagttcacgctcgcgttcgtcggctatggcgacgagcgggaccacacggtcatcgagctcacccacaactgggacacgaaatcgtacgagctcggcacgggcttcggccatctggcgctcgaagtcgaagacgcgtacaaggcgtgcgagcagatcaaggcgcagggcggcaaggtcacgcgcgaggccggcccgatgaagcacggcacgacggtgatcgcgttcgtcgaggatccggacggctacaagatcgagttcatccagcgcaacgctcactga

SEQ ID NO: 78482 - protein, 129 aa, Burkholderia pseudomallei K96243
MRLLHTMLRVGDLDRSIKFYTELLGMKLLRRQDYPDGKFTLAFVGYGDERDHTVIELTHNWDTKSYELGTGFGHLALEVEDAYKACEQIKAQGGKVTREAGPMKHGTTVIAFVEDPDGYKIEFIQRNAH

SEQ ID NO: 78483 - DNA, 393 bp, Methylococcus capsulatus str. Bath
  CDS (1)..(393): transl_table=11
atgcgtattttgcataccatgctgcgagtcggggatcttcagaagtccctctggttttacaccgaagttctgggcatgcgactgctgcggcagatggaatttccggacggcgaatttactttggcgttcgtgggctacggtgacgaggcgcacgatgcggtgattgaactgacctacaactggggcgtgagcaagtatgagctgggtaccggcttcggtcatatcgcactgggggtggatgacatccatgcggccgtggagcggatccgggcattagggggcgagatcgtgagggagcccggccccatgaagcatggaaccacggtcatcgcgttcgttgccgaccccgacggctaccggatcgaactgatcgaacacaaacccgcaggctag

SEQ ID NO: 78484 - protein, 130 aa, Methylococcus capsulatus str. Bath
MRILHTMLRVGDLQKSLWFYTEVLGMRLLRQMEFPDGEFTLAFVGYGDEAHDAVIELTYNWGVSKYELGTGFGHIALGVDDIHAAVERIRALGGEIVREPGPMKHGTTVIAFVADPDGYRIELIEHKPAG

SEQ ID NO: 78485 - DNA, 384 bp, Azoarcus sp. EbN1
  CDS (1)..(384): transl_table=11
atgcgaattcttcacacaatgctgcgagtgggcgatctggaccgttcgatcgctttctataccgaagttctcggcatgcgcctgctgcggcgccaggactatccggaaggaaaattcacgctcgcgttcgtcggttacggggatgaggccgacaacgcggtgatcgagctcacgtacaactgggaggtatcgtcctatgacctcggcaacggcttcggccacatcgcgctggctgtcccggatgcccggcgggcctgcgacgatattcgtgcccgcggcggcaaagtcgtgcgcgaggccggcccgatgaagcatggcaatacggtgatcgctttcgtcgaggatccggacggctacaagatcgaactgatcgagcgcagctga

SEQ ID NO: 78486 - protein, 127 aa, Azoarcus sp. EbN1
MRILHTMLRVGDLDRSIAFYTEVLGMRLLRRQDYPEGKFTLAFVGYGDEADNAVIELTYNWEVSSYDLGNGFGHIALAVPDARRACDDIRARGGKVVREAGPMKHGNTVIAFVEDPDGYKIELIERS

SEQ ID NO: 78487 - DNA, 429 bp, Silicibacter pomeroyi DSS-3
  CDS (1)..(429): transl_table=11
atgccgctcaaatatctgcacgtcatggtccgcgtgaaggaccttgaaaaatccatggccttctacgaattgctcgggctgcgcgaaatccgccgctacgacagtgaagaggggcggtttaccctggtctatctggccgcgcccgggcaggacgagacgccgctggagctgacctataactgggacggcgatgacgggctgcccagcgacagccgccatttcgggcatctcgcctatggggtcgacgacatctatgccacctgcgcgatgctgcaggaaaacggcatcaccatcaaccggccgccgcgcgacgggcgcatggcctttatccgctcgcccgacaatatctcgatcgaattgctgcagaacggtgccgcgctggacccggccgagccctgggtcagcatggacagcaccggccactggtga

SEQ ID NO: 78488 - protein, 142 aa, Silicibacter pomeroyi DSS-3
MPLKYLHVMVRVKDLEKSMAFYELLGLREIRRYDSEEGRFTLVYLAAPGQDETPLELTYNWDGDDGLPSDSRHFGHLAYGVDDIYATCAMLQENGITINRPPRDGRMAFIRSPDNISIELLQNGAALDPAEPWVSMDSTGHW

SEQ ID NO: 78489 - DNA, 381 bp, Bacteroides fragilis NCTC 9343
  CDS (1)..(381): transl_table=11
atggaaataaaaagtagatttgaccacttcaatatcaatgtgactgatctggaacgtagcattgctttctacgaaaaagcattgggattgaaagaacatcaccggaaagaggcagccgacggctcttttatcctggtatatctcacagataacaccaccggttttttattggaactcacctggctgcgagaccataccgaagcctatgaattgggagagaacgaaagtcatctttgcttccgtgtagcgggagattatgatgccgtacgccaatatcacaaagaaatggactgcgtatgctttgagaatacttccatggggctctatttcatcaatgatccggatgactactggattgaaatattaccggaacgactttaa

SEQ ID NO: 78490 - protein, 126 aa, Bacteroides fragilis NCTC 9343
MEIKSRFDHFNINVTDLERSIAFYEKALGLKEHHRKEAADGSFILVYLTDNTTGFLLELTWLRDHTEAYELGENESHLCFRVAGDYDAVRQYHKEMDCVCFENTSMGLYFINDPDDYWIEILPERL

SEQ ID NO: 78491 - DNA, 522 bp, Pseudomonas fluorescens Pf-5
  CDS (1)..(522): transl_table=11
atgagcctcaacgaactcaatacctttcccggcgtgaccgcccaaccggatgcggccactgcccgtttcgtgttcaaccacaccatgttgcgcgtcaaggacatcactcgctccctggacttctacacccgggtcctgggcttttccctggtagaaaaacgcgacttccctgaagccgagttcagcctgtacttcctggccctggtggacaaggcacagatcccggcagacgctggcgcacgaaccgagtggatgaagtcgattcccggcattctcgaactgacccacaaccacggcaccgagaacgatccagccttcgcctaccacaacggcaacagcgacccgcgcggcttcggccacatctgtatctcggtgccggacatcgtcgccgcctgcgagcgcttcgaagccctgggctgcgatttccagaagcgcctgaacgatggccggatgaaaagcctggccttcatcaaggacccggacggctactgggtcgagatcatccagccagcaccgctgtaa

SEQ ID NO: 78492 - protein, 173 aa, Pseudomonas fluorescens Pf-5
MSLNELNTFPGVTAQPDAATARFVFNHTMLRVKDITRSLDFYTRVLGFSLVEKRDFPEAEFSLYFLALVDKAQIPADAGARTEWMKSIPGILELTHNHGTENDPAFAYHNGNSDPRGFGHICISVPDIVAACERFEALGCDFQKRLNDGRMKSLAFIKDPDGYWVEIIQPAPL

SEQ ID NO: 78493 - DNA, 570 bp, Psychrobacter arcticus 273-4
  CDS (1)..(570): transl_table=11
atgaataataatgatacttttaataacgaccattcaatacaagagcaacctgaaagcagcgtaaaggctgatggcgtacagcctatctcagcgcagacgacaggttatacctttaaccatacgatgctgcgtgtcaaagatcctgtgaggtctttagagttttatactggcgtcttaggtatgacattgctggcagtcaaaaaattcccagccatgggttttgatttgtattttttagccaagcttactgagagcgagcgtgaaaatttgccgtcgggtaacgatttagagatttttgccttccgtcagcgtggtattttggaattgactcataactatggtactgagacaaaagcggactttagctatcatgatggcaatcaagaaccacaaggctttggtcacatttgttttaacgtacctgacctcaatgcagcggtggcttggtttgatgaaaatcatgtcgaattcaaaaaacgtccagatgaaggcagcatgaaaaacattgtttttatcaaagatgtcgatggttattggattgaaatcgtacaagcggatttgatggcttaa

SEQ ID NO: 78494 - protein, 189 aa, Psychrobacter arcticus 273-4
MNNNDTFNNDHSIQEQPESSVKADGVQPISAQTTGYTFNHTMLRVKDPVRSLEFYTGVLGMTLLAVKKFPAMGFDLYFLAKLTESERENLPSGNDLEIFAFRQRGILELTHNYGTETKADFSYHDGNQEPQGFGHICFNVPDLNAAVAWFDENHVEFKKRPDEGSMKNIVFIKDVDGYWIEIVQADLMA

SEQ ID NO: 78495 - DNA, 420 bp, Colwellia psychrerythraea 34H
  CDS (1)..(420): transl_table=11
atgaagtttttacataccatggtacgtgtacgtgatttggaccaatcgcttgatttctacatcaataaacttggcttaattgaaacaaaacgtattgaagtacctgcaggtaaatttaccttggtttatttagctaccgagattggcggcccggaagttgagttgacttacaactggggttctactgaagattatactgcagggcgtagcttcggtcatttagcctttgaagttgataacatttatcaaacgtgtcaaacattacaagacggcggcataacaattaacagaccgcctcgctgtggtcacatggcttttgttaactcacctgatggcatctcgatagagttattacaaaaagatggttccctagagccacaagagccatggttaagtatggaaaatagcggtagctggtaa

SEQ ID NO: 78496 - protein, 139 aa, Colwellia psychrerythraea 34H
MKFLHTMVRVRDLDQSLDFYINKLGLIETKRIEVPAGKFTLVYLATEIGGPEVELTYNWGSTEDYTAGRSFGHLAFEVDNIYQTCQTLQDGGITINRPPRCGHMAFVNSPDGISIELLQKDGSLEPQEPWLSMENSGSW

SEQ ID NO: 78497 - DNA, 522 bp, Pseudomonas syringae pv. phaseolicola 1448A
  CDS (1)..(522): transl_table=11
atgagcttgcacgaactcaacacactaccgggcgttacggccgaccctgaagcggctacccggcagtttgtattcaaccacaccatgctgcgcgtcaaggacatcacaaaatcgctggatttctacacccgcgtgctcggcttcagcctggttgaaaagcgtgatttcccggaagccgaattcagcctctacttcctcgcactggtggataaggcgcagatcccggaagacgacaaagcccgcaacgagtggatgaaatcgatccccggcattctcgagctgacccacaatcacggcaccgagagcgatgcgacagcttcgtaccacaacggcaacagcgacccgcgtggctttggtcacatttgcgtctcggtaccagacgtgaaggttgcctgcgagcgattcgagactttgggcgtcgactttcaaaagcgtctgtccgatggccgcatgaacagcctggccttcatcaaggacccggatggctactgggtagagattatccagccaaccccgctctga

SEQ ID NO: 78498 - protein, 173 aa, Pseudomonas syringae pv. phaseolicola 1448A
MSLHELNTLPGVTADPEAATRQFVFNHTMLRVKDITKSLDFYTRVLGFSLVEKRDFPEAEFSLYFLALVDKAQIPEDDKARNEWMKSIPGILELTHNHGTESDATASYHNGNSDPRGFGHICVSVPDVKVACERFETLGVDFQKRLSDGRMNSLAFIKDPDGYWVEIIQPTPL

SEQ ID NO: 78499 - DNA, 384 bp, Dechloromonas aromatica RCB
  CDS (1)..(384): transl_table=11
atgcgcattctgcacaccatgatccgcgtcggcgatctcgacaaatcgattgccttctacaccgaaattctcggcatgcagctgcttcgccgccaggactatccggacggccgcttcacgctggccttcgtcggctacggccccgaggacaaggaagccgtgctcgaactgacccacaactgggacacgccgtcttacgaactcggcaatggctatggccacgtcgcgctagccgtgccggatgcggcaggcgcctgcgccgagatcaaggccctcggcggcaaggtagtccgcgaggcgggaccgatgaagcatggcagcacgatcatcgcctttgttgaagacccggacggctacaagatcgaattgatccagcgcggctag

SEQ ID NO: 78500 - protein, 127 aa, Dechloromonas aromatica RCB
MRILHTMIRVGDLDKSIAFYTEILGMQLLRRQDYPDGRFTLAFVGYGPEDKEAVLELTHNWDTPSYELGNGYGHVALAVPDAAGACAEIKALGGKVVREAGPMKHGSTIIAFVEDPDGYKIELIQRG

SEQ ID NO: 78501 - DNA, 408 bp, Ralstonia eutropha JMP134
  CDS (1)..(408): transl_table=11
atgcgactcctccacaccatgctgcgcgtcggcgacctgcagcgctccatcgacttctacacccgcgtgctcggcatgcagctgctgcgccagagcgacaacccggaatacaagtaccgcctggccttcgtcggctatggcccggaaagcgagaccgcggtgctggaactgacctacaactacggcgtcgacaagtatgacctcggtaccgcctacggccacatcgcgctggaaaccgacaatgccgcggcggcctgcgaccgcatccgcgtggcgggcggcaaggtcgcgcgtgaagccggtccggtcaagggcggcacgacggtaatcgccttcgtcgaagacccggacggctacaagatcgaactgatcgagcgccattccacgcgcgacgccagccgtccctga

SEQ ID NO: 78502 - protein, 135 aa, Ralstonia eutropha JMP134
MRLLHTMLRVGDLQRSIDFYTRVLGMQLLRQSDNPEYKYRLAFVGYGPESETAVLELTYNYGVDKYDLGTAYGHIALETDNAAAACDRIRVAGGKVAREAGPVKGGTTVIAFVEDPDGYKIELIERHSTRDASRP

SEQ ID NO: 78503 - DNA, 414 bp, Thiobacillus denitrificans ATCC 25259
  CDS (1)..(414): transl_table=11
atgcgactactccataccatgctgcgggtcggcgatctcgaccgctcgatcgacttctacacccgcgtcctcggcatgacgctgctgcgccgcaaggactacccggacggcaagttcaccctcgctttcctcggctacgagcccgaagaccgggccgccgtgctcgaactgacctacaactggggcgtcgaccgctacgagatcggcacgggctacggccatatcgcgatcgaggtcgacgacgccgcggcagcctgcactgcggccgccgacaagggcgtgcgcatcctgcgcccggcaggcccgatggcgaacggcagcacggtcatcgccttcgtcgaggaccccgacggctatccgatcgagttcatccagaagggaacggccggctgggtcaaggagtgggcggagtag

SEQ ID NO: 78504 - protein, 137 aa, Thiobacillus denitrificans ATCC 25259
MRLLHTMLRVGDLDRSIDFYTRVLGMTLLRRKDYPDGKFTLAFLGYEPEDRAAVLELTYNWGVDRYEIGTGYGHIAIEVDDAAAACTAAADKGVRILRPAGPMANGSTVIAFVEDPDGYPIEFIQKGTAGWVKEWAE

SEQ ID NO: 78505 - DNA, 438 bp, Anabaena variabilis ATCC 29413
  CDS (1)..(438): transl_table=11
atgcgtttactacatacaatgctacgggtgggtaacctggaagagtccttgaaattctactgtgatgtcctgggcatgaagttactacggagaaaggattacccaggaggagaatttaccctagcttttattggctacggtgatgagagcgataacacagttatagaactaacctacaattggggagttgataagtacgaattaggtaatgcttacggtcatattgcccttggtgtagatgatatttatgccacctgtgagtctattaaaaatcagggcggtaaggtggttagggaaccagggccgatgaagcatggctcgactgtgattgcttttgtcgaagacccagatggatacaagatcgaactaatccagttgagtaatcaaagcgagacagtcaaacaggattcatcagaacagctagtgaaacagggttag

SEQ ID NO: 78506 - protein, 145 aa, Anabaena variabilis ATCC 29413
MRLLHTMLRVGNLEESLKFYCDVLGMKLLRRKDYPGGEFTLAFIGYGDESDNTVIELTYNWGVDKYELGNAYGHIALGVDDIYATCESIKNQGGKVVREPGPMKHGSTVIAFVEDPDGYKIELIQLSNQSETVKQDSSEQLVKQG

SEQ ID NO: 78507 - DNA, 393 bp, Streptococcus agalactiae A909
  CDS (1)..(393): transl_table=11
atgccatttttacatacttgtattcgcgttaaagatttggacgcctcaattgctttttatcaagaagcacttggttttaaggaagttcgtcgtaatgactttcctgaaaatcaatttactttagtctatatggccctagaggacgaccctagttacgaattagagttaacctataactatgatcacgaagcttatgatttaggaaatgggtatggtcatattgctgttggtgtagacgatttggaaactacttatgatgcccatcagaaagcaggttactctgtaacaaaaatttctggattaccaggtaaacctaatatgttctactttattcaagatccagatggctataaaattgaagttattcgactcagtcaatttaaagctgactaa

SEQ ID NO: 78508 - protein, 130 aa, Streptococcus agalactiae A909
MPFLHTCIRVKDLDASIAFYQEALGFKEVRRNDFPENQFTLVYMALEDDPSYELELTYNYDHEAYDLGNGYGHIAVGVDDLETTYDAHQKAGYSVTKISGLPGKPNMFYFIQDPDGYKIEVIRLSQFKAD

SEQ ID NO: 78509 - DNA, 522 bp, Pseudomonas fluorescens PfO-1
  CDS (1)..(522): transl_table=11
atgagcctgcaagaactgaacaccttccctggcgtcaccgccatcccggacagcgcaacccgtcacttcgtgttcaaccacaccatgctgcgcgtcaaagacatcaccaagtcgctggatttctacacccgcgtactgggtttctcgctggtagagaagcgtgatttcccggaagcggaattcagcctgtacttcctcgccttggtggacaaatcgcagatcccggccgacgccgctgctcgcaccgagtggatgaagtcgattcccggcattctggaactgacccacaaccatggcaccgagaacgacgcagacttcgcctaccacaacggcaacaccgacccgcgcggtttcggccacatctgcatttcggtaccggacatcgtcgctgcctgcgcgcgctttgaagagctgggctgcgacttccagaagcgtctgaccgatggccgcatgaagagcctggcgttcatcaaggatccggatggctactgggtcgagatcatccagccggcgccgctgtaa

SEQ ID NO: 78510 - protein, 173 aa, Pseudomonas fluorescens PfO-1
MSLQELNTFPGVTAIPDSATRHFVFNHTMLRVKDITKSLDFYTRVLGFSLVEKRDFPEAEFSLYFLALVDKSQIPADAAARTEWMKSIPGILELTHNHGTENDADFAYHNGNTDPRGFGHICISVPDIVAACARFEELGCDFQKRLTDGRMKSLAFIKDPDGYWVEIIQPAPL

SEQ ID NO: 78511 - DNA, 429 bp, Rhodobacter sphaeroides 2.4.1
  CDS (1)..(429): transl_table=11
atgcaggtcaaatatcttcacaccatggtccgggtcctcgacctcgagaagagcatcgccttcttccgcctcctcgggctcgaggagacccgccgcacggagagcgagacggggcgcttcaccctggtcttcatggccccgccgggccagccggaatgcccggtcgaactcacctacaactgggacggcgacgagggattgccttcggacagccgccatttcggccatctggcctatgcggtcgaggatatctacgacatgtgcgccaggctgcaggcggcgggtgtcacgatcaaccgtccgccgcgcgacggccacatggccttcgtccgcagcccggacaatatctcgatcgaactcctgcagatgggcgacagcctgcctccggccgagccctggagctcgatgcagaacaccggccactggtga

SEQ ID NO: 78512 - protein, 142 aa, Rhodobacter sphaeroides 2.4.1
MQVKYLHTMVRVLDLEKSIAFFRLLGLEETRRTESETGRFTLVFMAPPGQPECPVELTYNWDGDEGLPSDSRHFGHLAYAVEDIYDMCARLQAAGVTINRPPRDGHMAFVRSPDNISIELLQMGDSLPPAEPWSSMQNTGHW

SEQ ID NO: 78513 - DNA, 396 bp, Rhodobacter sphaeroides 2.4.1
  CDS (1)..(396): transl_table=11
ttggccaagatgatccacagcatgatccgcgtgcaggacgaggcgcgctcgcttgccttctaccgcgaggccttcggcctcgaggtggccgagcggctcgatttcgagagtttcacgctgctctatctctcgaacgccgaaagcgagttcgagctggagctcaccgtcaacaagggccgcgcggagccctatgcccttggcgacggttacggccatctggcggtctcggtcgcagatgtcgcagccgagcatgcacggctgacggaggcgggcctcaacccccggaaaatagtggattttgcccccggcggcgaggtgatcgcccgcttcttcttcatcgcggatcccgacggataccagattgaagtcttggagcgcggcggccgctacaagtaa

SEQ ID NO: 78514 - protein, 131 aa, Rhodobacter sphaeroides 2.4.1
MAKMIHSMIRVQDEARSLAFYREAFGLEVAERLDFESFTLLYLSNAESEFELELTVNKGRAEPYALGDGYGHLAVSVADVAAEHARLTEAGLNPRKIVDFAPGGEVIARFFFIADPDGYQIEVLERGGRYK

SEQ ID NO: 78515 - DNA, 399 bp, Synechococcus sp. CC9605
  CDS (1)..(399): transl_table=11
atgcggatgcttcacaccatgctccgggtcgctgatctggagcggtctctgggcttctacaccgaggtcctgggcatgcagcttctgcgtcgaaaggattaccccagcggccgcttcaccttggcctttgttggctatggctcggagaaagaccacacggtcctggaactcacccacaactgggacaccgacagctacaccctgggtgatgcctacggccacatcgcgctgggggtggaggacattcacagcacctgcgctggcattgccgacaagggtggtcgtgtggtgcgggagcctggtccgatgaagcacggcaccacggtcatcgcctttgttgaagatccggatggctacaaggtggaattgatcgagatgtcctccaaagcccacgcctga

SEQ ID NO: 78516 - protein, 132 aa, Synechococcus sp. CC9605
MRMLHTMLRVADLERSLGFYTEVLGMQLLRRKDYPSGRFTLAFVGYGSEKDHTVLELTHNWDTDSYTLGDAYGHIALGVEDIHSTCAGIADKGGRVVREPGPMKHGTTVIAFVEDPDGYKVELIEMSSKAHA

SEQ ID NO: 78517 - DNA, 381 bp, Geobacter metallireducens GS-15
  CDS (1)..(381): transl_table=11
atgttcaaacggattgaccatgtggaaatcatcccccgcgatttcgaaagagctatcggcttctacacggaggtattgggattcaaggtcaggcaacggctgaaggtggaagcccctcccctcgaaggaatcgcctatcttgagcttggcgacacggtcattgagctgatgcaggtcagggatgccacaccggcagtggtaaatccatggcagaccggctatcggatgatggccctggaggtggaagatatggaccgggctgtggcctatcttgccggcaaaggggtggcgatcacctggggaccggtgaccttggggacatccaagagggccgagatacaggacgccgatggattctccatcgaattgaggcagtggtga

SEQ ID NO: 78518 - protein, 126 aa, Geobacter metallireducens GS-15
MFKRIDHVEIIPRDFERAIGFYTEVLGFKVRQRLKVEAPPLEGIAYLELGDTVIELMQVRDATPAVVNPWQTGYRMMALEVEDMDRAVAYLAGKGVAITWGPVTLGTSKRAEIQDADGFSIELRQW

SEQ ID NO: 78519 - DNA, 390 bp, Prochlorococcus marinus str. MIT 9312
  CDS (1)..(390): transl_table=11
atgcgcatccttcatacaatgctgagagttggagatttagataaatccattaatttttacgttaatagattaggaatgaatttattaagaaaaaaggattaccctcacggaaaattcactttggcatttgttggttatggttcagaaaaagagaatgcagtgattgaattaacctataactgggataagaagtcagacgactatgagctcggagataagtatggtcatatagctattggagtaaaagatattcatcttatttgccaaggactagaaaataatggttgtaaagtaacaaccaaacctaagacaatgaaaaacagtacaactgtcttggcttttattgaggatcctgatggatataaaattgaacttattgaaagagattaa

SEQ ID NO: 78520 - protein, 129 aa, Prochlorococcus marinus str. MIT 9312
MRILHTMLRVGDLDKSINFYVNRLGMNLLRKKDYPHGKFTLAFVGYGSEKENAVIELTYNWDKKSDDYELGDKYGHIAIGVKDIHLICQGLENNGCKVTTKPKTMKNSTTVLAFIEDPDGYKIELIERD

SEQ ID NO: 78521 - DNA, 414 bp, Synechococcus elongatus PCC 7942
  CDS (1)..(414): transl_table=11
atgcgactactgcatacgatgctgcgagtcggggatctggagcgatcgctacagttttactgcgagatcctgggcatgcagttgctgcggcgcaaggactaccccggtggggaatttacgctggcctttgtgggctacggcgaagaagcagaccacaccgtcctcgagctcacctacaactggggcaaagagcaatacgagctgggcgatgcctacggtcacattgcgatcggcgtcgacgacatctacgccacctgcgaagcgattcgcgccagaggcggcaaaattagccgcgagcccggccccatgaaacatggcagcaccgtgattgcctttgttgaagatcccgatggctacaaagtcgaattaattcaaaccgggacttctggcgccagcgcccagcccgccgcctaa

SEQ ID NO: 78522 - protein, 137 aa, Synechococcus elongatus PCC 7942
MRLLHTMLRVGDLERSLQFYCEILGMQLLRRKDYPGGEFTLAFVGYGEEADHTVLELTYNWGKEQYELGDAYGHIAIGVDDIYATCEAIRARGGKISREPGPMKHGSTVIAFVEDPDGYKVELIQTGTSGASAQPAA

SEQ ID NO: 78523 - DNA, 441 bp, Rhodospirillum rubrum ATCC 11170
  CDS (1)..(441): transl_table=11
atgcgcttcttgcacaccatggtccgcgtcgccgatctcgacgcctccctcgacttctattgcgccaagctcggcctgcgcgaaatcagccgccaggataacgaaaagggccggttcaccctggttttcctcgccgcccccgccgacgaggagacggcccgcgaaaccaaggcgcccttggtcgaactgacctacaactgggatcccgaggtttatacgggcgggcgcaacttcgggcatctcgcctataaggtcgatgacatctatgcgacctgccaaaagctgatggacgccggggtgacgatcaaccgcccgccgcgcgacggcaatatggccttcatccgctcgcccgacggcatttccatcgaactgctccaagaaggcgcgccgctggcgccggccgagccctgggccagcatggccaataccggaagctggtaa

SEQ ID NO: 78524 - protein, 146 aa, Rhodospirillum rubrum ATCC 11170
MRFLHTMVRVADLDASLDFYCAKLGLREISRQDNEKGRFTLVFLAAPADEETARETKAPLVELTYNWDPEVYTGGRNFGHLAYKVDDIYATCQKLMDAGVTINRPPRDGNMAFIRSPDGISIELLQEGAPLAPAEPWASMANTGSW

SEQ ID NO: 78525 - DNA, 390 bp, Burkholderia thailandensis E264
  CDS (1)..(390): transl_table=11
atgcgtttgcttcacacgatgctgcgagtcggcgatctcgaccgctcgatcaagttctacaccgaactgctcggcatgaaactgctgcgccgccaagactatccggacggcaagttcacgctcgcgttcgtcggctacggcgacgagcaggaccacacggtcatcgagctcacccacaactgggacacgaaatcgtacgagctcggcacgggcttcggccatctcgccgtcgaagtcgaggacgcgtacaaggcgtgcgagcagatcaaggcgcaaggcggcaaggtcacgcgcgaagcgggcccgatgaagcacggcacgacggtgatcgcgttcgtcgaagatccggacggctacaagatcgagttcatccagcgcaagactcactga

SEQ ID NO: 78526 - protein, 129 aa, Burkholderia thailandensis E264
MRLLHTMLRVGDLDRSIKFYTELLGMKLLRRQDYPDGKFTLAFVGYGDEQDHTVIELTHNWDTKSYELGTGFGHLAVEVEDAYKACEQIKAQGGKVTREAGPMKHGTTVIAFVEDPDGYKIEFIQRKTH

SEQ ID NO: 78527 - DNA, 438 bp, Novosphingobium aromaticivorans DSM 12444
  CDS (1)..(438): transl_table=11
gtgaccaagttcctgcataccatgattcgcgtgaccgatcccgacgcgactatcgcgttcttcgaactgatcggcctgaaggagacgcggcgcttcgacagcgagaagggccgcttcaccctgatcttcctggcggctcccggcgaggagggcatcgccgaggtcgagctgacctacaactggccgcccgaggacggttcgcccgcagaggggtattcgggcgggcgcaatttcgggcacctcgcgtaccgcgtcgacaatatctatgatacctgccggcgcatcatggatgcaggccatatcgtccaccgtcctccgcgcgacggacacatggccttcgtgaagacgccggacggaatttcgatcgaactgctgcaggacggtcacctgccgccgcaggagccgtgggcgagcatggagaacaccggaacctggtaa

SEQ ID NO: 78528 - protein, 145 aa, Novosphingobium aromaticivorans DSM 12444
MTKFLHTMIRVTDPDATIAFFELIGLKETRRFDSEKGRFTLIFLAAPGEEGIAEVELTYNWPPEDGSPAEGYSGGRNFGHLAYRVDNIYDTCRRIMDAGHIVHRPPRDGHMAFVKTPDGISIELLQDGHLPPQEPWASMENTGTW

SEQ ID NO: 78529 - DNA, 384 bp, Saccharophagus degradans 2-40
  CDS (1)..(384): transl_table=11
atgagacttttacacaccatgctaagggttggcgacctcgatgcgtcgctacatttttatacccaagtattggggatgaaattactgcgcaaacaagatttcccaaccggcaaatttacacttgcgtttgtaggttacggcgaagaaagcgatactgctgtaatagaactaacgcataactgggaaacctcatcgtatgagttgggcaatggttatggccatatcgctttaggggtaaacgatgtatacgctacctgcgaaactatacgagcagcagggggtaaaattgtacgagaggctgggcctatgatgcatggcacaacagttattgcattcgtagaagaccccgatggatataaaatagagctaattgggtgtgagtaa

SEQ ID NO: 78530 - protein, 127 aa, Saccharophagus degradans 2-40
MRLLHTMLRVGDLDASLHFYTQVLGMKLLRKQDFPTGKFTLAFVGYGEESDTAVIELTHNWETSSYELGNGYGHIALGVNDVYATCETIRAAGGKIVREAGPMMHGTTVIAFVEDPDGYKIELIGCE

SEQ ID NO: 78531 - DNA, 399 bp, Methylobacillus flagellatus KT
  CDS (1)..(399): transl_table=11
gtgcgcatattgcataccatgttacgggtcggcgacctggagaagtcgctggcgttctatacccaggtgctcggcatgaagctattgcgccgccatgagtatcctgatggcaagttcacattggcatttgtcggatatggcagcgaacgtgaccaggcggtgatcgagctgacctacaattggtataccagcagttatgacaagggcaatgcctacggccacatcgccatcgaagtggacgacgcctatgccgcgtgcgaagcggtcaggcaggctggtggcaaggtagtgcgcgaggctgggccgatgatgcatggtacgacggtgatcgcctttatcgaggatccggacggctataaggtggagttcatccagaagggtacctggacgccggcctga

SEQ ID NO: 78532 - protein, 132 aa, Methylobacillus flagellatus KT
MRILHTMLRVGDLEKSLAFYTQVLGMKLLRRHEYPDGKFTLAFVGYGSERDQAVIELTYNWYTSSYDKGNAYGHIAIEVDDAYAACEAVRQAGGKVVREAGPMMHGTTVIAFIEDPDGYKVEFIQKGTWTPA

SEQ ID NO: 78533 - DNA, 387 bp, Burkholderia xenovorans LB400
  CDS (1)..(387): transl_table=11
atgcgcctgcttcacaccatgctccgggtcggcgacctggatcgctcgattgccttttacaccgaactgctcggcatgaaactgctgcgccgcgacgattatccggacggcaaattcacgctggcattcgtcggttacgaagatgagcgcgacggcaccgtgctcgaactcacccacaactgggacacgccttcttacgacctcggcaccggtttcggccacctcgccgtcgaagtggacgacgcctacgccgcatgtgacagaatcaaggcacaaggcggcacggtggtgcgcgaagccggcccgatgaagcacggcacgaccgtgatcgcattcgtcacggatccggacggctacaagatcgagttcatccagaagaagaaatga

SEQ ID NO: 78534 - protein, 128 aa, Burkholderia xenovorans LB400
MRLLHTMLRVGDLDRSIAFYTELLGMKLLRRDDYPDGKFTLAFVGYEDERDGTVLELTHNWDTPSYDLGTGFGHLAVEVDDAYAACDRIKAQGGTVVREAGPMKHGTTVIAFVTDPDGYKIEFIQKKK

SEQ ID NO: 78535 - DNA, 399 bp, Burkholderia xenovorans LB400
  CDS (1)..(399): transl_table=11
atggccaaactcatccacacgatgatccgcgtgcacgatctgccgcgttcgctgcagttctatcagaaggctttcaatctggacgtatcgcaccggctcgactttccggatttcacgctcgtgtatttgcgcaacggcgaagccgacgccgaaatagaactcacctggaacaaaggccgcacggagccgtattcgcacggcgacggctacggccacgtggcgttttgcgtcgacgatgcaaagcgcgagcggcagcgtctgctcgatctcggcatgacgcccaatgatctgcgcgagtttcacaacgacgacggcgagttgctggcgcgttactttttcattcaggaccctgacggctacaagatcgaagtgctggaacgctacggccactatcaatag

SEQ ID NO: 78536 - protein, 132 aa, Burkholderia xenovorans LB400
MAKLIHTMIRVHDLPRSLQFYQKAFNLDVSHRLDFPDFTLVYLRNGEADAEIELTWNKGRTEPYSHGDGYGHVAFCVDDAKRERQRLLDLGMTPNDLREFHNDDGELLARYFFIQDPDGYKIEVLERYGHYQ

SEQ ID NO: 78537 - DNA, 408 bp, Ralstonia metallidurans CH34
  CDS (1)..(408): transl_table=11
atgcgactcctccacaccatgctgcgcgttggcgactaccagcgttcgatcgacttctacacgcgcgtgctgggcatgacgctgctgcgcgaaagcgacaatcccgaatacaagtaccgcctggccttcgtcggatacggccccgaaaccgagaccgccgtcatcgaactgacctacaactacggcgtcgacaagtacgatcttggtaccgcctatggccatatcgccctggaagtacccagcgcggccgaagcctgtgagcgcatccggtcggccggcggcaaggtcacccgcgaagccggtccggtcaagggcggcaccacggtgatcgcgttcgtagaggacccggacggctacaagatcgaactgatcgagcgtcactcgacgcgcgacgctgcccgcccgtaa

SEQ ID NO: 78538 - protein, 135 aa, Ralstonia metallidurans CH34
MRLLHTMLRVGDYQRSIDFYTRVLGMTLLRESDNPEYKYRLAFVGYGPETETAVIELTYNYGVDKYDLGTAYGHIALEVPSAAEACERIRSAGGKVTREAGPVKGGTTVIAFVEDPDGYKIELIERHSTRDAARP

SEQ ID NO: 78539 - DNA, 429 bp, Silicibacter sp. TM1040
  CDS (1)..(429): transl_table=11
atgccactcaagtatctgcatacaatggtccgggtcaaagacctggagaaatccatggcgttctatgcgctgctcggcctcaaagaaacccgccgctacgacagcgaggcaggacggttttcgctgatcttcatggcccctcccggccaggaggaggctccggtcgagctcacctggaactgggatggcgacgacgaactgccgtctgacagccgccactttggccacctcgcttatgaagtcgacaatatctacgagacctgccagcacctcatggacaacggtgttgtcattaaccgtccgccccgcgatgggcggatggcgtttgtgcgctcacccgacaatatctcgatcgaattgctgcaggcgggggatgcacttccaccggcagagccttggtccagcatggaaaacaccggtcactggtga

SEQ ID NO: 78540 - protein, 142 aa, Silicibacter sp. TM1040
MPLKYLHTMVRVKDLEKSMAFYALLGLKETRRYDSEAGRFSLIFMAPPGQEEAPVELTWNWDGDDELPSDSRHFGHLAYEVDNIYETCQHLMDNGVVINRPPRDGRMAFVRSPDNISIELLQAGDALPPAEPWSSMENTGHW

SEQ ID NO: 78541 - DNA, 498 bp, Silicibacter sp. TM1040
  CDS (1)..(498): transl_table=11
atgaataccccccaaacgcccgaggattgggccgctgagcatatccttggcatatacgagacccacctgcccgtgcgcgacctcgaccgttcgctggcgttttacaccgggcagctggggctgaagctcgctcgccgcctacccgaacgcgacgtcgcatttctgtggaccggccccaaggaggtggggatgctggggctatggggtgcgggcagtgcgccccttgggatgtccctgcattttgcctttcgcgccaccaaggcggcagtgcttggcgcctgcacgcagttgccggcgcagggcatcacaccgctggggttcaccggagatccgatcacagagccggtggtgctgggctggatgcccgcgatctcggtctatttcaaggatcctgacggccactcgatcgagatgctgcatatgctggaggacgcggcggatccggcctttggcgtccaaagctatagtgattggcaaaaccgggcgtcacaggcgtaa

SEQ ID NO: 78542 - protein, 165 aa, Silicibacter sp. TM1040
MNTPQTPEDWAAEHILGIYETHLPVRDLDRSLAFYTGQLGLKLARRLPERDVAFLWTGPKEVGMLGLWGAGSAPLGMSLHFAFRATKAAVLGACTQLPAQGITPLGFTGDPITEPVVLGWMPAISVYFKDPDGHSIEMLHMLEDAADPAFGVQSYSDWQNRASQA

SEQ ID NO: 78543 - DNA, 396 bp, Silicibacter sp. TM1040
  CDS (1)..(396): transl_table=11
gtgaccaaacttgcccatagcatgatccgcgtcctcgacgagactgcctccgtggcgttttacaaggcggcgttcgacatggagatcgcagaccggctcgattttgatgatttcacgctgatctacctgaccgcgcctgagggcagctttgagttggagctcacagtcaacaaatcccagaccgaggcctatgatctgggcaatggctatggtcatctggctgtggtggtcgaggatctggaagcggcgcgcgccaaggtcgaaaccgcaggcggtgcgccacgcgacatcgtggattttcgccccgcaggcgagcgcgtcgcgcggttcttctttgtggccgaccccgatggctaccagatcgaagtgatcgaggcgggcgggcgtttcaagtaa

SEQ ID NO: 78544 - protein, 131 aa, Silicibacter sp. TM1040
MTKLAHSMIRVLDETASVAFYKAAFDMEIADRLDFDDFTLIYLTAPEGSFELELTVNKSQTEAYDLGNGYGHLAVVVEDLEAARAKVETAGGAPRDIVDFRPAGERVARFFFVADPDGYQIEVIEAGGRFK

SEQ ID NO: 78545 - DNA, 387 bp, Myxococcus xanthus DK 1622
  CDS (1)..(387): transl_table=11
atgcgaatcctgcacaccatgctccgcgtcggtgacctcgagcgctcgctcgacttctacacccggatcatcggcatgaagttgctgcgccgtcacgactaccccgacggcaagttcaccctggccttcgtgggcttcggccccgaggacacccaccccgccctggagctcacgtacaactggggcgtcgagaagtacgagctcggcacggcctacggccacgtggccctgggcgtcagtgacatccacggcacctgcgaggccatccggcaggccggtggcaaggtggtccgcgagcccggccccatgaagcacggcaccaccgtcatcgccttcgtcgaggacccggacggctacaaggtggaactcatccagaaggaccgctga

SEQ ID NO: 78546 - protein, 128 aa, Myxococcus xanthus DK 1622
MRILHTMLRVGDLERSLDFYTRIIGMKLLRRHDYPDGKFTLAFVGFGPEDTHPALELTYNWGVEKYELGTAYGHVALGVSDIHGTCEAIRQAGGKVVREPGPMKHGTTVIAFVEDPDGYKVELIQKDR

SEQ ID NO: 78547 - DNA, 438 bp, Mycobacterium sp. MCS
  CDS (1)..(438): transl_table=11
gtggacatcagccatgtgggcctgcgggtacgcgatctcgagatggccacgaagttctacacggcactcggcttcaccgaggtgaagcgcctgacggtccccgaccagatggcgcagggcctgctcggactggcgccgcccatcggattcgaggcggtgtatctgcgcaacggcggtgtcgtgctgcaattgctgaccttctcgggccacccggcgccggaggaacccgaacgcggaatggtcggagccggtttgacgcatctgtccatcgcggttgcggatctcgccgcggcctgtgacgcggtgacggccgccgggggagcggtggtcgccgacccgggcggcggattcgcctgtatggtccgcgatcccgacggtcaactcctcgaactggtcaacgaacgcgtccgtccggtgccggtcaccgaagctcgctga

SEQ ID NO: 78548 - protein, 145 aa, Mycobacterium sp. MCS
MDISHVGLRVRDLEMATKFYTALGFTEVKRLTVPDQMAQGLLGLAPPIGFEAVYLRNGGVVLQLLTFSGHPAPEEPERGMVGAGLTHLSIAVADLAAACDAVTAAGGAVVADPGGGFACMVRDPDGQLLELVNERVRPVPVTEAR

SEQ ID NO: 78549 - DNA, 420 bp, Rubrobacter xylanophilus DSM 9941
  CDS (1)..(420): transl_table=11
atgccggccgcgttcatccacacctgctacaggatcaccgaccccgagcggaccatagacttctacgtgaacaagctcgggatgaagaaggttggggagatgcacttctccgacgccacgaactacttcttcgccatggaggaggacccctcctccccgatgctggagctcacccacaaccacgaccgcacggggccctacgagaagggcgagggctactcgcacatagcgtttacggtggacgacctggagggtacggtggcgcgcctcgcggagcagggcgtgaaggtggcggtcgagccgaagaccctgaccgtggacgggcacgactacaggatcgccttcgtggaggacccggacggctaccgggtggagctcgtccagcgcggcacgatgaaggtgggggacatgctccagtag

SEQ ID NO: 78550 - protein, 139 aa, Rubrobacter xylanophilus DSM 9941
MPAAFIHTCYRITDPERTIDFYVNKLGMKKVGEMHFSDATNYFFAMEEDPSSPMLELTHNHDRTGPYEKGEGYSHIAFTVDDLEGTVARLAEQGVKVAVEPKTLTVDGHDYRIAFVEDPDGYRVELVQRGTMKVGDMLQ

SEQ ID NO: 78551 - DNA, 393 bp, Rubrobacter xylanophilus DSM 9941
  CDS (1)..(393): transl_table=11
gtgaggatctccggcgcggaccacaccaactggcgggtgcgggacctcgaggcctcgctccgcttctaccgggacgcgctggggctcgagccgttcgggctggaggagcacgcgcggggcgagcgtccgctggtctccctgcgggtgaacgagggctttatcctgcacctggtcccggacccgggcttcgagcgccctcccaccgggggctacgaccacctggcgctcgtcgtggagggcgcgggcatagacgaggtggccgagcgcctgcagcgccgcggcatacggatcgaacgccgcttcgagagcatactcggcgcgcgcggccggggcccggcgctgtacgtgagggaccccgacggctaccgcatagagctgaagttctacgcctga

SEQ ID NO: 78552 - protein, 130 aa, Rubrobacter xylanophilus DSM 9941
MRISGADHTNWRVRDLEASLRFYRDALGLEPFGLEEHARGERPLVSLRVNEGFILHLVPDPGFERPPTGGYDHLALVVEGAGIDEVAERLQRRGIRIERRFESILGARGRGPALYVRDPDGYRIELKFYA

SEQ ID NO: 78553 - DNA, 381 bp, Rubrobacter xylanophilus DSM 9941
  CDS (1)..(381): transl_table=11
gtgaggtatctgcacacctgctaccgggtcctggacctggagcgcagcatagacttctacaccaacaagctcgggctggagctcgtccgcaaggtgcccatcggcgaggaggccaccaacgcgttcatcggggtgccgggcgacccggagccgcggctggagctcaccctgaaccacgaccgccaaaccccctacgagctgggggagggctacagccacgtggccttcgccgtggaggacctcgacgcgctcgccgagcgcctggagcgggcggggggcgtggagttcgagagcaggccgcacgccatcagcaccggcacccggctcttcttcgtccgcgaccccgacggctaccggatagagttcgtggagcgccggtga

SEQ ID NO: 78554 - protein, 126 aa, Rubrobacter xylanophilus DSM 9941
MRYLHTCYRVLDLERSIDFYTNKLGLELVRKVPIGEEATNAFIGVPGDPEPRLELTLNHDRQTPYELGEGYSHVAFAVEDLDALAERLERAGGVEFESRPHAISTGTRLFFVRDPDGYRIEFVERR

SEQ ID NO: 78555 - DNA, 441 bp, Mesorhizobium sp. BNC1
  CDS (1)..(441): transl_table=11
atgcgttacctgcacacgatggtccgcgtacgcgatatcggtgaatcgctggatttttattgcaacaagctcggcatgaaggaggtgcggcgcattgagaatgaggcagggcgctttacgctgatctttctcgccgctccagaggacgtcgaagcagccgagcgccacaaggcgccgctcgtggaattgacctacaactgggatccggaagattatcaaggcggccgcaatttcggccatctggcctatgaggtggacgacatttacgcattttgccagcaccttatggacgcaggcatcaccattaaccgtcctccccgtgacggcaacatggcattcatccgttcacccgacggcatctccatcgagattctgcagaagggcgaagccaagcccaaggccgagccgtgggcctctatgccgaacacgggggcgtggtag

SEQ ID NO: 78556 - protein, 146 aa, Mesorhizobium sp. BNC1
MRYLHTMVRVRDIGESLDFYCNKLGMKEVRRIENEAGRFTLIFLAAPEDVEAAERHKAPLVELTYNWDPEDYQGGRNFGHLAYEVDDIYAFCQHLMDAGITINRPPRDGNMAFIRSPDGISIEILQKGEAKPKAEPWASMPNTGAW

SEQ ID NO: 78557 - DNA, 381 bp, Clostridium perfringens ATCC 13124
  CDS (1)..(381): transl_table=11
atggcaagcaaaatgttacacacatgcataagggtaaaagatttagataaatctttaaagttttataaggaagctttaggacttattgaaacaagaagaatggattatccagaatataaattttctttagtgtatctttcagataaagaagatggatatgaagtagaattaacttataactatgatcaagaaaagccatatgatttagggaatggctttagtcatatagctgtcggggtagaagatatagaagctgaaagagaaagacatatttctttaggatatgaggttacacctatgaaaggtctttcagatggagctgcaacatattattttgtaacagatccagatggctataaagtagaggtaattaaactttag

SEQ ID NO: 78558 - protein, 126 aa, Clostridium perfringens ATCC 13124
MASKMLHTCIRVKDLDKSLKFYKEALGLIETRRMDYPEYKFSLVYLSDKEDGYEVELTYNYDQEKPYDLGNGFSHIAVGVEDIEAERERHISLGYEVTPMKGLSDGAATYYFVTDPDGYKVEVIKL

SEQ ID NO: 78559 - DNA, 411 bp, Haemophilus somnus 129PT
  CDS (1)..(411): transl_table=11
atgagaattttacatactatgttacgtgtgggcgatatggatcgctcgatccacttttatcaacaggtattaggtatgcgtttattgcgtacaagtgaaaacactgaatataaatattctttagcttttttaggctatgatgatgaagaaaactcatctgttattgagctaacttataactggggtgtaagtaaatatgaaatggggactgcttatggtcacattgctattggagttgaagatatttatgccacttgtaaagcggttaaagaagcaggtgggaaaattactcgtgagcctggtccagtaaaaggcggaaaaactgtcatcgcatttgtggaagatcctgatggctataaaattgagtttattgaaaataaaatggcacaagcagggctaggtaatcaataa

SEQ ID NO: 78560 - protein, 136 aa, Haemophilus somnus 129PT
MRILHTMLRVGDMDRSIHFYQQVLGMRLLRTSENTEYKYSLAFLGYDDEENSSVIELTYNWGVSKYEMGTAYGHIAIGVEDIYATCKAVKEAGGKITREPGPVKGGKTVIAFVEDPDGYKIEFIENKMAQAGLGNQ

SEQ ID NO: 78561 - DNA, 429 bp, Trichodesmium erythraeum IMS101
  CDS (1)..(429): transl_table=11
atgcgactcttacacaccatgctgcgagtcaataacttagaaaaatctatagaattctactgtgatgtcctcggcatgaaactactacgtaaaaaagatttccctggtggcaaatttactctagctttcgttggttatggcgatgagttaaaccatacagtattagaactgacctataactgggacactgataaatacgatttaggcaatgcttatggccatattgccttgggtgttgatgatatttatagcacttgcgaaaaaattaaagaacaagggggtaaagttactagggaaccagggccaatgaagcatggttctacagttattgcttttatagaagacccaaatggatataaagtagagctaattgagttaaagagtgacaacagcagcttagaaaaaaaagttgcagctaatactaattga

SEQ ID NO: 78562 - protein, 142 aa, Trichodesmium erythraeum IMS101
MRLLHTMLRVNNLEKSIEFYCDVLGMKLLRKKDFPGGKFTLAFVGYGDELNHTVLELTYNWDTDKYDLGNAYGHIALGVDDIYSTCEKIKEQGGKVTREPGPMKHGSTVIAFIEDPNGYKVELIELKSDNSSLEKKVAANTN

SEQ ID NO: 78563 - DNA, 471 bp, Synechococcus sp. CC9311
  CDS (1)..(471): transl_table=11
atggaacgccccctgccacgtctgtttgtgttttggcagcatgaggaaagaacaggtggaatcagcaacatgcgcatgcttcacaccatgctcagagtgggcgatttggagcgatcaatccgcttctacaccgaggtcttgggtatgcaactgctgcgtcgtaaggattacccctccggtcgcttcacgcttgcgtttgtgggatatggggatgagcgcgacaacaccgttcttgagctgacccacaactgggacaccgcggaatatgcccttggtgatggttatggccacattgctcttggtctcgatgacatctattcggcttgcactgcgattgcagaaaagggagggcgggttgtccgtgagcctggtccgatgaaacatggcaacaccgtgattgctttcgttgacgatccagatggctacaaggtggaactcattcaggtttcctcccgatcagacgcggcctaa

SEQ ID NO: 78564 - protein, 156 aa, Synechococcus sp. CC9311
MERPLPRLFVFWQHEERTGGISNMRMLHTMLRVGDLERSIRFYTEVLGMQLLRRKDYPSGRFTLAFVGYGDERDNTVLELTHNWDTAEYALGDGYGHIALGLDDIYSACTAIAEKGGRVVREPGPMKHGNTVIAFVDDPDGYKVELIQVSSRSDAA

SEQ ID NO: 78565 - DNA, 411 bp, Shewanella sp. MR-4
  CDS (1)..(411): transl_table=11
atgtcacaactgttacacaccatgcttcgcgtcggtaacttagaacgcagtatcgctttttacactcaagtgctgggcatgaagctgctacgcacctccaaaaatccagagtacaaatattccctcgccttcgtgggttacggtgaagaatcaacgggtcaggccgtcatcgagttaacctacaactggggaacggaaaaatacgatctcggcacggcctttggtcatattgccatcggtgatgaagacatttatgcccgctgtgaagccattgccgctgcgggtggtaaagtcacccgcgcgcccggccctgttgctggcggcaccactgaaatcgcgtttgtggaagatcccgacggttataagattgaatttattcaaatgaagtcggcgacccaaggtttaggttaa

SEQ ID NO: 78566 - protein, 136 aa, Shewanella sp. MR-4
MSQLLHTMLRVGNLERSIAFYTQVLGMKLLRTSKNPEYKYSLAFVGYGEESTGQAVIELTYNWGTEKYDLGTAFGHIAIGDEDIYARCEAIAAAGGKVTRAPGPVAGGTTEIAFVEDPDGYKIEFIQMKSATQGLG

SEQ ID NO: 78567 - DNA, 411 bp, Shewanella sp. MR-7
  CDS (1)..(411): transl_table=11
atgtcacaactgttacacaccatgcttcgcgtcggtaacttagaacgcagtatcgctttttacactcaagtgctgggcatgaagctgctacgcacctccgaaaatccagagtacaaatattccctcgccttcgtgggttacggtgaagaatcaacgggtcaggccgtcatcgagttaacctacaactggggtacggaaaaatacgatctcggcacggcctttggtcatattgccatcggtgatgaagacatttatgcccgctgtgaagccattgccgctgcgggtggtaaagtcacccgcgcgcccggccctgttgctggcggcaccactgaaatcgcgtttgtggaagatcccgacggttataagattgaatttattcaaatgaagtcggcgacccaaggtttaggttaa

SEQ ID NO: 78568 - protein, 136 aa, Shewanella sp. MR-7
MSQLLHTMLRVGNLERSIAFYTQVLGMKLLRTSENPEYKYSLAFVGYGEESTGQAVIELTYNWGTEKYDLGTAFGHIAIGDEDIYARCEAIAAAGGKVTRAPGPVAGGTTEIAFVEDPDGYKIEFIQMKSATQGLG

SEQ ID NO: 78569 - DNA, 444 bp, Alkalilimnicola ehrlichei MLHE-1
  CDS (1)..(444): transl_table=11
atgcagtacctgcacaccatggtgcgtgtcagcgatctcgatgcgtcactggatttctactgcaacaagctcgggctggtggagatcagccgtaaggagagcgaaaaggggcgttttaccctggtcttcctggcggccccggacgacgaggcgcgggcgcgcagcgcggacaaggcgccgatgttggagctgacctacaactgggacccggagacctataccggtggccgcaacttcggccacctggccttccgggtgccggatatctatgggctgtgccagcggttgatggacagcggcgtcaccatcaaccggccgccccgggacggccacatggccttcgtccgctcgccggatggcatctccattgagctgctgcaggcgggtgaggcgctgccgcccaaagagccctgggcctccatggcgaacaccggcacgtggtag

SEQ ID NO: 78570 - protein, 147 aa, Alkalilimnicola ehrlichei MLHE-1
MQYLHTMVRVSDLDASLDFYCNKLGLVEISRKESEKGRFTLVFLAAPDDEARARSADKAPMLELTYNWDPETYTGGRNFGHLAFRVPDIYGLCQRLMDSGVTINRPPRDGHMAFVRSPDGISIELLQAGEALPPKEPWASMANTGTW

SEQ ID NO: 78571 - DNA, 474 bp, Hyphomonas neptunium ATCC 15444
  CDS (1)..(474): transl_table=11
atgagccctgaattcctccacaccatgatccgcgtcggcgacatcgacgctgccaagcgcttcttctgcgacggcctcggcctggccgaagtcacccgctacgacaatgaagcgggccgcttcaccctcgtcttcctcgccgccccggcagacattgaacggggtggcggcgtgcccgaaggcgcctcgcccacctcgctgaacatcccgatgatcgagctcacccataactgggacgagaaggattatgagggcgggcgcaatttcggccacctcgcctatcaggtcgaggacatctacgccgccacccagcgcttcgccgatctcggcgtccccattagccgcccaccccgcgacggccgcatgaccttcatccgctccccggacggtatctccgtcgaacttctgcaaaagggcaaaccccaggccccgcaggaaccctgggccagcgccccgaatatcggggcgtggtga

SEQ ID NO: 78572 - protein, 157 aa, Hyphomonas neptunium ATCC 15444
MSPEFLHTMIRVGDIDAAKRFFCDGLGLAEVTRYDNEAGRFTLVFLAAPADIERGGGVPEGASPTSLNIPMIELTHNWDEKDYEGGRNFGHLAYQVEDIYAATQRFADLGVPISRPPRDGRMTFIRSPDGISVELLQKGKPQAPQEPWASAPNIGAW

SEQ ID NO: 78573 - DNA, 396 bp, Rhizobium leguminosarum bv. viciae 3841
  CDS (1)..(396): transl_table=11
ttggcgaagatgatccactccatgatccgcgttctcgatgaggcgcgctccgtcgaattctacgagagggcattcggcctttcggtcgccgaccgcgtcgatttcgaaaccttcacgctgatctatatgagcaatgccgagaccggcttcgagctggaactgaccgtcaacaagggccggaccgcgccctatgacctcggcaatgcctacggccatctcgccgtctcggtcgaagaggtggcggtcgagcgcgagcggctgtcaaagctcgggctgaagcccggtgaactggtggagctcaaccgcgacggcaagctctttggcctgttctttttcatcagcgatcccgatggctacaagatcgaggtgctgcagcgccacggccggtttctctga

SEQ ID NO: 78574 - protein, 131 aa, Rhizobium leguminosarum bv. viciae 3841
MAKMIHSMIRVLDEARSVEFYERAFGLSVADRVDFETFTLIYMSNAETGFELELTVNKGRTAPYDLGNAYGHLAVSVEEVAVERERLSKLGLKPGELVELNRDGKLFGLFFFISDPDGYKIEVLQRHGRFL

SEQ ID NO: 78575 - DNA, 441 bp, Rhizobium leguminosarum bv. viciae 3841
  CDS (1)..(441): transl_table=11
atgcgttatctacatacaatggttcgtgtcaaagacctggacacgtcgcttgccttttacaccacgctgttcggactggaggaaattcgccgccacgaaaacgagaagggccgcttcaccctggttttcctggctgctcgcgacgatctcgaccgtgcgcgcagcgaaaaagccccctgcctcgagcttacctacaattgggacacggaagattatagcggaggtcgcaatttcggccacctcgcctatgaggtcgacgatatttacgccacctgccagaatctgatggacaacggcatcaccatcaaccggccgccgcgcgacgggaacatggccttcgtgcgctcgcccgacggcatctcgatcgaaatcctgcagaagggcaacccgcttccggccactgagccctgggcctcgatgggcaataccggcgcctggtaa

SEQ ID NO: 78576 - protein, 146 aa, Rhizobium leguminosarum bv. viciae 3841
MRYLHTMVRVKDLDTSLAFYTTLFGLEEIRRHENEKGRFTLVFLAARDDLDRARSEKAPCLELTYNWDTEDYSGGRNFGHLAYEVDDIYATCQNLMDNGITINRPPRDGNMAFVRSPDGISIEILQKGNPLPATEPWASMGNTGAW

SEQ ID NO: 78577 - DNA, 396 bp, Pseudomonas aeruginosa UCBPP-PA14
  CDS (1)..(396): transl_table=11
atgcgaatcctgcacagcatgctccgcgtggccgatctcgaggccgcgctggagttctacacccgcgccctggacatgcgtctgctacggcgccgggactatcccgaaggccgcttcaccctggccttcgtcggctaccaggacgagcgcgcggccgctgccctggagttgacccacaactgggaccgggacggctacacccagggcgacggctacggccacctggccatcgaggtcgaggatgccgccgtcacctgcgcccgggccagggcgctgggctatcgggtcacccgcgaggccgggccgatgcagcacggacgcagcgtgatcgccttcctcgaagacccggacggctacaaggtggaactgatccagaagggtacccagttcgattga

SEQ ID NO: 78578 - protein, 131 aa, Pseudomonas aeruginosa UCBPP-PA14
MRILHSMLRVADLEAALEFYTRALDMRLLRRRDYPEGRFTLAFVGYQDERAAAALELTHNWDRDGYTQGDGYGHLAIEVEDAAVTCARARALGYRVTREAGPMQHGRSVIAFLEDPDGYKVELIQKGTQFD

SEQ ID NO: 78579 - DNA, 441 bp, Magnetococcus sp. MC-1
  CDS (1)..(441): transl_table=11
atgcggtttttacataccatggtgcgggtggcggatttagaggcgtcgctgcatttttaccgggatctgttggggttggttgagacccagcgcaaggagagtcaggcggggcggtttaccctggtctatctggccgcgccggaggatctggagcgggccaagggggagcaggcgccagagattgagcttacctacaattgggagagtgagtgttacagcggtgggcgtaattttggccatatagcgctgttggttgaggatatttatgcggtttgtgcacggatgcagcagggtggtgtgacgattttgcggccaccgcgagatgggcacatggccttttttcgtagtcccgatgggattagtattgaattactgcaaaaaggggaggccctgcctatgcaagagccctgggccagtatggtcaacagcggtagttggtag

SEQ ID NO: 78580 - protein, 146 aa, Magnetococcus sp. MC-1
MRFLHTMVRVADLEASLHFYRDLLGLVETQRKESQAGRFTLVYLAAPEDLERAKGEQAPEIELTYNWESECYSGGRNFGHIALLVEDIYAVCARMQQGGVTILRPPRDGHMAFFRSPDGISIELLQKGEALPMQEPWASMVNSGSW

SEQ ID NO: 78581 - DNA, 402 bp, Azoarcus sp. BH72
  CDS (1)..(402): transl_table=11
atgccaaagccaaaactcatccacaccatgatccgggtcctggacctggacaaatcactggccttctaccgcgacgccctcgggctggaggaggcctaccggctcgattttccggacttcgcgctggcctacctgcgcaatgccgagaacgacttcgagctggaactcacgctcaacaagggccgcagcgaggcctacacccacggtagcggctacggccacatcgcggtctgtgtcgacgacgtcgaggccgagcaccgccggcttgccgggctggggctggggccgaccgacgtcaagcgtttcgccgatggcgacgcgctgatcgcccgcttcttcttcatccaggaccccgatggctacaaggtcgaggtgctggagcgccacggccattaccagtga

SEQ ID NO: 78582 - protein, 133 aa, Azoarcus sp. BH72
MPKPKLIHTMIRVLDLDKSLAFYRDALGLEEAYRLDFPDFALAYLRNAENDFELELTLNKGRSEAYTHGSGYGHIAVCVDDVEAEHRRLAGLGLGPTDVKRFADGDALIARFFFIQDPDGYKVEVLERHGHYQ

SEQ ID NO: 78583 - DNA, 369 bp, Azoarcus sp. BH72
  CDS (1)..(369): transl_table=11
atgttgcgtgtcggcgatcttgatcggtcgctggcgttttataccgaggtgctcgggatgcgtctgctgcgtcgtaacgactatccggacggcaagttcacgctggcctttgtcggctatcaggacgaggcggacggcgcggtgctggaactgacccacaactggggcgtggagcgctatgaactcggcaccgcgtacggtcatattgcgctcgaggtgccggatgcggccaaggcatgcgacgagatccgggcccgtggaggcaaggtggtgcgcgaggccgggccgatgaaacacggttcgaccgtgatcgcctttgtcgaggacccggatggctacaaggtggaactgatcgaaaggcgcgcttag

SEQ ID NO: 78584 - protein, 122 aa, Azoarcus sp. BH72
MLRVGDLDRSLAFYTEVLGMRLLRRNDYPDGKFTLAFVGYQDEADGAVLELTHNWGVERYELGTAYGHIALEVPDAAKACDEIRARGGKVVREAGPMKHGSTVIAFVEDPDGYKVELIERRA

SEQ ID NO: 78585 - DNA, 417 bp, Acidovorax sp. JS42
  CDS (1)..(417): transl_table=11
atgagacttctgcacaccatgctgcgcgttggcaatctccagcgctccatcgatttctacacccaggtgctgggcatgcagttgctgcgcacctccgaaaaccctgaatacaaatactctctggccttcctgggcttcgagggcggcaaccccggccaggccgagatcgagctgacgtacaactggggggtggaaagctatgagatgggcacagcctacggccacattgccctgggcgtgcccgacgcctacgccgcctgcgagaagatcaaggccgccggcggcaccgtgacacgcgaggccgggccggtcaagggtggcaccacggtgatcgcctttgtgaccgaccctgacggttacaagattgaattgatcgagcgcaagagcgatgccggcgcaggcaccggtctgcgctag

SEQ ID NO: 78586 - protein, 138 aa, Acidovorax sp. JS42
MRLLHTMLRVGNLQRSIDFYTQVLGMQLLRTSENPEYKYSLAFLGFEGGNPGQAEIELTYNWGVESYEMGTAYGHIALGVPDAYAACEKIKAAGGTVTREAGPVKGGTTVIAFVTDPDGYKIELIERKSDAGAGTGLR

SEQ ID NO: 78587 - DNA, 441 bp, Magnetospirillum magnetotacticum MS-1
  CDS (1)..(441): transl_table=11
atggaatacctgcacacgatggtccgtgtggcggatctcgaccgcgcgctcgccttctacgtcgataccttcggcctcaaggaggtccggcgggtcgagaacgagaagggccgcttcaccctggtcttcctcgccgcgccgggggacgtggcgcgggccgaggccgagaagtcgcccctgatcgagctgacctataactgggatccggaggaatattcgggcgggcgcaacttcgggcacctcgcctatcaggtcgacgacatctacgccttctgccagcggctgaaggaggccggggtgaccatcaaccggccgccccgcgacgggcatatggccttcgtgcgctcgcccgacggcatctccatcgaaatcctgcaaaagggcggcgcgaagccgccgcaggagccctgggcgtccatggaaaataccggctcgtggtga

SEQ ID NO: 78588 - protein, 146 aa, Magnetospirillum magnetotacticum MS-1
MEYLHTMVRVADLDRALAFYVDTFGLKEVRRVENEKGRFTLVFLAAPGDVARAEAEKSPLIELTYNWDPEEYSGGRNFGHLAYQVDDIYAFCQRLKEAGVTINRPPRDGHMAFVRSPDGISIEILQKGGAKPPQEPWASMENTGSW

SEQ ID NO: 78589 - DNA, 396 bp, Magnetospirillum magnetotacticum MS-1
  CDS (1)..(396): transl_table=11
atggctaagcccgtccacaccatgatccgcgtccgcgacgaggcgcgctcgcgcgactactacgcccgcgccttcggccttgagccggccgaccgcttcgacttcccggatttcacgctgctctacctgcgcgatccggcctcgccgttcgagctggagctgacggtcaacaaggaccgctccgagccctacaatctcggcgacggctacggccacctcgccttcgtggtggaggatgccgaggcggaacatgcccggttcgagcgggagggttttccggtcaccccggtcaagacgctcaagcacggggacacgccgctggcgcgcttcttcttcgccaccgacccggacggctacaagatcgaggtgatccagaagggcgggcgcttcgcctga

SEQ ID NO: 78590 - protein, 131 aa, Magnetospirillum magnetotacticum MS-1
MAKPVHTMIRVRDEARSRDYYARAFGLEPADRFDFPDFTLLYLRDPASPFELELTVNKDRSEPYNLGDGYGHLAFVVEDAEAEHARFEREGFPVTPVKTLKHGDTPLARFFFATDPDGYKIEVIQKGGRFA

SEQ ID NO: 78591 - DNA, 435 bp, Nostoc punctiforme PCC 73102
  CDS (1)..(435): transl_table=11
atgcgattactacatacaatgctacgggtagccaatctggaagagtcgttgaagttttactgtgaacttttgggtatgaaattactgcgccgaaaagattatccagggggagaatttaccctggcttttgtgggctatggtgacgaaagcgacaacgcagtaattgaactaacctacaactggggtgtagaaaaatatgaattgggtaatgcttacggtcacattgcccttggagttgatgatatttacgctacctgtgaagaaatccgcaatcagggcggtaaagtcgtgcgcgaaccagggccgatgaaacatggttcgacagtaattgcttttgtggaagatccagatgggtataaaattgagctgattcaactaggatctcaaggttcggcagccaaagaggaatcacaagagcaacttgtgagtcagtaa

SEQ ID NO: 78592 - protein, 144 aa, Nostoc punctiforme PCC 73102
MRLLHTMLRVANLEESLKFYCELLGMKLLRRKDYPGGEFTLAFVGYGDESDNAVIELTYNWGVEKYELGNAYGHIALGVDDIYATCEEIRNQGGKVVREPGPMKHGSTVIAFVEDPDGYKIELIQLGSQGSAAKEESQEQLVSQ

SEQ ID NO: 78593 - DNA, 408 bp, Actinobacillus pleuropneumoniae serovar 1 str. 4074
  CDS (1)..(408): transl_table=11
atgcgaattttacataccatgttacgcgtgggcgatttagatcgttcaattaaattttataccgaagtattaggtatgcgtttacttcgtaccagcgaaaaccctcaatataaatattcattagcatttgtcggttatgcggacgaaagtgaaagtgcggtaatcgaattaacttataactggggcgtagaaagttatgagttaggtacggcattcggtcacgtggcgttaggcgtggatgacatttatgcaacgatcgaaagcgtacgtgcggcgggcggtaaaattacccgtgagccgggtccggtattaggcggaacaacggtcatcgcgtttgccgaagatccggacggttataaaatcgagtttatcgaaaataaaaatgcacaggctgcattaggtaactaa

SEQ ID NO: 78594 - protein, 135 aa, Actinobacillus pleuropneumoniae serovar 1 str. 4074
MRILHTMLRVGDLDRSIKFYTEVLGMRLLRTSENPQYKYSLAFVGYADESESAVIELTYNWGVESYELGTAFGHVALGVDDIYATIESVRAAGGKITREPGPVLGGTTVIAFAEDPDGYKIEFIENKNAQAALGN

SEQ ID NO: 78595 - DNA, 372 bp, Fusobacterium nucleatum subsp. vincentii ATCC 49256
  CDS (1)..(372): transl_table=11
atgaaatttcattttttacatgaaaattttaatgttttagatttagaaaaaagcataaaattttataatgaagctcttggactaaaagttgtaagagaaaaatttgcagaagatggaagctacaaaataatctatttaggcgatgatataactcatttccaattagaattaacttggcttgctgatagaacagaaaaatatgatttaggtgatgaagagtttcatttagcttttgaagtagataattatgaagaagcatttaaaaaacatacagaaatgggatgtgttgtttttgtaaatgaaaaaatgggtatatattttataacagatcctgatggatattggttagaaattttaccatctaagaaataa

SEQ ID NO: 78596 - protein, 123 aa, Fusobacterium nucleatum subsp. vincentii ATCC 49256
MKFHFLHENFNVLDLEKSIKFYNEALGLKVVREKFAEDGSYKIIYLGDDITHFQLELTWLADRTEKYDLGDEEFHLAFEVDNYEEAFKKHTEMGCVVFVNEKMGIYFITDPDGYWLEILPSKK

SEQ ID NO: 78597 - DNA, 408 bp, Haemophilus influenzae R2846
  CDS (1)..(408): transl_table=11
atgcaaattttacacactatgttacgcgtgggcgatttagatcgttcaatcaaattttaccaagatgttttaggtatgcgtttattacgcaccagtgaaaacccagaatacaaatatacgctggcttttttaggttacgaaaatggcgaaagtgcggcagaaattgaattaacatacaactggggcgtagataaatatgaacacggcactgcatatggacatatcgctatcggcgtagatgatatttatgcgacttgtgaagccgttcgcacgagcggtggtaacgttactcgcgaagcagggccagttaaaggtggctcaaccgtcattgcttttgttgaagatcccgatggttataaaattgaatttatcgaaaacaaaagtactaaatctggtttaggcgactaa

SEQ ID NO: 78598 - protein, 135 aa, Haemophilus influenzae R2846
MQILHTMLRVGDLDRSIKFYQDVLGMRLLRTSENPEYKYTLAFLGYENGESAAEIELTYNWGVDKYEHGTAYGHIAIGVDDIYATCEAVRTSGGNVTREAGPVKGGSTVIAFVEDPDGYKIEFIENKSTKSGLGD

SEQ ID NO: 78599 - DNA, 390 bp, Listeria monocytogenes str. 1/2a F6854
  CDS (1)..(390): transl_table=11
atgactgcaaaaatgttacatacatgtatccgcgtaaaaaacctaacagaatcaattactttttatgaaaaagcattaggacttaaagaagttcgccgcaaggacttcccggatttcgaatttacgttagtttatatggcgtttgaagaaggcggttttgaactagaattaacgtacaactacgaccaaaaagaagcctacgatttaggaaatggttacggtcacttagcggttggtgttccggacgtacgtgctttattaaaagaacaccaagaagctggttttactgtgacagatttaaaaggactacctggcgaagacccattctattatttcttaacagatccagatggttataaaacagaaatcattcaagatggcgctttataa

SEQ ID NO: 78600 - protein, 129 aa, Listeria monocytogenes str. 1/2a F6854
MTAKMLHTCIRVKNLTESITFYEKALGLKEVRRKDFPDFEFTLVYMAFEEGGFELELTYNYDQKEAYDLGNGYGHLAVGVPDVRALLKEHQEAGFTVTDLKGLPGEDPFYYFLTDPDGYKTEIIQDGAL

SEQ ID NO: 78601 - DNA, 393 bp, Bacillus cereus G9241
  CDS (1)..(393): transl_table=11
atgccagttagaagaattgaacacattggactcatggttgcaaacttagaaacatctatttccttttatgaaaaagtagttggcttacagctcattaagcgaatggggcacccgaatccagacttaaaactcgcttttttaggtgtggaagaatcaaaagagacgatactcgaattaattgagggctacaactcttcccttccggcagaaggaaaagtacatcacatttgctttaaggtagattcattagaggatgaaatcgaaagactaaagaaacataaagtaacctttttactaggagaagaaatcgaaacattaccagatggaacacgttacatattcttcgcgggtcctgatggagagtggattgagttttttgagacggagagataa

SEQ ID NO: 78602 - protein, 130 aa, Bacillus cereus G9241
MPVRRIEHIGLMVANLETSISFYEKVVGLQLIKRMGHPNPDLKLAFLGVEESKETILELIEGYNSSLPAEGKVHHICFKVDSLEDEIERLKKHKVTFLLGEEIETLPDGTRYIFFAGPDGEWIEFFETER

SEQ ID NO: 78603 - DNA, 429 bp, Crocosphaera watsonii WH 8501
  CDS (1)..(429): transl_table=11
atgcgtcttttacatacgatgttaagggttaaagacctggaagaatcccttaaattctattgtgatattttaggcatgaaactacttcgccaaaaagattatccagggggtgagtttactcttgcttttgttggttatggtgatgagtccgataattcagttatagaattaacctataattggggtgttgactcctatgacttgggtgatgcttatggacatattgctttaggagtccatgatatctatggaacttgtgaaaaaattagagagcaaggtggcaatattaccagagaaccgggtcccatgaaacacgggacaacagttattgcttttgtagaagatcctaacggttataaggttgagttgattcaaataggaacccagggatcagctaaaaaagaaacagaaaccgcaaaggcagcttag

SEQ ID NO: 78604 - protein, 142 aa, Crocosphaera watsonii WH 8501
MRLLHTMLRVKDLEESLKFYCDILGMKLLRQKDYPGGEFTLAFVGYGDESDNSVIELTYNWGVDSYDLGDAYGHIALGVHDIYGTCEKIREQGGNITREPGPMKHGTTVIAFVEDPNGYKVELIQIGTQGSAKKETETAKAA

SEQ ID NO: 78605 - DNA, 528 bp, Xylella fastidiosa Dixon
  CDS (1)..(528): transl_table=11
atgcaccccaaaaacttccaacatcagctcaaaaccatcccacaaccgccggacgaaacccgggacttcgtgttcaatcacaccatgctacgggtcaaagagatcaacgcttctctggatttctacgctcgcatactcggcttccgcctgatcgaccaacgggacttccccgaagcacaattcagcctgtacttcctcgcactgttaccccagacggtacacatctcagacaatgacaccgaacgccgcctgtggatgtccggcatccccggagtccttgaattgacccacaactacggaaccgaaacccaagaaggacagatctaccacaacggcaacagcgaaccacgcggctttggccacatctgcatctccgtgcccgatctgtacagcgcctgcgcacgttttgacacactccaagtgccttatcaaaaacgcctaaccgatggccgcatgaaaaacatcgccttcatcaaagatccagacggctactgggtagaaatcatctccaacacaccgctgccataa

SEQ ID NO: 78606 - protein, 175 aa, Xylella fastidiosa Dixon
MHPKNFQHQLKTIPQPPDETRDFVFNHTMLRVKEINASLDFYARILGFRLIDQRDFPEAQFSLYFLALLPQTVHISDNDTERRLWMSGIPGVLELTHNYGTETQEGQIYHNGNSEPRGFGHICISVPDLYSACARFDTLQVPYQKRLTDGRMKNIAFIKDPDGYWVEIISNTPLP

SEQ ID NO: 78607 - DNA, 384 bp, Streptococcus suis 89/1591
  CDS (1)..(384): transl_table=11
atggcaagtaaaaaaatgttgcacgcttgtttgcgtgttgagaacttagaagcatctcaaaaattttatgaagaagcatttggatttaaggaaacccgtcgtaaggactatccagagcacaagtttaccttggtttacttagcacttgaaggagatggctttgagattgaattgacctacaattatgatcatggtccctatatcgtaggcgacggtttctcgcatctagctctttcttcagatgatttagaaggagacaatgctaagcataaggagctgggctatccaacgacagacatcaagagcttgccaggaagtccaggtcgttattattttgtgacagctccagatggctaccgtgtggaagtcattcgtgcagattaa

SEQ ID NO: 78608 - protein, 127 aa, Streptococcus suis 89/1591
MASKKMLHACLRVENLEASQKFYEEAFGFKETRRKDYPEHKFTLVYLALEGDGFEIELTYNYDHGPYIVGDGFSHLALSSDDLEGDNAKHKELGYPTTDIKSLPGSPGRYYFVTAPDGYRVEVIRAD

SEQ ID NO: 78609 - DNA, 435 bp, Sulfitobacter sp. EE-36
  CDS (1)..(435): transl_table=11
atgccgatcaaatatttgcacacgatggtgcgcgtcaaggatctggagaaatcgcaagccttctacgagctgctgggcctgaaagagcgccgccggatcgacaatgaggatgggcggttttcgctgatcttcatgtgccctcccgggcaggacgacggccatgcggatgtggagctgacctataactgggacggcgatgatgcgctgcccgatgacagccgtcatttcgggcacctcgcctataccgttgaaaacatttatgaaacctgcaagatgttgcaagagaacgggatcacgatcaaccgtcctccgcgcgacgggtatatggcgttcatccggtcgcccgacaatgtgtcggtcgaattgctgcaagaaggggaccggctggagccgcaggaaccctgggccagcatggaaaacaccggccattggtaa

SEQ ID NO: 78610 - protein, 144 aa, Sulfitobacter sp. EE-36
MPIKYLHTMVRVKDLEKSQAFYELLGLKERRRIDNEDGRFSLIFMCPPGQDDGHADVELTYNWDGDDALPDDSRHFGHLAYTVENIYETCKMLQENGITINRPPRDGYMAFIRSPDNVSVELLQEGDRLEPQEPWASMENTGHW

SEQ ID NO: 78611 - DNA, 396 bp, Roseovarius nubinhibens ISM
  CDS (1)..(396): transl_table=11
atggcaaaactgatccacgggatgatccgggttctcgacgaggaacggtcggtgaatttctatcgcgaggcctttgggcttcgggttgaaaagcggctcgatttcacctcattcacgcttgtttacctgcgaaatgaggaagcggatttcgagattgagctgaccatcaacaaggatcgcgaggcggcctatgaccttggcgatggctatggtcacatggcggttgtggtggaggatctcgaggccgagcacgcgcggtttcaggaggccgggctcaacccgcgcaagcttgtcgagtttgcgccggatggcgagctgatcgccaagttctttttcgtggcggacccggatggctatgagatcgaagtgatgcagcgccatgggcggtatcggtaa

SEQ ID NO: 78612 - protein, 131 aa, Roseovarius nubinhibens ISM
MAKLIHGMIRVLDEERSVNFYREAFGLRVEKRLDFTSFTLVYLRNEEADFEIELTINKDREAAYDLGDGYGHMAVVVEDLEAEHARFQEAGLNPRKLVEFAPDGELIAKFFFVADPDGYEIEVMQRHGRYR

SEQ ID NO: 78613 - DNA, 423 bp, Roseovarius nubinhibens ISM
  CDS (1)..(423): transl_table=11
gtgaaatatctgcacacgatggtccgcgtgaaggatctcgaggcgtcgatgcgcttttacgaattgctcgggctgcgcgagacccgccgctatgacagcgaagagggccggttctcgctcatcttcatggcgccgccgggacaggaggactgcccggtcgagctcacctataattgggatggcgatgacgcgctgccctcggacagtcgccattttggccatctcgcctacgaggtcgaaaacatctatgccacctgccagtatctgctcgacaatggggtggtgatcaaccggccgccgcgcgatgggcggatggcctttgtgcgcagccccgacaatatctcggtcgagctgttgcaggcgggcgatccgctgcccgccgaggcgccgtggtcggcgatggagaacaccggacattggtga

SEQ ID NO: 78614 - protein, 140 aa, Roseovarius nubinhibens ISM
MKYLHTMVRVKDLEASMRFYELLGLRETRRYDSEEGRFSLIFMAPPGQEDCPVELTYNWDGDDALPSDSRHFGHLAYEVENIYATCQYLLDNGVVINRPPRDGRMAFVRSPDNISVELLQAGDPLPAEAPWSAMENTGHW

SEQ ID NO: 78615 - DNA, 429 bp, Oceanicola batsensis HTCC2597
  CDS (1)..(429): transl_table=11
atgaaagtccgttatctgcatacgatggtccgggtgaaggaccttgaacgcaccatggcgttcttcgaacttctcggcctgaaggaaatacgccgcaccgaccacgaacaggggcgtttcacactggtcttcatggcccccgaggaacaggacgagtgcccggtggaactgacctacaactgggacggggacgacgcgctgccctcggacagccgccatttcgggcatctcgcctattcggtcggcaatatctacgagatgtgccagcacctgatggacaacggcgtgacgatcaaccgcccgccgcgtgacgggcgcatggccttcgtccggtcgccggacaacatctcggtcgagcttctgcaggagggcagcgcgctggatccggctgaaccctgggcctcgatggagaacacgggccattggtga

SEQ ID NO: 78616 - protein, 142 aa, Oceanicola batsensis HTCC2597
MKVRYLHTMVRVKDLERTMAFFELLGLKEIRRTDHEQGRFTLVFMAPEEQDECPVELTYNWDGDDALPSDSRHFGHLAYSVGNIYEMCQHLMDNGVTINRPPRDGRMAFVRSPDNISVELLQEGSALDPAEPWASMENTGHW

SEQ ID NO: 78617 - DNA, 381 bp, Prochlorococcus marinus str. MIT 9211
  CDS (1)..(381): transl_table=11
atgcttcgggtcggtgatcttgaaaaatcactttggttttacaccacaatcttaggcatgaatctactgagacaaaaagaatatccatcaggtcgtttcactctggcttttgtgggttatggaccagaagaaaataatacggttttagaattgactcataactgggatgttgaccactatgaacttggcaatgcgtatggccacattgctttgggagtcaaaaatatctttgaaacttgtgagttgatcaaaaaaaatggtggaaatattgttagagagccaggtccaatgaaacacggaaaaactattattgcttttgtggaagatcctgatgggtacaaaattgaattaatagatctctcatcgagaaccctcaaataa

SEQ ID NO: 78618 - protein, 126 aa, Prochlorococcus marinus str. MIT 9211
MLRVGDLEKSLWFYTTILGMNLLRQKEYPSGRFTLAFVGYGPEENNTVLELTHNWDVDHYELGNAYGHIALGVKNIFETCELIKKNGGNIVREPGPMKHGKTIIAFVEDPDGYKIELIDLSSRTLK

SEQ ID NO: 78619 - DNA, 438 bp, Erythrobacter sp. NAP1
  CDS (1)..(438): transl_table=11
atggtcaaatatctccactcgatgatccgagtcaccgatccgcaggcgacggtcgatttcttcaagctgatcgggcttgaggaagtgcgccgcttcgatgtcgaggcaggacgcttcacgctaattttccttgcagcgcccggacaagagggcgttgccgaggtcgagctgacgtacaactggccgcctgaagatggcagcgagcctgaagactatgatggcgggcgcaatttcggccacctcgcctaccgggtcgagaacatctacgacacgtgtcagcggctcgccgatgctggccacacgatccaccgcccgccgcgtgatggccatatggccttcgtcaaatcacctgacggtatttccgtcgagttgcttcaggaaggcaatctggagccgcaggagccctgggccagcatggaaaacaccgggagctggtag

SEQ ID NO: 78620 - protein, 145 aa, Erythrobacter sp. NAP1
MVKYLHSMIRVTDPQATVDFFKLIGLEEVRRFDVEAGRFTLIFLAAPGQEGVAEVELTYNWPPEDGSEPEDYDGGRNFGHLAYRVENIYDTCQRLADAGHTIHRPPRDGHMAFVKSPDGISVELLQEGNLEPQEPWASMENTGSW

SEQ ID NO: 78621 - DNA, 399 bp, Synechococcus sp. RS9917
  CDS (1)..(399): transl_table=11
atgcgcatgctgcacacgatgctgcgcgtgggggatctggagcgatcgctgcgcttctacaccgaggtgctggggatgcagttgctgcgccgcaaggactacccctccggtcggttcacgctcgctttcgtgggatacggcgaggagagcgaccacaccgtgctggagctgacccacaactgggacaccgaccattacgccctgggtgatggctacggccacatcgccctcggtgtggatgacatccaggccacctgtgcggcgattgccgacaagggtgggcgcgtggtgagggaaccggggccgatgaagcacggcagcacggtgatcgccttcgtggaggatccagatggctacaaagtggagctgattcagctcgcgtccagggcgtcgtcctga

SEQ ID NO: 78622 - protein, 132 aa, Synechococcus sp. RS9917
MRMLHTMLRVGDLERSLRFYTEVLGMQLLRRKDYPSGRFTLAFVGYGEESDHTVLELTHNWDTDHYALGDGYGHIALGVDDIQATCAAIADKGGRVVREPGPMKHGSTVIAFVEDPDGYKVELIQLASRASS

SEQ ID NO: 78623 - DNA, 405 bp, Synechococcus sp. WH 5701
  CDS (1)..(405): transl_table=11
atgcgtctgctgcacaccatgctccgggtcggcgatctggagcgttccctcgccttctacacagaggtgctcggcatgcgtctgctgcggcgccgcgagtatccctccggacgcttcaccctggctttcctcggctacggcgaggaaagcgacagcaccgtgatcgagctcacccacaactgggacaccacgtcctatgagatcggcacgggttatggccacatcgccatcggtgtcgacgacattgctggcacctgtgatgccatcgccggcaaggggggacgggtggtgcgcccaccggggccgatgaagcacggcagcaccgtgatcgcctttgtggaggacccggacggatacaaggtggagctgatccagcttgccccgagggtcgatgcagcagcctga

SEQ ID NO: 78624 - protein, 134 aa, Synechococcus sp. WH 5701
MRLLHTMLRVGDLERSLAFYTEVLGMRLLRRREYPSGRFTLAFLGYGEESDSTVIELTHNWDTTSYEIGTGYGHIAIGVDDIAGTCDAIAGKGGRVVRPPGPMKHGSTVIAFVEDPDGYKVELIQLAPRVDAAA

SEQ ID NO: 78625 - DNA, 402 bp, Synechococcus sp. WH 7805
  CDS (1)..(402): transl_table=11
atgcgcatgctgcacaccatgctccgggtgggcgatctcgagcgttctctggccttttacaccgacgttttgggcatgcggttgctgaggcgcaaggactatcccggcggccgcttcactcttgctttcgtcggttatggggatgagtcggagtccacggtccttgagctcacccacaattgggatacagccgagtacgacctcggcagtggctatggacatatcgccttgggcgtggacgacatccaggcaacctgtgcggggattgcgggccagggtggtcgtgtcgttcgcgaaccaggcccgatgaagcacggcagcaccgtgatcgccttcgtggaagatcccgatggatacaagatcgagctgattgagctgtcgtcccgttccacgtctgcctga

SEQ ID NO: 78626 - protein, 133 aa, Synechococcus sp. WH 7805
MRMLHTMLRVGDLERSLAFYTDVLGMRLLRRKDYPGGRFTLAFVGYGDESESTVLELTHNWDTAEYDLGSGYGHIALGVDDIQATCAGIAGQGGRVVREPGPMKHGSTVIAFVEDPDGYKIELIELSSRSTSA

SEQ ID NO: 78627 - DNA, 402 bp, Pseudoalteromonas tunicata D2
  CDS (1)..(402): transl_table=11
atgcgtttactccataccatgcttcgtgttactgatttagagaaatccatcgctttttatactcaagtacttggcatgaaagaaatccgccgtgcagagaacccacaataccgctatacccttgcatttgttggttacgctgatgaatcagagcaagctgtaattgaactaacctataactgggatactgatagttacgatttaggtaatgcgtatggccatattgcgcttgagtttgatgatatttaccgtgcctgtgagcagataaaagcccgtggtggtattgtaaccagagagcctggtccagtgcttggtggtaccactgaaattgcgtttgtaaaagatcctgatggttatgcgattgaacttattcagactaaaacaaaattagacgacttttaa

SEQ ID NO: 78628 - protein, 133 aa, Pseudoalteromonas tunicata D2
MRLLHTMLRVTDLEKSIAFYTQVLGMKEIRRAENPQYRYTLAFVGYADESEQAVIELTYNWDTDSYDLGNAYGHIALEFDDIYRACEQIKARGGIVTREPGPVLGGTTEIAFVKDPDGYAIELIQTKTKLDDF

SEQ ID NO: 78629 - DNA, 441 bp, Photobacterium sp. SKA34
  CDS (1)..(441): transl_table=11
atggaatacttacataccatggtacgagtgagcaacttagatgcttcactggatttttactgtaacaaacttggtttggtagaaattcgacgtaaagaaagcgaacgtggacgatttacattagtatttttagccgcatctaatcaggcagaaacggcgaaagaaacacaatcgcctttattagaactaacttataactgggatccagaatcgtacactggtggtcgtaattttggtcacctcgcttttgccgtcgataatatttacgatttatgtgctcatttacaaaataatggtgttgtcattaatcgcccaccccgtgatggacatatggcatttgtacgttcacctgatggtatttcgattgaactgcttcaaaaaggtgacgcactagaagcagccgaaccttgggtttcgatgcaaaaccaaggtgaatggtaa

SEQ ID NO: 78630 - protein, 146 aa, Photobacterium sp. SKA34
MEYLHTMVRVSNLDASLDFYCNKLGLVEIRRKESERGRFTLVFLAASNQAETAKETQSPLLELTYNWDPESYTGGRNFGHLAFAVDNIYDLCAHLQNNGVVINRPPRDGHMAFVRSPDGISIELLQKGDALEAAEPWVSMQNQGEW

SEQ ID NO: 78631 - DNA, 396 bp, Photobacterium sp. SKA34
  CDS (1)..(396): transl_table=11
atggctaagattattcactcaatgatccgtgtattagatcttgacgcttcattaaaattttacacagaagcattagatttagagatcgctgagcgtttagactttgaagagtttagtttggtttacttacgcaacgaagaaaacgatatggaacttgaactgacttggaatgagggaaccaaagaaccgtatactcatggcacaggttatggtcacattgctgttgctgtcgatgatttagaagatgagcatgcaaaattaactgaatgtggttatgcgcctttagagattaaagagttctttcgtgaggggactttgttagcaaagtttttctttgtgcaagatcctgatggttacaaaattgagtttttacaacgtcatgctcgttaccagtaa

SEQ ID NO: 78632 - protein, 131 aa, Photobacterium sp. SKA34
MAKIIHSMIRVLDLDASLKFYTEALDLEIAERLDFEEFSLVYLRNEENDMELELTWNEGTKEPYTHGTGYGHIAVAVDDLEDEHAKLTECGYAPLEIKEFFREGTLLAKFFFVQDPDGYKIEFLQRHARYQ

SEQ ID NO: 78633 - DNA, 393 bp, Oceanospirillum sp. MED92
  CDS (1)..(393): transl_table=11
atgcgacttttacacactatgctcagggtaactgaccttaaagcatcaatagagttctacaccgagttgatgggcatgcaactgcttcgcagcaaagactatccagaaggaaagtttactctggcattccttggctatggagatgaagctgaacataccgcgctggaattaacgcacaattgggatactgatgcatatgatctgggtaacggttttggtcatttagccatagaagtcgatgatgtctatgccgcctgcgacgcaatcaaagcgaaagggggcgaagttgttcgtgaagcaggccccatgaaacatggcagtacagtactcgcttttgtaaaagatcccgacggttatatgattgaacttcttggtagcaaaagaagcgattaa

SEQ ID NO: 78634 - protein, 130 aa, Oceanospirillum sp. MED92
MRLLHTMLRVTDLKASIEFYTELMGMQLLRSKDYPEGKFTLAFLGYGDEAEHTALELTHNWDTDAYDLGNGFGHLAIEVDDVYAACDAIKAKGGEVVREAGPMKHGSTVLAFVKDPDGYMIELLGSKRSD

SEQ ID NO: 78635 - DNA, 456 bp, gamma proteobacterium HTCC2207
  CDS (1)..(456): transl_table=11
atgcgatttttacacagcatggtacgggttactgacctggaaaaatccctcgccttttattgcactgccttaggtctggcagaactctatagatatgaagttcccaagggacgttttaccctggtttttctcgccgcacccagcgatgctgataacgcccaagagacgaaagcgccgctgattgagttaacctataactggccgcctgaacagggcgagccggagcactatggggaagggcgaaactttgggcatctggcttacaaggtggataatatttatgccacctgtcagcgtttgatggatgcaggcgtggtgatcaaccgtccaccgcgagatggccatatggcctttgtgcgctcccctgacaatatctctatcgaactgctgcaagagggtgaggcgctgcccgctcaggaaccttgggcatcgatgaacaatactggtagctggtag

SEQ ID NO: 78636 - protein, 151 aa, gamma proteobacterium HTCC2207
MRFLHSMVRVTDLEKSLAFYCTALGLAELYRYEVPKGRFTLVFLAAPSDADNAQETKAPLIELTYNWPPEQGEPEHYGEGRNFGHLAYKVDNIYATCQRLMDAGVVINRPPRDGHMAFVRSPDNISIELLQEGEALPAQEPWASMNNTGSW

SEQ ID NO: 78637 - DNA, 390 bp, Oceanobacter sp. RED65
  CDS (1)..(390): transl_table=11
atgcgcatcctccacactatgcttcgcgtcggtaatctagacaaatccattgagttctatacggacgtattgggaatgaagctattgcgtaagcacgacaacgagcaatacaaatacacgctcgcttttgtcggttacgatactgaagacaaaaccgcagtattagaactgacctataactgggacaccagcgaatacgatttgggcgaaggttatggccacatcgctatcggctgcgaggatatctacaaaacctgcgacctaattcgcgagcgaggcggtatcatcagccgtgaaccaggcccggtgaaaggcggaacaactgaaatcgctttcgtgaaagacccagatggatacgctatagaattgattcaaaccgataaagcttga

SEQ ID NO: 78638 - protein, 129 aa, Oceanobacter sp. RED65
MRILHTMLRVGNLDKSIEFYTDVLGMKLLRKHDNEQYKYTLAFVGYDTEDKTAVLELTYNWDTSEYDLGEGYGHIAIGCEDIYKTCDLIRERGGIISREPGPVKGGTTEIAFVKDPDGYAIELIQTDKA

SEQ ID NO: 78639 - DNA, 402 bp, Synechococcus sp. RS9916
  CDS (1)..(402): transl_table=11
atgcgcatgcttcacaccatgctccgggtcggcgacctcgagcggtctctgcggttttacaccgaggttctggggatgcagttgctgcgtcgcaaggattacccctccggccgtttcaccctggcgtttgtcggttacggccccgagagcgaccacacggtgttggagctcacccacaactgggataccaaggattacgccatcggtgacggctatggccacatcgcccttggggtcgatgacatcgtcggcacttgccaggccatcgccgaacggggtggacgggtggtgcgtgaacccgggccgatgaagcacggcaacaccgtgatcgcctttgtggaagatcccgatggctacaaagtggaattaattcagctgtcgtcccgctcggacgcggcttaa

SEQ ID NO: 78640 - protein, 133 aa, Synechococcus sp. RS9916
MRMLHTMLRVGDLERSLRFYTEVLGMQLLRRKDYPSGRFTLAFVGYGPESDHTVLELTHNWDTKDYAIGDGYGHIALGVDDIVGTCQAIAERGGRVVREPGPMKHGNTVIAFVEDPDGYKVELIQLSSRSDAA

SEQ ID NO: 78641 - DNA, 390 bp, Vibrio sp. Ex25
  CDS (1)..(390): transl_table=11
atgcttcgcgtaggtgatctagacaaatccatcaagttttacactgaagttatgggcatgcagttgcttcgtacgaacgagaataaagagtacgaatacacactggcgtttcttggctacggtgacgaatcccaaggtgctgtgatcgagctaacttacaactggggtaaaactgaatatgacctaggtactgcttttggtcatatcgccattggtgttgatgatatctacacaacttgcgacgctatcaaagcggcgggcggtaatgtgacgcgtgaaccaggtccagtaaaaggcggaagcacgcacattgcattcgtaaaagacccagatggttatatgattgagcttatccaaaacaagcaagcttcagcaggtcttgaaggctaa

SEQ ID NO: 78642 - protein, 129 aa, Vibrio sp. Ex25
MLRVGDLDKSIKFYTEVMGMQLLRTNENKEYEYTLAFLGYGDESQGAVIELTYNWGKTEYDLGTAFGHIAIGVDDIYTTCDAIKAAGGNVTREPGPVKGGSTHIAFVKDPDGYMIELIQNKQASAGLEG

SEQ ID NO: 78643 - DNA, 387 bp, Vibrio sp. Ex25
  CDS (1)..(387): transl_table=11
atgattcacaccatgatccgagtcagcgatctggaccgttctctacaattttaccgcgacatactagagctagaaatcaaagaccaatacatctttgatggtttttctctgacctatctagccaacgaagaaactggctttgaattagagttgacacacaatcacgatcaaactgagccttacactcacggctcaggctacggtcaccttgctgtcagcgtagaggacatcgaacaaactcacaaacgcattaaatctctcggtattgaagcgggtgacatcaaagcttttgatcaccaacaaaagcatttggcaacgttcttttttgtgactgatcctgatggttacaaaattgagttcttacaacgccaagggcgttacctataa

SEQ ID NO: 78644 - protein, 128 aa, Vibrio sp. Ex25
MIHTMIRVSDLDRSLQFYRDILELEIKDQYIFDGFSLTYLANEETGFELELTHNHDQTEPYTHGSGYGHLAVSVEDIEQTHKRIKSLGIEAGDIKAFDHQQKHLATFFFVTDPDGYKIEFLQRQGRYL

SEQ ID NO: 78645 - DNA, 387 bp, Vibrio sp. Ex25
  CDS (1)..(387): transl_table=11
atgaagtttctccacacgatgatccgtgttgttgacctagacaaatctatcgaattttatacaaaagttctgggtatgagcgttttggatcgttttgaaaaccaagaataccgttactcactggtgtttgttggtagccctgatcaaccagatggcgcgaccatcgagctaacttacaactgggataccgacagttacgacttaggtaacgcattcgggcacatagcgcttgggtgtgaagacatttacgcagcttgcgaaaaaatcaaagcgcttggcggcaacgtcactcgcgaacccggtcaaatgaaaggtggagaaacgcacatcgcgttcattaaagatcccgacggctacccaatcgaactgattcaaactaaacaataa

SEQ ID NO: 78646 - protein, 128 aa, Vibrio sp. Ex25
MKFLHTMIRVVDLDKSIEFYTKVLGMSVLDRFENQEYRYSLVFVGSPDQPDGATIELTYNWDTDSYDLGNAFGHIALGCEDIYAACEKIKALGGNVTREPGQMKGGETHIAFIKDPDGYPIELIQTKQ

SEQ ID NO: 78647 - DNA, 624 bp, Alteromonadales bacterium TW-7
  CDS (1)..(624): transl_table=11
gtggttttaatttttgctgctgttgattatgatgatgcaaaatctgcttttataaattcatttaaatttttcattcatttcattaaggatcaccgcatgtctcattatgacgaatctccagagcaaattgcacaggccactgaaggctatgtaatgcagcaaactatgttacgtataaaagatccaaaaccgtcgctggcattttatcaaaatgtattaggtatgaagctattaggtaagtatgactttcctgaaatgaagtttacgctgtactttttaggctacgagccaacacagccagaaggtgatgataagacaaaagcaaaatgggtatttggtcgccctgctcttatagagctcactcataactggggcactgaaaacgacgatagttttaagggctaccacagcggtaacgacgagccaaaagggtttggccatattggtattagtgtacccgatgtgtacgctgccagtgagcgctttgcaaaatacgatgttgaatttgtaaaaaagccagacgatggttcaatgaaaggcttagcatttattaaagaccctgacggctactggatagaaatactctcaccagatggtataaccgatattatttttggtaaataa

SEQ ID NO: 78648 - protein, 207 aa, Alteromonadales bacterium TW-7
MVLIFAAVDYDDAKSAFINSFKFFIHFIKDHRMSHYDESPEQIAQATEGYVMQQTMLRIKDPKPSLAFYQNVLGMKLLGKYDFPEMKFTLYFLGYEPTQPEGDDKTKAKWVFGRPALIELTHNWGTENDDSFKGYHSGNDEPKGFGHIGISVPDVYAASERFAKYDVEFVKKPDDGSMKGLAFIKDPDGYWIEILSPDGITDIIFGK

SEQ ID NO: 78649 - DNA, 387 bp, Alteromonadales bacterium TW-7
  CDS (1)..(387): transl_table=11
atgcgcttattacacactatgcttcgcgttacaaatttagaaaaatccattgcgttttacacgcatgttcttggtatgaaagagctacgtcgctctgaaaatgaagagtaccgatacacattggcctttataggctatggcgacgaaaaagatacaaccgtccttgagctaacatacaactgggatcaaagtagttacagcttaggagacgcctacgggcacatcgcaattgaatttgaagacatatataaagcgtgcgatgacataaaagcggcaggtggaaatataagtagagaacccggcccagttaaaggtgggacaacccaaattgcattcgttaaagaccctgatgggtatgcaattgagcttattcagaaaaaatcataa

SEQ ID NO: 78650 - protein, 128 aa, Alteromonadales bacterium TW-7
MRLLHTMLRVTNLEKSIAFYTHVLGMKELRRSENEEYRYTLAFIGYGDEKDTTVLELTYNWDQSSYSLGDAYGHIAIEFEDIYKACDDIKAAGGNISREPGPVKGGTTQIAFVKDPDGYAIELIQKKS

SEQ ID NO: 78651 - DNA, 441 bp, marine gamma proteobacterium HTCC2143
  CDS (1)..(441): transl_table=11
atgcgctatcttcacaccatggtcagggtcagcaatctagaggaatcattaacattctattgcgatcatctagggctcattgaagccaaccgctacgaaaatgaagccggacgctttacgctagtttttctctgtgctccggaagatctggacagttttaaggataacagcggtcccgcactagaattgacctataactgggacgaatcagggtacgagggaggacgtaactttggccacttggcctatcgcgtcgataatatatacgagacttgccaaacgctgatggacgccggtgtcactattaaccgtccaccacgttgcggccatatggcctttatacgctccccagacaacgtttccgtagagttgctacagaaagatggatcgctggaaccgatggagccctggctgtcgatgaaaaacaccggtgaatggtag

SEQ ID NO: 78652 - protein, 146 aa, marine gamma proteobacterium HTCC2143
MRYLHTMVRVSNLEESLTFYCDHLGLIEANRYENEAGRFTLVFLCAPEDLDSFKDNSGPALELTYNWDESGYEGGRNFGHLAYRVDNIYETCQTLMDAGVTINRPPRCGHMAFIRSPDNVSVELLQKDGSLEPMEPWLSMKNTGEW

SEQ ID NO: 78653 - DNA, 441 bp, marine gamma proteobacterium HTCC2080
  CDS (1)..(441): transl_table=11
atgcagtttttgcacaccatgatccgcgccagcagtttagacagcaccctcgacttcttttgcaacaagttggggctgatagaagtgaatcgatacgacagcgaggccgggcgatttacgctcgttttcctcgccgccccggatgatgtcgaacgagctcatacggatcaggcgccactggttgaaattacctacaattgggattctgaaatttatgatggcggcagaaattttggccacttggcttaccgggttgacgatatttacgcgacctgtgccagcctgatgagcaaaggcgtcaccattaaccgcccaccccgagacggtcgcatggcgttcatccgctcccctgacggtatctccgtggaactactgcaggctggggatgccttatccgccgcggaaccctgggcgtcgatggaaaatactggcagctggtag

SEQ ID NO: 78654 - protein, 146 aa, marine gamma proteobacterium HTCC2080
MQFLHTMIRASSLDSTLDFFCNKLGLIEVNRYDSEAGRFTLVFLAAPDDVERAHTDQAPLVEITYNWDSEIYDGGRNFGHLAYRVDDIYATCASLMSKGVTINRPPRDGRMAFIRSPDGISVELLQAGDALSAAEPWASMENTGSW

SEQ ID NO: 78655 - DNA, 571 bp, Arachis hypogaea
  CDS (8)..(571)
gattcggatggcgtcggaagcgaaggaatcaccagcaaacaatcctggcttgtcaacggttcgggatgaggctaccaaagggtatatcatgcagcagactatgtttcgggtgaaggaccctaaggctagtcttgacttttactcacgtgtcctgggaatgtcattgctgaagagattagatttctctgagatgaagttcagcttgtacttcctgggctacgaggatacttcgacagctccaacagatcctactgagagaactgtttggacctttggtcgacctgcaacaattgagctgactcacaactggggcacagagagtgatcccgagtttaaaggctatcataatggaaactccgagcctcgtggatttgggcatattggggttacagttgatgatgtgcacaaggcatgcgagagatttgaacaactgggagtagagtttgtcaagaaaccaaacgatggaaagatgaagaatatagccttcatcaaggatcctgatggctactggatcgagatctttgatctcaagactatcgggacaacagccggaaacgcagctaatcactag

SEQ ID NO: 78656 - protein, 187 aa, Arachis hypogaea
MASEAKESPANNPGLSTVRDEATKGYIMQQTMFRVKDPKASLDFYSRVLGMSLLKRLDFSEMKFSLYFLGYEDTSTAPTDPTERTVWTFGRPATIELTHNWGTESDPEFKGYHNGNSEPRGFGHIGVTVDDVHKACERFEQLGVEFVKKPNDGKMKNIAFIKDPDGYWIEIFDLKTIGTTAGNAANH

SEQ ID NO: 78657 - DNA, 408 bp, Janthinobacterium lividum
  CDS (1)..(408): transl_table=11
atgcgtattttgcacaccatgttacgggtcggcgacctgcagcgctccatcgatttttacaccaaggtcctgggcatgaaattgctgcgcaccagcgacaacccggaataccagtacacgctggccttcgtcggctacggttcgaatcccgaccacgcggaactggaactgacgtataactatggcaccaccagctacgatctgggcacggcctatggccacatcgccatctcggccgacgatatcgtcgccgcttgcgacgcggcacgggcgaatggcggcaacgtcacgcgcgaaccgggccccgtgaaaggtggcaacacggtcatcgccttcatcaccgacccggacggctacaagatcgaattgatcgaacgcaagttcgacggccagggcggcggcttgtaa

SEQ ID NO: 78658 - protein, 135 aa, Janthinobacterium lividum
MRILHTMLRVGDLQRSIDFYTKVLGMKLLRTSDNPEYQYTLAFVGYGSNPDHAELELTYNYGTTSYDLGTAYGHIAISADDIVAACDAARANGGNVTREPGPVKGGNTVIAFITDPDGYKIELIERKFDGQGGGL

SEQ ID NO: 78659 - DNA, 615 bp, Aspergillus niger
  CDS (1)..(615)
atgccttccgcatccccatcatctcctttcgaggctggcatctatcttcctgggggccataacaccgacccgccgatgacatccgacacggacggctatcgattgaatcactttatgctccgcatcagggatcctcagcgcactctgcatttctatattgacctcatgggcatgcgcactattttcaccatgaacgccggtccgttcaccatgtactacctcggctacccacccacccccagcgaccgcgccgatctttctgcctgggcctcccgagtcgccaacgtccgcgaacttacccagaccattgggctgctggagttttaccatactcatgggactgaaaaggacgacgagtttagagtctcttccgggaactcgcctcctaacttgggttttggccatctaggattcactgtcccggacgttcccgcggctgtcgagcgcctgaggcgggaaggggtacacgtgctgaaagatctgggggatagttcgagggagagtgttcctctcagtacttgggaggagcatcgcggcttcggaacgggggatctacatccaaagttcaaggaaatttacgatcagattgcgtgtgtggctgatccggtgggctga

SEQ ID NO: 78660 - protein, 204 aa, Aspergillus niger
MPSASPSSPFEAGIYLPGGHNTDPPMTSDTDGYRLNHFMLRIRDPQRTLHFYIDLMGMRTIFTMNAGPFTMYYLGYPPTPSDRADLSAWASRVANVRELTQTIGLLEFYHTHGTEKDDEFRVSSGNSPPNLGFGHLGFTVPDVPAAVERLRREGVHVLKDLGDSSRESVPLSTWEEHRGFGTGDLHPKFKEIYDQIACVADPVG

SEQ ID NO: 78661 - DNA, 966 bp, Aspergillus niger
  CDS (1)..(966)
atggcgacagacacttccaagtataagcttaaccacaccatgcttcgggtcaaggacccgaagaagtcttgtatgttcctggaattctacaagtacctgggtctcagccaggtcaaccagatcgacttccccgagaacaagttctccctctacttccttgcctacgacggcccccagtctctccagggtgaacgtcacttcacggaccgcaacggcgtcttggagctcacccataaccatggcacggaggatgaccctaactacagcgtggtcaacggtaacaccgaaccctaccgcggttttggacacattgctatttccgtggacaacatcgaggccgcctgcaagcgactggaggatgccggataccccttccagaagaagcttaccgagggccgtatgcgtcacatcgcgtttgtcaaggatcccgatggatactgggtcgagattatccgccgtcacaacgaggatgttggtaccgccaccgatccctccagctaccgtctgaaccacaccatgctccgcgtcaaatgcgccgagactagcgtcaagtattaccaggaagtctttggaatgactctgttgcgcaccatcgagaacaaggatgctggattcaacctttacttcctgggctaccctggtgccaaccctgagcggcgcgagggtgccaccaacccggtctctgaatgggagggtctgctggagcttacctggaactatggcaccgagaagcaagagggcccggtttatcacaacggtaacacggagccgcaaggatttggacacatttgtgtctccgtcgacgatctcaatgctgcctgtgatcggttcgagtctctgaatgttaactggaagaagcgccttacggatggacggatgaagtacgtggcattcatcctggatccggataactattgggtggaggttgtccagaacgaggcacttaagcgtactggcaacttgtaa

SEQ ID NO: 78662 - protein, 321 aa, Aspergillus niger
MATDTSKYKLNHTMLRVKDPKKSCMFLEFYKYLGLSQVNQIDFPENKFSLYFLAYDGPQSLQGERHFTDRNGVLELTHNHGTEDDPNYSVVNGNTEPYRGFGHIAISVDNIEAACKRLEDAGYPFQKKLTEGRMRHIAFVKDPDGYWVEIIRRHNEDVGTATDPSSYRLNHTMLRVKCAETSVKYYQEVFGMTLLRTIENKDAGFNLYFLGYPGANPERREGATNPVSEWEGLLELTWNYGTEKQEGPVYHNGNTEPQGFGHICVSVDDLNAACDRFESLNVNWKKRLTDGRMKYVAFILDPDNYWVEVVQNEALKRTGNL

SEQ ID NO: 78663 - DNA, 1099 bp, Citrus paradisi
  CDS (12)..(887)
  misc_feature (1054)..(1054): n is a, g, c or t
tccatatcaaaatggctgaggcttctcctgctgctgctaatgccgagttgctggaatggccaaagaaagataagcgacgcttccttcatgctgtgtatcgtgttggtgatcttgatcgcaccatcaaattttacaccgaatgctttgggatgaagctgttgagaaagagagacgtcccggaagagaaatactcaaatgcctttcttggatttggccccgaacagtctcactttgttgtggagttaacgtacaactatggtgtaacttcatatgatattggaactggttttggccattttgcaattgcaactgaagatgtttacaaactggttgaaaacattcgtgccaagggtggcaatgtcactagagagcctggtccacttaaaggtggaacaactcacattgcctttgtgaaggatcccgatggttatatttttgaactcatccagagaggtccaactcctgaaccactctgtcaagtaatgcttcgcgttggcgatcttggtcgctccatcaagttctatgaaaaggctttggggatgaaactgttaagaacagttgataaacctgaatacaagtacaccctggccatgcttggatatgctgaggaagatcagactactgttctggagttaacttataattatggtgtgactgaatataccaagggaaatgcatatgcgcaggttgctattagtactgatgatgtatacaaaagtgctgaggttgtcaacctggttacccaagagcttggagggaagataactcggcaacccggatcaatccctggactcaacaccaaaatcacctctttcgtagacccagatggctggaaaacggtcctggttgacaatgaagattttctgaaggaaattcagtcggaataatgatgtcatggtaggaggagttttgcaaaacacttgcatcaaaataaatcctactactgtactatctgtatgaataaattaccgtgtctggtattgaaagccaccgatatgcctgttacgatatcggtggtttgctgctatgtgatgtgatgaattattaaattganatctactgcttaaatttggattacgttgctatggcagcatttgtt

SEQ ID NO: 78664 - protein, 291 aa, Citrus paradisi
MAEASPAAANAELLEWPKKDKRRFLHAVYRVGDLDRTIKFYTECFGMKLLRKRDVPEEKYSNAFLGFGPEQSHFVVELTYNYGVTSYDIGTGFGHFAIATEDVYKLVENIRAKGGNVTREPGPLKGGTTHIAFVKDPDGYIFELIQRGPTPEPLCQVMLRVGDLGRSIKFYEKALGMKLLRTVDKPEYKYTLAMLGYAEEDQTTVLELTYNYGVTEYTKGNAYAQVAISTDDVYKSAEVVNLVTQELGGKITRQPGSIPGLNTKITSFVDPDGWKTVLVDNEDFLKEIQSE

SEQ ID NO: 78665 - DNA, 1201 bp, Sporobolus stapfianus
  CDS (61)..(918)
gcacatcgtctgcgctctttgatcgaatcgagtcgaggccgatcggtaccgaaccacgggatggcgagcgggagcgatgccgtgcttgagtggcacaagcaagacaagaagaggatgctccacgccgtttaccgggttggagacttggaccgcacaatcaagtgttacactgaatgctttggaatgaagctgctgaggaaaagggatgttcctgaagagaagtacaccaacgcattccttgggtatggacctgaggacaagaactttgctcttgaactgacatacaattacggtgtcgacaagtatgacattggagagggctttggacatttcgcaattgctactgaggatattaacaagatagctgaggcagttaaatcaagcggctgttgcaagatcactcgtgagcctggtcctgtcaagggaggatccactgttattgcctttgcacaggacccagatggttacatgtttgagcttatccaaaggggtccgacacctgagcctctttgccaggtcatgcttcgtgttggtgaccttgagcgttctattaagttctatgagaaggctcttgggatgaggctgctgaggaagaaggatgtacctgattacaagtacactattgcgatgctgggctatgatgacgaggacaagacaactgttatagagttgacatacaactacggtgtcacagaatacagcaagggcaatgcatatgctcaggttgctatcggcactaatgatgtgtacaagagtgcagaggctgttgaactggcaaccaaagaattagggggcaagattttgaagcagccagggccgctaccagggattaacacaaagattgcctcttttgttgacccagatggctggaaagtggttctggttgaccacgccgacttcctcaaggaactcaagtaatgattgatcaggacggccggctcccaggtgttgtagtagtggttgtcagcgatgtaataaaaggtgcttgtccgcctgaccatccgagaataaactttggcacagagcttgtccttgttccaagtctcggccacgctgtgtggttgtgcttgtgcctgctacttactatgctgttggtgtatgtagaaacctgaacctgtgtactctgaatggtgtatttggtcctctttgatccgagtgcggagtgcctgattgttctgccgctaaaaaaaaaaaaaaaaaa

SEQ ID NO: 78666 - protein, 285 aa, Sporobolus stapfianus
MASGSDAVLEWHKQDKKRMLHAVYRVGDLDRTIKCYTECFGMKLLRKRDVPEEKYTNAFLGYGPEDKNFALELTYNYGVDKYDIGEGFGHFAIATEDINKIAEAVKSSGCCKITREPGPVKGGSTVIAFAQDPDGYMFELIQRGPTPEPLCQVMLRVGDLERSIKFYEKALGMRLLRKKDVPDYKYTIAMLGYDDEDKTTVIELTYNYGVTEYSKGNAYAQVAIGTNDVYKSAEAVELATKELGGKILKQPGPLPGINTKIASFVDPDGWKVVLVDHADFLKELK

SEQ ID NO: 78667 - DNA, 504 bp, Ostreococcus tauri
  CDS (1)..(504)
atgtcggcgaagcgagaccccagcgcgtacctcccgagcgacacgtataactcgctggacaaggatggacacgtcgtgttcttgcacacaatggttcgaagcaccaatctgaaagccacgatggattttttcagcgccctcgggttgatggagacgcggaggaaggagtcgcagggtggaaaatttacgttggtcttcatggcgtcctccccgggggcgcccgaggtcgagatcacgtataactggcccgaagaggacgggtcgacggagacgttcgcgccgccgagccgctcgatgggacacctggcgtacgccgtggatgatatctacgcgaaagcggaggagttgcgaggtaaagggatcgaaatcttgaggccgccgcgagacgggaagatgatgtttgtgaaatcgccggatgggatcagcgtggagattttgcaaaaaggcgcgccgctcgagccgctcgaaccgtggaagagcatggagaacgtggggacgtggtaa

SEQ ID NO: 78668 - protein, 167 aa, Ostreococcus tauri
MSAKRDPSAYLPSDTYNSLDKDGHVVFLHTMVRSTNLKATMDFFSALGLMETRRKESQGGKFTLVFMASSPGAPEVEITYNWPEEDGSTETFAPPSRSMGHLAYAVDDIYAKAEELRGKGIEILRPPRDGKMMFVKSPDGISVEILQKGAPLEPLEPWKSMENVGTW

SEQ ID NO: 78669 - DNA, 1041 bp, Verticillium dahliae
  CDS (1)..(1041)
atgttctctcttcgcggcctgcaacgactgcgtctcacccaagctcacctcaacaaacccaccatccacacagcgcaaccctttcgcagactcgcaaccatggcaggtaccacgaatcccaagaactacaagttcaaccactccatgatccgcgtcaaggaccccaaggcgtcgatcaagttctacgagctcctcggcatgaccgtcatcaagacgatccgccagcccgaggccaagtttgacctctacttcctggcctacgactcgcccaaggccgtctcggcaggcgcctccgtcttcgaccgcgaagggctcatcgagctgacgcacaactacggcaccgaggacgacgccagctacaccgtcaacaacggcaacaccgagccccaccgcggcttcggccacctctgcatcgccgtcgacaacatccaggcggcgtgcgaccgcatcgagaaggcgggctacgagttccagaagaagctgtccgagggccgcatgcgccacatcgccttcgctaaggacgccgacggctactgggtcgagctcatcacgtggaacgacgtcgccgcgaccgagggcgtcgccgagacggacgtgtcgacctaccgcatgaaccacaccatgctgcgcgtcaaggacgccgacaagtcgctcgccttttaccgcgacgtcctcggcatggacctgctgcgcaagaacgagtccagcagcttcaccctcttcttcctcggctacaacaaggacggcgacggcaccgccacgcgcgagggcgtgctcgagctaacgtggaaccacggcaccgagaaggaggccgacttcaagtaccacaatggcaacgaccagccgcagggcttcggccacatttgcgtcaccgtcgacgatattgatgccgcgtgcgagcgcttcgagtcgctgaactgcaactggaagaagaggctgacggacggccgtatgaagaacgtggccttcctgctggaccccgataactactgggtcgaggttgtgcagaacgagaagttcaccggaaaggataacttctag

SEQ ID NO: 78670 - protein, 346 aa, Verticillium dahliae
MFSLRGLQRLRLTQAHLNKPTIHTAQPFRRLATMAGTTNPKNYKFNHSMIRVKDPKASIKFYELLGMTVIKTIRQPEAKFDLYFLAYDSPKAVSAGASVFDREGLIELTHNYGTEDDASYTVNNGNTEPHRGFGHLCIAVDNIQAACDRIEKAGYEFQKKLSEGRMRHIAFAKDADGYWVELITWNDVAATEGVAETDVSTYRMNHTMLRVKDADKSLAFYRDVLGMDLLRKNESSSFTLFFLGYNKDGDGTATREGVLELTWNHGTEKEADFKYHNGNDQPQGFGHICVTVDDIDAACERFESLNCNWKKRLTDGRMKNVAFLLDPDNYWVEVVQNEKFTGKDNF

SEQ ID NO: 78671 - DNA, 867 bp, Medicago truncatula
  CDS (1)..(867)
atgtcaggattttgtgtgggtatggctgagattgatttggaatggccaaagaaagacaaccgtcgtttgcttcatgttgtttatcgtgttggtgaccttgaacgcaccattaagttttatactgaggctcttgggatgaaacttttgaggcagagagatgttcctgaggagaaatatgccaatgcttttcttggatttggcgatgaacaatcccattttgttgttgaattaacatataattatggggtgacttcgtatgatgttggagatggctttggacattttgcaattgcaactcaagatgtttacaaattggttgagcacattcgtgctaaaggtggaaacatcacaagggaggctggtccagttcaaggtgggacaactgttattgcctttgtgaaggatcctgatggctacacttttgcacttgttcaaagacctatagttcacgacccattctgtcaaataagtctccgcgttggtgatttagaacgtgccataaagttttatgaaaaggctttgggcttgaaggtggtgaggaaggttgataatcctgagaacaagtacactattgctatacttgggtataaagaggaggacgacgcaactgtgttggagttgacatataattatggtgtcaccgaatactctaagggaactgcttatgcacagattgctgttggtactgatgatgtctacaagagtgctgatgtagtcaacctagtaacgcaagagcttggagggaagatcactcggcaaccagggccaattcccggccttaacacaaaagtcgtttcttttttagatccagatggatggaaaactgtgttagttgacaatgaagatttcctgaaggaactggagtga

SEQ ID NO: 78672 - protein, 288 aa, Medicago truncatula
MSGFCVGMAEIDLEWPKKDNRRLLHVVYRVGDLERTIKFYTEALGMKLLRQRDVPEEKYANAFLGFGDEQSHFVVELTYNYGVTSYDVGDGFGHFAIATQDVYKLVEHIRAKGGNITREAGPVQGGTTVIAFVKDPDGYTFALVQRPIVHDPFCQISLRVGDLERAIKFYEKALGLKVVRKVDNPENKYTIAILGYKEEDDATVLELTYNYGVTEYSKGTAYAQIAVGTDDVYKSADVVNLVTQELGGKITRQPGPIPGLNTKVVSFLDPDGWKTVLVDNEDFLKELE

SEQ ID NO: 78673 - DNA, 957 bp, Aspergillus oryzae
  CDS (1)..(957)
atggcgacggatacttccacgtataagctcaatcacactatgatccgggtcaaggacccgaagaagtccctggaattctacaagttcctcggacttactcagattcaacaactcgatttccccgaaaacaagttttcgctctacttcctcgcatacaacggccccaagtccctgcagggtgaccgtcactggacggaccgcaacgctgttctggagctcacccacaactatggcacagaaaatgaccccaactacagcgtagccaacggcaacacggaacctcaccggggctttggtcatattgccatttctgttgacaacattgaatcggcctgcaagagaattgaagatgctggctatcctttccagaagaagctcactgatggacgtatgaagcacattgctttcgccaaggatcctgatggatactgggttgagcttattcgtcgtcataacgaggatgtgggtacgacgacagataccgccaattaccgactcaaccacagcatgctccgtgtgaagtgcgcagagacaagtttgaaattctaccaagaagttatgggcatgacccttttacgaaccgccgagaacaaggatgcaggcttcaatctctatttcttgggataccctgcaggaaaccccaaagtgcaagaggatgccaagaatcccgtggctgagtgggaaggtttgctcgagctcacctggaactatggaacggagaagcaagaaggacctgtctaccacaatggcaacgctgagccacaaggattcggccatatctgtgttgctgttgacgatctcaacgccgcctgcgagcgcttcgaatcattgaatgtcaactggaagaagcgtttgactgacggccggatgaaggatgttgcctttgtgcttgaccccgatggatactggatcgaagtgattcagaaccaggcacttaagcgcactagcaattggtaa

SEQ ID NO: 78674 - protein, 318 aa, Aspergillus oryzae
MATDTSTYKLNHTMIRVKDPKKSLEFYKFLGLTQIQQLDFPENKFSLYFLAYNGPKSLQGDRHWTDRNAVLELTHNYGTENDPNYSVANGNTEPHRGFGHIAISVDNIESACKRIEDAGYPFQKKLTDGRMKHIAFAKDPDGYWVELIRRHNEDVGTTTDTANYRLNHSMLRVKCAETSLKFYQEVMGMTLLRTAENKDAGFNLYFLGYPAGNPKVQEDAKNPVAEWEGLLELTWNYGTEKQEGPVYHNGNAEPQGFGHICVAVDDLNAACERFESLNVNWKKRLTDGRMKDVAFVLDPDGYWIEVIQNQALKRTSNW

SEQ ID NO: 78675 - DNA, 966 bp, Phaeosphaeria nodorum
  CDS (1)..(966)
atggctaccgatccaagcaagtacaagcttaaccactcgatgatccgtatcaaggatccgaagcgaagcgtgcaattctatgagttcctaggcatgaaattgatcaaccagatcaagatgcccgaggccaagtttgacctatacttccttgcatacgatagtccaaaggcagtatcgcacggcaaccactggactgatcgtgagggcattgtcgagcttacccacaactacggaaccgaagacgacccggattacaagatctccaacggtaacaccgagccgcacaagggtttcggacatctctgtgtttctgttgataacattcaggctgcatgccagcgtctcgaagatgcaggttacaagtttcagaagaagctgaccgacggacgtatgcgccacattgcattcgtgctggaccctgatggctactgggtcgaggttattggccagaagccattggaggagaccgagagtgtcaaggacaccgacacaagcacataccgcatgaaccacaccatgatccgtgtcaaggacaaggacgtgtcactcaagttttaccaggatgttttgggaatgcagctcaaacgtacatcagagtctccaaactctggcttcaacctctacttcctcggctacggtgccccagcatcagacgagaccgcgaatggtgttaacccgacagcggatcatgagggattgctagagttgacgtggaactacggcaccgagaaggaagccgacttcaagtaccacaatggcaacgacgagccccaaggcttcggtcatatctgtatcgcggtcgacgatctggaggcagcctgtgctcgcttcgaggaaaagaaggtcaactggaagaagaggcttaccgatggccgtatgaagagcattgcgtttgtgctcgacccagacaactactggatcgaggttgtgcagaacgagaaactcaagacacgtagcaatgtgtaa

SEQ ID NO: 78676 - protein, 321 aa, Phaeosphaeria nodorum
MATDPSKYKLNHSMIRIKDPKRSVQFYEFLGMKLINQIKMPEAKFDLYFLAYDSPKAVSHGNHWTDREGIVELTHNYGTEDDPDYKISNGNTEPHKGFGHLCVSVDNIQAACQRLEDAGYKFQKKLTDGRMRHIAFVLDPDGYWVEVIGQKPLEETESVKDTDTSTYRMNHTMIRVKDKDVSLKFYQDVLGMQLKRTSESPNSGFNLYFLGYGAPASDETANGVNPTADHEGLLELTWNYGTEKEADFKYHNGNDEPQGFGHICIAVDDLEAACARFEEKKVNWKKRLTDGRMKSIAFVLDPDNYWIEVVQNEKLKTRSNV

SEQ ID NO: 78677 - DNA, 1154 bp, Zea mays
  CDS (103)..(975)
tagatagagagagagagagtgatcggtacaaggatcaccgctgtgcctgcgcgtgctgcttcaccgaatcgagacagaccctgtccgaatccgagccaagggatggcaaccggtagtgaagcctcgaaggcagctgagactgtggttgactggcataaacaggacagcaagaggatgctccatgcggtttaccgtgttggggatctggaccgcacaatcaagtactacacggaatgctttgggatgaaactgctgaggaaaagggatgttcctgatgagaagtacaccaacgccttccttggctttgggccagagaacaccaactttgcagttgaattgacatacaactatggcgttgacaagtatgacattggaacgggctttgggcatttcgcaattgctaatgatgatgtgtacaagttagctgagaatatcaaatccaagggtggcaagatcacccgcgaacctggtcctgtcaagggaggatccactgttattgccttcgcacaggatcctgatggctacatgtttgagcttatccagagggctgacacacctgagcctctttgccaggtcatgcttcgtgttggtgaccttgagcgttctatcaagttttatgagaaggccctagggatgaagctcctaaggaagaaggatgtacctgattacaagtataccattgccatgttgggctatgctgatgaggacaagacaactgttctggagctgacgtacaactatggagtcacagaatacagcaagggcaatgcatatgctcaggttgccattggcaccaatgatgtgtacaagagcgctgaggcagttgatctggcgaccaaagaactaggtggcaagattttgcggcagccagggcctctacctgggatcaacactaagatcgcctcttttgttgatccagatggctggaaagtggttctggtcgacaacaccgacttcctcaaggaactacagtgaagactcgggatacccaggtgctgtgctaggatgtagtaatgcttatctggtgtaataagatgtgggtggtttgtttccgccctgacgaacttataataatgaatgttgttacagaggttgtgcttctgccagtgaggtttgggatttgctaaaaaaaaaaaaaaaaaaaaaaaaaaaaa

SEQ ID NO: 78678 - protein, 290 aa, Zea mays
MATGSEASKAAETVVDWHKQDSKRMLHAVYRVGDLDRTIKYYTECFGMKLLRKRDVPDEKYTNAFLGFGPENTNFAVELTYNYGVDKYDIGTGFGHFAIANDDVYKLAENIKSKGGKITREPGPVKGGSTVIAFAQDPDGYMFELIQRADTPEPLCQVMLRVGDLERSIKFYEKALGMKLLRKKDVPDYKYTIAMLGYADEDKTTVLELTYNYGVTEYSKGNAYAQVAIGTNDVYKSAEAVDLATKELGGKILRQPGPLPGINTKIASFVDPDGWKVVLVDNTDFLKELQ

SEQ ID NO: 78679 - DNA, 1803 bp, Paracoccidioides brasiliensis
  CDS (190)..(1149)
ggcacgaggctggaccctgtctctattgttctaaataatcggctttaccgtagctatagttaaattctaaggtatccttctatctccctgtctctcgccgtattgctgcgtcgactttccgtaatccccaagcaagaattaacttctgtggcagcttttgtgtcttggtgtagcactgccaccgcaatcatggccacagatccatcaaaatacaagttcaatcataccatgattcgcgtaaaggatccaaaaagatcagttgaattttacaattttctgggcctttcgcaaatcaacagactagatttcccagagaacaagttctccctctacttccttgcatatgacggcccacaggccctatctggctcccgccactggacggataggaatggcattatcgaacttactcacaattatggaaccgaaaacgacccttcgtacactgtctcgaccggcaatgtcgagcctcaccgcggatttggtcatctcgctatctcagtggataacgtcgaactcgcctgcaagcgcctggaagatgccaactacagcttccagaagaagttcgccgaagggaggatgcgaaatattgccttcgtcaaagacccagacggatactgggtggagattatccggaaacatcaaacagatgcggccgttgcacagacaaatccatccacctaccggatgaaccacaccatggttagggtcaaggacccggaagcaagtttgaaattctaccaggaagtttttggaatgacccttcttcgcacgctcgagcttgctggtgcggattgcaatctgtacttcctggcgtatccttcatccaatccatcgcttaaagagggtgatgccaacccagtcgcagaatgggaagggttgctggaattgacctggaatcacggcacagagaagcaagaaggaaaagtgtatcatgatggcaattcggagcctcagggatttggacatatctgcgtatcagttgacgatctcgatgctgcctgtgctcggttcgaggcacaaaacgtaacctggaaggaacgtttgactgacgggcggatgaaaaatgtggccgttatcctagacccagacggttactggattgagatcatccaaaatgagtcctttaaaaacagaagccactggtagactaccattcacccatttgtgccttggcagacgaattgaaccctgagcccctccagtcgaattccgtgggagtccgtaggagcctgtgggtgcctgtgggagcctctggcgaacagagctgccgctttgcctgtacggaggttgctctgaggattctaaagccctccaagcctgcgtcgtcgtccacgacaacttgctggttttatttggcgactcgctgtccagcgctgaggagcatgatggagtaccggtatcatcgtcctcgcatgtgatgacttcggcgaatggtagtagtacgaagccgaattcgagtgatagcagtggtgctgctggggttctttggtcaaggaagccgcggtctcttaatccggttggtgggcatcggcgtttgggtagttgaattcatcggaggcgaagagggatgggattggtgctgaaggggagagataggtgaggcgaaggttatgatgcgatgtgtttaattcttacatagtatgttgattgtgggtttgaatgggctagatagagatggggtgaaatggggtggtatgagatgcgatgtggttttgagagaggcgctatagtgtctttagtctacagtaaaatagcattaattaatctaagagttaagctatcgaagagtgggtgtgttag

SEQ ID NO: 78680 - protein, 319 aa, Paracoccidioides brasiliensis
MATDPSKYKFNHTMIRVKDPKRSVEFYNFLGLSQINRLDFPENKFSLYFLAYDGPQALSGSRHWTDRNGIIELTHNYGTENDPSYTVSTGNVEPHRGFGHLAISVDNVELACKRLEDANYSFQKKFAEGRMRNIAFVKDPDGYWVEIIRKHQTDAAVAQTNPSTYRMNHTMVRVKDPEASLKFYQEVFGMTLLRTLELAGADCNLYFLAYPSSNPSLKEGDANPVAEWEGLLELTWNHGTEKQEGKVYHDGNSEPQGFGHICVSVDDLDAACARFEAQNVTWKERLTDGRMKNVAVILDPDGYWIEIIQNESFKNRSHW

SEQ ID NO: 78681 - DNA, 1053 bp, Arabidopsis thaliana
  CDS (1)..(1053)
atggtgaggatcattcctatggctgcttcctccattcgaccttccctcgcctgcttctctgattctcctcgcttccccatctccctcctctccagaaatctctctcgcactctccatgttcctcaatcacagctttttggtttaacttctcataagcttttgagaagaagtgtaaactgtttaggagttgctgaatctggtaaagcagctcaatctactacacaagatgatcttctcacctgggttaagaatgataagagaagaatgcttcatgttgtttatcgtgttggcgatatggaccggacgataaagttttatactgaatgtcttgggatgaagcttctacgtaagcgtgatataccagaagagaagtatactaatgctttccttggttatggaccggaagattcacactttgtgattgagcttacttataattatggagttgacaagtatgacattggggctggttttggtcactttggtattgcggtcgatgatgtggcgaaaactgtagagcttgtgaaagccaaagggggaaaagtaagccgggagcctggtcctgtcaaaggtggcaaaactgtaatagcattcattgaagatcctgatggttacaaatttgaactcttggaaagaggtcctacaccagaacctctttgccaagttatgctccgtgttggtgatctcgatagggccataaagttctatgagaaggcttttggaatggaacttctgcgaacaagagacaacccagagtacaagtacacaatagccatgatgggatatggtccagaagataaatttcctgtcctagagctgacatataactatggtgtcactgaatatgataaaggaaatgcttatgctcagatatcaatagggacggatgatgtgtacaaaactgcagaagctataaaactctttgggggaaaaatcacgagggagcctggtcccttaccaggtattagcacgaagatcaccgcgtgtctggatcctgatggttggaaatcggtatttgtggacaacattgactttctcaaagaactggagtga

SEQ ID NO: 78682 - protein, 350 aa, Arabidopsis thaliana
MVRIIPMAASSIRPSLACFSDSPRFPISLLSRNLSRTLHVPQSQLFGLTSHKLLRRSVNCLGVAESGKAAQSTTQDDLLTWVKNDKRRMLHVVYRVGDMDRTIKFYTECLGMKLLRKRDIPEEKYTNAFLGYGPEDSHFVIELTYNYGVDKYDIGAGFGHFGIAVDDVAKTVELVKAKGGKVSREPGPVKGGKTVIAFIEDPDGYKFELLERGPTPEPLCQVMLRVGDLDRAIKFYEKAFGMELLRTRDNPEYKYTIAMMGYGPEDKFPVLELTYNYGVTEYDKGNAYAQISIGTDDVYKTAEAIKLFGGKITREPGPLPGISTKITACLDPDGWKSVFVDNIDFLKELE

SEQ ID NO: 78683 - DNA, 852 bp, Arabidopsis thaliana
  CDS (1)..(852)
atggctgaggcttctgatttgttggaatggcctaagaaggataaccgtcgttttctccatgttgtctaccgcgttggtgatcttgatcgcaccattgagttttacactgaggtctttggtatgaagctgttgtggaaaagagatatccctgaggagaagtattctaatgcttttcttggttttggacctgaaacatctaactttgttgtggagctcacatataactatggtgttagctcatatgatattggaactggctttgggcattttgccatttcaactcaagatgtttccaaactggttgagaacgtccgtgccaagggtggaaatgtgactagggaacctggtccagtcaaaggtggaggcagtgtcattgcgtttgtgaaggaccctgatggctacacttttgagctcatccagagaggtccaactccagaacctttctgccaagtcatgcttcgtgttggtgatctcgaccgtgccatcaaattctatgaaaaggccctcgggatgagactcttgagaaagattgagagacctgagtacaagtacaccataggcatgatggggtatgctgaagaatacgagtcgatagttttggagctgacctataactacgacgtgactgagtacacaaagggcaatgcatatgcacagattgcaataggcacagatgatgtgtacaaaagcggtgaagttattaagatagtcaaccaagagctaggaggaaagatcactagagaagccggacctcttcctggactcggcaccaagattgtctcattccttgatccagatggctggaaaacggttttggtggacaacaaagattttctcaaggaactggaatga

SEQ ID NO: 78684 - protein, 283 aa, Arabidopsis thaliana
MAEASDLLEWPKKDNRRFLHVVYRVGDLDRTIEFYTEVFGMKLLWKRDIPEEKYSNAFLGFGPETSNFVVELTYNYGVSSYDIGTGFGHFAISTQDVSKLVENVRAKGGNVTREPGPVKGGGSVIAFVKDPDGYTFELIQRGPTPEPFCQVMLRVGDLDRAIKFYEKALGMRLLRKIERPEYKYTIGMMGYAEEYESIVLELTYNYDVTEYTKGNAYAQIAIGTDDVYKSGEVIKIVNQELGGKITREAGPLPGLGTKIVSFLDPDGWKTVLVDNKDFLKELE

SEQ ID NO: 78685 - DNA, 1000 bp, Avicennia marina
  CDS (4)..(558)
gtgatggcatccaaagagtcagccgacaacaacccaggactccacacttctctggatgaggccaccaaaggctatttcttgcagcaaaccatgcttcgggtaaaggaccccaaagtcagtcttgatttctactctcgaattatgggaatgtcgttgcttaaaagattggacttcccagagatgaaattcagcttatactttttgggatatgaggacacatcttcagctcccagtgatcctgttgagcgcacgtcgtggacttttggtcagaaagcagtacttgagcttacacataactggggtactgaaagtgatcctgagttcaaaggttatcacaatggtaactcagatcctcgtggtttcggacacataggtgtcactgttgatgatgtgcacaaggcatgtgagagatttgaaagtttaggagtggagtttgtaaagaaacctcgggatggaaaaatcatggatgtagcattcatcaaggatcccgatggctactggattgaaatctttgacactaggactattgccaaatcaactgctgatgctgctgtttgactgcatgctgcgcctgtctcagaagatgcgcaacaacgcctccttgagtttgtgttgtatcagacacttaaaggagacaggagcagatgttttcaaatggttaaaccattcgtgtcccatacgtggaaaagtggatatatttccctcactgaatgctttccataacttgaataatgctcttgtcacaagagcgtagtgtatggctttttcctagaatgaatgattcgagaaaatctatcttgaacgggaaggggttcctacctgttcagtgtagacctgcggtgctgtaatggttattcttgcttgttgtcactatggtagtggattatcaaatcccttaaagattgtgtgagaagggtggttcgtgttttttctaaaaccatggaattgaattgaaatcgaaattttagtatatggagttgaaataaaaaaaaaaaaaaaa

SEQ ID NO: 78686 - protein, 184 aa, Avicennia marina
MASKESADNNPGLHTSLDEATKGYFLQQTMLRVKDPKVSLDFYSRIMGMSLLKRLDFPEMKFSLYFLGYEDTSSAPSDPVERTSWTFGQKAVLELTHNWGTESDPEFKGYHNGNSDPRGFGHIGVTVDDVHKACERFESLGVEFVKKPRDGKIMDVAFIKDPDGYWIEIFDTRTIAKSTADAAV

SEQ ID NO: 78687 - DNA, 1074 bp, Arabidopsis thaliana
  CDS (1)..(1074)
atggtgaggatcattcctatggctgcttcctccattcgaccttccctcgcctgcttctctgattctcctcgcttccccatctccctcctctccagaaatctctctcgcactctccatgttcctcaatcacagctttttggtttaacttctcataagcttttgagaagaagtgtaaactgtttaggagttgctgaatctggtaaagcagctcaagctactacacaagatgatcttctcacctgggttaagaatgataagagaagaatgcttcatgttgtttatcgtgttggcgatatggaccggacgataaagtacttcactttggctttcctgttttatactgaatgtcttgggatgaagcttctacgtaagcgtgatataccagaagagaagtatactaatgctttccttggttatggaccggaagattcacactttgtgattgagcttacttataattatggagttgacaagtatgacattggggctggttttggtcactttggtattgcggtcgatgatgtggcgaaaactgtagagcttgtgaaagccaaagggggaaaagtaagccgggagcctggtcctgtcaaaggtggcaaaactgtaatagcattcattgaagatcctgatggttacaaatttgaactcttggaaagaggtcctacaccagaacctctttgccaagttatgctccgtgttggtgatctcgatagggccataaagttctatgagaaggcttttggaatggaacttctgcgaacaagagacaacccagagtacaagtacacaatagccatgatgggatatggtccagaagataaatttcctgtcctagagctgacatataactatggtgtcactgaatatgataaaggaaatgcttatgctcagatagcaatagggacggatgatgtgtacaaaactgcagaagctataaaactctttgggggaaaaatcacgagggagcctggtcccttaccaggtattagcacgaagatcaccgcgtgtctggatcctgatggttggaaatcggtatttgtggacaacattgactttctcaaagaactggagtga

SEQ ID NO: 78688 - protein, 357 aa, Arabidopsis thaliana
MVRIIPMAASSIRPSLACFSDSPRFPISLLSRNLSRTLHVPQSQLFGLTSHKLLRRSVNCLGVAESGKAAQATTQDDLLTWVKNDKRRMLHVVYRVGDMDRTIKYFTLAFLFYTECLGMKLLRKRDIPEEKYTNAFLGYGPEDSHFVIELTYNYGVDKYDIGAGFGHFGIAVDDVAKTVELVKAKGGKVSREPGPVKGGKTVIAFIEDPDGYKFELLERGPTPEPLCQVMLRVGDLDRAIKFYEKAFGMELLRTRDNPEYKYTIAMMGYGPEDKFPVLELTYNYGVTEYDKGNAYAQIAIGTDDVYKTAEAIKLFGGKITREPGPLPGISTKITACLDPDGWKSVFVDNIDFLKELE

SEQ ID NO: 78689 - DNA, 849 bp, Glycine max
  CDS (74)..(631)
tctgtttctccctcactctgatccacttctacttcaacatcttaagaaagcgaatcgattccgattcctctcaatggctgcggaacccaaggaatcgccttccaacaaccccggtctccatacaactcctgacgaagccaccaagggttacatcatgcaacaaactatgtttagaatcaaagaccctaaagtgagcctcgatttttattctcgagtcttgggcatgtctttgcttaagagattggattttccggagatgaagttcagcctgtacttcatgggctatgagaatacggcagaagctccaagtaatccaattgataaagtggtttggaccttttctcagaaggctacaattgaactgacacataattggggtactgaaagcgatccagagttcaaagggtaccacaatggcaattctgaacctcgtggctttggacacattggtgtaactgttgatgacacatacaaggcatgtgaaagatttcagaatctgggagttgagtttgttaagaaaccagaagatgggaaaatgaaaggtatagcatttattaaagatcctgatggatactggattgaaatctttgatcggaaaacaataggaaatgtaacacaaactgctgcttaggcttaagataacaccttaaggcccggcttttctgtgatatgttcttatctctgatttaattgggtcttttgctcgtatgtggagtatgtaggatttttcgagcttcacctgaatgaataatttgttgtcaaaccagaacgaaaaacaagattgtgttgtgaatcttgtattttttttttctttaatttcaaaaacctagccaaaaaaaaaaaaaaaaa

SEQ ID NO: 78690 - protein, 185 aa, Glycine max
MAAEPKESPSNNPGLHTTPDEATKGYIMQQTMFRIKDPKVSLDFYSRVLGMSLLKRLDFPEMKFSLYFMGYENTAEAPSNPIDKVVWTFSQKATIELTHNWGTESDPEFKGYHNGNSEPRGFGHIGVTVDDTYKACERFQNLGVEFVKKPEDGKMKGIAFIKDPDGYWIEIFDRKTIGNVTQTAA

SEQ ID NO: 78691 - DNA, 558 bp, Arabidopsis thaliana
  CDS (1)..(558)
atggcgtcggaagcgagggaatcaccagcaaacaatcctggcttgtcaacgaatcgagatgaggctacaaaaggatacatcatgcaacagactatgtttcggatcaaggaccctaaggctagtcttgacttttactcacgtgtactggggatgtcattgctgaagaggctggatttctctgagatgaaatttagtttgtacttcctgggctacgaggatactacaacagctccaaccgatccaacagagagaacggtttggacatttggtcaaccggcaacaattgaattgactcacaactggggtacagagagtgatcctgagtttaaaggttatcacaatgggaactctgagcctcgtggatttgggcacattggggttaccgttgatgatgtgcacaaggcatgcgagagatttgaagaattgggagtagagtttgccaagaaaccaaacgatggaaagatgaagaatatagccttcattaaggatcctgatggctactggatcgagatctttgatctcaagactatcggaactactaccgtaaacgcagcttga

SEQ ID NO: 78692 - protein, 185 aa, Arabidopsis thaliana
MASEARESPANNPGLSTNRDEATKGYIMQQTMFRIKDPKASLDFYSRVLGMSLLKRLDFSEMKFSLYFLGYEDTTTAPTDPTERTVWTFGQPATIELTHNWGTESDPEFKGYHNGNSEPRGFGHIGVTVDDVHKACERFEELGVEFAKKPNDGKMKNIAFIKDPDGYWIEIFDLKTIGTTTVNAA

SEQ ID NO: 78693 - DNA, 784 bp, Brassica juncea
  CDS (45)..(602)
tagttcatcgtacatcgagatttgatcagcttcgtgtgttctctatggcgtcggaagcgaaggaatcaccagcaaacaatcctggcttgtcaacggttcgggatgaggctaccaaagggtatatcatgcagcagactatgtttcgggtgaaggaccctaaggctagtcttgacttttactcacgtgtcctgggaatgtcattgctgaagagattagatttctctgagatgaagttcagcttgtacttcctgggctacgaggatacttcgacagctccaacagatcctactgagagaactgtttggacctttggtcgacctgcaacaattgagctgactcacaactggggcacagagagtgatcccgagtttaaaggctatcataatggaaactccgagcctcgtggatttgggcatattggggttacagttgatgatgtgcacaaggcatgcgagagatttgaacaactgggagtagagtttgtcaagaaaccacacgatggaaagatgaagaatatagccttcatcaaggatcctgatggctactggatcgagatctttgatctcaagactatcgggacaacagccggaaacgcagcttgaagtagttccgcttgtgctgtttgtgttcttgtgttcattccacctgagtttgaaattcaaataaagatgtttcctgtctcaacgaataagagaaaatgacattattctcaatgtggtctgtttcttggtctttacaatgagttgagttaaataagttgttatcaaaaaaaaaaaaaaaaaaa

SEQ ID NO: 78694 - protein, 185 aa, Brassica juncea
MASEAKESPANNPGLSTVRDEATKGYIMQQTMFRVKDPKASLDFYSRVLGMSLLKRLDFSEMKFSLYFLGYEDTSTAPTDPTERTVWTFGRPATIELTHNWGTESDPEFKGYHNGNSEPRGFGHIGVTVDDVHKACERFEQLGVEFVKKPHDGKMKNIAFIKDPDGYWIEIFDLKTIGTTAGNAA

SEQ ID NO: 78695 - DNA, 795 bp, Cicer arietinum
  CDS (58)..(618)
ctcgtgccgctctctcaccgatactcaaagaaaccgcatcgatttcgatttttctcgatggctgcttcggaatcgaaggaatcaccggctaacaaccccggtcttcatacgactattgatgaagctactaagggttactttatgcaacaaactatgtttagaattaaagaccccaaagttagccttgatttttattctcgcgttttgggcatgtctttgcttaagagattggattttcctgagatgaagttcagcttatactttatggggtatgaggatacaacagaagctccaagtaaccctgtggatagaacagtttggacctttgctcaaaaggctacaattgaattgacccataattggggcactgaaagtgatccagagttcaaagggtaccacaatggcaattctgatcctcgtggctttggacacattggcataactgttgatgacacctacaaagcatgtgaaagatttcagaatcttggagtcgagtttgttaagaaaccagatgatgggaaaatgaaagggattgcatttattaaggatcccgatggttactggattgaactctttgaccggaaaacaattggaaatgtaacagaaggtaatgcttgagataaaaccttcaggtagacaccatggtatccaattctcttgtcttatttacttattcatgtttagcgccctgtatgtaattttgtccttacattatattctctcatataaagttttggatggtgtaaaatttgtgtttatttggacgtataaatgcaaagttatgttggaggtgag

SEQ ID NO: 78696 - protein, 186 aa, Cicer arietinum
MAASESKESPANNPGLHTTIDEATKGYFMQQTMFRIKDPKVSLDFYSRVLGMSLLKRLDFPEMKFSLYFMGYEDTTEAPSNPVDRTVWTFAQKATIELTHNWGTESDPEFKGYHNGNSDPRGFGHIGITVDDTYKACERFQNLGVEFVKKPDDGKMKGIAFIKDPDGYWIELFDRKTIGNVTEGNA

SEQ ID NO: 78697 - DNA, 417 bp, Neisseria meningitidis serogroup A
  CDS (1)..(417): transl_table=11
atgcgcttactccatactatgctccgcgtgggcaatctcgaaaaatccctcgatttctaccaaaacgttttgggtatgaaactgctccgccgaaaagattatcccgaaggcagatttacccttgccttcgtcggttacggcgatgaaaccgacagcacggttttggaactgacgcacaactgggatacggaacgatacgacttgggcaacgcctacggacacatcgcggttgaagtggacgatgcctacgaagcctgcgaacgtgtgaagcggcagggcggaaacgtcgtccgcgaagccggcccgatgaaacacggcacaaccgtgatagccttcgtcgaagaccccgacggatacaaaatcgagttcattcaaaagaaaagcggcgacgattcggttgcctatcaaactgcctga

SEQ ID NO: 78698 - protein, 138 aa, Neisseria meningitidis serogroup A
MRLLHTMLRVGNLEKSLDFYQNVLGMKLLRRKDYPEGRFTLAFVGYGDETDSTVLELTHNWDTERYDLGNAYGHIAVEVDDAYEACERVKRQGGNVVREAGPMKHGTTVIAFVEDPDGYKIEFIQKKSGDDSVAYQTA

SEQ ID NO: 78699 - DNA, 645 bp, Pseudomonas putida
  CDS (124)..(645): transl_table=11
gagctgttgacaattaatcatcggctcgtataatgtgtggaattgtgagcggataacaatttcacacaggaaacaggaattcccgctggcgcctgcgggcccggcctcgtctctggagctttcatgagcctgaacgacctcaacaccctgcctggcgttactgcccaagcggaccctgccactgcgcaattcgttttcaaccacaccatgctgcgcgtcaaggacatcgagaagtcgctggacttctatacccgcgtgcttggtttcaaactggtggacaagcgcgacttcgtcgaagccaagttcagcctgtacttcctggcgctggttgacccagcgacaattccagctgatgacgatgcgcgtcaccagtggatgaagtcgatccctggcgtacttgagttgacgcataaccacggcactgaacgtgatgcagacttcgcctatcaccatggcaataccgacccgcgcggttttggccatatctgcgtttcggtgcctgacgtagttgcggcctgcgaacgcttcgaggccttgcaggtgccgttccagaagcgactgagcgacggccgtatgaaccatctggcctttatcaaagacccggatggttactgggtcgaagtgattcagccaacgcccttgtaa

SEQ ID NO: 78700 - protein, 173 aa, Pseudomonas putida
MSLNDLNTLPGVTAQADPATAQFVFNHTMLRVKDIEKSLDFYTRVLGFKLVDKRDFVEAKFSLYFLALVDPATIPADDDARHQWMKSIPGVLELTHNHGTERDADFAYHHGNTDPRGFGHICVSVPDVVAACERFEALQVPFQKRLSDGRMNHLAFIKDPDGYWVEVIQPTPL

SEQ ID NO: 78701 - DNA, 909 bp, Schizosaccharomyces pombe
  CDS (1)..(909)
atggcttctactactgacatgagtacttacaaactaaatcacactatgattcgtgtgaaagacctcgacaagagtctcaaattttataccgaggtgtttggtatgaaactcattgatcaatgggttttcgaggaaaatgaattctctttgtcgtttttagctttcgatggacctggagctctaaatcacggagtggaacgtagtaagcgtgaaggtatattggaactgacttataactttggcactgagaagaaggaaggccctgtttatatcaatggtaataccgagcctaagagaggatttggacacatctgctttactgttgataacattgaatctgcttgcgcatatttggaatccaagggggtttcttttaagaaaaagctttccgatggtaagatgaaacacatcgcttttgccttggatcctgacaattactggattgagcttgtttctcaatctgaaactaagcccaaagctaatatttctaactttcgttttaatcatacaatggtccgtgttaaggatcccgaacctagtatcgccttttatgagaaacttggaatgaaggtaattgacaaagcggatcatcccaatggtaagttcaccaattatttcttggcctatcctagcgacttgcccagacatgatcgtgagggattacttgaattgactcataactggggtactgaaaaggagtcaggacccgtttaccataatggcaatgacggcgatgaaaagggttatggtcatgtttgtatttccgttgacaatattaatgcagcttgctctaaatttgaagctgaggggctaccattcaagaagaaattgaccgatggcagaatgaaggatattgctttcttactggaccctgataattactgggttgaggtcattgaacagaagtaa

SEQ ID NO: 78702 - protein, 302 aa, Schizosaccharomyces pombe
MASTTDMSTYKLNHTMIRVKDLDKSLKFYTEVFGMKLIDQWVFEENEFSLSFLAFDGPGALNHGVERSKREGILELTYNFGTEKKEGPVYINGNTEPKRGFGHICFTVDNIESACAYLESKGVSFKKKLSDGKMKHIAFALDPDNYWIELVSQSETKPKANISNFRFNHTMVRVKDPEPSIAFYEKLGMKVIDKADHPNGKFTNYFLAYPSDLPRHDREGLLELTHNWGTEKESGPVYHNGNDGDEKGYGHVCISVDNINAACSKFEAEGLPFKKKLTDGRMKDIAFLLDPDNYWVEVIEQK

SEQ ID NO: 78703 - DNA, 848 bp, Solanum lycopersicum
  CDS (27)..(584)
gaattcctaggtttatatcatcatcaatggcttcagagtcgaaggattcgccttctaacaatccaggtcttcatgctacccctgatgaagcaactaaaggttactttttgcagcaaactatgtttagaatcaaggatcccaaagtgagtcttgaattctactccaaagtgttgggcatgtccttgctcaagagattggatttccctgagatgaagttcagcttatacttcatggggtatgaggatacagcatcagctcccagtgatcccgttgaacgtactgcttggacctttagtcagaaatctacattagagcttacacacaactggggtactgagagtgaccctaattttacaggttaccacaatggaaattcagaaccacgtggctttggacacataggtgttactgttgatgatgtctacaaggcttgtgagagatttgaaagtctgggagtagagtttgtaaagaaacctcttgacggaaaaatgaaaggtattgcatttattaaagatcctgatggctattggatcgagatctttgacacgaaaattatcaaagacgctgctggttctgcttcttagttcaggagcactcgaggcttctatcacgagtcttgatcaactcagagatcgatttgaagagagtgttttccagaaatgaacattttcgcgctgtgtttaatctgctagtgaatgaattttgcgccatgttttaggccgaaaagttttttatctgtctaatgtaaaaacaagagatgtatactgtgttcaaaataatagattggatgtaacttctgtgattgagaaataaaaattgaattagaaaaacttcaataaaaagaattc

SEQ ID NO: 78704 - protein, 185 aa, Solanum lycopersicum
MASESKDSPSNNPGLHATPDEATKGYFLQQTMFRIKDPKVSLEFYSKVLGMSLLKRLDFPEMKFSLYFMGYEDTASAPSDPVERTAWTFSQKSTLELTHNWGTESDPNFTGYHNGNSEPRGFGHIGVTVDDVYKACERFESLGVEFVKKPLDGKMKGIAFIKDPDGYWIEIFDTKIIKDAAGSAS

SEQ ID NO: 78705 - DNA, 396 bp, Synechocystis sp
  CDS (1)..(396): transl_table=11
atgttcttgctacacaccatgattcgagtgggagatttagacaaatccctgcaattttactgcgacattttggggatgaatttactccgcaaaaaagactaccccagtggggaatttaccctcgcttttgtgggttatggcaaagaatcggagaacgcggtgattgagttaacccataactggggcaccgataaatacgatttgggtaatggttttggccacattgccctgggggtggaagacatttatagcacctgcgacaaaatcagagataagggagggaaagtggtgcgggaaccggggccgatgaagcacggcaccaccgtcattgcttttgtggaagatcccgatggctacaaaattgaattgatccaaacttcctcaaagaaagattag

SEQ ID NO: 78706 - protein, 131 aa, Synechocystis sp
MFLLHTMIRVGDLDKSLQFYCDILGMNLLRKKDYPSGEFTLAFVGYGKESENAVIELTHNWGTDKYDLGNGFGHIALGVEDIYSTCDKIRDKGGKVVREPGPMKHGTTVIAFVEDPDGYKIELIQTSSKKD

SEQ ID NO: 78707 - DNA, 417 bp, Vibrio cholerae
  CDS (1)..(417): transl_table=11
atgtccaaccatcgtattttgcacaccatgctacgcgtcggcgatttggataaatcgatcgaattctatactcaagtgatgggtatgagcctgctgcgcaaaaatgagaatactgagtacaaatacaccctcgccttcttaggttatggtgatgaatcccaaggtgcggtcattgaactgacctacaactggggcgtggcggactatgagaaaggcaacgcatacggccatatcgcgattggggttgatgatatttatgcgacttgcgataccatcaaagcagcgggaggcattgtaacccgtgaaccaggcccagtgaaaggcgggacaactcacatcgctttcgtgaaagaccctgatggttacatgattgagcttatccaaaacaagcaagcccatgctggtcttgaaggctaa

SEQ ID NO: 78708 - protein, 138 aa, Vibrio cholerae
MSNHRILHTMLRVGDLDKSIEFYTQVMGMSLLRKNENTEYKYTLAFLGYGDESQGAVIELTYNWGVADYEKGNAYGHIAIGVDDIYATCDTIKAAGGIVTREPGPVKGGTTHIAFVKDPDGYMIELIQNKQAHAGLEG

SEQ ID NO: 78709 - DNA, 417 bp, Vibrio parahaemolyticus
  CDS (1)..(417): transl_table=11
atgtcaaacggtcgaattctacacactatgcttcgcgtaggtgatctagacaaatcaatcaaattttatactgaagtcatgggcatgcagttgcttcgtaccaacgaaaacaaagagtacgaatacacacttgcctttgttggttacggtgatgaatcccaaggtgccgtgattgaactgacttacaactggggtaagacagaatatgacctaggcacagcatttggtcatattgcaattggcgtagacgacatctacgcaacatgtgatgcaatcaaagccgcaggcggtaacgttactcgcgaagcgggcccagtgaaaggtggtacaacacacatcgcctttgtaaaagatcctgatggttacatgattgagcttatccagaacaaacaagcttctgcgggtctagaaggctag

SEQ ID NO: 78710 - protein, 138 aa, Vibrio parahaemolyticus
MSNGRILHTMLRVGDLDKSIKFYTEVMGMQLLRTNENKEYEYTLAFVGYGDESQGAVIELTYNWGKTEYDLGTAFGHIAIGVDDIYATCDAIKAAGGNVTREAGPVKGGTTHIAFVKDPDGYMIELIQNKQASAGLEG

SEQ ID NO: 78711 - DNA, 981 bp, Saccharomyces cerevisiae
  CDS (1)..(981)
atgtccactgatagtacacgctatccaattcagattgagaaagcctcgaatgatccaacccttctgcttaatcacacatgtttaagagtcaaggatccagcaaggaccgttaagttctacaccgaacacttcggtatgaagctattaagcagaaaggattttgaagaagcaaaatttagcttgtactttttaagctttccaaaagacgacatacccaaaaataagaatggagagcctgatgtttttagcgcacacggtgtcttagaactaactcacaattggggtactgaaaaaaacccagactacaagatcaacaacgggaatgaggaacctcatcgtggatttgggcacatctgtttttctgtatccgatatcaataaaacctgcgaagagctagaatctcagggtgtcaaattcaagaagagactctctgaaggaagacagaaggacattgcgtttgctttaggccctgatggatactggattgagttgatcacatattctagagagggtcaggaatacccaaagggctcagtaggtaacaagttcaatcataccatgattcgtattaaaaacccaacccggtctttagaattctaccagaatgtgttgggcatgaaattattaagaactagtgagcacgaaagtgcaaaatttacgttatactttcttggttatggcgttccaaagaccgacagcgttttttcatgtgaaagtgtgttggagttaactcataattggggaactgagaatgatccaaacttccactatcataacggtaactcagagccccagggttatggtcacatctgcataagttgtgatgacgctggcgccctttgtaaagaaattgaagtgaaatacggcgataagatccaatggtctcctaaatttaaccaaggcagaatgaagaatattgcctttttgaaggatcctgatggttattccattgaagtcgttcctcatggtttgattgcctaa

SEQ ID NO: 78712 - protein, 326 aa, Saccharomyces cerevisiae
MSTDSTRYPIQIEKASNDPTLLLNHTCLRVKDPARTVKFYTEHFGMKLLSRKDFEEAKFSLYFLSFPKDDIPKNKNGEPDVFSAHGVLELTHNWGTEKNPDYKINNGNEEPHRGFGHICFSVSDINKTCEELESQGVKFKKRLSEGRQKDIAFALGPDGYWIELITYSREGQEYPKGSVGNKFNHTMIRIKNPTRSLEFYQNVLGMKLLRTSEHESAKFTLYFLGYGVPKTDSVFSCESVLELTHNWGTENDPNFHYHNGNSEPQGYGHICISCDDAGALCKEIEVKYGDKIQWSPKFNQGRMKNIAFLKDPDGYSIEVVPHGLIA

SEQ ID NO: 78713 - DNA, 381 bp, Bacillus subtilis
  CDS (1)..(381): transl_table=11
atggcaaaacgaattgaccatacaggcatcatggtaagagatattaacgcgtccatcacattttatgaagaggtactaggcatgaaattgaaggatcgcatcactcacacgaacggtgtaatcgagcttgcttttcttggctttgaagacggcccggaaacagaaattgaactgattcaaggctacagcagcgagcttcccgctgaaggaaaagtgcaccacattgccctgctgacggatgacatcgcggctgaatatacaaaagcggaaaaaatgaacgcaaaatttatcgacgaggagatcacaacacttccaaacggataccgttatttctatatcgaaggccctgacggtgagtggattgagttctttcagcggtaa

SEQ ID NO: 78714 - protein, 126 aa, Bacillus subtilis
MAKRIDHTGIMVRDINASITFYEEVLGMKLKDRITHTNGVIELAFLGFEDGPETEIELIQGYSSELPAEGKVHHIALLTDDIAAEYTKAEKMNAKFIDEEITTLPNGYRYFYIEGPDGEWIEFFQR

SEQ ID NO: 78715 - DNA, 1134 bp, Oryza sativa
  CDS (1)..(1134)
atgagagctctccccatggccgccggccgcgccgccgccgtcgccgcctgcgcctcgccggccgtcccgcggaggtcgctgctcctctccaccgccgccgcaggtgagcccccctgtcgacccccggctgattcctcctctccaagcaaattcagtcggttcgatcggtcagctgtacgtcttcttggatggactgcagcgctgcagccggagccggtgaggctgacccggggcgcgagcgccgcgcccaagctccgggcctcgccgccggacgccgcgcaggcggcggcggccttcggcagcaaggaggaggccttcgcctgggccaagagcgacaaccggcggctgctccacgtcgtctaccgcgtcggcgacatcgacagaacaatcaagttctacacggagtgccttgggatgaagctgctgaggaagcgcgacatcccggaggagaagtacaccaacgccttcctcggctatggcgcggaggacaaccacttcgtcgtcgagctcacctacaactatggcgtcgacaagtatgacatcggggcaggtttcggtcactttggcatcgccgtcgacgatgtggcgaagacggtggagctgataagggcgaaaggagggaaggtgaccagggagcccggccctgtcaagggcggcaagacggtgatcgccttcgtcgaggacccagatggctacaagtttgagatccttgagaggccagggactccagagcccctgtgccaggtgatgctccgtgtcggtaatcttgatcgggccataagcttctatgagaaggcctgtggcatggagctgctaaggaagagagataaccctgaatacaagtacacagtggcaatgatggggtatggtcctgaagacaagaatgctgtgctggagctgacatacaactatggtgtcactgaatatgacaaggggaatgcatatgcccagatcgcgatcggaaccgacgacgtctacaagacggcggaggtggtgaagctgttcggagggcaggtggtgcgggagccagggccattgccggggatcaacaccaagatcacgtccatcctggaccctgatggctggaaatcggtgtttgtcgacaacatcgactttgcaaaggaactggagtaa

SEQ ID NO: 78716 - protein, 377 aa, Oryza sativa
MRALPMAAGRAAAVAACASPAVPRRSLLLSTAAAGEPPCRPPADSSSPSKFSRFDRSAVRLLGWTAALQPEPVRLTRGASAAPKLRASPPDAAQAAAAFGSKEEAFAWAKSDNRRLLHVVYRVGDIDRTIKFYTECLGMKLLRKRDIPEEKYTNAFLGYGAEDNHFVVELTYNYGVDKYDIGAGFGHFGIAVDDVAKTVELIRAKGGKVTREPGPVKGGKTVIAFVEDPDGYKFEILERPGTPEPLCQVMLRVGNLDRAISFYEKACGMELLRKRDNPEYKYTVAMMGYGPEDKNAVLELTYNYGVTEYDKGNAYAQIAIGTDDVYKTAEVVKLFGGQVVREPGPLPGINTKITSILDPDGWKSVFVDNIDFAKELE

SEQ ID NO: 78717 - DNA, 1038 bp, Oryza sativa
  CDS (1)..(1038)
atgagagctctccccatggccgccggccgcgccgccgccgtcgccgcctgcgcctcgccggccgtcccgcggaggtcgctgctcctctccaccgccgccgcagcgctgcagccggagccggtgaggctgacccggggcgcgagcgccgcgcccaagctccgggcctcgccgccggacgccgcgcaggcggcggcggccttcggcagcaaggaggaggccttcgcctgggccaagagcgacaaccggcggctgctccacgtcgtctaccgcgtcggcgacatcgacagaacaatcaagttctacacggagtgccttgggatgaagctgctgaggaagcgcgacatcccggaggagaagtacaccaacgccttcctcggctatggcgcggaggacaaccacttcgtcgtcgagctcacctacaactatggcgtcgacaagtatgacatcggggcaggtttcggtcactttggcatcgccgtcgacgatgtggcgaagacggtggagctgataagggcgaaaggagggaaggtgaccagggagcccggccctgtcaagggcggcaagacggtgatcgccttcgtcgaggacccagatggctacaagtttgagatccttgagaggccagggactccagagcccctgtgccaggtgatgctccgtgtcggtaatcttgatcgggccataagcttctatgagaaggcctgtggcatggagctgctaaggaagagagataaccctgaatacaagtacacagtggcaatgatggggtatggtcctgaagacaagaatgctgtgctggagctgacatacaactatggtgtcactgaatatgacaaggggaatgcatatgcccagatcgcgatcggaaccgacgacgtctacaagacggcggaggtggtgaagctgttcggagggcaggtggtgcgggagccagggccattgccggggatcaacaccaagatcacgtccatcctggaccctgatggctggaaatcggtgtttgtcgacaacatcgactttgcaaaggaactggagtaa

SEQ ID NO: 78718 - protein, 345 aa, Oryza sativa
MRALPMAAGRAAAVAACASPAVPRRSLLLSTAAAALQPEPVRLTRGASAAPKLRASPPDAAQAAAAFGSKEEAFAWAKSDNRRLLHVVYRVGDIDRTIKFYTECLGMKLLRKRDIPEEKYTNAFLGYGAEDNHFVVELTYNYGVDKYDIGAGFGHFGIAVDDVAKTVELIRAKGGKVTREPGPVKGGKTVIAFVEDPDGYKFEILERPGTPEPLCQVMLRVGNLDRAISFYEKACGMELLRKRDNPEYKYTVAMMGYGPEDKNAVLELTYNYGVTEYDKGNAYAQIAIGTDDVYKTAEVVKLFGGQVVREPGPLPGINTKITSILDPDGWKSVFVDNIDFAKELE

SEQ ID NO: 78719 - DNA, 873 bp, Oryza sativa
  CDS (1)..(873)
atgagagctctccccatggccgcggcggcggccttcggcagcaaggaggaggccttcgcctgggccaagagcgacaaccggcggctgctccacgtcgtctaccgcgtcggcgacatcgacagaacaatcaagttctacacggagtgccttgggatgaagctgctgaggaagcgcgacatcccggaggagaagtacaccaacgccttcctcggctatggcgcggaggacaaccacttcgtcgtcgagctcacctacaactatggcgtcgacaagtatgacatcggggcaggtttcggtcactttggcatcgccgtcgacgatgtggcgaagacggtggagctgataagggcgaaaggagggaaggtgaccagggagcccggccctgtcaagggcggcaagacggtgatcgccttcgtcgaggacccagatggctacaagtttgagatccttgagaggccagggactccagagcccctgtgccaggtgatgctccgtgtcggtaatcttgatcgggccataagcttctatgagaaggcctgtggcatggagctgctaaggaagagagataaccctgaatacaagtacacagtggcaatgatggggtatggtcctgaagacaagaatgctgtgctggagctgacatacaactatggtgtcactgaatatgacaaggggaatgcatatgcccagatcgcgatcggaaccgacgacgtctacaagacggcggaggtggtgaagctgttcggagggcaggtggtgcgggagccagggccattgccggggatcaacaccaagatcacgtccatcctggaccctgatggctggaaatcggtgtttgtcgacaacatcgactttgcaaaggaactggagtaa

SEQ ID NO: 78720 - protein, 290 aa, Oryza sativa
MRALPMAAAAAFGSKEEAFAWAKSDNRRLLHVVYRVGDIDRTIKFYTECLGMKLLRKRDIPEEKYTNAFLGYGAEDNHFVVELTYNYGVDKYDIGAGFGHFGIAVDDVAKTVELIRAKGGKVTREPGPVKGGKTVIAFVEDPDGYKFEILERPGTPEPLCQVMLRVGNLDRAISFYEKACGMELLRKRDNPEYKYTVAMMGYGPEDKNAVLELTYNYGVTEYDKGNAYAQIAIGTDDVYKTAEVVKLFGGQVVREPGPLPGINTKITSILDPDGWKSVFVDNIDFAKELE

SEQ ID NO: 78721 - DNA, 1053 bp, Oryza sativa
  CDS (1)..(1053)
atggctcgcctcctcctccccctccccatcgccgccgccgccgcctcccgcctccgcctccccgtcctctcctcctccgtggcgcggcgtgaggcgctgctcttcggggggagggtggcggcggcgagggcgccggtgaggctggcgaggagaggggtgagcgccggggcggaggcgggcgggtcgtcgtcggccgccgcggcagcgcaggtgatcgggcaggacgaggcggtggagtgggtcaagaaggaccggaggcgcatgctccatgtcgtctaccgcgtcggcgacctcgacaagacgatcaagttttacaccgagtgcttggggatgaagctgttgcgcaagcgcgacattccggaggagaggtataccaatgcttttctcgggtacgggcctgaggactcgcattttgttgtggagctcacttacaattatggtgtggaaagttatgatatcgggactgctttcggtcacttcgggattgctgtcgaggacgttgcaaaaacagtagatctcattaaagccaagggaggaacggtaacaagagaaccaggacctgtaaaaggtggaaagtctgtaattgcttttattgaagatcctgatggttacaaatttgagcttatagaaagaggtcctacacctgagcctttatgccaggtaatgcttcgagtgggagatcttgatcatgctatcaatttctatgagaaggcatttggcatggaacttctccggaaacgagacaatccccaatacaagtatactattgcaatgatgggatatggtcctgaagacaaaaatgctgtactggagttgacctacaactatggtgtcaaggaatatgataaaggaaatgcttatgcacagattgctattagcacagatgatgtctacaagactgcggaagtcattagacaaaatggtggacaaataactcgtgaacctggcccattacctggaattaatacgaagataactgcttgcacagatccagatggctggaaaacagtatttgttgataatgtagattttctcaaggagttggaagaatga

SEQ ID NO: 78722 - protein, 350 aa, Oryza sativa
MARLLLPLPIAAAAASRLRLPVLSSSVARREALLFGGRVAAARAPVRLARRGVSAGAEAGGSSSAAAAAQVIGQDEAVEWVKKDRRRMLHVVYRVGDLDKTIKFYTECLGMKLLRKRDIPEERYTNAFLGYGPEDSHFVVELTYNYGVESYDIGTAFGHFGIAVEDVAKTVDLIKAKGGTVTREPGPVKGGKSVIAFIEDPDGYKFELIERGPTPEPLCQVMLRVGDLDHAINFYEKAFGMELLRKRDNPQYKYTIAMMGYGPEDKNAVLELTYNYGVKEYDKGNAYAQIAISTDDVYKTAEVIRQNGGQITREPGPLPGINTKITACTDPDGWKTVFVDNVDFLKELEE

SEQ ID NO: 78723 - DNA, 825 bp, Oryza sativa
  CDS (1)..(825)
atggctcgcctcctcctccccctccccatcgccgccgccgccgcctcccgcctccgcctccccgtcctctcctcctccgtggcgcggcgtgaggcgctgctcttcggggggagggtggcggcggcgagggcgccggtgaggctggcgaggagaggggtgagcgccggggcggaggcgggcgggtcgtcgtcggccgccgcggcagcgcaggtgatcgggcaggacgaggcggtggagtgggtcaagaaggaccggaggcgcatgctccatgtcgtctaccgcgtcggcgacctcgacaagacgatcaagttttacaccgagtgcttggggatgaagctgttgcgcaagcgcgacattccggaggagaggtataccaatgcttttctcgggtacgggcctgaggactcgcattttgttgtggagctcacttacaattatggtgtggaaagttatgatatcgggactgctttcggtcacttcgggattgctgtcgaggacgttgcaaaaacagtagatctcattaaagccaagggaggaacggtaacaagagaaccaggacctgtaaaaggtggaaagtctgtaattgcttttattgaagatcctgatggttacaaatttgagcttatagaaagaggtcctacacctgagcctttatgccaggtaatgcttcgagtgggagatcttgatcatgctatcaatttctatgagaaggcatttggcatggaacttctccggaaacgagacaatccccaatacaaggttggtacttttcaaaaccattgcatggatttacctcgtgacactcatggcttctgtttgccctga

SEQ ID NO: 78724 - protein, 274 aa, Oryza sativa
MARLLLPLPIAAAAASRLRLPVLSSSVARREALLFGGRVAAARAPVRLARRGVSAGAEAGGSSSAAAAAQVIGQDEAVEWVKKDRRRMLHVVYRVGDLDKTIKFYTECLGMKLLRKRDIPEERYTNAFLGYGPEDSHFVVELTYNYGVESYDIGTAFGHFGIAVEDVAKTVDLIKAKGGTVTREPGPVKGGKSVIAFIEDPDGYKFELIERGPTPEPLCQVMLRVGDLDHAINFYEKAFGMELLRKRDNPQYKVGTFQNHCMDLPRDTHGFCLP

SEQ ID NO: 78725 - DNA, 714 bp, Oryza sativa
  CDS (1)..(714)
atggccgccgccgccatcgccgccgcttcactgctcccctcctccgccttcgctctccgccgtctctcctcggcggcgaacgtctcccgctttgcccagctcaagagattcgaccgggctcgccggttcgcgccggccgccgccatgtcgacgtcgtcggggccgaaggaggcgccggcaaacaacccgggcctccaggcgccgtcggagaaggaccccgcgaccaagggctacttcatgcagcagacgatgttccgtgtaaaggatccaaaagtgagtctcgacttctactcgcgtgtgatgggcatgtcgttgctgaaaagattggattttcctgagatgaaattcagcttgtattttcttggttatgaggatgtggaatcggcccctactgatcctgtaaagaggactgtttggacttttgggcaaagggctacacttgagctcacacacaactggggcacagaaaatgatcctgaattcaaaggttaccataatgggaactcagaccctcgtggttttggtcatataggagtaactgttcacgatgtctataaggcgtgtgagcggttcgaacgtcttggggtagagtttgttaaaaagccagatgatggtaaaatgaagggcattgcatttatcaaagaccctgatggctactggattgaaatatttgacctgaacagaattggggcggtgactgcggaagcatcatga

SEQ ID NO: 78726 - protein, 237 aa, Oryza sativa
MAAAAIAAASLLPSSAFALRRLSSAANVSRFAQLKRFDRARRFAPAAAMSTSSGPKEAPANNPGLQAPSEKDPATKGYFMQQTMFRVKDPKVSLDFYSRVMGMSLLKRLDFPEMKFSLYFLGYEDVESAPTDPVKRTVWTFGQRATLELTHNWGTENDPEFKGYHNGNSDPRGFGHIGVTVHDVYKACERFERLGVEFVKKPDDGKMKGIAFIKDPDGYWIEIFDLNRIGAVTAEAS

SEQ ID NO: 78727 - DNA, 876 bp, Oryza sativa
  CDS (1)..(876)
atggcaagcggtagtgaagctgagaagtcacctgaggttgtgctggagtggcctaagaaggacaagaagaggcttctacatgctgtttaccgtgttggagatttggatcgcaccattaaatgttacacagaatgctttggaatgaaattactgaggaaaagagatgtgcctgaagagaaatatacgaatgcatttcttgggtttggacctgaggacaccaactttgcacttgaattgacatacaattatggtgttgataagtacgacattggagcaggatttgggcatttcgctattgcaactgaggacgtgtacaaattggctgagaaaattaaatccagttgttgctgcaagatcactcgtgaacctggtcctgtcaagggaggatccactgtgattgcctttgcacaggatcctgacggttacatgtttgagcttatccagaggggtccaacacctgagcctctttgccaagttatgcttcgtgtgggtgaccttgatcgctccatcaagttctacgagaaggcccttggtatgaagctgctgaggaagaaggatgtacctgactataagtataccattgccatgttgggctatgctgatgaggataagacaactgttattgagttgacatacaactatggtgtcacagaatataccaagggcaacgcatatgctcaggttgctattggcactgaagatgtctacaagagtgctgaggctgttgagttggttacaaaagaactagggggaaagattttgcggcagccaggtccactaccagggctcaacacaaagattgcctctttccttgaccctgatggctggaaagtggttttggttgataacgccgacttcctgaaggaactccagtga

SEQ ID NO: 78728 - protein, 291 aa, Oryza sativa [sequence omitted]

SEQ ID NO: 78729 - DNA, 546 bp, Oryza sativa
  CDS (1)..(546)
atggcaagcggtagtgaagctgagaagtcacctgaggttgtgctggagtggcctaagaaggacaagaagaggcttctacatgctgtttaccgtgttggagatttggatcgcaccattaaatgttacacagaatgctttggaatgaaattactgaggaaaagagatgtgcctgaagagaaatatacgaatgcatttcttgggtttggacctgaggacaccaactttgcacttgaattgacatacaattatggtgttgataagtacgacattggagcaggatttgggcatttcgctattgcaactgaggacgtgtacaaattggctgagaaaattaaatccagttgttgctgcaagatcactcgtgaacctggtcctgtcaagggaggatccactgtgattgcctttgcacaggatcctgacggttacatgtttgagcttatccagaggggtccaacacctgagcctctttgccaagttatgcttcgtgtgggtgaccttgatcgctccatcaagttctacgagaaggtattctcattcgttgcataa

SEQ ID NO: 78730 - protein, 181 aa, Oryza sativa
MASGSEAEKSPEVVLEWPKKDKKRLLHAVYRVGDLDRTIKCYTECFGMKLLRKRDVPEEKYTNAFLGFGPEDTNFALELTYNYGVDKYDIGAGFGHFAIATEDVYKLAEKIKSSCCCKITREPGPVKGGSTVIAFAQDPDGYMFELIQRGPTPEPLCQVMLRVGDLDRSIKFYEKVFSFVA

SEQ ID NO: 78731 - DNA, 1044 bp, Zea mays
  CDS (1)..(1044)
atggcgcgcctgctcatccccctccccttcgccgccgcctctgcctcatcgctccacctcgccgtctcccgccttcctctcgccgcggtctccgccgcgcgtcgcgagtgtctctttgggggaagggtggtaggaggagtggtgagggcgcgcgggaggctttctaagcgcgggttgtgcgccggcgcagaggctggcgactcggccgtcacggtggaggccatggaatgggtcaagaaggacaggaggcgcctgctccacgtcgtctaccgcgtcggggacctcgacaagacgatcaagttctacacggagtgcctgggcatgaaactgttgaggaagagggacattcccgaggagaggtacaccaatgcctttctggggtacgggcctgaggattcacattttgttgtggagctcacttacaattatggtgtggagagctataacatcgggactggttttggccactttggaattgctgttgaggatgttgcaaaaacagtggaacttattaaagcaaaaggaggaacagtcacaagggagccaggccctgtcaaaggtgggaaatcagtaattgcctttattgaggatcctgatggttacaagtttgagcttatagaaagagggcctactcccgagcctttgtgccaggtaatgcttcgagtgggagatcttgatcgtgctataaatttctatgagaaggcatttggcatggaacttcttcgcaagcgagacaattctgagtacaagtatacgattgcgatgatgggatatggtccagaagacaaaaatgctgtattggagttgacctacaactatggggtgaaggaatatgataagggaaatgcttatgcacagattgctattagtactgatgatgtctacaaaactgcggaagcaattagagtaaatggtggacaaattactcgtgaacctggcccattacctggcatcaccaccaagataactgcatgcacagatccagatggctggaaaacagtgtttgtcgataacatagattttctgaaggagttggaagaatga

SEQ ID NO: 78732 - protein, 347 aa, Zea mays
MARLLIPLPFAAASASSLHLAVSRLPLAAVSAARRECLFGGRVVGGVVRARGRLSKRGLCAGAEAGDSAVTVEAMEWVKKDRRRLLHVVYRVGDLDKTIKFYTECLGMKLLRKRDIPEERYTNAFLGYGPEDSHFVVELTYNYGVESYNIGTGFGHFGIAVEDVAKTVELIKAKGGTVTREPGPVKGGKSVIAFIEDPDGYKFELIERGPTPEPLCQVMLRVGDLDRAINFYEKAFGMELLRKRDNSEYKYTIAMMGYGPEDKNAVLELTYNYGVKEYDKGNAYAQIAISTDDVYKTAEAIRVNGGQITREPGPLPGITTKITACTDPDGWKTVFVDNIDFLKELEE

SEQ ID NO: 78733 - DNA, 1026 bp, Brassica napus
  CDS (1)..(1026)
atgaggataatctcaatggcctccaccatccgaccttccttgctaggctgcgtctctgcatcatctcctcgcttccccgtcgtctccaggaatctctctttctcccatgttactcagtcaaagcttttgactttgagaagaagcgtaagctgcttaggagtagctgaatctggaaaagcaagcacggccgctactgaagaggatcttctcaagtgggtgaaagatgataacagaaggatgcttcacgtcgtttaccgtgttggcgatttggaccggaccataaaattctatacggaatgtcttggaatgaagcttctacgcaagcgtgatataccggaggagaagtatacaaatgcttttcttggttatggtcctgaagattcacactttgtcattgagctcacttataattatggagttgacaagtatgacattggagcaggttttggtcactttggtattgctgtcgacgatgtggcgaaaactgtagaacttataaaagccaaagggggcaaagtaacaagggagcctggtgctgtcaaaggtggcaaaactgtaatcgcattcattgaagatcctgatggttacaaatttgaactcttggagagaggtcctacacctgaacctctttgccaagttatgctccgtgttggtgatctcgacaggtccatcaaattctatgagaaggcttttggaatggaacttctgcgcacaagagacaatccagagtacaagtacacaatagctatgatgggatatggtccagaagacaaaactgcagtcctagagctgacatataactatggtgtcactgaatatgataaaggaaatgcttatgctcagattgcaatagggacggatgacgtgtacaaaaccgcagaggctgtaaaactctttggtgggaaaatcacgagggaacctggtcccttaccaggtataagcacaaagatcaccgcatgtttagatccagatggttggaagtcggtgtttgtggacaacgttgattttctcaaagaactggagtga

SEQ ID NO: 78734 - protein, 341 aa, Brassica napus
MRIISMASTIRPSLLGCVSASSPRFPVVSRNLSFSHVTQSKLLTLRRSVSCLGVAESGKASTAATEEDLLKWVKDDNRRMLHVVYRVGDLDRTIKFYTECLGMKLLRKRDIPEEKYTNAFLGYGPEDSHFVIELTYNYGVDKYDIGAGFGHFGIAVDDVAKTVELIKAKGGKVTREPGAVKGGKTVIAFIEDPDGYKFELLERGPTPEPLCQVMLRVGDLDRSIKFYEKAFGMELLRTRDNPEYKYTIAMMGYGPEDKTAVLELTYNYGVTEYDKGNAYAQIAIGTDDVYKTAEAVKLFGGKITREPGPLPGISTKITACLDPDGWKSVFVDNVDFLKELE

SEQ ID NO: 78735 - DNA, 852 bp, Brassica napus
  CDS (1)..(852)
atggcagaaaatgctgatttggtggagtggccaaagaaggataagcgtcgttttctccatgttgtgtaccgcgttggtgatcttgatcgcactatccagttttacacagagtgctttggcatgaaggtgttgaggaaaagagatgtccctgaggagaagtactctaatgctttccttgggtttggtcctgaaacctccaacttcgttgtcgagctcacttacaattatggtgttagctcatatgacattggaactggatttgggcatttcgctatttcaactcaagatgtttctaagatggttgaggcggttcgtgccaagggtggaaatgtcaccagagagcctggtccggtcaaaggtggaggcagtgtcattgcctttgtcaaggaccctgatggttacacttttgagcttatccagagaggtccaactcctgaacctctctgtcaagtcatgcttcgtgttggtgatcttgaccgcgccatcaagttctatgaaaaggcccttgggatgagactcttgagaaggattgagaggcctgaatacaagtacaccataggcatgatgggatatgctgaggaatatgagtcaatagttttggagctgacctataactacggtgtgactgagtacacaaagggcaacgcatatgcacagattgcaataggcacggatgatgtgtacaaaagcgctgaagtagtgaagatagccaaccaagagctaggaggaaagatcactagagaagccggacctcttcctggactcggcaccaagattgtctcattcctcgatccagatggctggaaaacagttctggtagacaacgaagattttctgaaggaactggaatga

SEQ ID NO: 78736 - protein, 283 aa, Brassica napus
MAENADLVEWPKKDKRRFLHVVYRVGDLDRTIQFYTECFGMKVLRKRDVPEEKYSNAFLGFGPETSNFVVELTYNYGVSSYDIGTGFGHFAISTQDVSKMVEAVRAKGGNVTREPGPVKGGGSVIAFVKDPDGYTFELIQRGPTPEPLCQVMLRVGDLDRAIKFYEKALGMRLLRRIERPEYKYTIGMMGYAEEYESIVLELTYNYGVTEYTKGNAYAQIAIGTDDVYKSAEVVKIANQELGGKITREAGPLPGLGTKIVSFLDPDGWKTVLVDNEDFLKELE

SEQ ID NO: 78737 - DNA, 852 bp, Brassica napus
  CDS (1)..(852)
atggcagaaaatgctgagttgttggagtggccaaagaaggataagcgtcgttttctccatgttgtgtaccgcgttggtgatcttgatcgcactatccagttctacactgagtgctttggcatgaagctgttgaggaaaagagatgtccctgaggagaagtactctaatgctttccttggttttggtcctgaaacctccaacttcgttgtcgagctcacttacaattatggtgttagctcatatgacattggaactggatttgggcatttcgctatttcaactcaagatgtttccaagatggttgaagctgtccgtgccaaaggtgggaatgtcaccagagagcctggtccggtcaaaggtggaggcagtgttattgcgtttgtaaaggaccctgatggttacatgtttgagctcatccagagaggcccaactcctgaacctctctgtcaagtcatgcttcgtgttggtgatcttgaccgtgccatcaagttctatgaaaaggcccttgggatgagactcttgagaaggattgagagacctgaatacaagtacaccataggcatgatgggatatgctgaggaatatgagtccatagttttggagctgacctataactacggcgtgactgagtacacaaagggcaacgcatatgcacagattgcaataggcacggatgatgtgtacaaaagcgcggaagtagtgaagatagccaaccaagagctaggaggaaagatcaccagagaagccggaccacttcctggactcggcaccaagattgtctccttcctcgatccagatgggtggaaaacagtcctggtagacaatgaagattttctgaaggaactggaatga

SEQ ID NO: 78738 - protein, 283 aa, Brassica napus
MAENAELLEWPKKDKRRFLHVVYRVGDLDRTIQFYTECFGMKLLRKRDVPEEKYSNAFLGFGPETSNFVVELTYNYGVSSYDIGTGFGHFAISTQDVSKMVEAVRAKGGNVTREPGPVKGGGSVIAFVKDPDGYMFELIQRGPTPEPLCQVMLRVGDLDRAIKFYEKALGMRLLRRIERPEYKYTIGMMGYAEEYESIVLELTYNYGVTEYTKGNAYAQIAIGTDDVYKSAEVVKIANQELGGKITREAGPLPGLGTKIVSFLDPDGWKTVLVDNEDFLKELE

SEQ ID NO: 78739 - DNA, 852 bp, Brassica napus
  CDS (1)..(852)
atggcagaaaatgctgatttgttggagtggccaaagaaggataagcgtcgttttctccatgttgtgtaccgcgttggtgatcttgatcgcactatccagttctacactgagtgctttggcatgaagctgttgaggaaaagagatgtccctgaggagaagtactctaatgctttccttggttttggtcctgaaacctccaacttcgttgtcgagctcacttacaattatggtgttagctcatatgacattggaactggatttgggcatttcgctatttcaactcaagatgtttccaagatggttgaagctgtccgtgccaaaggtgggaatgtcaccagagagcctggtccggtcaaaggtggaggcagtgtcattgcctttgtaaaggaccctgatggttacatgtttgagctcatccagagaggtccaactcctgaacctctctgtcaagtcatgcttcgtgttggtgatcttgaccgtgccatcaagttctatgaaaaggcccttgggatgagactcttgagaaggattgagagacctgaatacaagtacaccataggcatgatgggatatgctgaggaatatgagtcgatagttttggagctgacctataactacggcgtgactgagtacacaaagggcaacgcatatgcacagattgcaataggcacggatgatgtgtacaaaagcgcggaagtagtgaagatagccaaccaagagctaggaggaaagatcaccagagaagccggaccacttcctggactcggcaccaagattgtctccttcctcgatccagatgggtggaaaacagtcctggtagacaatgaagattttctgaaggaactggaatga

SEQ ID NO: 78740 - protein, 283 aa, Brassica napus
MAENADLLEWPKKDKRRFLHVVYRVGDLDRTIQFYTECFGMKLLRKRDVPEEKYSNAFLGFGPETSNFVVELTYNYGVSSYDIGTGFGHFAISTQDVSKMVEAVRAKGGNVTREPGPVKGGGSVIAFVKDPDGYMFELIQRGPTPEPLCQVMLRVGDLDRAIKFYEKALGMRLLRRIERPEYKYTIGMMGYAEEYESIVLELTYNYGVTEYTKGNAYAQIAIGTDDVYKSAEVVKIANQELGGKITREAGPLPGLGTKIVSFLDPDGWKTVLVDNEDFLKELE

SEQ ID NO: 78741 - DNA, 864 bp, Glycine max
  CDS (1)..(864)
atggctgaggctacacaatctaatgctgagttgttggagtggcctaagaaagataagcgccgcttcctgcatgttgtgtatcgtgttggtgatcttgatcgcaccattaagttttatactgaatgttttgggatgaagcttttgaggaaaagagatattccagaggagaaatatgccaatgcttttcttggatttggccctgaacaatcccattttgttgtggaattaacatataattatggggtgacctcatatgatattggaactggatttggacattttgctatcgcaactccagatgtttacaaattggttgaagacatccgggctaagggtggaaatgtcaccagggagcctggtccagttaagggtgggaaatctgttattgccttcgtgaaggatcctgatggttatgcttttgagctcattcaaagaccttcaacccctgaaccattgtgccaagtaatgcttcgcgttggtgatttagagcgctcaattaagttttatgaaaaggctttgggtttgagggtggtaaagaagactgatagacctgaatacaagtatactatagctatgcttgggtatgcagaggaacatgagacaactgtgttggagctgacatataactatggtgtcactgaatacaccaagggaaatgcttatgcacaggttgctattggtactgatgatgtatacaagagtgctgaggttgtcaacatagtcacacaagagcttggagggaagattactcggcaaccaggaccaattcctggccttaacacaaagatcactgctttcttagatcctgatggatggaaaactgttttggttgacaatcaagattttctgaaggagctggagtaa

SEQ ID NO: 78742 - protein, 287 aa, Glycine max
MAEATQSNAELLEWPKKDKRRFLHVVYRVGDLDRTIKFYTECFGMKLLRKRDIPEEKYANAFLGFGPEQSHFVVELTYNYGVTSYDIGTGFGHFAIATPDVYKLVEDIRAKGGNVTREPGPVKGGKSVIAFVKDPDGYAFELIQRPSTPEPLCQVMLRVGDLERSIKFYEKALGLRVVKKTDRPEYKYTIAMLGYAEEHETTVLELTYNYGVTEYTKGNAYAQVAIGTDDVYKSAEVVNIVTQELGGKITRQPGPIPGLNTKITAFLDPDGWKTVLVDNQDFLKELE

SEQ ID NO: 78743 - DNA, 1089 bp, Glycine max
  CDS (1)..(1089)
atggtattggtgagagtggttcccatggcttcttcttcttcgattcgacccactctctcctcccttagattcttaacaccgtcatctctttcgctctccaacccttcttctcgtatctctttctcccatcttccctctccctctgtgtctcaatccaatagttttggcctcaaagcttccagagagttgagacaacatggcaactccacgagaatcatggcatcagggcacgtgtctcaatcgatttcagctgcttcaccagaaaatgtgcttgagtgggtcaaacaggacaagcgaagaatgcttcatgttgtatatcgtgttggggacctggacaggaccataaagttttatacagagtgcctaggaatgaagctcctcagaaagagggacataccagaggagaaatatactaatgcctttcttggatatgggcccgaagactcacactttgttattgaactgacatacaattatggagttgacaagtatgatattggaactggatttggccattttggtattgctgttgatgatgttgcaaaagcagtggagctaataagagctaagggtggcaaaataactagggagcctggtcctgtcaagggagggcgttcagtaattgcatttattgaagatcctgatggttacaaatttgaacttatagaaagaggtcccactcctgaacccttgtgccaagtaatgcttcgagtgggtgatcttaatcgttcaatagaattttacgagaaggcatttggtatggagctgcttcgtacacgagacaatccagaatacaagtacaccatagcaatgctgggttatggtccagaagataaaagcactgttctggagttgacttacaattatggagtcactgaatacgataaaggaaatgcttatgctcagattgcaataggcacagatgatgtgtacaaaactgcagaagcaattaaactagctggaggaaagattactcgggaacctggaccattacctggtatcaacacaaaaattactgcatgcttggatccagatggctggaagtcggtttttgtagataatgttgattttctaaaggagttggaatag

SEQ ID NO: 78744 - protein, 362 aa, Glycine max
MVLVRVVPMASSSSIRPTLSSLRFLTPSSLSLSNPSSRISFSHLPSPSVSQSNSFGLKASRELRQHGNSTRIMASGHVSQSISAASPENVLEWVKQDKRRMLHVVYRVGDLDRTIKFYTECLGMKLLRKRDIPEEKYTNAFLGYGPEDSHFVIELTYNYGVDKYDIGTGFGHFGIAVDDVAKAVELIRAKGGKITREPGPVKGGRSVIAFIEDPDGYKFELIERGPTPEPLCQVMLRVGDLNRSIEFYEKAFGMELLRTRDNPEYKYTIAMLGYGPEDKSTVLELTYNYGVTEYDKGNAYAQIAIGTDDVYKTAEAIKLAGGKITREPGPLPGINTKITACLDPDGWKSVFVDNVDFLKELE

SEQ ID NO: 78745 - DNA, 1023 bp, Zea mays
  CDS (1)..(1023)
atgaggactctactaccggtggccgccggccgcgggaccgtcgcctgcgcggccacgcccgtcccccggaggtcgctgctcctctccaccgctgccgcaggtgcggcgctgcagccggagcaggtggctggaacgaggccgttgaggctgaccaggagcgaggccagcgccgtggcaaagcccaggaccttggccgacgaggccatctcgtgggcgaagaaagacaaccgccgcctcctccacgtcgtctaccgggtcggcgacctcgacaagacgatcaagttctacaccgagtgcctggggatgaagctgctcaggaagagagacataccagaggagaagtacagcaacgcgttcctcgggtacgggcccgaggaatcgcatttcgtcgtcgagctcacttacaattacggggttgacaaatatgacataggcgaagggttcggccatttcggcatcgcagtcgaggacgtggccaagacggtagagctcataagagcaaaggctggaaaggtcatcagggaagccggtcctgtcaagggcggcgagaccgtcatcgccttcgtggaggaccccgacggctacaagtttgagatcatcgagaggcctggaactccggaacccttgtgccaggtgatgctccgcgtcggcgaccttgaccgtgccataagcttctatgagaaggcctgcggcatggaactgctccggaagcgagatagccctgagtacaagtacacagtggcaatgatgggttacggccctgaagacaaggacgcggtgctggagctgacctacaactatggtgtcaccgagtatgccaaggggaatgcatatgcccagatcgccattggcaccgacgatgtctacaggaccgcggaggcggcgaagctgtccggaggccaggtggtgcgggagccggggcccttgccagggatcaacaccaagatcacagccatcctggaccctgatggctggaaattggtcttcgtcgacaacatggacttcgccaaggaactggagtag

SEQ ID NO: 78746 - protein, 340 aa, Zea mays
MRTLLPVAAGRGTVACAATPVPRRSLLLSTAAAGAALQPEQVAGTRPLRLTRSEASAVAKPRTLADEAISWAKKDNRRLLHVVYRVGDLDKTIKFYTECLGMKLLRKRDIPEEKYSNAFLGYGPEESHFVVELTYNYGVDKYDIGEGFGHFGIAVEDVAKTVELIRAKAGKVIREAGPVKGGETVIAFVEDPDGYKFEIIERPGTPEPLCQVMLRVGDLDRAISFYEKACGMELLRKRDSPEYKYTVAMMGYGPEDKDAVLELTYNYGVTEYAKGNAYAQIAIGTDDVYRTAEAAKLSGGQVVREPGPLPGINTKITAILDPDGWKLVFVDNMDFAKELE

SEQ ID NO: 78747 - DNA, 1023 bp, Zea mays
  CDS (1)..(1023)
atgaggactctactacctgtggccgccggtcgcgggaccgtcgcctgcgcggccacgcccgtcccccggaggtcgctgctcctctccaccgctgccgcaggtgcggcgctgcagccggagcaggtggctgggacgaggccgttgaggctgaccaggagcgtggcgagcgccgtggcaaagcccaggacctcggccgacgaggccatctcgtgggcgaagaaggacaaccgccggctcctccacgtcgtctaccgggtcggcgacctcgacaagacgatcaagttctacaccgagtgcctggggatgaagctgctcaggaagagagacataccagaggagaagtacagcaacgcgttcctcgggtacgggcccgaggaatcgcatttcgtcgtcgagctcacttacaattacggggttgacaaatatgacataggcgaagggttcggccatttcggcatcgcagtcgaggacgtggccaagacggtagagctcataagagcaaaggctggaaaggtcatcagggaagccggtcctgtcaagggcggcgagaccgtcatcgccttcgtggaggaccccgacggctacaagtttgagatcatcgagaggcctggaactccggaacccttgtgccaggtgatgctccgcgtcggcgaccttgaccgtgccataagcttctatgagaaggcctgcggcatggaactgctccggaagcgagatagccctgagtacaagtacacagtggcaatgatgggttacggccctgaagacaaggacgcggtgctggagctgacctacaactatggtgtcaccgagtatgccaaggggaatgcatatgcccagatcgccattggcaccgacgatgtctacaggaccgcggaggcggcgaagctgtccggaggccaggtggtgcgggagccggggcccttgccagggatcaacaccaagatcacagccatcctggaccctgatggctggaaattggtttttgtcgacaacatggacttcgccaaggaactggagtag

SEQ ID NO: 78748 - protein, 340 aa, Zea mays
MRTLLPVAAGRGTVACAATPVPRRSLLLSTAAAGAALQPEQVAGTRPLRLTRSVASAVAKPRTSADEAISWAKKDNRRLLHVVYRVGDLDKTIKFYTECLGMKLLRKRDIPEEKYSNAFLGYGPEESHFVVELTYNYGVDKYDIGEGFGHFGIAVEDVAKTVELIRAKAGKVIREAGPVKGGETVIAFVEDPDGYKFEIIERPGTPEPLCQVMLRVGDLDRAISFYEKACGMELLRKRDSPEYKYTVAMMGYGPEDKDAVLELTYNYGVTEYAKGNAYAQIAIGTDDVYRTAEAAKLSGGQVVREPGPLPGINTKITAILDPDGWKLVFVDNMDFAKELE

SEQ ID NO: 78749 - DNA, 24 bp, Artificial sequence
  primer
atgcgtcttcttcataccatgctg

SEQ ID NO: 78750 - DNA, 21 bp, Artificial sequence
  primer
ttagttgcccagaccgcgacc

SEQ ID NO: 78751 - protein, 181 aa, Artificial sequence
  consensus sequence
  Variant (2)..(4): Xaa in position 2 to 4 is any amino acid
  Variant (7)..(7): Xaa in position 7 is any amino acid
  Variant (9)..(10): Xaa in position 9 to 10 is any amino acid
  Variant (11)..(21): Xaa in position 11 to 21 is any or no amino acid
  Variant (24)..(25): Xaa in position 24 to 25 is any amino acid
  Variant (26)..(27): Xaa in position 26 to 27 is any or no amino acid
  Variant (29)..(43): Xaa in position 29 to 43 is any amino acid
  Variant (44)..(56): Xaa in position 44 to 56 is any or no amino acid
  Variant (58)..(63): Xaa in position 58 to 63 is any amino acid
  Variant (64)..(90): Xaa in position 64 to 90 is any or no amino acid
  Variant (94)..(94): Xaa in position 94 is any amino acid
  Variant (96)..(97): Xaa in position 96 to 97 is any amino acid
  Variant (98)..(106): Xaa in position 98 to 106 is any or no amino acid
  Variant (108)..(109): Xaa in position 108 to 109 is any amino acid
  Variant (111)..(112): Xaa in position 111 to 112 is any amino acid
  Variant (113)..(121): Xaa in position 113 to 121 is any or no amino acid
  Variant (124)..(129): Xaa in position 124 to 129 is any amino acid
  Variant (130)..(132): Xaa in position 130 to 132 is any or no amino acid
  Variant (134)..(149): Xaa in position 134 to 149 is any amino acid
  Variant (150)..(170): Xaa in position 150 to 170 is any or no amino acid
  Variant (172)..(173): Xaa in position 172 to 173 is any amino acid
  Variant (179)..(180): Xaa in position 179 to 180 is any amino acid
HXXXRVXDXXXXXXXXXXXXXFYXXXXGXXXXXXXXXXXXXXXXXXXXXXXXXXXXFXXXXXXXXXXXXXXXXXXXXXXXXXXXXXXXXXELTXNXXXXXXXXXXXYXXGXXXXXXXXXXXGHXXXXXXXXXDXXXXXXXXXXXXXXXXXXXXXXXXXXXXXXXXXXXXXFXXDPDGYXXE

SEQ ID NO: 78752 - protein, 13 aa, Artificial sequence
  protein pattern
  Variant (2)..(3): Xaa in position 2 to 3 is any amino acid
  Variant (4)..(4): Xaa in position 4 is Asp, Gly or Ser
  Variant (8)..(9): Xaa in position 8 to 9 is any amino acid
  Variant (10)..(10): Xaa in position 10 is Phe, Ile, Leu or Val
  Variant (12)..(13): Xaa in position 12 to 13 is Phe, Ile, Leu or Val
FXXXPDGXXXEXX

SEQ ID NO: 78753 - DNA, 786 bp, Escherichia coli
  CDS (1)..(786): transl_table=11
atgaacccgtcgcaacatgctgaacagtttcagagccagttagcgaactatgtgccacagttcactcccgaattttggccggtgtggttgatcattgccggagtattgctggttgggatgtggttggtgctggggctgcatgccttgcttcgtgctcgtggcgtgaagaaatcagccaccgatcatggtgagaagatttatctttacagcaaagcggtcagattatggcactggtcgaatgcgttactctttgtattgttgctggccagtgggctgataaatcactttgcgatggtgggcgcaactgcggttaaaagtctggttgcggtgcatgaagtttgcggatttttgttactggcatgctggctcggctttgtgctgatcaatgccgttggggataatggtcaccactatcgcattcgtcgtcaggggtggctggaacgagcggcaaaacaaacgcgattttatttgtttggcattatgcagggggaagaacatcctttcccggcaacaacccagtctaaatttaatcccttacagcaggtcgcctatgttggtgtcatgtatggattgctgccgttgttactattgacggggctgctgtgtctctatccgcaagccgtgggagatgtgtttcctggcgtaagatactggttattgcagacacattttgctctggcatttataagcctcttttttatcttcggtcatctttatctttgcaccacggggcgtacgccacacgaaacctttaaaagcatggtcgatggctatcaccggcactaa

SEQ ID NO: 78754 - protein, 261 aa, Escherichia coli
MNPSQHAEQFQSQLANYVPQFTPEFWPVWLIIAGVLLVGMWLVLGLHALLRARGVKKSATDHGEKIYLYSKAVRLWHWSNALLFVLLLASGLINHFAMVGATAVKSLVAVHEVCGFLLLACWLGFVLINAVGDNGHHYRIRRQGWLERAAKQTRFYLFGIMQGEEHPFPATTQSKFNPLQQVAYVGVMYGLLPLLLLTGLLCLYPQAVGDVFPGVRYWLLQTHFALAFISLFFIFGHLYLCTTGRTPHETFKSMVDGYHRH

SEQ ID NO: 78755 - DNA, 786 bp, Escherichia coli O157:H7 EDL933
  CDS (1)..(786): transl_table=11
atgaacccgtcgcaacatgctgaacagtttcagagccagttagcgaactatgtgccacagttcactcccgaattttggccggtgtggttgatcattgccggagtattgctggttgggatgtggttggtgctggggctgcacgccttgcttcgtgctcgtggcgtgaagaaatcagccaccgatcatggtgagaggatttatctttacagcaaagcggtcagattatggcactggtcgaatgcgttactctttgtattgttgctggcaagtgggctgataaatcactttgcgctggtgggcgcaactgcggttaaaagtctggttgcggtgcatgaagtttgcggatttttgttactggcatgctggctcggctttgttctgatcaatggcgttgggggtaatggccaccactatcgcattcgtcgtcagggttggctggagcgggcggcaaaacaaacgcgattttatttgtttggcattatgcagggggaagaacatcctttcccggcaacaacccagtctaaatttaatcccttacagcaggttgcctatgttggtgtcatgtatggattgctgccgttgttactattgacggggctgctgtgtctctatccgcaagccgtgggagatgtgtttcctggcgtaagatactggttattgcaggcgcattttgctctggcatttataagcctcttttttatcttcggtcatctttatctttgcaccacggggcgtacgccacacgaaacctttaaaagcatggtcgatggctatcaccggcactaa

SEQ ID NO: 78756 - protein, 261 aa, Escherichia coli O157:H7 EDL933
MNPSQHAEQFQSQLANYVPQFTPEFWPVWLIIAGVLLVGMWLVLGLHALLRARGVKKSATDHGERIYLYSKAVRLWHWSNALLFVLLLASGLINHFALVGATAVKSLVAVHEVCGFLLLACWLGFVLINGVGGNGHHYRIRRQGWLERAAKQTRFYLFGIMQGEEHPFPATTQSKFNPLQQVAYVGVMYGLLPLLLLTGLLCLYPQAVGDVFPGVRYWLLQAHFALAFISLFFIFGHLYLCTTGRTPHETFKSMVDGYHRH

SEQ ID NO: 78757 - DNA, 786 bp, Escherichia coli CFT073
  CDS (1)..(786): transl_table=11
atgaacccgtcgcaacatgctgaacagtttcagagccagttggcgaactatgtgccacagttcaccccccaattttggccggtgtggttgatcattgccggactattgctggttgggatgtggttggtgctggggctacatgccttgcttcgtgctcgtggcgtgaagaaatcagccaccgatcatggtgagaggatttatctttacagcaaagcggtcagattatggcactggtcgaatgcgttactctttgtattgttgctggcaagtgggctgataaatcactttgcgctggtgggcgcaactgcggttaaaagtctggttgcggtgcatgaagtttgcggatttttgttactggcatgctggctcggctttgttctgatcaatgccgttgggggtaatggtcaccactatcgcattcgtcgtcaggggtggctggagcgagcggcaaaacaaacgcgattctatttgtttggcattatgcagggggaagaacatcctttcccggcaacaacccagtctaaatttaatcccttacagcaggttgcctatgttggtgtcatgtatggattgctgccgttgttactattgacggggctgctgtgtctctatccgcaagccgtgggagatatgtttcctggcgtaagatactggttattgcaggcgcattttgctctggcatttataagcctcttttttatcttcggtcatctttatctttgcaccacggggcgtacgccacacgaaacctttaaaagcatggtcgatggctatcaccggcactaa

SEQ ID NO: 78758 - protein, 261 aa, Escherichia coli CFT073
MNPSQHAEQFQSQLANYVPQFTPQFWPVWLIIAGLLLVGMWLVLGLHALLRARGVKKSATDHGERIYLYSKAVRLWHWSNALLFVLLLASGLINHFALVGATAVKSLVAVHEVCGFLLLACWLGFVLINAVGGNGHHYRIRRQGWLERAAKQTRFYLFGIMQGEEHPFPATTQSKFNPLQQVAYVGVMYGLLPLLLLTGLLCLYPQAVGDMFPGVRYWLLQAHFALAFISLFFIFGHLYLCTTGRTPHETFKSMVDGYHRH

SEQ ID NO: 78759 - DNA, 765 bp, Salmonella enterica subsp. enterica serovar Typhi Ty2
  CDS (1)..(765): transl_table=11
atgaatactatctggggagcggaactacattatgcgccagattattggccgctgtggttaatttacgcaggcgtcgtggtgctgctcatgcttgttgggctggttatccatgcgttattgcgccggatgctggcgccaaaaacggcgggcggcgaagagcatcgtgactatctctactcgctggcgattcgccgttggcattggggaaatgcattactgtttgttttattactgttaagcggtttatttggtcatttttctctcggccctgtagcgctaatggtacaagtgcatacctggtgtggttttgccttactggctttctgggtcgggtttgtgctgatcaacctcaccacaggtaacgggcgtcactatcgggtaaatttttccggactagtgacgcgctgcatacgccagacccgtttttacctttttggcatcatgaaaggggaagcgcatccgttcgcggcaacagagcagaataagttcaatccactgcagcaactggcatatctggcgattatgtacgcgctggtaccgctgttaatcatcaccggtttgctgtgtctctatccgcaggttgcgggtctgggccctgtgatgctggtgctgcatatggcgcttgctatcatcggcttactgtttatttgcgcgcatctctatctgtgtactcttggcgacacgccgggacaaattttccgtagcatggttgacggctatcatcgtcatcgtaccgcgccgcgcggggataagtccgccgtctga

SEQ ID NO: 78760 - protein, 254 aa, Salmonella enterica subsp. enterica serovar Typhi Ty2
MNTIWGAELHYAPDYWPLWLIYAGVVVLLMLVGLVIHALLRRMLAPKTAGGEEHRDYLYSLAIRRWHWGNALLFVLLLLSGLFGHFSLGPVALMVQVHTWCGFALLAFWVGFVLINLTTGNGRHYRVNFSGLVTRCIRQTRFYLFGIMKGEAHPFAATEQNKFNPLQQLAYLAIMYALVPLLIITGLLCLYPQVAGLGPVMLVLHMALAIIGLLFICAHLYLCTLGDTPGQIFRSMVDGYHRHRTAPRGDKSAV

SEQ ID NO: 78761 - DNA, 765 bp, Salmonella typhimurium
  CDS (1)..(765): transl_table=11
atgaatactatctggggagcggaactacattatgcgccagattattggccgctgtggttaatttacgcaggcgtcgtggtgctgctcatgcttgttgggctggttatccatgcgttattgcgccggatgctggcgccaaaaacggcgggcggtgaagaacatcgtgactatctctactcgctggcgattcgccgctggcattggggaaatgcgttactgtttgttttattactgttaagcggtttatttggtcatttttctctcggccctgtagcgctaatggtacaagtgcatacctggtgtggttttgccttactggctttctgggtcgggtttgtgctgatcaacctcaccacaggtaacgggcgtcactatcgggtaaatttttccggactggtaacgcgctgcatacgccagacgcgtttttacctttttggcattatgaaaggggaagcgcatccgttcgtggcaacagagcagaataagttcaatccactgcaacaactggcatatctggcgattatgtacgcgctggtaccgctgttaatcatcaccggtttgctgtgtctctatccgcaggttgcgggtctgggccctgtgatgctggtgctgcatatggcgcttgctatcatcggcttactgtttatttgcgcgcatctctatctgtgtactcttggcgacacgccgggacaaattttccgtagcatggttgacggctatcatcgtcatcgtaccgcgccgcgcggggataagtccgccgtctga

SEQ ID NO: 78762 - protein, 254 aa, Salmonella typhimurium
MNTIWGAELHYAPDYWPLWLIYAGVVVLLMLVGLVIHALLRRMLAPKTAGGEEHRDYLYSLAIRRWHWGNALLFVLLLLSGLFGHFSLGPVALMVQVHTWCGFALLAFWVGFVLINLTTGNGRHYRVNFSGLVTRCIRQTRFYLFGIMKGEAHPFVATEQNKFNPLQQLAYLAIMYALVPLLIITGLLCLYPQVAGLGPVMLVLHMALAIIGLLFICAHLYLCTLGDTPGQIFRSMVDGYHRHRTAPRGDKSAV

SEQ ID NO: 78763 - DNA, 22 bp, Artificial sequence
  primer
atgaacccgtcgcaacatgctg

SEQ ID NO: 78764 - DNA, 18 bp, Artificial sequence
  primer
ttagtgccggtgatagcc

SEQ ID NO: 78765 - protein, 261 aa, Artificial sequence
  consensus sequence
  Variant (3)..(6): Xaa in position 3 to 6 is any amino acid
  Variant (9)..(12): Xaa in position 9 to 12 is any amino acid
  Variant (13)..(22): Xaa in position 13 to 22 is any or no amino acid
  Variant (24)..(25): Xaa in position 24 to 25 is any amino acid
  Variant (28)..(28): Xaa in position 28 is any amino acid
  Variant (32)..(32): Xaa in position 32 is any amino acid
  Variant (36)..(39): Xaa in position 36 to 39 is any amino acid
  Variant (41)..(43): Xaa in position 41 to 43 is any amino acid
  Variant (45)..(46): Xaa in position 45 to 46 is any amino acid
  Variant (52)..(56): Xaa in position 52 to 56 is any amino acid
  Variant (58)..(58): Xaa in position 58 is any amino acid
  Variant (60)..(64): Xaa in position 60 to 64 is any amino acid
  Variant (66)..(66): Xaa in position 66 is any amino acid
  Variant (71)..(71): Xaa in position 71 is any amino acid
  Variant (73)..(73): Xaa in position 73 is any amino acid
  Variant (75)..(75): Xaa in position 75 is any amino acid
  Variant (79)..(79): Xaa in position 79 is any amino acid
  Variant (89)..(89): Xaa in position 89 is any amino acid
  Variant (93)..(94): Xaa in position 93 to 94 is any amino acid
  Variant (97)..(97): Xaa in position 97 is any amino acid
  Variant (99)..(100): Xaa in position 99 to 100 is any amino acid
  Variant (101)..(103): Xaa in position 101 to 103 is any or no amino acid
  Variant (105)..(107): Xaa in position 105 to 107 is any amino acid
  Variant (109)..(109): Xaa in position 109 is any amino acid
  Variant (112)..(113): Xaa in position 112 to 113 is any amino acid
  Variant (117)..(117): Xaa in position 117 is any amino acid
  Variant (121)..(121): Xaa in position 121 is any amino acid
  Variant (123)..(123): Xaa in position 123 is any amino acid
  Variant (130)..(132): Xaa in position 130 to 132 is any amino acid
  Variant (136)..(136): Xaa in position 136 is any amino acid
  Variant (140)..(143): Xaa in position 140 to 143 is any amino acid
  Variant (145)..(147): Xaa in position 145 to 147 is any amino acid
  Variant (149)..(151): Xaa in position 149 to 151 is any amino acid
  Variant (162)..(162): Xaa in position 162 is any amino acid
  Variant (165)..(165): Xaa in position 165 is any amino acid
  Variant (169)..(169): Xaa in position 169 is any amino acid
  Variant (172)..(172): Xaa in position 172 is any amino acid
  Variant (174)..(174): Xaa in position 174 is any amino acid
  Variant (182)..(182): Xaa in position 182 is any amino acid
  Variant (185)..(187): Xaa in position 185 to 187 is any amino acid
  Variant (190)..(190): Xaa in position 190 is any amino acid
  Variant (192)..(192): Xaa in position 192 is any amino acid
  Variant (196)..(197): Xaa in position 196 to 197 is any amino acid
  Variant (207)..(208): Xaa in position 207 to 208 is any amino acid
  Variant (210)..(214): Xaa in position 210 to 214 is any amino acid
  Variant (215)..(219): Xaa in position 215 to 219 is any or no amino acid
  Variant (221)..(222): Xaa in position 221 to 222 is any amino acid
  Variant (224)..(224): Xaa in position 224 is any amino acid
  Variant (228)..(228): Xaa in position 228 is any amino acid
  Variant (230)..(230): Xaa in position 230 is any amino acid
  Variant (232)..(232): Xaa in position 232 is any amino acid
  Variant (235)..(236): Xaa in position 235 to 236 is any amino acid
  Variant (243)..(243): Xaa in position 243 is any amino acid
  Variant (245)..(245): Xaa in position 245 is any amino acid
  Variant (248)..(250): Xaa in position 248 to 250 is any amino acid
  Variant (252)..(252): Xaa in position 252 is any amino acid
MNXXXXAEXXXXXXXXXXXXXXPXXWPXWLIXAGVXXXXMXXXLXXHALLRXXXXXKXAXXXXXRXYLYSXAXRXWHWXNALLFVLLLXSGLXXHFXLXXXXXVXXXVXVHXXCGFXLLAXWXGFVLINXXXGNGXHYRXXXXGXXXRXXXQTRFYLFGIMXGEXHPFXATXQXKFNPLQQXAYXXXMYXLXPLLXXTGLLCLYPQXXGXXXXXXXXXXLXXHXALAXIXLXFIXXHLYLCTXGXTPXXXFXSMVDGYHRH

SEQ ID NO: 78766 - protein, 61 aa, Artificial sequence
  protein pattern
  Variant (2)..(2): Xaa in position 2 is Leu or Val
  Variant (9)..(9): Xaa in position 9 is Ala or Leu
  Variant (10)..(10): Xaa in position 10 is Thr or Val
  Variant (11)..(11): Xaa in position 11 is Gly or Thr
  Variant (12)..(12): Xaa in position 12 is Asp or Gly
  Variant (15)..(15): Xaa in position 15 is His or Arg
  Variant (19)..(19): Xaa in position 19 is Ile or Val
  Variant (20)..(20): Xaa in position 20 is Asn or Arg
  Variant (21)..(21): Xaa in position 21 is any amino acid
  Variant (22)..(22): Xaa in position 22 is Gln or Ser
  Variant (24)..(24): Xaa in position 24 is any or no amino acid
  Variant (26)..(26): Xaa in position 26 is any amino acid
  Variant (27)..(27): Xaa in position 27 is any or no amino acid
  Variant (29)..(29): Xaa in position 29 is Ala or Cys
  Variant (30)..(30): Xaa in position 30 is Ala or Ile
  Variant (31)..(31): Xaa in position 31 is Lys or Arg
  Variant (42)..(42): Xaa in position 42 is any amino acid
  Variant (45)..(45): Xaa in position 45 is Ala or Glu
  Variant (49)..(49): Xaa in position 49 is Ala, Pro or Val
  Variant (52)..(52): Xaa in position 52 is Glu or Thr
  Variant (54)..(54): Xaa in position 54 is Asn or Ser
WXGFVLINXXXXNGXHYRXXXXGXLXXRXXXQTRFYLFGIMXGEXHPFXATXQXKFNPLQQ

SEQ ID NO: 78767 - protein, 44 aa, Artificial sequence
  protein pattern
  Variant (2)..(3): Xaa in position 2 to 3 is any amino acid
  Variant (4)..(4): Xaa in position 4 is any or no amino acid
  Variant (6)..(6): Xaa in position 6 is Phe or Met
  Variant (10)..(10): Xaa in position 10 is Phe or Ile
  Variant (12)..(12): Xaa in position 12 is Gly or Ser
  Variant (14)..(14): Xaa in position 14 is any or no amino acid
  Variant (16)..(16): Xaa in position 16 is any or no amino acid
  Variant (18)..(18): Xaa in position 18 is any amino acid
  Variant (19)..(19): Xaa in position 19 is Ala or Gly
  Variant (26)..(26): Xaa in position 26 is any amino acid
  Variant (28)..(28): Xaa in position 28 is Asp or Arg
  Variant (31)..(31): Xaa in position 31 is any amino acid
  Variant (32)..(32): Xaa in position 32 is Glu or Gln
  Variant (33)..(33): Xaa in position 33 is any amino acid
  Variant (35)..(35): Xaa in position 35 is Lys or Arg
LXXXHXALAXIXLXFXIXXHLYLCTXGXTPXXXFXSMVDGYHRH

SEQ ID NO: 78768 - protein, 27 aa, Artificial sequence
  protein pattern
  Variant (2)..(4): Xaa in position 2 to 4 is any amino acid
  Variant (5)..(9): Xaa in position 5 to 9 is any or no amino acid
  Variant (11)..(11): Xaa in position 11 is Asp or Glu
  Variant (12)..(12): Xaa in position 12 is Phe or Tyr
  Variant (15)..(15): Xaa in position 15 is Leu or Val
  Variant (19)..(19): Xaa in position 19 is any amino acid
  Variant (23)..(25): Xaa in position 23 to 25 is Leu or Val
  Variant (26)..(26): Xaa in position 26 is Gly or Leu
LXXXXXXXXPXXWPXWLIXAGVXXXXM

SEQ ID NO: 78769 - protein, 28 aa, Artificial sequence
  protein pattern
  Variant (3)..(3): Xaa in position 3 is Leu or Val
  Variant (4)..(4): Xaa in position 4 is Ala or Gly
  Variant (5)..(5): Xaa in position 5 is Ile or Val
  Variant (8)..(8): Xaa in position 8 is Ala or Gly
  Variant (10)..(10): Xaa in position 10 is Leu or Val
  Variant (14)..(15): Xaa in position 14 to 15 is Ile or Leu
  Variant (25)..(25): Xaa in position 25 is any or no amino acid
  Variant (27)..(27): Xaa in position 27 is any or no amino acid
AYXXXMYXLXPLLXXTGLLCLYPQXAXG

SEQ ID NO: 78770 - protein, 14 aa, Artificial sequence
  protein pattern
  Variant (2)..(2): Xaa in position 2 is any amino acid
  Variant (3)..(3): Xaa in position 3 is any or no amino acid
  Variant (5)..(5): Xaa in position 5 is any or no amino acid
  Variant (7)..(7): Xaa in position 7 is Ala or Gln
  Variant (10)..(10): Xaa in position 10 is Glu or Thr
  Variant (11)..(11): Xaa in position 11 is any amino acid
VXXLXVXVHXXCGF

SEQ ID NO: 78771 - DNA, 648 bp, Escherichia coli
  CDS (1)..(648): transl_table=11
atgggtaagatgaaccatcaggatgaattgccgttagcgaaagtcagcgaagttgacgaggcgaagcggcaatggttgcaggggatgcgtcaccccgttgatacggtaaccgaaccagaacctgctgaaatcctggctgagttcattcgccagcattctgcggctgggcagctggtggcgcgcgccgtgtttctctcgccaccctatttggttgcagaagaggaactgtcagttttgctggaaagcattaagcagaacggagactacgcggatatcgcttgtttgacgggaagcaaggatgattactattactcaacgcaggccatgagtgaaaactacgcggcgatgtctttgcaagttgtggagcaggacatttgtcgcgccattgcacacgccgttcgttttgagtgccagacgtatcctcgtccttacaaagtcgccatgctgatgcaagcgccatattacttccaggaagcgcagattgaagccgcgatcgccgcgatggatgttgcacctgaatatgccgatatacggcaggtggagtcatcgacggcggtgttgtacttgtttagcgagcgatttatgacctatggcaaggcttatggcttatgcgaatggttcgaggtagagcagtttcagaacccctaa

SEQ ID NO: 78772 - protein, 215 aa, Escherichia coli
MGKMNHQDELPLAKVSEVDEAKRQWLQGMRHPVDTVTEPEPAEILAEFIRQHSAAGQLVARAVFLSPPYLVAEEELSVLLESIKQNGDYADIACLTGSKDDYYYSTQAMSENYAAMSLQVVEQDICRAIAHAVRFECQTYPRPYKVAMLMQAPYYFQEAQIEAAIAAMDVAPEYADIRQVESSTAVLYLFSERFMTYGKAYGLCEWFEVEQFQNP

SEQ ID NO: 78773 - DNA, 639 bp, Shigella flexneri 2a str. 301
  CDS (1)..(639): transl_table=11
atgaaccatcaggatgaattgccgttagcgaaagtcagcgaagttgacgaggcgaagcggcaatggttgcaggggatgcgtcaccccgttgatacggtaaccgaaccagaacctgctgaaatcctggctgagttcattcgccagcattctgcggctgggcagctggtggcgcgcaccgtgtttctctcgccaccctattcggttgcagaagaggaactgtcagttttgctggaaagcattaagcagaacggagactacgcggatatcgcttgtatgacgggaagtcaggatgattactattactcaacgcaggccatgagtgaaaactacgcggcgatgtctttgcaagttgtggagcaggacatttgtcgcgccattgcacacgccgttcgttttgagtgccagacgtatcctcgtccttacaaagtcgccatgctgatgcaagcgccatattacttccaggaagcgcagattgaagccgcgatcgccgcgatggatgttgcacctgaatatgccgatatacggcaggtggagtcatcgacggcggtgttgtacttgtttagcgagcgatttatgacctatggcaaggcttatggcttatgcgaatggttcgaggtagagcagtttcagaacccctga

SEQ ID NO: 78774 - protein, 212 aa, Shigella flexneri 2a str. 301
MNHQDELPLAKVSEVDEAKRQWLQGMRHPVDTVTEPEPAEILAEFIRQHSAAGQLVARTVFLSPPYSVAEEELSVLLESIKQNGDYADIACMTGSQDDYYYSTQAMSENYAAMSLQVVEQDICRAIAHAVRFECQTYPRPYKVAMLMQAPYYFQEAQIEAAIAAMDVAPEYADIRQVESSTAVLYLFSERFMTYGKAYGLCEWFEVEQFQNP

SEQ ID NO: 78775 - DNA, 648 bp, Escherichia coli CFT073
  CDS (1)..(648): transl_table=11
atgggagagatgaaccatcaggatgaattgccgttagcggaagtcagcgaaattgatgaggcgaagcggcaatggttgcaggggatgcgtcaccccgttgatacggtaaccgaaccagaaccggctgaaatcctggcagagttcattcgccagcattctgcggctgggcagctggtggcgcgcgctgtgtttctctcgccgccctattcggttgcagaagaggaactgtcagttttgctggaaaacattaagcagaacggagactacgcggatatcgcttgtatgacgggaagccaggatgattactattactcaacgcaggccatgagtgaaaactacgcggcgatgtctttgcaagttgtggagcaggacatttgtcgcgccattgcacacgccgttcgttttgagtgccagacgtatcctcgtccttacaaagtcgccatgctgatgcaagcgccatattacttccaggaagcgcagattgaagccgcgatcgccacgatggatgttgcacctgaatatgccgatatacggcaggtggagtcatcgacggcagtgttgtacttgtttagcgagcgatttatgacctatggcaaggcgtatggcttatgcgaatggttcgaggtagagcagtttcagaacccctga

SEQ ID NO: 78776 - protein, 215 aa, Escherichia coli CFT073
MGEMNHQDELPLAEVSEIDEAKRQWLQGMRHPVDTVTEPEPAEILAEFIRQHSAAGQLVARAVFLSPPYSVAEEELSVLLENIKQNGDYADIACMTGSQDDYYYSTQAMSENYAAMSLQVVEQDICRAIAHAVRFECQTYPRPYKVAMLMQAPYYFQEAQIEAAIATMDVAPEYADIRQVESSTAVLYLFSERFMTYGKAYGLCEWFEVEQFQNP

SEQ ID NO: 78777 - DNA, 24 bp, Artificial sequence
  primer
atgggtaagatgaaccatcaggat

SEQ ID NO: 78778 - DNA, 25 bp, Artificial sequence
  primer
ttaggggttctgaaactgctctacc

SEQ ID NO: 78779 - DNA, 1035 bp, Escherichia coli
  CDS (1)..(1035): transl_table=11
atgatggtcatccgtcccgttgagcgatcagatgtctcggcgctgatgcagcttgccagcaaaacgggcggcggcctgacgtcgcttcccgccaatgaagccacgctttcggcgcgtatcgaaagggcaatcaaaacctggcaaggcgaactgcccaaaagtgagcagggctatgtgttcgtgctggaagatagcgagacaggcaccgtggcggggatttgtgccattgaggtggcggttgggctgaacgatccctggtacaactatcgcgtcggcacgttggttcacgcctcaaaagagctgaatgtctataacgcattgccgacgctgtttctcagtaacgatcacaccggcagcagcgagctgtgcacgctgtttctcgacccggactggcgcaaagagggcaacggctatttgctgtcgaaatcgcgctttatgtttatggcggcttttcgcgacaagtttaatgacaaagtggttgctgaaatgcgcggggtgattgacgaacacggctattcaccgttctggcaaagcctcggtaaacgcttcttttcgatggattttagccgcgccgattttctctgcggcaccgggcaaaaggcatttattgcagaactgatgccgaaacatccgatctatacccactttttatcccaggaagcccaggacgtcatcggtcaggtacatccgcaaaccgcgcctgcccgcgcggtgctggagaaagaaggttttcgctaccgtaactatatcgacatctttgacggtgggccgacgcttgagtgtgacatcgaccgcgtgcgcgccatccgtaaaagtcggctggtggaagtggcagaagggcagcctgcgcagggcgatttcccagcctgcctggtcgccaatgaaaattatcaccatttccgcgtggtgctggtgcgtaccgatccggcaaccgagcgtttgattttaaccgccgcacaactggatgccctcaaatgccacgccggggatcgcgttcgtctggtgcgcctgtgcgcagaggagaaaacagcataa

SEQ ID NO: 78780 - protein, 344 aa, Escherichia coli
MMVIRPVERSDVSALMQLASKTGGGLTSLPANEATLSARIERAIKTWQGELPKSEQGYVFVLEDSETGTVAGICAIEVAVGLNDPWYNYRVGTLVHASKELNVYNALPTLFLSNDHTGSSELCTLFLDPDWRKEGNGYLLSKSRFMFMAAFRDKFNDKVVAEMRGVIDEHGYSPFWQSLGKRFFSMDFSRADFLCGTGQKAFIAELMPKHPIYTHFLSQEAQDVIGQVHPQTAPARAVLEKEGFRYRNYIDIFDGGPTLECDIDRVRAIRKSRLVEVAEGQPAQGDFPACLVANENYHHFRVVLVRTDPATERLILTAAQLDALKCHAGDRVRLVRLCAEEKTA

SEQ ID NO: 78781 - DNA, 1005 bp, Caulobacter crescentus CB15
  CDS (1)..(1005): transl_table=11
atgctagtcgtccgtcccgccggttccgccgattttgaggccctgatggagctggccgttctgtctgggcgcggcttcaccagtcttcccgaagacgaacccacgctgcgctcgcgcctcgccctgtccgaagccagcttccaggcgggcgttgcgccgcccgaggcctggtacaccctgatgctggaggacctggaaaccggcacggtcgagggcgtcgcgggcgtcaaggcgggcgtgggcctcaagcgcccgttcttctccttccgggtcgtgaccctggctcagtcatcgccgaccctggaaatgcgcttcgaccacaaggcgctggtgctggtgaacgagtgcgcgggttggtccgaagtcggctcgctgttcctgcgccccgagaagcgcaagggcggagccgggcggctgctggcgcaatcgcgctacatgctgatcggtatcgagccgcagcgcttcgccgagatggttctggccgaactgcgcggctggttcgacgaggacggccgatgccccttctgggagcacgtctcgcacaagttcttccggcttgacttcgaccaggcggatctgatgagcgcctcgaccgatggccagttcatcctggacctggcgccgcgccacccgatctataccgagcttctgcccgaggaggctcgcgacgtgatcggtcgtgtccaccgcgacggtgaagccgcgcgggcgatgctggagcgcgagggcttccggtatcagggactcgtcgacctgttcgatgcaggaccaactgtggcctgtccccgagacgacatccgtaccgtgcgtgacgccagacggctgcgggtcaaggtgggcgaagacgcctatggcgaagaggcgctgatctccacgggcgaggtttcgcgcttccgcgccgtgcgggcgccggtgttgatcgacggcgagacggcgatcctgggacgcgatgcaatggacgccctgggcgtaggcgaaggcgaagtggtgcgggtgaaggcatga

SEQ ID NO: 78782 - protein, 334 aa, Caulobacter crescentus CB15
MLVVRPAGSADFEALMELAVLSGRGFTSLPEDEPTLRSRLALSEASFQAGVAPPEAWYTLMLEDLETGTVEGVAGVKAGVGLKRPFFSFRVVTLAQSSPTLEMRFDHKALVLVNECAGWSEVGSLFLRPEKRKGGAGRLLAQSRYMLIGIEPQRFAEMVLAELRGWFDEDGRCPFWEHVSHKFFRLDFDQADLMSASTDGQFILDLAPRHPIYTELLPEEARDVIGRVHRDGEAARAMLEREGFRYQGLVDLFDAGPTVACPRDDIRTVRDARRLRVKVGEDAYGEEALISTGEVSRFRAVRAPVLIDGETAILGRDAMDALGVGEGEVVRVKA

SEQ ID NO: 78783 - DNA, 1032 bp, Shigella flexneri 2a str. 301
  CDS (1)..(1032): transl_table=11
atggtcatccgtcccgttgagcgctcagatgtctcggcgctgatgcagcttgccagcaaaacgggcggcggcctgacgtcgcttcccgccaatgaagccacgctttcggcgcgtatcgaaagggcaatcaaaacctggcaaggtgaactgcccaaaagcgagcagggctatgtgttcgtgctggaagatagcgagacaggcaccgtggcggggatttgcgctattgaggtggcggttgggctgaacgatccctggtacaactatcgcgtcggcacgttggttcacgcctcaaaagagctgaatgtctataacgcattgccgacgctgtttcttagtaacgatcacaccggcagcagcgagctgtgcacgctgtttctcgacccggactggcgcaaagagggcaacggctatttgctgtcgaaatcgcgctttatgtttatggcggcttttcgcgacaagtttaatgacaaagtggttgctgaaatgcgcggggtgattgacgaacacggctattcaccgttctggcaaagcctcggtaaacgcttcttttcgatggattttagccgcgccgattttctctgcggcaccgggcaaaaggcatttattgcagaactgatgccgaaacatccgatctatacccactttttatcccaggaagcccaggacgtcatcggtcaggtacatccgcaaaccgcgcctgcccgcgcggtgctggagaaagaaggttttcgttaccgcaactatatcgacatcttcgacggcgggccaacgcttgagtgtgacatcgaccgcgtgcgcgccatccgtaaaagtcggctggtggaagtggcagaagggcagcctgcgcagggcgattttccggcctgcctggtcgccaatgaaaattatcaccatttccgcgtggtgctggcgcgtaccgatccggcaaccgagcgtttgattttaaccgccgcacaactggatgccctcaaatgccacgcaggggatcgcgttcgtctggtgcgcctgtgcgcagaggagaaaacagcatga

SEQ ID NO: 78784 - protein, 343 aa, Shigella flexneri 2a str. 301
MVIRPVERSDVSALMQLASKTGGGLTSLPANEATLSARIERAIKTWQGELPKSEQGYVFVLEDSETGTVAGICAIEVAVGLNDPWYNYRVGTLVHASKELNVYNALPTLFLSNDHTGSSELCTLFLDPDWRKEGNGYLLSKSRFMFMAAFRDKFNDKVVAEMRGVIDEHGYSPFWQSLGKRFFSMDFSRADFLCGTGQKAFIAELMPKHPIYTHFLSQEAQDVIGQVHPQTAPARAVLEKEGFRYRNYIDIFDGGPTLECDIDRVRAIRKSRLVEVAEGQPAQGDFPACLVANENYHHFRVVLARTDPATERLILTAAQLDALKCHAGDRVRLVRLCAEEKTA

SEQ ID NO: 78785 - DNA, 1029 bp, Pseudomonas putida KT2440
  CDS (1)..(1029): transl_table=11
atgatcgttcgtcctgtacgcagcagcgatttgcctgcgttgatcgaattggcacgcagcaccggcaccaccgggctgaccacgctgccggccaacgaagagcgcctggggcatcgcgttggttgggcggaaaaaagctttcgtggcgaagccgagcgtggcgacaccgattacctgttcgtgctggaaaacgacgaaggcctggtggtgggcatcagtgccatcgccggcgccgtcggcctgcgtgagccctggtacaactaccgggtcggcctgactgtcagcgcctcgcaggagctgaagatctaccgcgaaatcccgacgctgttcctggccaacgacctgaccggcaactcagagctgtgctcgctgttcctgcgcagcgactaccgctcgggcctcaatggccgcctgctgtcgcgcgcgcgcatgctgttcattgccgagttccccgagctgttcggcaagaagatcattgccgaaatgcgcggcatgtctgacgagcagggccgttcgccgttctgggaaagcctgggccggcatttcttcaagatggagttcagccaggccgactacctcaccggcgtgggcaacaagtcgttcatcgccgaactgatgcccaagttcccgctgtacacctgcttcctgtccgaagcggcgcgcagtgtgatcggccgtgtgcacaaagacaccgagccggcgctggccatgctcaagcaggaaggcttcaactaccagggctacgtcgacatcttcgatgccggcccggccatcgagtgtgacactgccaagatccgcgccgtacgcgagagccagaccctggtgctggcggtaggtacgccaggcgatgacgcgacccctttcatcatccacaaccgcaagcgcgacgactgtcgcatcactgccgcacctgcacggttggccgccggcaccctggtggtcgacccgttgaccgccaaacgcctgcgcatgggcgttggcgacaatgtccgcgcggtgccgctgtcggccagccgggaggcccattaa

SEQ ID NO: 78786 - protein, 342 aa, Pseudomonas putida KT2440
MIVRPVRSSDLPALIELARSTGTTGLTTLPANEERLGHRVGWAEKSFRGEAERGDTDYLFVLENDEGLVVGISAIAGAVGLREPWYNYRVGLTVSASQELKIYREIPTLFLANDLTGNSELCSLFLRSDYRSGLNGRLLSRARMLFIAEFPELFGKKIIAEMRGMSDEQGRSPFWESLGRHFFKMEFSQADYLTGVGNKSFIAELMPKFPLYTCFLSEAARSVIGRVHKDTEPALAMLKQEGFNYQGYVDIFDAGPAIECDTAKIRAVRESQTLVLAVGTPGDDATPFIIHNRKRDDCRITAAPARLAAGTLVVDPLTAKRLRMGVGDNVRAVPLSASREAH

SEQ ID NO: 78787 - DNA, 1020 bp, Pseudomonas putida KT2440
  CDS (1)..(1020): transl_table=11
atgctggtgatgcgccccgcgcaaatggctgatctgaacgacgtgcagcgcatggctgcagacagccccattggtgtcacctcgctgccggacgacactgctcgtctgggcgacaagattgccgcctctgagacatccttcgccgccgaggtcagcttcaacggtgaagagagttactttttcgtgctcgaagacagtgaaacaggcaagttggccggctgctcggccattgtcgcttcggccggctactccgagccgttctacagttttcgtaacgaaacattcgtgcacgcctcacgcgagctgaagatacacaacaagatccatgtgctgtcgctgtgtcacgatctgaccggcaacagcctgctgaccagtttctatgtggcgccggagctggtgaacagtggctgggccgagctcaactcgcgcggccggctgctgttcatggctgcgcacccggagcgctttgccgattcggtggtgaccgagatcgtcggcttcagcgacgagcagggtgaatcgccgttctgggatgccatcggccgcaacttcttcgacctcaactatgccgacgccgagcgcctgtgcggcctgaagagccgtacctttctcgccgagctgatgccgcattacccgatctacgtgccgttgttgccagacctggcgcaggaagccatgggccaggtacatccgcgggcgcagatcaccttcgacatactcatgcgcgaaggcttcgagaccgagcactacatcgacatcttcgacggcggcccgaccctgcatgcgcgcacctctggcatccgctcgatcgcccagagccgggtggtgccggtgaagatcgaagaggccccggtcaaaggcgggcgcccgtacctggtgtgcaacggcctgttgcaggactaccgcgcggtgttgctggacctggactgggtgcctggcaagccggtcagcctgagcgtggcagcagccgacgcgctgggcgtgggtgagggcgccagcgtgcgcctggtcgcggtttga

SEQ ID NO: 78788 - protein, 339 aa, Pseudomonas putida KT2440
MLVMRPAQMADLNDVQRMAADSPIGVTSLPDDTARLGDKIAASETSFAAEVSFNGEESYFFVLEDSETGKLAGCSAIVASAGYSEPFYSFRNETFVHASRELKIHNKIHVLSLCHDLTGNSLLTSFYVAPELVNSGWAELNSRGRLLFMAAHPERFADSVVTEIVGFSDEQGESPFWDAIGRNFFDLNYADAERLCGLKSRTFLAELMPHYPIYVPLLPDLAQEAMGQVHPRAQITFDILMREGFETEHYIDIFDGGPTLHARTSGIRSIAQSRVVPVKIEEAPVKGGRPYLVCNGLLQDYRAVLLDLDWVPGKPVSLSVAAADALGVGEGASVRLVAV

SEQ ID NO: 78789 - DNA, 948 bp, Escherichia coli CFT073
  CDS (1)..(948): transl_table=11
atgatggtcattcgtcccgttgagcgctcagatgtctcggcgctgatgcagcttgccagcaaaacgggcggcggcctgacgtcgcttcccgccaatgaagccacgctttcggtgcgtattgaaagggcaatcaaaacctggcaaggcgaactgcccaaaagtgagcagggttatgtgtttgtactggaagatagtgagacaggcactgtggcggggatttgcgccattgaggtggcggttgggctgaacgatccctggtacaactatcgcgtcggcacgctggttcacgcttcgaaagagctgaatgtctataacgcattgccgacgctgtttctcagtaacgatcacaccggcagcagcgagctgtgcacgctgtttctcgacccgaagtggcgcaaagagggcaacggctatttgctgtcgaaatcgcgctttatgtttatggcggcttttcgcgacaagtttaatgacaaagtggtcgccgaaatgcgcggggtgattgacgaacacggctattcaccgttctggcaaagcctcggtaaacgcttcttttcgatggattttagccgcgctgattttctctgcggcaccgggcaaaaggcatttattgcagaactgatgccgaaacatccgatctatacccactttttatcccaggaagcccaggacgtcatcggtcaggtacatccgcaaaccgcgcctgcccgtgcggtgctggagaaagaaggttttcgctaccgtaactatatcgacatctttgacggcgggccgacacttgaatgtgatatcgaccgcgtgcgcgccatccgtaaaagtcggctggtggaagtggccgaagggcagcctgcgcagggcgattttccggcctgcctggtcgccaatgaaaattatcaccatttccgcgtggtgctggtgcgtaccgatccagcgaccgagcgtttgatttaa

SEQ ID NO: 78790 - protein, 315 aa, Escherichia coli CFT073
MMVIRPVERSDVSALMQLASKTGGGLTSLPANEATLSVRIERAIKTWQGELPKSEQGYVFVLEDSETGTVAGICAIEVAVGLNDPWYNYRVGTLVHASKELNVYNALPTLFLSNDHTGSSELCTLFLDPKWRKEGNGYLLSKSRFMFMAAFRDKFNDKVVAEMRGVIDEHGYSPFWQSLGKRFFSMDFSRADFLCGTGQKAFIAELMPKHPIYTHFLSQEAQDVIGQVHPQTAPARAVLEKEGFRYRNYIDIFDGGPTLECDIDRVRAIRKSRLVEVAEGQPAQGDFPACLVANENYHHFRVVLVRTDPATERLI

SEQ ID NO: 78791 - DNA, 1020 bp, Vibrio vulnificus CMCP6
  CDS (1)..(1020): transl_table=11
atgctagttgttcgccctattgcaatgtcggactatgaatctttgcacacctgcgctgttgagtcagggcatggattcacttctctaccggttaacgaagagttgttaaccaatcgaatcaaacattctgaatacagttttgccaaagccaatgtgaccgaacccggtgacgaaggctatctgatggtcggttttgacagtgaaacgggtgaggttgcgggaactacaggtatcgaagcctcaattggctgggatgtgccgttttactcgtatcacatcagcaagattgttcactcatcgccgaaattaggcgttaacaatgtcgtgaaactgctgacctttggcaataactacaccggttgtagcgaaatttgtaccctatttttgcgcgagaagtttcgtcaaggtttgaatggtcgcctgatgtctaagtgccgttttctgatgatggcagagcatccacaccgtttctctcaaaccatttttgccgaaatgcgcggtgtttctgatgcgcaaggcaattcgccattttggcagtggttgcaagagcactttttctcaatcgatttcaccatggcggattaccttacgggtatcggtaagaaaggttttattgccgatttaatgccaaagctgccgatctacatcaacctgctcagcccagaggcgcaagcggtgattggtcaagtgcatgacaacacaagacctgcgttgaagttgttggaaagagaagggtttaccaaccgcggttatgtcgacattttcgatggtggtccaacggtggaatgcgatttgcgcaatattgaatcggtgcgccattccgtacgtgcgaaagtgcggatcagtgagcattcgagctcaaaagcgttcttaattgccaatacttcatttgaggattttcgtgcgactgccgccaaagcagcgtatgacccagcaacatcaagcgtgattttatctccagccgtcgccgaagcgttgaacgttgaagatggtcactacgtacgcatgttgccgcagtaa

SEQ ID NO: 78792 - protein, 339 aa, Vibrio vulnificus CMCP6
MLVVRPIAMSDYESLHTCAVESGHGFTSLPVNEELLTNRIKHSEYSFAKANVTEPGDEGYLMVGFDSETGEVAGTTGIEASIGWDVPFYSYHISKIVHSSPKLGVNNVVKLLTFGNNYTGCSEICTLFLREKFRQGLNGRLMSKCRFLMMAEHPHRFSQTIFAEMRGVSDAQGNSPFWQWLQEHFFSIDFTMADYLTGIGKKGFIADLMPKLPIYINLLSPEAQAVIGQVHDNTRPALKLLEREGFTNRGYVDIFDGGPTVECDLRNIESVRHSVRAKVRISEHSSSKAFLIANTSFEDFRATAAKAAYDPATSSVILSPAVAEALNVEDGHYVRMLPQ

SEQ ID NO: 78793 - DNA, 1026 bp, Pseudomonas syringae pv. tomato str. DC3000
  CDS (1)..(1026): transl_table=11
atgatcgttcgtcccgtacgcagcagcgacctgcccgcgttgatcgagctggcgcgcagcaccggcgccggtctgaccaccctgccggccaacgagcaacgcctggcccatcgggttggctgggctgaaaagacctttcgcggagaagccgagcgcggcgacgccgattacctgttcgtgctcgaagacgacgacggcaaagtggtgggcatttccgccatcgctggcgcggtcggcctgcgtgagccctggtacaactaccgggtcgggctgacggtcagcgcctcccaggaactgaacatttaccgggaaattcctacgctgtttctggccaacgacctgactggcaattccgaattgtgctcgctgttcctgcacagcgattcgcgcagcggcctcaacggtcgcctgctgtccaaggcgcgcatgctgttcattgctgagtttccgaaactgttcggtaacaagatcattgccgagatgcgcggcatgtccgacgagaatggccgttcgccgttctgggagagcctggggcggcacttcttcaagatggagttcagccaggccgattacctgaccggcgtgggtaacaaggcgtttatcgccgagctgatgcccaagtttccgctgtacagttgctttctgtccgaagacgcacgcaacgtgatcggtcgcgtgcacgccgacacagagcctgcgctgaccatgctcaagggtgagggcttctcgtatcagggctacgtcgatatcttcgatgcgggcccggccatcgagtgcgagaccggcaagatccgcgcggtcaaggacagccaggccctggtgctggccatcggcacgccgggcgacgacgcaccacagttcctgatctacaaccgcaagcgtgaagattgccgcgtgaccgtaggcgctgcgcggtttgctgccggtacgctggtggtcgcgccgcaaaccgccaagcggctgcgtatgaatgctggcgacaacgtgcgcgcagtgccgttgtccgccgcgcgggagggcgtttga

SEQ ID NO: 78794 - protein, 341 aa, Pseudomonas syringae pv. tomato str. DC3000
MIVRPVRSSDLPALIELARSTGAGLTTLPANEQRLAHRVGWAEKTFRGEAERGDADYLFVLEDDDGKVVGISAIAGAVGLREPWYNYRVGLTVSASQELNIYREIPTLFLANDLTGNSELCSLFLHSDSRSGLNGRLLSKARMLFIAEFPKLFGNKIIAEMRGMSDENGRSPFWESLGRHFFKMEFSQADYLTGVGNKAFIAELMPKFPLYSCFLSEDARNVIGRVHADTEPALTMLKGEGFSYQGYVDIFDAGPAIECETGKIRAVKDSQALVLAIGTPGDDAPQFLIYNRKREDCRVTVGAARFAAGTLVVAPQTAKRLRMNAGDNVRAVPLSAAREGV

SEQ ID NO: 78795 - DNA, 1044 bp, Chromobacterium violaceum ATCC 12472
  CDS (1)..(1044): transl_table=11
atgatgtttatccgtcccgttgaacacaaggacttgcccggcctgatggacctggcccggagcgccgccagcggcggcgtcggcctcacctcgctgccgatcaacgaagatcggctgcagaagcgcatcgcccgctcggtgctgtccttcgccggcgagctggaccgcgccgaccacggctacgtctttgtgctggaggattcggccaacagcaaggtggccggcatctgcgcggtggaagccgccgtcggcctgaaggagccctggtacaactaccgcatcggcaccatcgtccacgcgtcggaagaactgggcgtgtacagccgccacgaaaccctgttcctgtccaacgaccacaccggctattccgagctgtgcacgctgtatctgcacccggattaccgcgtcaagcgcaacggcggcctgctgtccaagagccgtttcctgttcctggcgcagttcccgcagctgtttggcaagatggtggtggcggagatgcgcggcgtgtccgacgagaacggccgctcgccgttctgggaggcgctgggccgccacttcttctccatcgatttcgccgaggccgactacctgaccggcatcggccagaaggccttcgtcgccgagctgatgcccaagcacccggtctatgtcgacttcctgccgcccgaggcgcaagcggtgatcggcctgacccacgaggccacccgcccggcggtggcgatgctggagtcggaaggcttccgctacgagggctatgtcgacatcttcgacgccggcccgaccgtgcaggcctacaccggcgacatccgcgcggtgaaggaaagccagcgcctgccggcgcgcgtcgtcgatccgctgccggacggcgacaaggaatgctatctggtctgcaacgacgccctgcaggactaccgcgcggtgctggtggagtctgcgcggccgcagggcgaattctgcctgacgccggatctggcgcgggtgctcaaggttaaggatggcgatcacgtgcgctgcgtgacgctgacgccgaaggaggcagtgtaa

SEQ ID NO: 78796 - protein, 347 aa, Chromobacterium violaceum ATCC 12472
MMFIRPVEHKDLPGLMDLARSAASGGVGLTSLPINEDRLQKRIARSVLSFAGELDRADHGYVFVLEDSANSKVAGICAVEAAVGLKEPWYNYRIGTIVHASEELGVYSRHETLFLSNDHTGYSELCTLYLHPDYRVKRNGGLLSKSRFLFLAQFPQLFGKMVVAEMRGVSDENGRSPFWEALGRHFFSIDFAEADYLTGIGQKAFVAELMPKHPVYVDFLPPEAQAVIGLTHEATRPAVAMLESEGFRYEGYVDIFDAGPTVQAYTGDIRAVKESQRLPARVVDPLPDGDKECYLVCNDALQDYRAVLVESARPQGEFCLTPDLARVLKVKDGDHVRCVTLTPKEAV

SEQ ID NO: 78797 - DNA, 1032 bp, Burkholderia vietnamiensis G4
  CDS (1)..(1032): transl_table=11
atgatcgtcgttcgggtcgtacaaacgggcgacgtcgacgcgctcgtgtcgctcgcgcaggaaaccgggccgggcctgaccacgttcaagcccgaccgcgacgcgctcgccgcgcgcatcgaacgctcgcgccgcacgctcgacggccgcgccgcgccgggcgaagccggctacttcttcgtgatggaagattcgacgacgggcgacatcgcgggcgtctgcgggatcgagtcgcaggtcggcctcgagcagccgttctacaactatcgcgtgagcaccgtcgtgcatgcgagccaggagctcggcgtgtggacgcgcatgcacgcgctgaacatctcgcacgacctgaccggctacgcggaagtgtgctcgctgttcctgagcccgcgctatcgcacgggcggcgtcggcggcctgctgtcgcgctcgcgcttcatgttcatcgcgcagttccgcgagcgctttccggaacgcatctgcgcggagctgcgcgggcacttcgacgaggacggcacgtcgccgttctggcgcgccgtcggctcgcacttctaccagatcgacttcaacgcggccgattacctgagctcgcacggccgcaagtcgttcctcgcggaactgatgccgcgttaccccgtgtacgtcgacctgctgccgcaggacgcgcaggacgcggtcggcctcacgcaccgcgacacgctgccggcccgcaagatgctcgaagcagaagggctgcgctatcagaaccacgtggacatcttcgatgccggcccggtgctcgaatgccacatcaacgacctgcgcaccgtgcgcgagagcgtggtcgtgccggctgcgatcggcgtgcccgatgcgctcggcgacgcgagccgctcgctggtgtcgaacacgtcgctgcacgacttccgcgtcggcgtcgcgccgggcgtggtcgcgaacggatcgttcgtgctgtcggccgacgatgccgccgcgctcgacgtgaaggccggcgatccggtccgcgtgctgccgctcaaagccaaacagggataa

SEQ ID NO: 78798 - protein, 343 aa, Burkholderia vietnamiensis G4
MIVVRVVQTGDVDALVSLAQETGPGLTTFKPDRDALAARIERSRRTLDGRAAPGEAGYFFVMEDSTTGDIAGVCGIESQVGLEQPFYNYRVSTVVHASQELGVWTRMHALNISHDLTGYAEVCSLFLSPRYRTGGVGGLLSRSRFMFIAQFRERFPERICAELRGHFDEDGTSPFWRAVGSHFYQIDFNAADYLSSHGRKSFLAELMPRYPVYVDLLPQDAQDAVGLTHRDTLPARKMLEAEGLRYQNHVDIFDAGPVLECHINDLRTVRESVVVPAAIGVPDALGDASRSLVSNTSLHDFRVGVAPGVVANGSFVLSADDAAALDVKAGDPVRVLPLKAKQG

SEQ ID NO: 78799 - DNA, 1029 bp, Acinetobacter sp. ADP1
  CDS (1)..(1029): transl_table=11
atgttgatcgttagacatgcagagttccgcgatctggatgatatcttcatcttggcagagaaatctggcgtcggcttaacctctttgccagccaatcgtgaaatcttattttccagaattgaacgcacacgaaaaaccttgctgggtgaatgccctcgaagtgaacaaggatatctatttgttcttgaagatattgaagataagcgtgtagtgggggtgagcgccattgaggttgctgttggtctgagcgaaccattttataattatcatgtcggcaagcaggtgcatgcgtgtaaaaatttgaatgtttataaaatactcaatacgctttttttaagcaatgatctgacagggagcagtgaattatgtactttgtttttagatgaggcttatcgcaaaaacctgaatggaaaacttttatcaaaaatccgttttttattcattgctgctttccatgaattttttcagcccaaaatcatcgctgaaatgcgcggttattcagatgaatcggggcgttctccattttgggatgccattggttatcagtttttcaatatggattttgccactgcagattatttgagcggtgttggtcaaaaagcttttattgcagagttaatgccacgatttccaatctatgtggatttactttcagcagatgtgcaaggtgtcattggggcggtgcatccacattctaaacctgccagccatgtactagaaagtgaaggcctacgataccaaggatacgtcgatatttttgatgctggccctacgcttgaagctgaaatctgttatctcagagcggtaaaggaaagtcaacttttacctattaaactgacgaattcaacccagcaagatggagcaccttatctggttgccaatgatacttatcaagagtatcgggcaattctgatccattcttcacttgatgccgaatacattgagttgagtcatcaacaggccagcttattgaatgtagaagaaggacaaaaaattcgtattttgccattaaatacgacggagcaataa

SEQ ID NO: 78800 - protein, 342 aa, Acinetobacter sp. ADP1
MLIVRHAEFRDLDDIFILAEKSGVGLTSLPANREILFSRIERTRKTLLGECPRSEQGYLFVLEDIEDKRVVGVSAIEVAVGLSEPFYNYHVGKQVHACKNLNVYKILNTLFLSNDLTGSSELCTLFLDEAYRKNLNGKLLSKIRFLFIAAFHEFFQPKIIAEMRGYSDESGRSPFWDAIGYQFFNMDFATADYLSGVGQKAFIAELMPRFPIYVDLLSADVQGVIGAVHPHSKPASHVLESEGLRYQGYVDIFDAGPTLEAEICYLRAVKESQLLPIKLTNSTQQDGAPYLVANDTYQEYRAILIHSSLDAEYIELSHQQASLLNVEEGQKIRILPLNTTEQ

SEQ ID NO: 78801 - DNA, 1017 bp, Colwellia psychrerythraea 34H
  CDS (1)..(1017): transl_table=11
atgatcattgtacgtcctattaaaacaagtgacttgaaagccttataccaaatcgcgatagattctggccacggttttacgtcactaccagtaaatgaacaattacttcaacaacgcattagccttgctgaagaatccttttcaaaagaagtgagccaagcgggaaaagaaggttatctttttgttatggaagataccgaaacaggtgacgttgttggtaccagtggtattgaagctgctgttggtttagatgatgctttttatcattatcatttaggtaaagttgtccatagctcacgagaactgaatatttacaataccgtagaaaccttgtcactatgtaatgattacaccggtgcgagtgaaatttgtacgttatttttaagtaatagtcatcgtaaaaataacaatggtcgttttttatcacgtttccgctttctttttatcgcggaacataaagaacgcttttctgacaccattattgcagaaatgcgtggtgtttcagacaatgaaggtcgctcaccattttggaattggcttgaagaacattttttctcaatggacttccctactgctgattacttaactggtataggtaaaaaagaatttattgctgagttaatgccgaagtatccaatttacgtcaatttgctaagtaaagaagcacaagacgtaattgacaaggtgcatccgcaaacagtaccagcacttcgcttattagaagcggaaggttttgcaagacgtggctatgttgatatttttgatgcgggtcctacggtggaatcgaatgttaacaatattagatcggttaaccaaagtaagcgttgccaagtgatcattgatgaagtgcaatcaactgataattacattatttgtaatagtaaagttgaagactttagagccactcaagcgccactttcattacgcgacacagctaaccaagttgtgattagtcaagccgttgccgatgcattgatggtcagtgctggtgattgggttcgtataatatctaattag

SEQ ID NO: 78802 - protein, 338 aa, Colwellia psychrerythraea 34H
MIIVRPIKTSDLKALYQIAIDSGHGFTSLPVNEQLLQQRISLAEESFSKEVSQAGKEGYLFVMEDTETGDVVGTSGIEAAVGLDDAFYHYHLGKVVHSSRELNIYNTVETLSLCNDYTGASEICTLFLSNSHRKNNNGRFLSRFRFLFIAEHKERFSDTIIAEMRGVSDNEGRSPFWNWLEEHFFSMDFPTADYLTGIGKKEFIAELMPKYPIYVNLLSKEAQDVIDKVHPQTVPALRLLEAEGFARRGYVDIFDAGPTVESNVNNIRSVNQSKRCQVIIDEVQSTDNYIICNSKVEDFRATQAPLSLRDTANQVVISQAVADALMVSAGDWVRIISN

SEQ ID NO: 78803 - DNA, 1026 bp, Pseudomonas fluorescens PfO-1
  CDS (1)..(1026): transl_table=11
atgattgttcgtcccgtacgcagcagcgatttgtccgctctgatcgacctggcccgcagcaccggcaccggcctgactaccttgccggccaacgaagagcgcctgacccaccgggttggctgggccgagaagacctttcgcggtgaagccggtcgtggcgacgcggactatctgttcgtgctcgaagacgacaacggtcgcgtggtggggatttccgccatcgccggcgcggtcggcctgcgcgagccttggtacaacttccgcgtcggcctgaccgtcagcgcctcgcaggaattgaatatctatcgcgagatcccgacgctgttcctggccaacgacttgaccggcaactccgagctgtgctcgctgttcctgcacgctgactaccgcaccggcctcaacggccgcatgttgtccaaggcgcggatgctgttcatcgccgaattcccggaactgttcggcaacaagatcatcgccgagatgcgcggcgtgtcggatgacgccggccgttcgccgttctgggagagcctgggccgtcacttcttcaagatggaattcagccaggccgattacctgaccggtgtcggcaacaaggcattcattgccgaactgatgccgaaattcccgctgtatacctgcttcctgtcgccggacgcgcgcaacgttatcggtcaggttcacccggacaccgagccggcgctggcaatgctcaagagcgaaggcttcagctatcagggttacgtcgacatcttcgacgccggccccgccatcgagtgcgagaccagcaagatccgcgcggtgcgtgacagcgaagcgctggtgctggccatcggcacgccgggcgacgacgccacgccgttcatcatccataaccgcaaacgcgaagactgccgcatcacggctgcgccggcccgtctggccgccggcaccctggtggtcgatccgctgaccgccaaacgtcttcaactcaacgctggcgatcaggtgcgcgccgtggcgttgtccgctgcccgggagtcgaaataa

SEQ ID NO: 78804 - protein, 341 aa, Pseudomonas fluorescens PfO-1
MIVRPVRSSDLSALIDLARSTGTGLTTLPANEERLTHRVGWAEKTFRGEAGRGDADYLFVLEDDNGRVVGISAIAGAVGLREPWYNFRVGLTVSASQELNIYREIPTLFLANDLTGNSELCSLFLHADYRTGLNGRMLSKARMLFIAEFPELFGNKIIAEMRGVSDDAGRSPFWESLGRHFFKMEFSQADYLTGVGNKAFIAELMPKFPLYTCFLSPDARNVIGQVHPDTEPALAMLKSEGFSYQGYVDIFDAGPAIECETSKIRAVRDSEALVLAIGTPGDDATPFIIHNRKREDCRITAAPARLAAGTLVVDPLTAKRLQLNAGDQVRAVALSAARESK

SEQ ID NO: 78805 - DNA, 1032 bp, Burkholderia sp. 383
  CDS (1)..(1032): transl_table=11
atgatcgtcgttcgggtcgtacaaacgggcgacgtcgattcgctcgtgtcgctcgcgaaggaaaccgggccgggcctgaccacgttcaagccggaccgcgacgcgctcgccgcgcgcatcgagcgtacgcgccgcacgctcgcgggcgaggccgcggccggcgaggccggctacttcttcgtgatggaagaatcgaagacgggcgacatcgcgggcgtgtgcgggatcgagacgcaggtcggcctcgaacagccgttctacaactatcgcgtaagcacggtcgtgcacgcgagccaggagctcggcgtgtggacgcggatgtccgcgctgaacatctcgcacgacctgaccggctatgcggaagtgtgctcgctgttcctgagcccgcgctatcgcacgggcggcgtgggcggcctgctgtcgcgctcgcgcttcatgttcatcgcgcagttccgcgagcgctttccggaacgcatctgcgcggaattgcgcggccacttcgacgaggacggcacgtcgccgttctggcgcgcagtcggttcgcacttctaccagatcgatttcaacgcggccgactatctcagctcgcacggccgcaagtcgttcctcgcggaactgatgccgcgctatccggtgtacgtcgacctgctgccgcaggacgcacaggacgcggtcggcctcacgcaccgcgatacgctgccggcccgcaagatgctcgaagcggaagggctgcgttaccagaatcacgtcgacatcttcgacgcgggccccgtgctcgaatgccacgtcaacgacctgcgcacggtgcgcgagagcgtcgtcgtgccggtcgcgatcggcgtgcccgatgcacgggacgacgcgccgaagtcgctcgtgtcgaacacgtcgctcaccgacttccgcgtcggcgtcgcgccgggcgtggtcgcgaacggctcgttcgtgctgtcggcggacgatgccgtcgcgctcgacgtgaaggccggcgatccggtgcgcgtgctgccgctcaaagtcaaacagggataa

SEQ ID NO: 78806 - protein, 343 aa, Burkholderia sp. 383
MIVVRVVQTGDVDSLVSLAKETGPGLTTFKPDRDALAARIERTRRTLAGEAAAGEAGYFFVMEESKTGDIAGVCGIETQVGLEQPFYNYRVSTVVHASQELGVWTRMSALNISHDLTGYAEVCSLFLSPRYRTGGVGGLLSRSRFMFIAQFRERFPERICAELRGHFDEDGTSPFWRAVGSHFYQIDFNAADYLSSHGRKSFLAELMPRYPVYVDLLPQDAQDAVGLTHRDTLPARKMLEAEGLRYQNHVDIFDAGPVLECHVNDLRTVRESVVVPVAIGVPDARDDAPKSLVSNTSLTDFRVGVAPGVVANGSFVLSADDAVALDVKAGDPVRVLPLKVKQG

SEQ ID NO: 78807 - DNA, 1038 bp, Novosphingobium aromaticivorans DSM 12444
  CDS (1)..(1038): transl_table=11
atgacctttcgcatccgtgccgcgcgcgcgaacgatctgcaaccgctctacgagatggcaaagctcacgggcggcggcttcaccaacctgccgcccgatcgcaaggcgctgaccgccaagctcagccgcgctgccgaagcctatgccaattgcgaggaaggcgatccgaagaacccgaaggacgagttgttcgtcctcgtgctggaagacaccgccaccggcgaagtgcgcggcaccgcacagatcttcaccagcgtgggccggcagtggccgttctattcctaccgcatggcgacgctgacccagcattccaaggaactgaaccgcactttccgcgccgagatgctcaaccttgtcaccgacctcgaagggtcgagcgaggtgggcggcctgttcctccacccttccgagcgtgcgggcgggctggggatgctgctggcgcgcagccgctacctgttcatagcgatgcaccggaagcgctttggcgacaagatcctggcggaactgcgcggcgtgatcgacgagcgcggcggatcgcccttctgggacggcgtggcggggcgcttcttcgggatgagcttccaggaagccgactatttcaacgcgatcaacggcaaccagttcatcgccgacctgatgcccaagcaccccgtctacatcgcgatgctgcccgagaccgcccgctcggccatcggcctgccccacccgtcgggccgcgccgcgatgcgcatgctcgaggaggaaggctttgcctatgaaggctatgtcgacatcttcgacggcggcccgacgatgaccgcgcgcaccgaccgcgtccgctcgatctgcgaggcgaaggaagtgacggtcacccacatccgcgcgcccgaaggaaccggcggcgccaccaaggcactcgtcgccacgggccgcctggcggactatcgctgcacttttgcggaagtggccgaagcggatgggggtctcgtactcgatcccgtcgccgccgccgcgctcggcgcaagcgtgggcgacaaggtctggttcgtcggacgctag

SEQ ID NO: 78808 - protein, 345 aa, Novosphingobium aromaticivorans DSM 12444
MTFRIRAARANDLQPLYEMAKLTGGGFTNLPPDRKALTAKLSRAAEAYANCEEGDPKNPKDELFVLVLEDTATGEVRGTAQIFTSVGRQWPFYSYRMATLTQHSKELNRTFRAEMLNLVTDLEGSSEVGGLFLHPSERAGGLGMLLARSRYLFIAMHRKRFGDKILAELRGVIDERGGSPFWDGVAGRFFGMSFQEADYFNAINGNQFIADLMPKHPVYIAMLPETARSAIGLPHPSGRAAMRMLEEEGFAYEGYVDIFDGGPTMTARTDRVRSICEAKEVTVTHIRAPEGTGGATKALVATGRLADYRCTFAEVAEADGGLVLDPVAAAALGASVGDKVWFVGR

SEQ ID NO: 78809 - DNA, 1032 bp, Burkholderia xenovorans LB400
  CDS (1)..(1032): transl_table=11
atgatcgtcgttcgcgttgtgcaacgaggcgatgtggacgcgctgatgcggctcgcgcaggaaaccggcccgggtctgaccactttcaagcccgaccgcgaggcactcgcggcacgcgtggagcgtgcgcgccgcacgatggaagacaaggccgagccgtatgaagccggctacttcttcgtgatggaagacacagataccggcgacgtggccggcgtgtgcggaatcgaaacagcggtgggcctgcaacagccgttctacaactatcgcgtgagcacggtggtgcatgcgagccaggacctcgggatctggacgcgcatgcgcgcgctgaatatctcgcacgacctgacgggttacgcggaagtgtgctcgctgttcctcagcccgcgttatcgcacgagcggcgtgggcggcttgctgtcgcggtcgcgcttcatgtttctcgcgcagtttcgcgagcgctttccgcagcgtctgtgcgcggaattgcgcggccatttcgatgcggaaggcagctcgccgttctggcgcgcggtcggctcgcatttctaccagatcgatttcaacgcggcggactacctgagttcgcacggccgcaaggcgtttctcgccgagctgatgccgcgctacccggtgtatgtcgagttgttgccgcaagaggcgcaggactgcgtcggcctcacacatagcgacacgattccggcgcgccgtatgctcgaagcggaagggctgcgctacgagaatcacgtcgatattttcgatgcgggtccggtgctcgaatgccatatcgccgatttgcgcaccgtgcgcgagagcgtggtggtgccggtcgaaatcggcgagtcgggcgcgccgcaagatgggcggaagtcgatggtatcgaatacctcgttgggcgattttcgcgtcggcgtggtggagggcgtgccgcaggacggtgtgttccgcctcagcgcggccgaggcctcggcactcgacgtcgaggcgggcgacctcgtgcgcgtgctgccgcagaaacacaaacagggatga

SEQ ID NO: 78810 - protein, 343 aa, Burkholderia xenovorans LB400
MIVVRVVQRGDVDALMRLAQETGPGLTTFKPDREALAARVERARRTMEDKAEPYEAGYFFVMEDTDTGDVAGVCGIETAVGLQQPFYNYRVSTVVHASQDLGIWTRMRALNISHDLTGYAEVCSLFLSPRYRTSGVGGLLSRSRFMFLAQFRERFPQRLCAELRGHFDAEGSSPFWRAVGSHFYQIDFNAADYLSSHGRKAFLAELMPRYPVYVELLPQEAQDCVGLTHSDTIPARRMLEAEGLRYENHVDIFDAGPVLECHIADLRTVRESVVVPVEIGESGAPQDGRKSMVSNTSLGDFRVGVVEGVPQDGVFRLSAAEASALDVEAGDLVRVLPQKHKQG

SEQ ID NO: 78811 - DNA, 1026 bp, Myxococcus xanthus DK 1622
  CDS (1)..(1026): transl_table=11
atgcttgtcctgcgtgacgtccagaagaccgacctgcccgggctcaaaaggctcgcggccgtgctgaacacggtgaacctgccgaacaacgaggaaacgctgtcggccatcgtggacacgtcggtgaagagcttcgcgggcaaggtgaagaaccccttcgagcgcgagtacctcttcgtgctcgaagacgtgcgcaacagcctcatcatcggcacgtcgatgatcatcgcgcagcacggcacctatgaggctccgcacatctattacgaggtgagcgagcgcgagcactactccgcgtccctctcccgtcaccttcgccacaaggtcctctccatcgcctacaactacgagggccccaccgaggtgggcggcctcgtcgtggacccgccctaccgcgccacgccggacaagcccggcaagcagctgtcctacgggcgcttcctcttcatcgccatgcaccggcggctcttccgccctcgcgtgctggcggagctgctgccgccgctgctgccggacggccgcagcctcttgtgggaggcctgcggcaagaagttcaccggcctcacctaccaggaggcggaccgcctcagccggcagaacaaggagttcatcaaggagctcttccccgcctcggacatctacgcgtcgctcttccccgcgcgcgtacagaaggtcctgggcgaggtgggcccgcagacgcgcggcgtgcagcgcatgctggagcgcatcggcttcaagtacatggagcgcatcgacccgttcgacggcggtccccacttcgaggccgacaccgccgacatctccctggtgcgcaagttccgtacgctcaaggtggcggaggaggacttcgacctggagggggatgacgtcctcgtcgcggcggagaatgactccggccgcaaccgtttccgcgccgtgcgctgccaggcccggctggagaacacccaggccttcctgcccgcgcgagccaaggaggtcctggacatccaggccggcgcgaaggtgtccatcatccccttcgaataa

SEQ ID NO: 78812 - protein, 341 aa, Myxococcus xanthus DK 1622
MLVLRDVQKTDLPGLKRLAAVLNTVNLPNNEETLSAIVDTSVKSFAGKVKNPFEREYLFVLEDVRNSLIIGTSMIIAQHGTYEAPHIYYEVSEREHYSASLSRHLRHKVLSIAYNYEGPTEVGGLVVDPPYRATPDKPGKQLSYGRFLFIAMHRRLFRPRVLAELLPPLLPDGRSLLWEACGKKFTGLTYQEADRLSRQNKEFIKELFPASDIYASLFPARVQKVLGEVGPQTRGVQRMLERIGFKYMERIDPFDGGPHFEADTADISLVRKFRTLKVAEEDFDLEGDDVLVAAENDSGRNRFRAVRCQARLENTQAFLPARAKEVLDIQAGAKVSIIPFE

SEQ ID NO: 78813 - DNA, 1020 bp, Shewanella sp. MR-7
  CDS (1)..(1020): transl_table=11
atgttaatcatacgtcctattcaggcaggcgattttgaatctctatatcaaatcgccgaagaatctggccatggctttacctcattgccagtcaatgccgatttgctaaggcataaaattgcccgcgcagaagcctcattcgttaaggtgattgataagcccttcgatgaaggctatttgatggtgctcgaggataccgcgactcgtgaagtggtcgggacctgtgccattgaagccgccgtgggtatggaagatgccttctaccactaccgcctcgggaccgaggtctatcattctgaacaaatcgaagttcgcaacgaggtggaaaccttaaccctgtgccacgattacactggcgccgccgaactttgtaccctgtttttgcgtgagggttatcgcaaagggaataatggtcggatgttgtcgcgcagccgttttctgtttttggcacagcacgctaaacgctttggtgagacagtgattgccgaaatgcgtggcgtgagcgattcccatggcaattctcccttctactgctggttacagaaaaacttcttaggcattgattttattcaggcagattacctgtcgggtctaggcaaaaaagcctttatggcggagatgatgccccgcaaccctgtgtatgtttgcctgctgcctgaagaagcgcaaaaagtgattggcgaagtacacaccaatacgcgtcctgccttgagtctgttgcaggcggaaggctttagatgccgtggttatgtggatattttcgatggcggtccaacggtggaatgccgtctcaccgatatccgcgccgtgcgagagagccgtctgctgaccgtagatattggtgaaatgcctgaatccgataagcaatttattgtctctaacactcaattagccaattaccgtgcgacctccgcttgtcttgctgtcgatgacaaaactgagcaggtggtaattagtccagaactcgccgagggtttgttactcgcaaaaggcgatcaaatccgtattttggcaatgtag

SEQ ID NO: 78814 - protein, 339 aa, Shewanella sp. MR-7
MLIIRPIQAGDFESLYQIAEESGHGFTSLPVNADLLRHKIARAEASFVKVIDKPFDEGYLMVLEDTATREVVGTCAIEAAVGMEDAFYHYRLGTEVYHSEQIEVRNEVETLTLCHDYTGAAELCTLFLREGYRKGNNGRMLSRSRFLFLAQHAKRFGETVIAEMRGVSDSHGNSPFYCWLQKNFLGIDFIQADYLSGLGKKAFMAEMMPRNPVYVCLLPEEAQKVIGEVHTNTRPALSLLQAEGFRCRGYVDIFDGGPTVECRLTDIRAVRESRLLTVDIGEMPESDKQFIVSNTQLANYRATSACLAVDDKTEQVVISPELAEGLLLAKGDQIRILAM

SEQ ID NO: 78815 - DNA, 1041 bp, Hyphomonas neptunium ATCC 15444
  CDS (1)..(1041): transl_table=11
atgacaaccgaatatgtgatgcgtccttcaaggctcgatgatctcgaggccctgatggggctggcggaattgtccggccctggatttaccagcttgccggtcgatgagcccatcctgatggagcggctcgaaaaatccgagcgggcatttcatggacggcagcagaatcttcagtacggaaagtatctgatgatgatggagcatgtgcccaccggcaaggtggttggctgctccgccgtgaaagccggcaccgggattgatcagcccttcttcaactatcgcatcatcacactggcgcaggcgagccatgcggcaggaaacctccgctttgatatggacgcgcttatcctgacgaatgaatatgtcggctacacggaagtcggcacattgtttctcaagccggatcaccggggagggggcgcgggccgcctcgccgcgcaatcacggtatcttctgatggcggctgccccggagcgcttcagcgaccgcgtactggccgaacttcgcggcgtggtggatgataccggcgagtcgcccttctgggagtgtctgggccggcacttcttccggatggacttcgccgaggctgaccgcctttcggcgacgaccgacaaccagttcatcgtcgacctgatgccgcgctacccggtctatgttgacctgctcccgccagaggcgcgcgaagtcatcggtcggtgccattctgaaggcgttggcgcctacaagctgctgcagtgggaaggcttcgagttcgaccggacggtcgacatctttgatggcggtccgctggtcgcggcccagaggcgtcatatccgcacgatccaggaaagccgcgttgttacggtagaggccggcgaggtagaaggcgacaaggatgcgcgccagggtatgctgtcgagcaaccgtctgccggatttccgtgtctgtctcggaaaatttgtgcgacggggcgacagcggtttggtggcgtctgcggaaatccttgaagcattgcggctgaaacctggcatgccggcaaggatctgggtacggagtaagtaa

SEQ ID NO: 78816 - protein, 346 aa, Hyphomonas neptunium ATCC 15444
MTTEYVMRPSRLDDLEALMGLAELSGPGFTSLPVDEPILMERLEKSERAFHGRQQNLQYGKYLMMMEHVPTGKVVGCSAVKAGTGIDQPFFNYRIITLAQASHAAGNLRFDMDALILTNEYVGYTEVGTLFLKPDHRGGGAGRLAAQSRYLLMAAAPERFSDRVLAELRGVVDDTGESPFWECLGRHFFRMDFAEADRLSATTDNQFIVDLMPRYPVYVDLLPPEAREVIGRCHSEGVGAYKLLQWEGFEFDRTVDIFDGGPLVAAQRRHIRTIQESRVVTVEAGEVEGDKDARQGMLSSNRLPDFRVCLGKFVRRGDSGLVASAEILEALRLKPGMPARIWVRSK

SEQ ID NO: 78817 - DNA, 1023 bp, Pseudomonas aeruginosa UCBPP-PA14
  CDS (1)..(1023): transl_table=11
atgatcgtacgtcctgttaccagcgccgacctgccggccctgatcgagctggcgcgcagcaccggcaccggcctgaccaccctgccggccaacgagcagcgcctgcagcatcgcgtcagttgggccgagaaggccttccgtggcgaggccgaacgcggcgacgccgactacctgttcgtcctcgaggacgacgccggcaaggtcgtcggcatctccgccatcgccggagcggtagggcttcgcgaaccctggtacaactaccgggtcggcctcaccgtgagcgcctcgcaggaactcaacatccatcgcgagatccccacgctgttcctggccaacgacctgaccggcaattccgagctgtgctcgctgttcctccacgccgaccaccgcagcggcctcaacggcaagctgctgtcgcgcgcgcgcttcctgttcatcgccgaattccgccacctgttcggcgacaagctgatcgccgagatgcgcggcatgtccgacgaggaggggcgttcgccattctgggaaagcctcggccggcacttcttcaagatggaattctcccaggccgactacctcaccggggtcggcaacaaggccttcatcgccgagctgatgccgaagttcccgctctacacctgcttcctctccgaggaggcgcgcggggtgattggccgcgtccatccgaacaccgagccggcgttggccatgctcaaggccgagggcttcagctaccagggctacgtcgacatcttcgacgccggcccggcgatcgaggccgagaccgacaagatccgcgccatcgccgagagccagaacctggtgctggcggtgggcactcccggcgacgacgccgagccctacctgatccacaaccgcaagcgcgaagactgtcgcatcaccgccgcgccggcgcgggccgccgccggcaccctggtggtcgatccgctgaccgccaagcgcctgcgcctgtcggccggcgcctcggtacgcgcggtgccgctgtcggcgcagaagcgcgcttga

SEQ ID NO: 78818 - protein, 340 aa, Pseudomonas aeruginosa UCBPP-PA14
MIVRPVTSADLPALIELARSTGTGLTTLPANEQRLQHRVSWAEKAFRGEAERGDADYLFVLEDDAGKVVGISAIAGAVGLREPWYNYRVGLTVSASQELNIHREIPTLFLANDLTGNSELCSLFLHADHRSGLNGKLLSRARFLFIAEFRHLFGDKLIAEMRGMSDEEGRSPFWESLGRHFFKMEFSQADYLTGVGNKAFIAELMPKFPLYTCFLSEEARGVIGRVHPNTEPALAMLKAEGFSYQGYVDIFDAGPAIEAETDKIRAIAESQNLVLAVGTPGDDAEPYLIHNRKREDCRITAAPARAAAGTLVVDPLTAKRLRLSAGASVRAVPLSAQKRA

SEQ ID NO: 78819 - DNA, 1017 bp, Erythrobacter sp. NAP1
  CDS (1)..(1017): transl_table=11
ttgacctatcgcctgcgcgctgcgcgtacatcggatctcgaacatctttacgagatggcaaagctgaccggcggcgggttcaccaacctgcccccggatcgccccgccctcaccgccaagcttgagcgcgccgctgaggcctttgccaacaccgacaacgagctggccgacgaacagttcgtcctggtgcttgaaaacctctcgacccgcaaagtggtggggacgtgccagctgatgaccaaggtcgggcagcaatggccgttctactcctatcggctcaacacgctgacccagtacagcgccgaacttgaccgcacggtgcgcgctgaactcctcagcctggttaccgaccttgagggatcgagcgaggttggcggtctcttccttcaccccaacgaacgagccgggggcctcggcctgcttctcgcacgcagccgctatctcttcgtcgcgatgcaccgcaagcgctttgctgatcgcatcctcgcagagcttcgcgggatcatcgacgaacgcggcggctcgcctttctgggacggcgttgcggggcgttttttcggcatgagcttccaggaagccgactatttcaacgcgatcaacggcaaccagttcatcgccgacctgatgcccaagcacccggtctatgtctcgatgctttccgaggacgcgcgcagcgttatcggtgtccctcacccgaccgggcgcgccgcgatgcggatgctcgagaacgagaatttccactatgacggctatgtggacatcttcgacggcgggccgagcatggtcgcgcgcaccgacgatgtgaccagcgtcaagaactcggtcgaagccaagctggtcagttgcgaccttggcgaaggcgagcgcgcgatccttgcaaccggacggcttgagacgttccgcgcctgttacggcgcgcgccagctcgacggtgaaggcggcgtggcaatcgatgcggcggctgccgatgcgctcgacgtgagcgaaggcgacacggtgtggagcgttgcgcgatga

SEQ ID NO: 78820 - protein, 338 aa, Erythrobacter sp. NAP1
MTYRLRAARTSDLEHLYEMAKLTGGGFTNLPPDRPALTAKLERAAEAFANTDNELADEQFVLVLENLSTRKVVGTCQLMTKVGQQWPFYSYRLNTLTQYSAELDRTVRAELLSLVTDLEGSSEVGGLFLHPNERAGGLGLLLARSRYLFVAMHRKRFADRILAELRGIIDERGGSPFWDGVAGRFFGMSFQEADYFNAINGNQFIADLMPKHPVYVSMLSEDARSVIGVPHPTGRAAMRMLENENFHYDGYVDIFDGGPSMVARTDDVTSVKNSVEAKLVSCDLGEGERAILATGRLETFRACYGARQLDGEGGVAIDAAAADALDVSEGDTVWSVAR

SEQ ID NO: 78821 - DNA, 1020 bp, Pseudoalteromonas tunicata D2
  CDS (1)..(1020): transl_table=11
atgcaagttattcgtcccatcaaaagcagcgattttgctgcactaaaacaaatagcaattgattctggtcatgggtttacttctttgcccgtcaatgatgagctattaattagcaaaataacccgctcagaacatagttttgcgcaagcggtgcaaacgcacggcgatcaaggttatttatttgttttagaagatacccatagcggcaaaataattggtactacagcaattgaagcaactgtaggtatgaacgtgccgctttatcattaccatcgcggtaaaatggttcaccactcgccaactcttgatgtttacaacacagtagaaacactgactatgtgtaacgactacacaggttcgagcgagatttgtactttgtttttaaatgaagcctaccgtaaaggcagtgcgggtcggttattatctcgggtgcgttttttgtttatggcagagcatcctgagcgttttgccgataccgttattgcagaaatgcgtggtgtgtctgatgaagaaggtcattcacctttttggcaatggttacaagatcacttttttaccattgattttccaactgccgaccatctaataggcataggcaacaaagtatttatttctgaattgatgccaaaacatccaatttatgccaatttactgggtgaagaagcacaagctgtaatcggacaagtccacgaaaaaacaaaacccgctttaaaattacttgaaaaagaagggtttgaacaccgtggttatgttgatttgtttgatgcaggcccaaccgttgaagcaaaactaaaatcaattaaaacggtacaacaaagcctgtcttggccatgtaaaatcacagaagttcaaggcaatcaacaggttgctgtttgcaaccaagaaattgaaggctttcgtgctttagtgagcgaccaaatacacatcgatgagcttcagaatctcctcttaatcagccctgcggttgctgatgcgctgcacgttaccgatggtgactgcgttcgttttattcaattttaa

SEQ ID NO: 78822 - protein, 339 aa, Pseudoalteromonas tunicata D2
MQVIRPIKSSDFAALKQIAIDSGHGFTSLPVNDELLISKITRSEHSFAQAVQTHGDQGYLFVLEDTHSGKIIGTTAIEATVGMNVPLYHYHRGKMVHHSPTLDVYNTVETLTMCNDYTGSSEICTLFLNEAYRKGSAGRLLSRVRFLFMAEHPERFADTVIAEMRGVSDEEGHSPFWQWLQDHFFTIDFPTADHLIGIGNKVFISELMPKHPIYANLLGEEAQAVIGQVHEKTKPALKLLEKEGFEHRGYVDLFDAGPTVEAKLKSIKTVQQSLSWPCKITEVQGNQQVAVCNQEIEGFRALVSDQIHIDELQNLLLISPAVADALHVTDGDCVRFIQF

SEQ ID NO: 78823 - DNA, 1017 bp, Photobacterium sp. SKA34
  CDS (1)..(1017): transl_table=11
atgctggttattcgtcctatcatcgctgatgattattctgcactcatgcagtgcgctgaagaatcgggtcatggttttacttcattacctgttaacgaagaaatgcttcgtaaccgcatcgctcattcagagcgtagctttgcaaaacatgtcgttcgcccagaggatgaaggctacctgatggtcgctgaagatacagataccggcgagatagcaggtaccacagccattgaagcgtcgattggcttagaagcccctttttataactatcatctaagtactgtggttcatgcctcgcgtcgattaggggtgcacaataccgtacagttattgacattaggtaatcactacaccggagataccgagctttgtacattatttttacgtacaccgtggcgtgaaggtttaaatggtcgtctattgtctaaagcgcgctttttaatgatggcagagcatcgtcatcgtttcgctgatgtggtatttgccgaaatgcgcggtgtttccgatgaaaaagggaactcacctttttggcaatggctaaaagataactttttctcgattgattttattcatgctgattatctaacgggtataggagcaaaaggctttattgcggacttaatgcctaaacttccgatatacgtcaatttactgagccaagaagcccaagcggtcatcggtcaagttcatgacaacactcgtcctgcattacgcttgctagaaaatgaaggtttttcatgccgtggttatgtcgatatttttgatgcaggccctacggttgaatgtgatgtacgtaatgtggaaacggttcgccattcaaagcgttatatcgttgaaattaacgatcatcaaagtgaacagcagtgcttagtagcgaatacatcatttactgattttcgtgctgttgcgagcccactggaaattaatgataaagcgcaaaccgtggttatgacgcaagaggtcgcagatactctcatggttaatacaggtgagcctgtgcgttttattgagctgtaa

SEQ ID NO: 78824 - protein, 338 aa, Photobacterium sp. SKA34
MLVIRPIIADDYSALMQCAEESGHGFTSLPVNEEMLRNRIAHSERSFAKHVVRPEDEGYLMVAEDTDTGEIAGTTAIEASIGLEAPFYNYHLSTVVHASRRLGVHNTVQLLTLGNHYTGDTELCTLFLRTPWREGLNGRLLSKARFLMMAEHRHRFADVVFAEMRGVSDEKGNSPFWQWLKDNFFSIDFIHADYLTGIGAKGFIADLMPKLPIYVNLLSQEAQAVIGQVHDNTRPALRLLENEGFSCRGYVDIFDAGPTVECDVRNVETVRHSKRYIVEINDHQSEQQCLVANTSFTDFRAVASPLEINDKAQTVVMTQEVADTLMVNTGEPVRFIEL

SEQ ID NO: 78825 - DNA, 1032 bp, Oceanospirillum sp. MED92
  CDS (1)..(1032): transl_table=11
atgtactacattcgcccgatagccattgaagatctggataccttacatcagatcgctgttgaatctggacccggctttacgtcattgccggaaaatacagaactgctgcaaaaaaagattgaacgcagtacacaagccctggctcgagatctggatcgccctggcgcacaaagctatctctttgtgcttgtggacagcgagaccgatcaggtcgtggggaccactggcattgaagcctcagtcgggctcgatgctccctggtatcactaccgactaggcaccgtggtacatgcatcgcgagaactggatatccacaatcgcttcaatacgctatacctgtgtaatgattacaccggctgtagtgaagtctgcacactttacctgaaacccgatcatcgtcattcacaaaatggcagcctgctctctaaaagccgttttctatttatggctgaacacccgcaacggttttctgaacgcgttatcgcggagatgcgaggctactctgacgaacacgggcgttctcccttctgggaaggtctggggagaaagttctttgcgatggattattccgaagcggattatctgaccggttcagggaacaaggtctttatcgccgaattaatgcccaaatacacaatctacctccatctcctgccggaggaggctcagcaggtcatcggcagggttcataccaatacggaacccgccaagagaatgctggaaaatgaaggtttccgcttcgagaactatgtggatatctttgatgccggacctacgattaccgcgcctttagagaaaatcagagccatacgcgaaagccgctatgcaaaagtcaggctgatcgacaaggcggaagaaacacctgaccacatccattttctgctaagtaatactcaggctaacgggttcagatgttgtttgagctccctttatgaacgccagggaattgccgaactcagccgggaatacgcggacctgttacaggtcaaaaataatgacaccatcaggctcgttgagctgaaaggacgttga

SEQ ID NO: 78826 - protein, 343 aa, Oceanospirillum sp. MED92
MYYIRPIAIEDLDTLHQIAVESGPGFTSLPENTELLQKKIERSTQALARDLDRPGAQSYLFVLVDSETDQVVGTTGIEASVGLDAPWYHYRLGTVVHASRELDIHNRFNTLYLCNDYTGCSEVCTLYLKPDHRHSQNGSLLSKSRFLFMAEHPQRFSERVIAEMRGYSDEHGRSPFWEGLGRKFFAMDYSEADYLTGSGNKVFIAELMPKYTIYLHLLPEEAQQVIGRVHTNTEPAKRMLENEGFRFENYVDIFDAGPTITAPLEKIRAIRESRYAKVRLIDKAEETPDHIHFLLSNTQANGFRCCLSSLYERQGIAELSREYADLLQVKNNDTIRLVELKGR

SEQ ID NO: 78827 - DNA, 1029 bp, Oceanobacter sp. RED65
  CDS (1)..(1029): transl_table=11
atgttaatcattcgccccgtacaagcagacgacctgcaagacttattagagcttgcagtgaaggctggtaaaggcatgacctctttaccagaagatccggatacgctctcagaaaaaattcaaaaatccattgatagcttcaaacgtagcgagccagatgacgatgattttttttggttagtgatggaagacctcgaccgaaagaaagtggtcggaacttcaggtgtttatgctcgcacaggaacccgccaagcgttttatgcctatcgcttaattagtcaaaatcactacagccatactttaaatcgccaagtgcgcagcgaaatgttacagctaagtaacgattacacagattgctccgaagttggcaccttgttcctcgatcccgaataccgtggcaacggccattggttagcgaaatctcgttacttactcatgggtcaattccctgagcgttttgcgccctatgtgatcgctgaattacgcggttggtcagatgaaaccggacgtagtcctttttgggacgccttgggccgacactttttcgaaatggactttgacgaagccgatacgttatgcggcgtaagcaataaccaattcataaccgaattaatgcctaagcatcccatctataccaagttactcccgcaagaagcgcaagacgtgattggtcaacccatggatgcggggcgtcgtgctatggaattactcgaagaggagggtttcacttacgacaaagtcgtcgatatttttgatgctggtccaatactacgtgggcgcattgaccagttacaaaccattagaaagatggaccagggtttagccgcagttagtgacgagcacatgctaactagtccaactatgatcgcaaccagttcgctcaaacacttccgtgtaattcatcaaccaatgatacgcacaggcgctgggcaagtgaagcttgcagcagaacatttgaaagcactcgacgtaaacgcaggcgctctattgcgttacgtacctaaattttcgaaatcccgttttcactaa

SEQ ID NO: 78828 - protein, 342 aa, Oceanobacter sp. RED65
MLIIRPVQADDLQDLLELAVKAGKGMTSLPEDPDTLSEKIQKSIDSFKRSEPDDDDFFWLVMEDLDRKKVVGTSGVYARTGTRQAFYAYRLISQNHYSHTLNRQVRSEMLQLSNDYTDCSEVGTLFLDPEYRGNGHWLAKSRYLLMGQFPERFAPYVIAELRGWSDETGRSPFWDALGRHFFEMDFDEADTLCGVSNNQFITELMPKHPIYTKLLPQEAQDVIGQPMDAGRRAMELLEEEGFTYDKVVDIFDAGPILRGRIDQLQTIRKMDQGLAAVSDEHMLTSPTMIATSSLKHFRVIHQPMIRTGAGQVKLAAEHLKALDVNAGALLRYVPKFSKSRFH

SEQ ID NO: 78829 - DNA, 1014 bp, Alteromonadales bacterium TW-7
  CDS (1)..(1014): transl_table=11
atgatccttcgcccaatccagcaaaatgattattcagcattactgacaatcgcccacgaatcgggccatggttttacatctttgcctttaaacgaagagctattacaaaagaagattgaccattcagtaagctcatttgctaaacaaacgtcacaacccggtgacgaaggctacttgtttgttcttgaagatagcgaaacaggtgaagtagtaggtacctcggcaatagaagctgctgtgggcctagatgatgcgttttatcattaccatttaagtaaagtaattcattcttcgcgcacactagacgtttacaaagcggttgatattttaacgctatgtaacgactacactggcgcaacagagctgtgcaccttgtttttgaaagacggctatcgcaaaaactgtaacggcaaactgctgtctaaagcacgctttatgtttattaaacaacaccaagcacgctttgcagaaaccgttattgcagaaatgcgcggtgtgtctgatgaaaacggcaatagcccgttttggaagtggttagaagaacactttttctcaatggacttcccaacagcagattacttaactggtattggccaaaaagtatttattgctgaactgatgcctaaatacccaatttacgtcaatttattgagtaaagatgcgcaagcggtaatcggtcaagttcacaacaatactcgcccagcgattgaattattaaaaagcgaaggcttcacgtttaacggctacgtcgatatttttgacgcaggtccaacagttgaagcaaaagtagataatatagctacagtacgtaactcacacgactttattgttgaaattggtgagaaaacgggcgacaccatggtgttattagcaaacgacaagctcgaaaacttcagagcgaccgttgcatcaatgagtttcgacgaacgcgctaaaaccgttgtgttatcacaacaagtagccgacgccctgcaattacaaacgggtgatactgttagcgcaaccccagtttaa

SEQ ID NO: 78830 - protein, 337 aa, Alteromonadales bacterium TW-7
MILRPIQQNDYSALLTIAHESGHGFTSLPLNEELLQKKIDHSVSSFAKQTSQPGDEGYLFVLEDSETGEVVGTSAIEAAVGLDDAFYHYHLSKVIHSSRTLDVYKAVDILTLCNDYTGATELCTLFLKDGYRKNCNGKLLSKARFMFIKQHQARFAETVIAEMRGVSDENGNSPFWKWLEEHFFSMDFPTADYLTGIGQKVFIAELMPKYPIYVNLLSKDAQAVIGQVHNNTRPAIELLKSEGFTFNGYVDIFDAGPTVEAKVDNIATVRNSHDFIVEIGEKTGDTMVLLANDKLENFRATVASMSFDERAKTVVLSQQVADALQLQTGDTVSATPV

SEQ ID NO: 78831 - DNA, 1020 bp, Pseudomonas putida GB-1
  CDS (1)..(1020): transl_table=11
atgctggtgatgcgccccgcgcaaatggctgatctgaacgaagtgcagcgcatggctgcagacagccccattggtgtcacctcgctgccggacgacactgctcgcctgggcgacaagattgccgcctccgagacatccttcgccgccgaggtcagcttcaacggtgaagaaagctactttttcgtgctcgaagacagtaacaccgggaagctggtcggctgttcggccatcgtcgcttcggccggctactccgagccgttctacagctttcgtaacgagaccttcgtgcacgcctcgcgcgagctgaagatccacaacaagatccacgtgctgtcgctgtgccacgatttgaccggcaacagcttgttgaccagcttctatgtgttgccggagttggtgaacagtggctgggccgagctcaactcgcgcggtcgcctgctgttcatggccgcgcacccggaacgcttcgccgactcggtggtaaccgaaatcgtcggttacagcgacgaacagggcgaatcgccgttctgggatgccatcggccgcaatttcttcgacctcaactatgcccacgccgaacgcctgtgcgggctcaagagccgtaccttcctcgccgagctgatgccgcactacccaatctacgtgccgctgctgcctgacttggcgcaggaagccatgggccaggtgcacccgcgcgcgcaaatcaccttcgacatcctcatgcgtgaaggcttcgagaccgagcactacatcgacattttcgacggcggcccgaccttgcacgcacgcacctcgggtattcgctcgatcgcccagagccgggtggcgccggtgaaaatcgaagacgccccggtcaagggcgggcgcccgtacctggtgtgcaacggccagttgcaggactaccgcgcggtgctgctggacctcgactgggtgcccggcaagccggtcagcctgagcgtggctgcagccgacgcgctgggcgtgggcgagggcgccagcgtgcgcctggtcgcggtctga

SEQ ID NO: 78832 - protein, 339 aa, Pseudomonas putida GB-1
MLVMRPAQMADLNEVQRMAADSPIGVTSLPDDTARLGDKIAASETSFAAEVSFNGEESYFFVLEDSNTGKLVGCSAIVASAGYSEPFYSFRNETFVHASRELKIHNKIHVLSLCHDLTGNSLLTSFYVLPELVNSGWAELNSRGRLLFMAAHPERFADSVVTEIVGYSDEQGESPFWDAIGRNFFDLNYAHAERLCGLKSRTFLAELMPHYPIYVPLLPDLAQEAMGQVHPRAQITFDILMREGFETEHYIDIFDGGPTLHARTSGIRSIAQSRVAPVKIEDAPVKGGRPYLVCNGQLQDYRAVLLDLDWVPGKPVSLSVAAADALGVGEGASVRLVAV

SEQ ID NO: 78833 - DNA, 1029 bp, Pseudomonas putida GB-1
  CDS (1)..(1029): transl_table=11
atgatcgttcgtcctgtacgcagcagcgatttgcctgcgttgatcgaattggcacgcagcaccggcaccaccgggctgaccacgctgccggccaacgaagaacgcctggggcatcgcgttggctgggcggaaaaaagcttccgcggcgaagcggagcgtggcgacaccgactacctgttcgtgctggaaaacgacgaaggcctggtggtgggcatcagtgccattgccggtgccgtaggcctgcgcgagccgtggtacaactaccgggtcggccttacggtcagcgcctcgcaggaactgaagatctaccgcgaaatcccgacgctgttcctggccaacgacctgaccggcaattccgagctgtgctcgctgttcctgcgcagcgactaccgctctggcctcaatggccgcctgctgtcgcgcgcacgtatgctgttcattgccgagttcccagagttgttcggcaagaagatcattgccgaaatgcgcggtatgtctgacgaacagggccgttcacctttctgggaaagcctgggccggcacttcttcaagatggagttcagccaggccgactacttgacgggcgtgggcaacaagtcgttcattgccgaactgatgcccaagttcccgctgtacacctgcttcctgtccgaggcagcgcgcaacgtgatcggccgcgtgcacaaagacaccgagccggcgttggcgatgctcaagcaggagggcttcaactaccagggctacgtcgatatcttcgatgcgggcccggccatcgaatgcgacaccgccaagatccgcgccgtgcgcgagagccagaccctggtgctggcggtagggacgccaggcgatgacgccacccctttcatcatccacaaccgcaagcgcgacgactgccgtatcacggctgcacctgcgcggctggcagccggcaccctggtggtcgacccgctgaccgccaagcgcctgcgcatgggcgctggcgacaatgtgcgcgccgtgccgctgtcggcaagccgggaggcccagtaa

SEQ ID NO: 78834 - protein, 342 aa, Pseudomonas putida GB-1
MIVRPVRSSDLPALIELARSTGTTGLTTLPANEERLGHRVGWAEKSFRGEAERGDTDYLFVLENDEGLVVGISAIAGAVGLREPWYNYRVGLTVSASQELKIYREIPTLFLANDLTGNSELCSLFLRSDYRSGLNGRLLSRARMLFIAEFPELFGKKIIAEMRGMSDEQGRSPFWESLGRHFFKMEFSQADYLTGVGNKSFIAELMPKFPLYTCFLSEAARNVIGRVHKDTEPALAMLKQEGFNYQGYVDIFDAGPAIECDTAKIRAVRESQTLVLAVGTPGDDATPFIIHNRKRDDCRITAAPARLAAGTLVVDPLTAKRLRMGAGDNVRAVPLSASREAQ

SEQ ID NO: 78835 - DNA, 1074 bp, Marinobacter sp. ELB17
  CDS (1)..(1074): transl_table=11
atgctgctgatacgcccattagttgaccgtgaccttgatgccctgtacaccatggcggaacatgcgggcaagggcctgacctcgctgccggcagaccgtggcctgttgcagcagaaaatcgatctggcgggaaacagttttaaccagcgttgcgcccccgaaacggcgctgtatctgtttgctcttgaggacactacaacaggtcaagcggtcggagtaagcggaatacaggcgagggttggccgcgatgaggtgttttacaactatcgcctgagcgttaccgtgaatgcctcgcgggagctgggcgttcacgtgcgaacgcctacgctgcaactgtccaatgacatgaccgacgtaagcgaaatttgctcgctgttgctggcggacacttacaaaggcggcggtaacggcctgctcctgtctcgctgccgatttttgtttttggacgatttccgtaaacagttctctgagaaaatcttcgcggaaatgcggggtgtgagtgatgccgagggcaataacccgctgtgggatgctctgggcagcaagttttttgatatggcgttcagtgaggccgaccgcttgtcgggcatgggcaataaatcctttattgccgagctgatgccgaaatacccgatttacttgtcgatgctgccaagctccgcccgctcggtgattggctgcgtgcacgccaatacggcgccggcgttgaaaatgcttcaggcggagggttttaatttcaacgggctggtggatatttttgacggcggcccggtggtggaaacgtttatcgacagtatccgcacggtacgcgaagcggttgggcgcacggtcaccattacggacacaccggtggccaccgatgtgcccgttaccgagcgtgttattgtggcaaatcgttcgatgcaacatttccgtgcaaccacactgccgcttacctgcgtaaacgccgacacgattgcgttgccgcaagacgttgctgcggcacttcaggttcaggccggcgacacagtgcgcctggcgcctttaaaagacagcggcccgctgcccagacagtcattcaaagccccccaatag

SEQ ID NO: 78836 - protein, 357 aa, Marinobacter sp. ELB17
MLLIRPLVDRDLDALYTMAEHAGKGLTSLPADRGLLQQKIDLAGNSFNQRCAPETALYLFALEDTTTGQAVGVSGIQARVGRDEVFYNYRLSVTVNASRELGVHVRTPTLQLSNDMTDVSEICSLLLADTYKGGGNGLLLSRCRFLFLDDFRKQFSEKIFAEMRGVSDAEGNNPLWDALGSKFFDMAFSEADRLSGMGNKSFIAELMPKYPIYLSMLPSSARSVIGCVHANTAPALKMLQAEGFNFNGLVDIFDGGPVVETFIDSIRTVREAVGRTVTITDTPVATDVPVTERVIVANRSMQHFRATTLPLTCVNADTIALPQDVAAALQVQAGDTVRLAPLKDSGPLPRQSFKAPQ

SEQ ID NO: 78837 - DNA, 1035 bp, Salmonella paratyphi
  CDS (1)..(1035): transl_table=11
atgcgggtgattcgtcctgtcgaacatgcggatatcgccgcgctgatgcagcttgcaggcaaaacgggcggcggcttaacctcgctaccggcaaatgaagcgacgctggcggcccgcattgaacgcgcgctaaaaacttggtccggcgagctgccaaaaggcgaacaagggtatgtatttgttctcgaagacagtgaaacgggtgaggtcggcgggatctgcgccattgaggtcgcggtcggccttaacgacccctggtataactatcgtgtcggtacgctggttcatgcctccaaagagctgaatgtatataacgcgttgccaacattattcctgagtaatgatcacactggcagcagtgagctttgcacgctgtttctcgatcccgaatggcgtaaagagggtaacggctacctgttgtcaaaatcgcgctttatgtttatggccgcgtttcgcgataaattcaatgagaaagtggtggcggaaatgcgcggcgtcattgacgagcacggctattctcccttctggcaaagtctcggcaaacgctttttttctatggatttcagccgggcggattttttatgcggtaccgggcaaaaagcgtttatcgccgagctgatgcccaaacatcctatttatacccacttcttatctgaagaggcacaggccgtgattggcgaagtccacccgcaaacggcgccagcccgcgcggtgctggaaaaggaaggctttcgctatcgccactatatcgacatcttcgacggcgggccgacgctggagtgtgatattgaccgcgtgcgggccattcgtaaaagccgactggtggaagtcgcggaagggcaacccgcgcctggcgactatccggcatgtctggtcgccaatgaaaactatcaccactttcgggccgcgctggtgcgtgccgatccgcagacttcacgacttgtacttaccgccgcgcagttggatgcgctgaaatgtcgcgcgggcgaccacgttcggctggtacgcctttgtgcagaggagaaaaccgtatga

SEQ ID NO: 78838 - protein, 344 aa, Salmonella paratyphi
MRVIRPVEHADIAALMQLAGKTGGGLTSLPANEATLAARIERALKTWSGELPKGEQGYVFVLEDSETGEVGGICAIEVAVGLNDPWYNYRVGTLVHASKELNVYNALPTLFLSNDHTGSSELCTLFLDPEWRKEGNGYLLSKSRFMFMAAFRDKFNEKVVAEMRGVIDEHGYSPFWQSLGKRFFSMDFSRADFLCGTGQKAFIAELMPKHPIYTHFLSEEAQAVIGEVHPQTAPARAVLEKEGFRYRHYIDIFDGGPTLECDIDRVRAIRKSRLVEVAEGQPAPGDYPACLVANENYHHFRAALVRADPQTSRLVLTAAQLDALKCRAGDHVRLVRLCAEEKTV

SEQ ID NO: 78839 - DNA, 1035 bp, Shigella flexneri
  CDS (1)..(1035): transl_table=11
atgatggtcatccgtcccgttgagcgctcagatgtctcggcgctgatgcagcttgccagcaaaacgggcggcggcctgacgtcgcttcccgccaatgaagccacgctttcggcgcgtatcgaaagggcaatcaaaacctggcaaggtgaactgcccaaaagcgagcagggctatgtgttcgtgctggaagatagcgagacaggcaccgtggcggggatttgcgctattgaggtggcggttgggctgaacgatccctggtacaactatcgcgtcggcacgttggttcacgcctcaaaagagctgaatgtctataacgcattgccgacgctgtttcttagtaacgatcacaccggcagcagcgagctgtgcacgctgtttctcgacccggactggcgcaaagagggcaacggctatttgctgtcgaaatcgcgctttatgtttatggcggcttttcgcgacaagtttaatgacaaagtggttgctgaaatgcgcggggtgattgacgaacacggctattcaccgttctggcaaagcctcggtaaacgcttcttttcgatggattttagccgcgccgattttctctgcggcaccgggcaaaaggcatttattgcagaactgatgccgaaacatccgatctatacccactttttatcccaggaagcccaggacgtcatcggtcaggtacatccgcaaaccgcgcctgcccgcgcggtgctggagaaagaaggttttcgttaccgcaactatatcgacatcttcgacggcgggccaacgcttgagtgtgacatcgaccgcgtgcgcgccatccgtaaaagtcggctggtggaagtggcagaagggcagcctgcgcagggcgattttccggcctgcctggtcgccaatgaaaattatcaccatttccgcgtggtgctggcgcgtaccgatccggcaaccgagcgtttgattttaaccgccgcacaactggatgccctcaaatgccacgcaggggatcgcgttcgtctggtgcgcctgtgcgcagaggagaaaacagcatga

SEQ ID NO: 78840 - protein, 344 aa, Shigella flexneri
MMVIRPVERSDVSALMQLASKTGGGLTSLPANEATLSARIERAIKTWQGELPKSEQGYVFVLEDSETGTVAGICAIEVAVGLNDPWYNYRVGTLVHASKELNVYNALPTLFLSNDHTGSSELCTLFLDPDWRKEGNGYLLSKSRFMFMAAFRDKFNDKVVAEMRGVIDEHGYSPFWQSLGKRFFSMDFSRADFLCGTGQKAFIAELMPKHPIYTHFLSQEAQDVIGQVHPQTAPARAVLEKEGFRYRNYIDIFDGGPTLECDIDRVRAIRKSRLVEVAEGQPAQGDFPACLVANENYHHFRVVLARTDPATERLILTAAQLDALKCHAGDRVRLVRLCAEEKTA

SEQ ID NO: 78841 - DNA, 1053 bp, Yersinia pseudotuberculosis
  CDS (1)..(1053): transl_table=11
atgatgaaagtgcgcccggtagagcgccgcgatctggctgatatctttgaactggccggtaaaacaggcgtaggcatgacctctctaccacaaaatgagcaacatctcgccgctcggatagaacgggcattaaatacctggcaaggctctttggatccgggcgaacaaggctatctgtttgtcttggaagatagcgaacagcagaaagtggttggcgtcagtgccattgaagttgctgttggcctgaacgacccttggtataacttccgcgtagggactctggtgcacgcctccaaagcactcaatgtgtataaatcggtgccgacactgtttttgagcaatgatcacacggggtatagcgaactgtgcacgctgtttctcgatcctgattatcgcaaggataaaaatggcccttttttatcaaaagtgcgttttttgtttattgctgcgtttcgccaatatttctcccgcaaagtgattgcagagatgcgcggttataccgatgagcaaggccgttcacccttttgggagagtgtcggccgtcatttcttttccattgagtttgcgaaagcagattatctcagtggcacagggcagaaagcctttattgctgagttgatgcccaaacacccgttgtatgtggattttctggcggaagaagcccgggcggtcatcggtcaggttcatcctcacaccgcgcctgcccgtgcagtgctggaaaccgaggggctgcaatatcagggttacgtggatatctttgatggtgggccaacattggaagccaacacggatgatgtgcgtgcggtacgcgatagcagcaaacgtactgtcgttatcaaggattatgatatcgaggattacgatatcgatcccaacggtcggctttatctcgtggctaacgaccattatcaccatttccgcgccatattaatgaatactcatctctccgacgaacggctgcgtttaacccccgagagtgccgaggcactgggggttgctgccggtgattcggttcgaatagtgagcctctttgccccggagacaaaacgatga

SEQ ID NO: 78842 - protein, 350 aa, Yersinia pseudotuberculosis
MMKVRPVERRDLADIFELAGKTGVGMTSLPQNEQHLAARIERALNTWQGSLDPGEQGYLFVLEDSEQQKVVGVSAIEVAVGLNDPWYNFRVGTLVHASKALNVYKSVPTLFLSNDHTGYSELCTLFLDPDYRKDKNGPFLSKVRFLFIAAFRQYFSRKVIAEMRGYTDEQGRSPFWESVGRHFFSIEFAKADYLSGTGQKAFIAELMPKHPLYVDFLAEEARAVIGQVHPHTAPARAVLETEGLQYQGYVDIFDGGPTLEANTDDVRAVRDSSKRTVVIKDYDIEDYDIDPNGRLYLVANDHYHHFRAILMNTHLSDERLRLTPESAEALGVAAGDSVRIVSLFAPETKR

SEQ ID NO: 78843 - DNA, 21 bp, Artificial sequence
  primer
atgatggtcatccgtcccgtt

SEQ ID NO: 78844 - DNA, 25 bp, Artificial sequence
  primer
ttatgctgttttctcctctgcgcac

SEQ ID NO: 78845 - protein, 350 aa, Artificial sequence
  consensus sequence
  Variant (2)..(6): Xaa in position 2 to 6 is any amino acid
  Variant (8)..(10): Xaa in position 8 to 10 is any amino acid
  Variant (12)..(14): Xaa in position 12 to 14 is any amino acid
  Variant (16)..(16): Xaa in position 16 is any amino acid
  Variant (17)..(20): Xaa in position 17 to 20 is any or no amino acid
  Variant (22)..(22): Xaa in position 22 is any amino acid
  Variant (23)..(23): Xaa in position 23 is any or no amino acid
  Variant (25)..(25): Xaa in position 25 is any amino acid
  Variant (27)..(27): Xaa in position 27 is any amino acid
  Variant (30)..(34): Xaa in position 30 to 34 is any amino acid
  Variant (36)..(56): Xaa in position 36 to 56 is any amino acid
  Variant (57)..(61): Xaa in position 57 to 61 is any or no amino acid
  Variant (63)..(64): Xaa in position 63 to 64 is any amino acid
  Variant (66)..(66): Xaa in position 66 is any amino acid
  Variant (69)..(74): Xaa in position 69 to 74 is any amino acid
  Variant (75)..(75): Xaa in position 75 is any or no amino acid
  Variant (77)..(79): Xaa in position 77 to 79 is any amino acid
  Variant (81)..(84): Xaa in position 81 to 84 is any amino acid
  Variant (86)..(88): Xaa in position 86 to 88 is any amino acid
  Variant (89)..(89): Xaa in position 89 is any or no amino acid
  Variant (91)..(91): Xaa in position 91 is any amino acid
  Variant (93)..(93): Xaa in position 93 is any amino acid
  Variant (95)..(102): Xaa in position 95 to 102 is any amino acid
  Variant (104)..(105): Xaa in position 104 to 105 is any amino acid
  Variant (107)..(114): Xaa in position 107 to 114 is any amino acid
  Variant (115)..(115): Xaa in position 115 is any or no amino acid
  Variant (117)..(117): Xaa in position 117 is any amino acid
  Variant (119)..(120): Xaa in position 119 to 120 is any amino acid
  Variant (122)..(122): Xaa in position 122 is any amino acid
  Variant (125)..(126): Xaa in position 125 to 126 is any amino acid
  Variant (128)..(130): Xaa in position 128 to 130 is any amino acid
  Variant (134)..(137): Xaa in position 134 to 137 is any amino acid
  Variant (139)..(140): Xaa in position 139 to 140 is any amino acid
  Variant (141)..(144): Xaa in position 141 to 144 is any or no amino acid
  Variant (146)..(146): Xaa in position 146 is any amino acid
  Variant (150)..(151): Xaa in position 150 to 151 is any amino acid
  Variant (153)..(154): Xaa in position 153 to 154 is any amino acid
  Variant (156)..(156): Xaa in position 156 is any amino acid
  Variant (158)..(162): Xaa in position 158 to 162 is any amino acid
  Variant (164)..(168): Xaa in position 164 to 168 is any amino acid
  Variant (171)..(171): Xaa in position 171 is any amino acid
  Variant (174)..(175): Xaa in position 174 to 175 is any amino acid
  Variant (177)..(178): Xaa in position 177 to 178 is any amino acid
  Variant (180)..(180): Xaa in position 180 is any amino acid
  Variant (185)..(190): Xaa in position 185 to 190 is any amino acid
  Variant (193)..(195): Xaa in position 193 to 195 is any amino acid
  Variant (197)..(198): Xaa in position 197 to 198 is any amino acid
  Variant (201)..(201): Xaa in position 201 is any amino acid
  Variant (203)..(208): Xaa in position 203 to 208 is any amino acid
  Variant (209)..(209): Xaa in position 209 is any or no amino acid
  Variant (211)..(211): Xaa in position 211 is any amino acid
  Variant (217)..(218): Xaa in position 217 to 218 is any amino acid
  Variant (220)..(220): Xaa in position 220 is any amino acid
  Variant (222)..(224): Xaa in position 222 to 224 is any amino acid
  Variant (226)..(228): Xaa in position 226 to 228 is any amino acid
  Variant (230)..(231): Xaa in position 230 to 231 is any amino acid
  Variant (235)..(236): Xaa in position 235 to 236 is any amino acid
  Variant (238)..(242): Xaa in position 238 to 242 is any amino acid
  Variant (244)..(246): Xaa in position 244 to 246 is any amino acid
  Variant (248)..(249): Xaa in position 248 to 249 is any amino acid
  Variant (253)..(258): Xaa in position 253 to 258 is any amino acid
  Variant (263)..(263): Xaa in position 263 is any amino acid
  Variant (266)..(279): Xaa in position 266 to 279 is any amino acid
  Variant (281)..(299): Xaa in position 281 to 299 is any amino acid
  Variant (300)..(307): Xaa in position 300 to 307 is any or no amino acid
  Variant (309)..(314): Xaa in position 309 to 314 is any amino acid
  Variant (316)..(329): Xaa in position 316 to 329 is any amino acid
  Variant (330)..(340): Xaa in position 330 to 340 is any or no amino acid
  Variant (342)..(345): Xaa in position 342 to 345 is any amino acid
  Variant (347)..(348): Xaa in position 347 to 348 is any amino acid
RXXXXXDXXXLXXXAXXXXXGXXGXTXLPXXXXXLXXXXXXXXXXXXXXXXXXXXXXXXXXYXXVXEDXXXXXXXGXXXIXXXXGXXXXPXYXYXXXXXXXXSXXLXXXXXXXXXLXLXXDXTGXXEXXXLFLXXXXRXXXXXXGXLLSXXRXXFXAXXXXXFXXXXXAEXRGXXDXXGXSPFWXXXXXXFFXXXFXXADXLXXXXXXXFXAELMPXXPXYXXXLXXXAXXVIGXXHXXXXXAXXXLXXEGFXXXXXXDIFDXGPXXXXXXXXXXXXXXSXXXXXXXXXXXXXXXXXXXXXXXXXXXNXXXXXXRXXXXXXXXXXXXXXXXXXXXXXXXXLXXXXGXXVR

SEQ ID NO: 78846 - protein, 34 aa, Artificial sequence
  protein pattern
  Variant (2)..(2): Xaa in position 2 is Ile, Leu or Met
  Variant (3)..(3): Xaa in position 3 is any amino acid
  Variant (5)..(6): Xaa in position 5 to 6 is any amino acid
  Variant (8)..(8): Xaa in position 8 is any or no amino acid
  Variant (10)..(10): Xaa in position 10 is any or no amino acid
  Variant (12)..(12): Xaa in position 12 is any amino acid
  Variant (13)..(13): Xaa in position 13 is Cys or Ser
  Variant (17)..(18): Xaa in position 17 to 18 is any amino acid
  Variant (19)..(19): Xaa in position 19 is Ile, Leu or Val
  Variant (20)..(22): Xaa in position 20 to 22 is any amino acid
  Variant (24)..(24): Xaa in position 24 is Phe or Tyr
  Variant (25)..(25): Xaa in position 25 is any amino acid
  Variant (26)..(26): Xaa in position 26 is Ile, Leu or Met
  Variant (27)..(27): Xaa in position 27 is Asp, Glu, Asn or Ser
  Variant (28)..(28): Xaa in position 28 is Phe or Tyr
  Variant (29)..(30): Xaa in position 29 to 30 is any amino acid
  Variant (32)..(32): Xaa in position 32 is Asp or Glu
  Variant (33)..(33): Xaa in position 33 is any amino acid
  Variant (34)..(34): Xaa in position 34 is Phe, Leu or Met
EXXGXXDXEXGXXPFWXXXXXXFXXXXXXXAXXX

SEQ ID NO: 78847 - protein, 58 aa, Artificial sequence
  protein pattern
  Variant (2)..(2): Xaa in position 2 is any amino acid
  Variant (6)..(6): Xaa in position 6 is His, Lys or Arg
  Variant (7)..(7): Xaa in position 7 is any amino acid
  Variant (8)..(8): Xaa in position 8 is Pro or Thr
  Variant (9)..(9): Xaa in position 9 is Ile, Leu or Val
  Variant (11)..(12): Xaa in position 11 to 12 is any amino acid
  Variant (13)..(13): Xaa in position 13 is Phe, Leu or Met
  Variant (15)..(15): Xaa in position 15 is Ala, Pro or Ser
  Variant (16)..(17): Xaa in position 16 to 17 is any amino acid
  Variant (18)..(18): Xaa in position 18 is Ala or Val
  Variant (19)..(19): Xaa in position 19 is Gln or Arg
  Variant (20)..(20): Xaa in position 20 is Ala, Asp, Glu, Gly, Asn, Gln or Ser
  Variant (21)..(21): Xaa in position 21 is Ala, Cys or Val
  Variant (22)..(22): Xaa in position 22 is Ile, Met or Val
  Variant (23)..(23): Xaa in position 23 is Asp or Gly
  Variant (24)..(24): Xaa in position 24 is any amino acid
  Variant (25)..(25): Xaa in position 25 is Pro, Thr or Val
  Variant (27)..(28): Xaa in position 27 to 28 is any amino acid
  Variant (29)..(29): Xaa in position 29 is Ala, Gly, Ser or Thr
  Variant (30)..(30): Xaa in position 30 is any amino acid
  Variant (31)..(31): Xaa in position 31 is Ala, Ile or Pro
  Variant (32)..(32): Xaa in position 32 is Ala or Thr
  Variant (33)..(34): Xaa in position 33 to 34 is any amino acid
  Variant (35)..(35): Xaa in position 35 is Ile, Leu, Met or Val
  Variant (37)..(38): Xaa in position 37 to 38 is any amino acid
  Variant (40)..(40): Xaa in position 40 is Gly or Asn
  Variant (41)..(41): Xaa in position 41 is Phe or Leu
  Variant (42)..(43): Xaa in position 42 to 43 is any amino acid
  Variant (44)..(44): Xaa in position 44 is Asp, Glu, Asn, Gln or Arg
  Variant (45)..(46): Xaa in position 45 to 46 is any amino acid
  Variant (47)..(47): Xaa in position 47 is Ile or Val
  Variant (52)..(52): Xaa in position 52 is Ala or Gly
  Variant (55)..(55): Xaa in position 55 is Ala, Ser, Thr or Val
  Variant (56)..(56): Xaa in position 56 is Ile, Leu, Met or Val
  Variant (57)..(57): Xaa in position 57 is any amino acid
  Variant (58)..(58): Xaa in position 58 is Ala, Cys, Ser or Thr
AXLMPXXXXYXXXLXXXXXXXXXXXHXXXXXXXXXLXXEXXXXXXXXDIFDXGPXXXX

SEQ ID NO: 78848 - protein, 31 aa, Artificial sequence
  protein pattern
  Variant (2)..(4): Xaa in position 2 to 4 is any amino acid
  Variant (5)..(5): Xaa in position 5 is any or no amino acid
  Variant (7)..(7): Xaa in position 7 is any amino acid
  Variant (8)..(8): Xaa in position 8 is Ala, Gly, Ser, Thr or Val
  Variant (9)..(9): Xaa in position 9 is any amino acid
  Variant (10)..(10): Xaa in position 10 is Ala, Ile or Val
  Variant (12)..(12): Xaa in position 12 is any amino acid
  Variant (13)..(13): Xaa in position 13 is Asp, Glu, Asn, Gln, Arg or Ser
  Variant (14)..(14): Xaa in position 14 is any amino acid
  Variant (15)..(15): Xaa in position 15 is Ala, Pro or Val
  Variant (16)..(16): Xaa in position 16 is any amino acid
  Variant (18)..(18): Xaa in position 18 is any amino acid
  Variant (19)..(19): Xaa in position 19 is Phe or Tyr
  Variant (20)..(20): Xaa in position 20 is His or Arg
  Variant (21)..(21): Xaa in position 21 is any amino acid
  Variant (22)..(22): Xaa in position 22 is Ala, Glu, Gly or Ser
  Variant (23)..(27): Xaa in position 23 to 27 is any amino acid
  Variant (28)..(28): Xaa in position 28 is Cys or Ser
  Variant (29)..(30): Xaa in position 29 to 30 is any amino acid
  Variant (31)..(31): Xaa in position 31 is Ile or Leu
GXXXXIXXXXGXXXXXYXXXXXXXXXXXXXX

SEQ ID NO: 78849 - protein, 24 aa, Artificial sequence
  protein pattern
  Variant (2)..(8): Xaa in position 2 to 8 is any amino acid
  Variant (9)..(9): Xaa in position 9 is any or no amino acid
  Variant (11)..(11): Xaa in position 11 is any amino acid
  Variant (12)..(12): Xaa in position 12 is Ala, Ser or Thr
  Variant (14)..(14): Xaa in position 14 is Ile, Leu or Val
  Variant (15)..(15): Xaa in position 15 is Cys or Gly
  Variant (16)..(16): Xaa in position 16 is Gly, Ser or Thr
  Variant (18)..(18): Xaa in position 18 is Phe or Tyr
  Variant (20)..(23): Xaa in position 20 to 23 is any amino acid
LXXXXXXXXGXXEXXXLXLXXXXR

SEQ ID NO: 78850 - protein, 28 aa, Artificial sequence
  protein pattern
  Variant (2)..(3): Xaa in position 2 to 3 is any amino acid
  Variant (4)..(4): Xaa in position 4 is Ala, Gly, Ser or Thr
  Variant (5)..(5): Xaa in position 5 is Gly or Pro
  Variant (6)..(6): Xaa in position 6 is any amino acid
  Variant (8)..(8): Xaa in position 8 is Phe, Leu, Met or Val
  Variant (10)..(10): Xaa in position 10 is Asn, Ser or Thr
  Variant (13)..(13): Xaa in position 13 is any amino acid
  Variant (14)..(14): Xaa in position 14 is Asp or Asn
  Variant (15)..(17): Xaa in position 15 to 17 is any amino acid
  Variant (19)..(20): Xaa in position 19 to 20 is any amino acid
  Variant (21)..(21): Xaa in position 21 is Lys or Arg
  Variant (22)..(22): Xaa in position 22 is Ile, Leu or Val
  Variant (23)..(24): Xaa in position 23 to 24 is any amino acid
  Variant (25)..(25): Xaa in position 25 is Ala, Ser or Thr
  Variant (26)..(27): Xaa in position 26 to 27 is any amino acid
  Variant (28)..(28): Xaa in position 28 is Ala, Ser or Thr
AXXXXXGXTXLPXXXXXLXXXXXXXXXX

SEQ ID NO: 78851 - protein, 21 aa, Artificial sequence
  protein pattern
  Variant (2)..(3): Xaa in position 2 to 3 is any amino acid
  Variant (4)..(4): Xaa in position 4 is any or no amino acid
  Variant (6)..(6): Xaa in position 6 is any or no amino acid
  Variant (8)..(9): Xaa in position 8 to 9 is any amino acid
  Variant (11)..(11): Xaa in position 11 is Phe, Leu or Met
  Variant (12)..(12): Xaa in position 12 is Leu or Met
  Variant (13)..(13): Xaa in position 13 is Phe or Met
  Variant (14)..(14): Xaa in position 14 is Ile, Leu or Met
  Variant (15)..(16): Xaa in position 15 to 16 is any amino acid
  Variant (17)..(17): Xaa in position 17 is Phe or His
  Variant (18)..(20): Xaa in position 18 to 20 is any amino acid
GXXXLXSXXRXXXXXXXXXXF

SEQ ID NO: 78852 - DNA, 1491 bp, Escherichia coli
  CDS (1)..(1491): transl_table=11
atggtggcggtgatttatgcaccgctgatcccggcagctctcacgctgatatcgcctgctttgtcgttgacacactggcaggcgttatttgccgatccacagttaccgcaggcattactggcaacgctggtgtcgacaaccatcgcggcggtcggggcattgttgattgccctgctggtgattgtggcgctgtggcctgggccgaaatggcagcgtatgtgcgcccgtctgccgtggctgctcgccattccccatgtggcttttgccaccagcgcccttctgctctttgctgacggagggctgctttatgactatttcccgtatttcactccgccaatggaccgatttggcatcggtctgggcctcacccttgcagtgaaagaaagcgcatttctgctgtggatcttagcagcagtattgagcgaaaaatggctgttgcagcaggtcattgtgctggattcgctgggctacagccgctggcaatgcctgaactggctgctgttgccctccgtcgcgcctgcgctggcaatggcgatgctggcgattgttgcctggtcgctgtcggtcgtggatgtggcaattattctcgggccaggtaatcccccgacgctggcggtaattagctggcagtggttaacccagggcgacattgaccaacaaacaaaaggcgcgcttgccagcctgctgttgatgctgttactcgccgcctacgttttgctgagctatctgctatggcgcagctggcggcgcactattccccgcgtagatggcgttcgcaagcctgccacgcctttattgccgggcaatacgctggcgatttttttacccttaaccggtgtgctgtgtgtggttctgctggcgatcctcgcggatcagtcgacgatcaatagtgaagcgctcatcaacagcctgacaatggggctggtggcgacattcatcgctttgctcctgttactgctgtggctggaatgggggccacagcgtcgccagttgtggctatggttgcccattttattacctgctctgccactggtggcgggccagtacacgctggcgctatggctgaaactggatggaagctggacggcggtggtctgggggcatctgctgtgggtgatgccgtggatgctgtttatcctgcaacccgcctggcagcgcattgattcacggttaattttgattgcgcaaacactgggctggtcgcgggccaaaatcttcttttacgtgaaatgcccactcatgttgcgccctgtgctgattgccttcgcggtgggatttgcagtcggtattgcgcagtatatgccaacgctgtggctgggcgcggggcgttttccgacgctcaccactgaggcggtggcattaagcagcggcggcagcaacggtattctcgccgcccaggctttatggcaactgctattaccgcttattatttttgccctgaccgcgttagtcgcaaaatgggtaggttatgtcagacaaggactccgctaa

SEQ ID NO: 78853 - protein, 496 aa, Escherichia coli
MVAVIYAPLIPAALTLISPALSLTHWQALFADPQLPQALLATLVSTTIAAVGALLIALLVIVALWPGPKWQRMCARLPWLLAIPHVAFATSALLLFADGGLLYDYFPYFTPPMDRFGIGLGLTLAVKESAFLLWILAAVLSEKWLLQQVIVLDSLGYSRWQCLNWLLLPSVAPALAMAMLAIVAWSLSVVDVAIILGPGNPPTLAVISWQWLTQGDIDQQTKGALASLLLMLLLAAYVLLSYLLWRSWRRTIPRVDGVRKPATPLLPGNTLAIFLPLTGVLCVVLLAILADQSTINSEALINSLTMGLVATFIALLLLLLWLEWGPQRRQLWLWLPILLPALPLVAGQYTLALWLKLDGSWTAVVWGHLLWVMPWMLFILQPAWQRIDSRLILIAQTLGWSRAKIFFYVKCPLMLRPVLIAFAVGFAVGIAQYMPTLWLGAGRFPTLTTEAVALSSGGSNGILAAQALWQLLLPLIIFALTALVAKWVGYVRQGLR

SEQ ID NO: 78854 - DNA, 1701 bp, Vibrio cholerae O1 biovar eltor str. N16961
  CDS (1)..(1701): transl_table=11
atgcttagaactgcctattggggtttcattttgctttgtgtcgcgccgatcctacctgggttggcgggagtcttgatctcagcctcaggctatctgcccgtacttgggcatcaccacgtatcttggcagggttttagtcaagtttggcaatggcaaggcgttgaatacgccttgctcctttctgttacttcgaccctattcagcacttatcttgccctcttgatgagcttcgccattttgcagcgattttggtttcatcctcgctggaagcgcatagaaaacagtttatctatcctgcttgccttaccccatgtggccttcgcgatcggttttgcttctttgtttgcctcgaccgggtggttggctcgtctgctctattatggcttcgaactccgtgacaactcgcatgaggtgacgtggttggtgcacgacccttacgccatcggccttactatcgctctggcgctgaaggaagtgccatttattctgttgatcagcttgcccattttacagcagttgaatttaaccaagatgaaaatgctcagtgcttcactgggttattcggagccacaaatgtggtggaagattgttttcccgcagtggctgcgcaaaatccgctttactttgtttgccgtcgccgcatacgctatttccgtggtcgatttcagcttagtgttagggccgactactcccccaacgttttcagtcctagtttggcagtggtttaatgaacccgatttgaacctactccccagagccgcctctggtgcggtagtgctattacttctcgcaagcatagtgttagtggcgattgttgcgcttgagtggttattcactcgcggctatcgcgcgtggcagtcttctggtcgctctcactttcctttgcctcacaaaagcatactcacgctcttgttcaccatttcaggagccatgattccgctcacattgatttggagtttggcacagcgctggcgcttcccagacctcttcccaacccaatggaccggacaattttggtatgacgagtggccgaatgttctgcacaacatggaaaccagcgttttgcttgcccttggctccggtagcttagcgttattgttgggcatccttgcccaagagtatcggctgcacactcaacgggcgatcccggtttacatcatcgcgttacctatgttgctgccccagctctccttgttgttcggtattcaagttttgactctgctgatggcttctcaagcctatacttggtgggtggtatgggcacacacattttttgcatttcccttagtttacttagccttaagtggcccttggcaaagctacaattcgaatttctcaaagattgcacgcagtttgggtaagagcgaatggcaaattttctggaaaatcaaattgccattgctgtttcctgctctgctttatgcgtgggccgtcgggatcagtgtcagtctggcgcagtatctccccaccttgatgctcggcggcggacgcttaaccactatcacaaccgaggccgttgccctttctagcggttacgatcgtcgagtgacagccatttacgccctctgccaagcactcctgcctttcgtgttcttttcaatagctctgcttctcggacgtatgcaaattcaccgctaccgagcagcacaattgacaacggtatttcatgatattttctctcgaaaacctcgccatccttaa

SEQ ID NO: 78855 - protein, 566 aa, Vibrio cholerae O1 biovar eltor str. N16961
MLRTAYWGFILLCVAPILPGLAGVLISASGYLPVLGHHHVSWQGFSQVWQWQGVEYALLLSVTSTLFSTYLALLMSFAILQRFWFHPRWKRIENSLSILLALPHVAFAIGFASLFASTGWLARLLYYGFELRDNSHEVTWLVHDPYAIGLTIALALKEVPFILLISLPILQQLNLTKMKMLSASLGYSEPQMWWKIVFPQWLRKIRFTLFAVAAYAISVVDFSLVLGPTTPPTFSVLVWQWFNEPDLNLLPRAASGAVVLLLLASIVLVAIVALEWLFTRGYRAWQSSGRSHFPLPHKSILTLLFTISGAMIPLTLIWSLAQRWRFPDLFPTQWTGQFWYDEWPNVLHNMETSVLLALGSGSLALLLGILAQEYRLHTQRAIPVYIIALPMLLPQLSLLFGIQVLTLLMASQAYTWWVVWAHTFFAFPLVYLALSGPWQSYNSNFSKIARSLGKSEWQIFWKIKLPLLFPALLYAWAVGISVSLAQYLPTLMLGGGRLTTITTEAVALSSGYDRRVTAIYALCQALLPFVFFSIALLLGRMQIHRYRAAQLTTVFHDIFSRKPRHP

SEQ ID NO: 78856 - DNA, 1491 bp, Escherichia coli O157:H7 EDL933
  CDS (1)..(1491): transl_table=11
atggtggcggtgatttatgcaccgctgatcccggcagctctcacgctgatatcgcctgctttgtcgttgacacactggcaggcgttatttgccgatccacagttaccgcaggcattactggcaacgctggtgtcgacaaccatcgcggcggtcggggcgttgttgattgccctactggtgattgtggcgctgtggcctgggccgaaatggcagcgtatgtgcacccgtctgccgtggctgctcgccattccccatgtggcttttgccaccagcgcccttctgctctttgctgacggagggctgctttatgactatttcccgtatttcactccgccaatggacaaattgggtattgggctgggcttcacgctggcggtgaaagaaagcgcatttctgctgtggatcttagcagcggtattgagtgaaaaacggcttttacagcaagtcatcgtgctggattcgctgggctacagccgctggcaatgcctgaactggctgctgttgccctccgtcgcgcctgcgctggcaatggcgatgctggcgattgttgcctggtcgctgtcggtcgtagatgtggcgattattcttgggccaggtaatccaccgacgctggcagtaattagctggcagtggttaactcagggcgacgccgatcaacaaacgaaaggcgcactcgccagcctgctgctgatgttgttactcgccgcctacgttttgctgggctatctgctatggtgtacctggcggcgtactattccccgcgtagatggcgttcgtaagcctgccacgcctttattgccaggcattacgctggcgagttttttacccttgaccagtgtgctgtgtgtggttctgctggcgatcctcgcggatcagtcgacgatcaatagtgaagcgctcatcaacagcctgacaatggggctggtggcgacattcatcgctttgctcctgttactgctgtggctggaatgggggccacagcgtcgccagttgtggctatggttgccgattttattaccggcactgccgctggtggcgggccagtacacgctggcgctatggctgaacatggatggaagctggacggcggtggtctgggggcatctgctgtgggtaatgccgtggatgctgtttatcctgcaacccgcctggcagcgcattgattcacggttaattttgattgcacaaacactgggctggtcgcgggccaaaatcttcttttacgtgaaatgtccgcttatgctacgccctacgctgattgccttcgcggtgggattttcagtcagtattgcgcagtatatgccgacgctgtggctgggcgcggggcgttttccgacgctcaccactgaggcggtggcattaagcagcggcggcagcaacggtattctcgccgccctggctttatggcaactgctattaccgcttattatttttgccctgaccgcgttagtcgcaaaatgggtaggttatgtcagacaaggactccgctaa

SEQ ID NO: 78857 - protein, 496 aa, Escherichia coli O157:H7 EDL933
MVAVIYAPLIPAALTLISPALSLTHWQALFADPQLPQALLATLVSTTIAAVGALLIALLVIVALWPGPKWQRMCTRLPWLLAIPHVAFATSALLLFADGGLLYDYFPYFTPPMDKLGIGLGFTLAVKESAFLLWILAAVLSEKRLLQQVIVLDSLGYSRWQCLNWLLLPSVAPALAMAMLAIVAWSLSVVDVAIILGPGNPPTLAVISWQWLTQGDADQQTKGALASLLLMLLLAAYVLLGYLLWCTWRRTIPRVDGVRKPATPLLPGITLASFLPLTSVLCVVLLAILADQSTINSEALINSLTMGLVATFIALLLLLLWLEWGPQRRQLWLWLPILLPALPLVAGQYTLALWLNMDGSWTAVVWGHLLWVMPWMLFILQPAWQRIDSRLILIAQTLGWSRAKIFFYVKCPLMLRPTLIAFAVGFSVSIAQYMPTLWLGAGRFPTLTTEAVALSSGGSNGILAALALWQLLLPLIIFALTALVAKWVGYVRQGLR

SEQ ID NO: 78858 - DNA, 1560 bp, Escherichia coli CFT073
  CDS (1)..(1560): transl_table=11
ttgggtaaatgcgctggaacaagaatggctacaccgttacagtacgcattaatctttttgctgtgggcgatgatggcggtgatttatgcaccgctgatcccggcagctctgacgctgatatcgcctgctttgtcgttgacgcactggcaggcgttatttgccgatccacagttaccgcaggcattactggcaacgctggtgtcgacaaccattgcggcggtcggggcgttgttgattgccctgctggtgattgtggcgctgtggccagggccgaaatggcagcgtatgtgcgcccgtctgccgtggctgctcgccattccccatgtggcttttgccaccagcgcccttctgatctttgctgacggagggctgctttatgactatttcccgtatttcactccgccaatggacaaattgggtattgggctgggcctcaccctggcggtaaaagaaagcgcatttctgctgtggatcttagcggcagtattgagcgaaaaacggctgttgcagcaactcattgtgctggattcgctgggctacagccgctggcaatgcctgaactggctgctgttgccctccgtcgcgtctgcgttagcaatggcgatgctggcgattgtcgcctggtcgctgtcggtcgtggatgtggcgattattcttgggccaggtaatcccccgacgctggcggtaattagctggcagtggttaactcagggcgacgccgatcaacaaacgaaaggtgcactcgccagcctgctgctgatgctgttactcgccgcctacgttttgctgggctatctgctatggcgtggctggcgacgtactattccccgcgtagatggcgttcgtaagcctgccacgcctttattgccaggcaatacgctggcgagttttttacccttaaccggtgtgctgtgtgtggttctgctggcgatcctcgcggatcagtcgacgatcaatagtgaagcgctcatcaacagcctgacaatggggctggtggcggcattcatcgctttgctcctgttactgctgtggcaggaatgggggccacagcgtcgccagttgtggctatggttgcccattttattacccgctctgcctctggtggcgggccagtacacgctggcgctatggctgaacctggatggaagctggacggcggtggtctgggggcatctgctgtgggtaatgccgtggatgctgtttatcctgcaacccgcctggcagcgcattgattcacggttaattttgattgcgcaaacactgggctggtcgcgggccaaaatcttcttttacgtaaaatgcccactcatgttgcgccctgcgctgattgccttcgcggtgggattttcagtcagtattgcgcagtatatgccgacgctgtggctgggcgcggggcgttttccgacgctcaccactgaagcggtggcattaagcagcggcggcagcaacggtattctcgccgcccaggctttatggcaactgctgttaccgcttattatttttgccctgaccgcgttagtcgcaaaatgggtaggttatgtcagacaaggactccgctaa

SEQ ID NO: 78859 - protein, 519 aa, Escherichia coli CFT073
MGKCAGTRMATPLQYALIFLLWAMMAVIYAPLIPAALTLISPALSLTHWQALFADPQLPQALLATLVSTTIAAVGALLIALLVIVALWPGPKWQRMCARLPWLLAIPHVAFATSALLIFADGGLLYDYFPYFTPPMDKLGIGLGLTLAVKESAFLLWILAAVLSEKRLLQQLIVLDSLGYSRWQCLNWLLLPSVASALAMAMLAIVAWSLSVVDVAIILGPGNPPTLAVISWQWLTQGDADQQTKGALASLLLMLLLAAYVLLGYLLWRGWRRTIPRVDGVRKPATPLLPGNTLASFLPLTGVLCVVLLAILADQSTINSEALINSLTMGLVAAFIALLLLLLWQEWGPQRRQLWLWLPILLPALPLVAGQYTLALWLNLDGSWTAVVWGHLLWVMPWMLFILQPAWQRIDSRLILIAQTLGWSRAKIFFYVKCPLMLRPALIAFAVGFSVSIAQYMPTLWLGAGRFPTLTTEAVALSSGGSNGILAAQALWQLLLPLIIFALTALVAKWVGYVRQGLR

SEQ ID NO: 78860 - DNA, 1710 bp, Vibrio parahaemolyticus RIMD 2210633
  CDS (1)..(1710): transl_table=11
atgttaagagcgctatatttaatcattatcgctgtttgtattttacctaccattccgggactactcggagtggtggtttctgcgctcggttatgtacctcctatcggcttgcaccacttttctttggatggctttaacgctgtttttgattgggagggtgtttggacatccatcgggctgactttctactctgccattttcagtagctacttggcttgcttgatcacatttgcgattttgcaagcatcgtggggctgcaagttttggcgaaaaattgaagttagcctctcaccacttctcgctatgccgcatgtcgcgtttgcaattggctttgcgttcttatttgcaccaacaggtatgggcgttagggttctcaaccaactgtttggttacgatcccaatgcacaaacggtgaatgacttagcattgctgattaaagacccgcatgcactcggtttggtcatcatgcttgcgattaaagaagtgccgtttttattgttgatgagtattccaattcttcagcaattgaaagtcgataagattgaaaaagtcagtcattcgatgggctacagttcggcgcaagcgtggtggaaatgcgtattcccacaatggatagcaaaattgcgctttccaatgctggcggtattggcttacagcttgtcggttgttgatgttgcattgattattggccctaccaacccaccgacgtttgcagttttggtatggcagtggtttaacgatcctgatttatcacttctaccaagagctgccgcaggcgcggtcgtgttgtttgctatcgctagccttttgattggatttgcacgcttaatggaatggtgtattaccaaaggcttcaaacgctggcagtactctggtcgaaacgggtttcgtttacccggtaaaaccctattttcactgattgcgctactcgcacttctaatgattccactcatggtggtatggagctttgctcaacgctggcgctttccagatttactaccgagccgctatagcctgcgtttttgggaatacgaatggcacagtattcttggtacgctggagcagagcatgctgattgccgttatcagcgcgaccgtcgctctagcccttgccttgatcgcacatgagtatcgccttcgttatcgctggcaggtgcccggttacatcatcgccatcccaatgctgattcctcagctatcggtgctattcggtatgcaagtagtgacgctgtacttaaacagtaacgcgtatttctcttgggtatgctgggcgcatgtgttcttcgcattcccatttatttacctctcgctagacggtccatggcgcagcttcgataacggcttaactcgcgtagcactcagcttgggtaaatcaccgatgcaagcttggttaaaagtgaaactgccaatcctcctacctgcgattgcattcgcatgggcggttgggattagcgtaagtctggcgcaatacctgccgacattggtgctaggggctgggcgcattagcaccatcacaaccgaagccgttgcgctatccagtggttttgaccgacgtgtcaccgcgatttacgccatttggcaagcactcttgccgttcttgttcttctcttttgcgatactactaagccgcttacacgtgaagtatcgccgcttgtctataaaaggtttactactgaatgagtctttgtctcgaaaacctcgccatccgtaa

SEQ ID NO: 78861 - protein, 569 aa, Vibrio parahaemolyticus RIMD 2210633
MLRALYLIIIAVCILPTIPGLLGVVVSALGYVPPIGLHHFSLDGFNAVFDWEGVWTSIGLTFYSAIFSSYLACLITFAILQASWGCKFWRKIEVSLSPLLAMPHVAFAIGFAFLFAPTGMGVRVLNQLFGYDPNAQTVNDLALLIKDPHALGLVIMLAIKEVPFLLLMSIPILQQLKVDKIEKVSHSMGYSSAQAWWKCVFPQWIAKLRFPMLAVLAYSLSVVDVALIIGPTNPPTFAVLVWQWFNDPDLSLLPRAAAGAVVLFAIASLLIGFARLMEWCITKGFKRWQYSGRNGFRLPGKTLFSLIALLALLMIPLMVVWSFAQRWRFPDLLPSRYSLRFWEYEWHSILGTLEQSMLIAVISATVALALALIAHEYRLRYRWQVPGYIIAIPMLIPQLSVLFGMQVVTLYLNSNAYFSWVCWAHVFFAFPFIYLSLDGPWRSFDNGLTRVALSLGKSPMQAWLKVKLPILLPAIAFAWAVGISVSLAQYLPTLVLGAGRISTITTEAVALSSGFDRRVTAIYAIWQALLPFLFFSFAILLSRLHVKYRRLSIKGLLLNESLSRKPRHP

SEQ ID NO: 78862 - DNA, 1695 bp, Desulfotalea psychrophila LSv54
  CDS (1)..(1695): transl_table=11
gtgatggcaagatctactaaagagatcctgctggccctttttccctgtttaagtctctcgctctttctcttgcccgtcctcctcggaggagtggccacaattttacccgcccttggcttttggcccgccttgggaggagagggttttaccggtagatatctgagtcgttttctcgaccatccggcggtgagggatgccttcttgctgaccttgacaacgggcttcgcggcctcctttgcggccctctttgttgccctatttcttttggcggggctctatggaacgaagatgtgggccttcctgcaccgcattttgggtttttggttggccattccccatgtctcctttaccctgggcattctctttttgttgagtcccagtggttggctgatgcgcctcttggcctcactgcttaccggctggactattccccccaacttttccctggtggcagatccctgggggctaagtttggcctttgtccttgcctgtaaggagattgcctttcttctctttatggggatagcggccctgagccgtattgaggcgggtaagctcatttggctggggaagagttttggctatggtccgacccgtatctggttgaccattattctccctcaactctacccccatcttcgcctctctttctgggcagttctggcctactctctctctgtggtggatgtggcccttattattggcccctcccgcccgccaaccctggctgttctggttcattcctggtttattcagggggaggcgagctctttttttcttgcctcggccggggccacctccctctgtctgttggtgcttttggccattactctctgctatttggcggagaggctacttgcccgcctggggcagaccctgcttcttggtggaggcagatcgtccctttttgacagagtatttgccggggccgggccacttcttatggctctgggccttctctttatggcggcctttgccggtctggccctgctctccgtttcgcggagatggcgttttccggatatcctccccgccagttatagctggcattactggtacaggggcctgctttcagcccaggaacccatcgtggtaacccttcttttgggggttttatccgctctgatctctcttgttcttgtggtgggatgtctggagtatgagcgagttcttcttcagcggggagaggggacgcgggtgcggcgcagtctgtggttactctatctgccctttcttcttccccagatctcctttgtctttggtctgcagatggtagcggttttctcaggacttgatggcagttttgtcgcccttcttttctcccatgtggtttttgttctgccctatgtctttattaccctggggcagagttatcgctcttttgataatcgttattttgatctggccctctctctgcgcgggtcgtggtggcgcgctcttttgcaggtgaagctccccatgctgaaaaagaccattgccttctctctggcaacgggattttctgtaagccttgtccagtacctgcccaccctctatgtgggggcaggacgtttccccacaatcaccaccgaggcggtgaatagggtctcaggaggcgatatgcgagtcaccgctgtctatgcccttctccagcttgctctccctctgctggtctactccgctgccctcttcttctctcggcagtcgaaggcctga

SEQ ID NO: 78863 - protein, 564 aa, Desulfotalea psychrophila LSv54
MMARSTKEILLALFPCLSLSLFLLPVLLGGVATILPALGFWPALGGEGFTGRYLSRFLDHPAVRDAFLLTLTTGFAASFAALFVALFLLAGLYGTKMWAFLHRILGFWLAIPHVSFTLGILFLLSPSGWLMRLLASLLTGWTIPPNFSLVADPWGLSLAFVLACKEIAFLLFMGIAALSRIEAGKLIWLGKSFGYGPTRIWLTIILPQLYPHLRLSFWAVLAYSLSVVDVALIIGPSRPPTLAVLVHSWFIQGEASSFFLASAGATSLCLLVLLAITLCYLAERLLARLGQTLLLGGGRSSLFDRVFAGAGPLLMALGLLFMAAFAGLALLSVSRRWRFPDILPASYSWHYWYRGLLSAQEPIVVTLLLGVLSALISLVLVVGCLEYERVLLQRGEGTRVRRSLWLLYLPFLLPQISFVFGLQMVAVFSGLDGSFVALLFSHVVFVLPYVFITLGQSYRSFDNRYFDLALSLRGSWWRALLQVKLPMLKKTIAFSLATGFSVSLVQYLPTLYVGAGRFPTITTEAVNRVSGGDMRVTAVYALLQLALPLLVYSAALFFSRQSKA

SEQ ID NO: 78864 - DNA, 1689 bp, Rhodobacter sphaeroides 2.4.1
  CDS (1)..(1689): transl_table=11
gtgagccagcgcgcgggcgggcttctccggcaggcgccgcggatcacgctcgcgctgatgctggcgccggtggcggcagggctttccggcacgattgcgcccgccttcggccttgagggcggccccgatctcgaggccttccgcgcgctcgccgcctggcccgggctcggcgcttcggtgcggctctcgctcgtgacgggcttcgtcgcgacagcgctcgcgcttgcgctgacgctcctcattctcgcgctcctccccggcggacggctgttcgaggcgctcctgcgccttctctcgccgctcctcgcggtgccccatgccgccgtggcgctggggctcgcctttctcatcgcgccgtcgggctggatcgcccgcgccctttcgccctgggccaccggctggcaggcgccgccggatctgctcacgctgaacgatccggcagggcttgcgctcatcgggggccttgtcgccaaggaggtgcccttcctcctcctcatgtcgctcgcggccctgccccagaccgatgcccagcgacggctgatgctggcggagtccctgggctacgggcgcgccgcaggctgggtcttcggcgtgctgcccgcgctctatgcccagatccggctgccctgctatgcggtgctggcctattccatgacggccgtcgagatggcgatgatcctcggcccgacccggccgccgacgctttccgtgcagatcgcgctctggatggccgatcccgcgctggccgaacgcggacgcggagcggcggcggcgcttctgcaactcgcgctggtcctcggcgcgctcggcctctggcgctctggcgagatcctcggccggaggctcctgctgcgcgccgccgcggggggccggcgcgcgcccgcgctggaccgggtactgcgcccgctcaccctcggcggcacggcgctggcgcttgccgcggtgatgctggggctcgcgggcctcgggctctggtcggtggcgggcctctggaccttcccggacgcgctgccgcagagcgtgagcctgcgcgtctggcaggaggccgcgccgagccttgcgcgacatgcagctctcacgctcgggattgccgcggccgtggccatggccgcgctcgccctgacgctcgcctgcctcgaggccgaggcgcgccatgggctctccccctctccccgggccatggccgcgctctacctgcctctcattgcgccgcaggtggccttcctgccggggcttcaggtggcggccctgagcctcgggctcgacggcacgcccatggctgtggcggccgcgcatctcgtcttcgttctgccctatgtctttctctcgctctcggcgccctggcgggcgtgggatccgcggatcggcacggtgggggcggcccttggcgcctcgccgggccgcatcttctggcgcctgcgcctgccgatgctgctgcgccccgtgctgaccgccttcgccgtgggcatggcggtgtcggtgggccagtatctgcccaccctcctcatcggcggcggtcgcgtctccaccctcacgacggaggcggtcgctttgtcctcgggcggcaaccggcggattgtgggcgcctatgccctcctgcagatgatcctgcccgcggccgccttcgccggagccctcgtcctgcccgccctcctcttccgccgacgccgcggcctgaggcttgcatga

SEQ ID NO: 78865 - protein, 562 aa, Rhodobacter sphaeroides 2.4.1
MSQRAGGLLRQAPRITLALMLAPVAAGLSGTIAPAFGLEGGPDLEAFRALAAWPGLGASVRLSLVTGFVATALALALTLLILALLPGGRLFEALLRLLSPLLAVPHAAVALGLAFLIAPSGWIARALSPWATGWQAPPDLLTLNDPAGLALIGGLVAKEVPFLLLMSLAALPQTDAQRRLMLAESLGYGRAAGWVFGVLPALYAQIRLPCYAVLAYSMTAVEMAMILGPTRPPTLSVQIALWMADPALAERGRGAAAALLQLALVLGALGLWRSGEILGRRLLLRAAAGGRRAPALDRVLRPLTLGGTALALAAVMLGLAGLGLWSVAGLWTFPDALPQSVSLRVWQEAAPSLARHAALTLGIAAAVAMAALALTLACLEAEARHGLSPSPRAMAALYLPLIAPQVAFLPGLQVAALSLGLDGTPMAVAAAHLVFVLPYVFLSLSAPWRAWDPRIGTVGAALGASPGRIFWRLRLPMLLRPVLTAFAVGMAVSVGQYLPTLLIGGGRVSTLTTEAVALSSGGNRRIVGAYALLQMILPAAAFAGALVLPALLFRRRRGLRLA

SEQ ID NO: 78866 - DNA, 1698 bp, Silicibacter sp. TM1040
  CDS (1)..(1698): transl_table=11
gtgcgcctccccctcgccctgcctccggtcttgcccgtcttgaccatcctggtcctgatcgggccggttctggcggggctgtgggggacaatcagcgccgccttcggccatctgccggtggcggggctctacgggccgtcgctgcagccgtttgaggcgctctggaactggcccggccttgggccagcggtgcgcctcagcctcgtcacgggtgtgctggcgacactcctgtcgcttttgattacacttctgttgctggcgggctggtccggcacccggccctttcgggcggtgctgcggctgctgtcgccgctcctgtccgttccacatgcggcagccgcctttggcctgttgttcctgatccaaccctccggctggatcgcccgcgccctgagcccctggctcaccggatggcagcgcccgcctgatgttttgctggtgcaggacccttggggccttgcgatgacgcttgggcttgtcgtcaaggaagtccccttcctgttgctcatcagcctcgccgccctgggccagatcgacagccaaggccgtctgcgtgtcgccatggcgcttggctacgggcgtgtggcggcgtggatcttcgcggtggggccagccctatatcagcgcatccgcctgccgatctatgtggtgctggcctactccatgtcggtggtggatgtggccgtgatcctcggccccaatacgccgccgcccctctcggtgcagatcgtgcgctggatggcagagcctgatctcacgctgcgcacgctggcctcggcgggtgcgctggtgcaactggcactggtgatcggcgcccttctgctgtggcgcggcgcagaacgggggatcgccgcgcttggcacgggtctgatctatcgcgggtggcggttttcgcgcgatggcctctggcgcgcgcttggactggccgcagccgcgacctctgtcgggctggtgctcgcggggcttttggggctggtggtctggtcctttgccgcccggtggagctttcccgacctcctgcccgacggaatgagcctgcgcagctggagccgcaacagccccgccgcacttgagacactcgccaccacctttgccatcgccggtgcggccacgcttgcagcgctcgttctgacgctcggctgtcttgagaccgaggagcgccgcaacctgcgcctcacccgcaaggggctctggctcttgtatttaccgctcctggtgccgcaaaccgcgtttttgcccggcatgcagacgcttttgctggggtttggcatcgaccgcacgctttgggcagtggtgctggcgcatcttgtgtttgtgctgccctacctgcgcctgtcgctcgaaggcccctacaaggcgtgggatccgcggcttggggccgtgggcgcggccatgggggcctctcggaaccggatttttctgcaactcagactaccgatgctgctggcgccgatcctgaccgcagtggccgtgggcatggcggtctcggtcgggcaatatctgccgacgcttctggtcggaggcggacgcatccagaccctcaccaccgaagccgtcgccctcgccgccggtggcgaccgccgcgccattggcctatacgggctggtgcagacggctgcggcgctcctgccctttgtgctggcgctggccctgccgctgttcgtctggcgcaaccgaagaggacttcatcatggctga

SEQ ID NO: 78867 - protein, 565 aa, Silicibacter sp. TM1040
MRLPLALPPVLPVLTILVLIGPVLAGLWGTISAAFGHLPVAGLYGPSLQPFEALWNWPGLGPAVRLSLVTGVLATLLSLLITLLLLAGWSGTRPFRAVLRLLSPLLSVPHAAAAFGLLFLIQPSGWIARALSPWLTGWQRPPDVLLVQDPWGLAMTLGLVVKEVPFLLLISLAALGQIDSQGRLRVAMALGYGRVAAWIFAVGPALYQRIRLPIYVVLAYSMSVVDVAVILGPNTPPPLSVQIVRWMAEPDLTLRTLASAGALVQLALVIGALLLWRGAERGIAALGTGLIYRGWRFSRDGLWRALGLAAAATSVGLVLAGLLGLVVWSFAARWSFPDLLPDGMSLRSWSRNSPAALETLATTFAIAGAATLAALVLTLGCLETEERRNLRLTRKGLWLLYLPLLVPQTAFLPGMQTLLLGFGIDRTLWAVVLAHLVFVLPYLRLSLEGPYKAWDPRLGAVGAAMGASRNRIFLQLRLPMLLAPILTAVAVGMAVSVGQYLPTLLVGGGRIQTLTTEAVALAAGGDRRAIGLYGLVQTAAALLPFVLALALPLFVWRNRRGLHHG

SEQ ID NO: 78868 - DNA, 1650 bp, Photobacterium sp. SKA34
  CDS (1)..(1650): transl_table=11
atgttacctgcgttttactttcttttacttgccgtgtgtattttaccgacattgccagggctactcggtgtggtgattactgcattgggatatatgccaccactggggttaactcaattctcattcatcggttttaaccaagtattacaatggcaaggtgtcgaacacgctattgccttaacgttttatacaacggcggctagctgttttcttgcttgtttgtttacctttgcaatcatccaaacctgttggggcacccgactatggcagcgtattgaatcagcactaagccctctactcgctattccccatgttgcttttgcgattggctttgcctttttatttgcaccaacaggtatgggcgttcgtttattgtattcattactcccagccaatctcagcactcatgctgtcagtcaaaccgcattactgatcaatgatccttatggcttagggcttatcttcatgctcgccttaaaagaaacgccttttttaatgctaatgagtattccggttctccaacaattaaacatagagcaaacccacaaagtatccgcatctctgggctataaccatgctcaatcatggctaaagtgtattttccctcagtggttacctaagatgcgttttccgctatttgctatcgtggcttatggtgtctctgtcgtcgatgttgcacaaattatagggccaaccaatcctcctacctttgccgttttagtctggcaatggtttattgatccaaacctacaactgatgccgcgagctgccgcaggggcaatcatactgtttgttatcggcacaatattattaagtattacggtggctatagaatggttactcacccaattttttaaacaatggcaatggtcaggtagatatggccttgcgcttccagggaaatcactttttagtctaatgctggtattagcagcgatgattatcccagtattaagtctatggtcggtcgcactacgttggcgctttcctgatttgcttccaagtcgttatagcttgcgcttttggcaactagaatggagtcatattcttagtacaattaacattagtgtggtgatcgcattgatcagtgcatcgattgggctatgtttttccattgtcgcgcacgaatatcgtataaaacataaatggcatattcctaactatattgttgccattccgatgttgatcccacagctatcgttactcttcggtttgcaagtactaactttattttcctcacttaatacttatctattatgggtctgctgggctcatctcttttttgttttcccttatgtctatctcgcacttgatggtccttatcgcagttatgatcaacgtttaactcaaattggattaagtttagggaaaacacctttgcaggtatggcttaaaataaagctgccacaattatcatcggcatttatttttgcatgggttattggcattagcgtcagtttggcacaatacctcccaacattaatgctaggtgctggccgaataagtaccttaacgacagaagccgtaacccttgccagtggatcagacaggcgagttaccgctatttacgccttatgccaagcgctgatcccattatgcttttttattttagctcgacgaataaaccaacgaaaaacaataaacacttaa

SEQ ID NO: 78869 - protein, 549 aa, Photobacterium sp. SKA34
MLPAFYFLLLAVCILPTLPGLLGVVITALGYMPPLGLTQFSFIGFNQVLQWQGVEHAIALTFYTTAASCFLACLFTFAIIQTCWGTRLWQRIESALSPLLAIPHVAFAIGFAFLFAPTGMGVRLLYSLLPANLSTHAVSQTALLINDPYGLGLIFMLALKETPFLMLMSIPVLQQLNIEQTHKVSASLGYNHAQSWLKCIFPQWLPKMRFPLFAIVAYGVSVVDVAQIIGPTNPPTFAVLVWQWFIDPNLQLMPRAAAGAIILFVIGTILLSITVAIEWLLTQFFKQWQWSGRYGLALPGKSLFSLMLVLAAMIIPVLSLWSVALRWRFPDLLPSRYSLRFWQLEWSHILSTINISVVIALISASIGLCFSIVAHEYRIKHKWHIPNYIVAIPMLIPQLSLLFGLQVLTLFSSLNTYLLWVCWAHLFFVFPYVYLALDGPYRSYDQRLTQIGLSLGKTPLQVWLKIKLPQLSSAFIFAWVIGISVSLAQYLPTLMLGAGRISTLTTEAVTLASGSDRRVTAIYALCQALIPLCFFILARRINQRKTINT

SEQ ID NO: 78870 - DNA, 1536 bp, Escherichia coli
  CDS (1)..(1536): transl_table=11
atggctacaccgttacggtacgcattaatctttttgctgtgggcgatggtggcggtgatttatgcaccgctgatcccggcagctctcacgctgatatcgcctgctttgtcgttgacacactggcaggcgttatttgccgatccacagttaccgcaggcattactggcaacgctggtgtcgacaaccatcgcggcggtcggggcattgttgattgccctgctggtgattgtggcgctgtggcctgggccgaaatggcagcgtatgtgcgcccgtctgccgtggctgctcgccattccccatgtggcttttgccaccagcgcccttctgctctttgctgacggagggctgctttatgactatttcccgtatttcactccgccaatggaccgatttggcatcggtctgggcctcacccttgcagtgaaagaaagcgcatttctgctgtggatcttagcagcagtattgagcgaaaaatggctgttgcagcaggtcattgtgctggattcgctgggctacagccgctggcaatgcctgaactggctgctgttgccctccgtcgcgcctgcgctggcaatggcgatgctggcgattgttgcctggtcgctgtcggtcgtggatgtggcaattattctcgggccaggtaatcccccgacgctggcggtaattagctggcagtggttaacccagggcgacattgaccaacaaacaaaaggcgcgcttgccagcctgctgttgatgctgttactcgccgcctacgttttgctgagctatctgctatggcgcagctggcggcgcactattccccgcgtagatggcgttcgcaagcctgccacgcctttattgccgggcaatacgctggcgatttttttacccttaaccggtgtgctgtgtgtggttctgctggcgatcctcgcggatcagtcgacgatcaatagtgaagcgctcatcaacagcctgacaatggggctggtggcgacattcatcgctttgctcctgttactgctgtggctggaatgggggccacagcgtcgccagttgtggctatggttgcccattttattacctgctctgccactggtggcgggccagtacacgctggcgctatggctgaaactggatggaagctggacggcggtggtctgggggcatctgctgtgggtgatgccgtggatgctgtttatcctgcaacccgcctggcagcgcattgattcacggttaattttgattgcgcaaacactgggctggtcgcgggccaaaatcttcttttacgtgaaatgcccactcatgttgcgccctgtgctgattgccttcgcggtgggatttgcagtcggtattgcgcagtatatgccaacgctgtggctgggcgcggggcgttttccgacgctcaccactgaggcggtggcattaagcagcggcggcagcaacggtattctcgccgcccaggctttatggcaactgctattaccgcttattatttttgccctgaccgcgttagtcgcaaaatgggtaggttatgtcagacaaggactccgctaa

SEQ ID NO: 78871 - protein, 511 aa, Escherichia coli
MATPLRYALIFLLWAMVAVIYAPLIPAALTLISPALSLTHWQALFADPQLPQALLATLVSTTIAAVGALLIALLVIVALWPGPKWQRMCARLPWLLAIPHVAFATSALLLFADGGLLYDYFPYFTPPMDRFGIGLGLTLAVKESAFLLWILAAVLSEKWLLQQVIVLDSLGYSRWQCLNWLLLPSVAPALAMAMLAIVAWSLSVVDVAIILGPGNPPTLAVISWQWLTQGDIDQQTKGALASLLLMLLLAAYVLLSYLLWRSWRRTIPRVDGVRKPATPLLPGNTLAIFLPLTGVLCVVLLAILADQSTINSEALINSLTMGLVATFIALLLLLLWLEWGPQRRQLWLWLPILLPALPLVAGQYTLALWLKLDGSWTAVVWGHLLWVMPWMLFILQPAWQRIDSRLILIAQTLGWSRAKIFFYVKCPLMLRPVLIAFAVGFAVGIAQYMPTLWLGAGRFPTLTTEAVALSSGGSNGILAAQALWQLLLPLIIFALTALVAKWVGYVRQGLR

SEQ ID NO: 78872 - DNA, 23 bp, Artificial sequence
  primer
atggtggcggtgatttatgcacc

SEQ ID NO: 78873 - DNA, 23 bp, Artificial sequence
  primer
ttagcggagtccttgtctgacat

SEQ ID NO: 78874 - protein, 533 aa, Artificial sequence
  consensus sequence
  Variant (2)..(12): Xaa in position 2 to 12 is any amino acid
  Variant (14)..(30): Xaa in position 14 to 30 is any amino acid
  Variant (31)..(41): Xaa in position 31 to 41 is any or no amino acid
  Variant (43)..(56): Xaa in position 43 to 56 is any amino acid
  Variant (60)..(73): Xaa in position 60 to 73 is any amino acid
  Variant (75)..(80): Xaa in position 75 to 80 is any amino acid
  Variant (82)..(83): Xaa in position 82 to 83 is any amino acid
  Variant (87)..(87): Xaa in position 87 is any amino acid
  Variant (94)..(98): Xaa in position 94 to 98 is any amino acid
  Variant (100)..(100): Xaa in position 100 is any amino acid
  Variant (102)..(103): Xaa in position 102 to 103 is any amino acid
  Variant (105)..(117): Xaa in position 105 to 117 is any amino acid
  Variant (118)..(131): Xaa in position 118 to 131 is any or no amino acid
  Variant (133)..(134): Xaa in position 133 to 134 is any amino acid
  Variant (136)..(137): Xaa in position 136 to 137 is any amino acid
  Variant (139)..(141): Xaa in position 139 to 141 is any amino acid
  Variant (144)..(144): Xaa in position 144 is any amino acid
  Variant (147)..(148): Xaa in position 147 to 148 is any amino acid
  Variant (152)..(157): Xaa in position 152 to 157 is any amino acid
  Variant (159)..(171): Xaa in position 159 to 171 is any amino acid
  Variant (176)..(186): Xaa in position 176 to 186 is any amino acid
  Variant (188)..(198): Xaa in position 188 to 198 is any amino acid
  Variant (200)..(201): Xaa in position 200 to 201 is any amino acid
  Variant (203)..(203): Xaa in position 203 is any amino acid
  Variant (205)..(205): Xaa in position 205 is any amino acid
  Variant (212)..(212): Xaa in position 212 is any amino acid
  Variant (214)..(214): Xaa in position 214 is any amino acid
  Variant (217)..(218): Xaa in position 217 to 218 is any amino acid
  Variant (222)..(223): Xaa in position 222 to 223 is any amino acid
  Variant (225)..(228): Xaa in position 225 to 228 is any amino acid
  Variant (230)..(241): Xaa in position 230 to 241 is any amino acid
  Variant (243)..(247): Xaa in position 243 to 247 is any amino acid
  Variant (249)..(250): Xaa in position 249 to 250 is any amino acid
  Variant (252)..(298): Xaa in position 252 to 298 is any amino acid
  Variant (299)..(308): Xaa in position 299 to 308 is any or no amino acid
  Variant (310)..(314): Xaa in position 310 to 314 is any amino acid
  Variant (316)..(341): Xaa in position 316 to 341 is any amino acid
  Variant (342)..(357): Xaa in position 342 to 357 is any or no amino acid
  Variant (360)..(360): Xaa in position 360 is any amino acid
  Variant (362)..(366): Xaa in position 362 to 366 is any amino acid
  Variant (368)..(378): Xaa in position 368 to 378 is any amino acid
  Variant (379)..(389): Xaa in position 379 to 389 is any or no amino acid
  Variant (392)..(392): Xaa in position 392 is any amino acid
  Variant (394)..(394): Xaa in position 394 is any amino acid
  Variant (396)..(401): Xaa in position 396 to 401 is any amino acid
  Variant (403)..(407): Xaa in position 403 to 407 is any amino acid
  Variant (409)..(418): Xaa in position 409 to 418 is any amino acid
  Variant (420)..(422): Xaa in position 420 to 422 is any amino acid
  Variant (424)..(426): Xaa in position 424 to 426 is any amino acid
  Variant (428)..(428): Xaa in position 428 is any amino acid
  Variant (430)..(434): Xaa in position 430 to 434 is any amino acid
  Variant (436)..(442): Xaa in position 436 to 442 is any amino acid
  Variant (444)..(444): Xaa in position 444 is any amino acid
  Variant (446)..(452): Xaa in position 446 to 452 is any amino acid
  Variant (455)..(455): Xaa in position 455 is any amino acid
  Variant (457)..(464): Xaa in position 457 to 464 is any amino acid
  Variant (466)..(466): Xaa in position 466 is any amino acid
  Variant (468)..(475): Xaa in position 468 to 475 is any amino acid
  Variant (477)..(477): Xaa in position 477 is any amino acid
  Variant (481)..(482): Xaa in position 481 to 482 is any amino acid
  Variant (485)..(486): Xaa in position 485 to 486 is any amino acid
  Variant (489)..(489): Xaa in position 489 is any amino acid
  Variant (493)..(494): Xaa in position 493 to 494 is any amino acid
  Variant (496)..(496): Xaa in position 496 is any amino acid
  Variant (499)..(500): Xaa in position 499 to 500 is any amino acid
  Variant (502)..(502): Xaa in position 502 is any amino acid
  Variant (510)..(510): Xaa in position 510 is any amino acid
  Variant (513)..(518): Xaa in position 513 to 518 is any amino acid
  Variant (520)..(521): Xaa in position 520 to 521 is any amino acid
  Variant (524)..(524): Xaa in position 524 is any amino acid
  Variant (526)..(527): Xaa in position 526 to 527 is any amino acid
  Variant (530)..(532): Xaa in position 530 to 532 is any amino acid
PXXXXXXXXXXXAXXXXXXXXXXXXXXXXXXXXXXXXXXXXAXXXXXXXXXXXXXXALLXXXXXXXXXXXXXXWXXXXXXLXXLLAXPHVAFAXXXXXLXAXXGXXXXXXXXXXXXXXXXXXXXXXXXXXXDXXGXXLXXXLAXKEXXFLLXXXXXXLXXXXXXXXXXXXXSLGYXXXXXXXXXXXPXXXXXXXXXXXAXXAXSXSVVDVAXIXGPXXPPTXXVXXXXWXXXXXXXXXXXXAXXXXXLXXLXXXXXXXXXXXXXXXXXXXXXXXXXXXXXXXXXXXXXXXXXXXXXXXXXXXXXXXXXLXXXXXAXXXXXXXXXXXXXXXXXXXXXXXXXXXXXXXXXXXXXXXXXXALXLXXXXXEXXXXXXXXXXXXXXXXXXXXXXLPXLXPXXXXXXGXXXXXLXXXXXXXXXXVXXXHXXXVXPXXXXXLXXXXXXXDXRXXXXXXXLGXSXXXXXXXXKXPXXXXXXXXAXAVGXXVSXXQYXPTLXXGXGRXXTXTTEAVALXSGXXXXXXAXXALXQXXLPXXXF

SEQ ID NO: 78875 - protein, 60 aa, Artificial sequence
  protein pattern
  Variant (2)..(9): Xaa in position 2 to 9 is any amino acid
  Variant (10)..(11): Xaa in position 10 to 11 is any or no amino acid
  Variant (13)..(13): Xaa in position 13 is Ile, Leu or Met
  Variant (14)..(14): Xaa in position 14 is Leu or Met
  Variant (15)..(15): Xaa in position 15 is Phe or Leu
  Variant (16)..(16): Xaa in position 16 is any amino acid
  Variant (17)..(17): Xaa in position 17 is Ala or Pro
  Variant (18)..(18): Xaa in position 18 is any amino acid
  Variant (19)..(19): Xaa in position 19 is Ala or Leu
  Variant (20)..(20): Xaa in position 20 is any amino acid
  Variant (22)..(22): Xaa in position 22 is any amino acid
  Variant (26)..(26): Xaa in position 26 is Phe, Ile or Met
  Variant (27)..(27): Xaa in position 27 is Ala or Ser
  Variant (29)..(29): Xaa in position 29 is Gly or Ser
  Variant (30)..(30): Xaa in position 30 is Ile, Leu or Val
  Variant (31)..(31): Xaa in position 31 is Ala or Gly
  Variant (34)..(34): Xaa in position 34 is Leu or Met
  Variant (38)..(38): Xaa in position 38 is any amino acid
  Variant (39)..(39): Xaa in position 39 is Ile, Leu or Val
  Variant (41)..(41): Xaa in position 41 is Ala or Gly
  Variant (44)..(44): Xaa in position 44 is Phe, Ile, Leu or Val
  Variant (45)..(45): Xaa in position 45 is Pro, Gln, Ser or Thr
  Variant (47)..(47): Xaa in position 47 is Ile or Leu
  Variant (55)..(56): Xaa in position 55 to 56 is Ala or Ser
  Variant (58)..(58): Xaa in position 58 is any amino acid
  Variant (59)..(59): Xaa in position 59 is Asp, Asn or Ser
  Variant (60)..(60): Xaa in position 60 is Asn or Arg
SXXXXXXXXXXPXXXXXXXXAXAVGXXVXXXQYXPTLXXGXGRXXTXTTEAVALXXGXXX

SEQ ID NO: 78876 - protein, 37 aa, Artificial sequence
  protein pattern
  Variant (2)..(2): Xaa in position 2 is any or no amino acid
  Variant (4)..(4): Xaa in position 4 is any or no amino acid
  Variant (6)..(6): Xaa in position 6 is Trp or Tyr
  Variant (7)..(7): Xaa in position 7 is Ala, Gly or Ser
  Variant (8)..(8): Xaa in position 8 is Ile, Leu or Val
  Variant (13)..(13): Xaa in position 13 is Phe or Val
  Variant (14)..(14): Xaa in position 14 is Ala or Ser
  Variant (15)..(15): Xaa in position 15 is any amino acid
  Variant (16)..(16): Xaa in position 16 is Ile or Val
  Variant (17)..(17): Xaa in position 17 is Ile or Leu
  Variant (20)..(20): Xaa in position 20 is Gly, Ser or Thr
  Variant (21)..(21): Xaa in position 21 is any amino acid
  Variant (25)..(25): Xaa in position 25 is Phe or Leu
  Variant (26)..(26): Xaa in position 26 is Ala or Ser
  Variant (28)..(28): Xaa in position 28 is Ile or Leu
  Variant (29)..(29): Xaa in position 29 is Ser or Val
  Variant (30)..(30): Xaa in position 30 is His or Trp
  Variant (31)..(31): Xaa in position 31 is Gln or Ser
  Variant (33)..(33): Xaa in position 33 is Phe or Leu
  Variant (34)..(34): Xaa in position 34 is any amino acid
  Variant (35)..(35): Xaa in position 35 is Asp, Glu or Gln
  Variant (36)..(36): Xaa in position 36 is Gly or Pro
  Variant (37)..(37): Xaa in position 37 is Asp, Glu or Asn
AXVXAXXXSVVDXXXXXGPXXPPTXXVXXXXWXXXXX

SEQ ID NO: 78877 - protein, 31 aa, Artificial sequence
  protein pattern
  Variant (2)..(3): Xaa in position 2 to 3 is any amino acid
  Variant (4)..(4): Xaa in position 4 is Ala or Gly
  Variant (5)..(5): Xaa in position 5 is Ile or Leu
  Variant (6)..(6): Xaa in position 6 is Gly or Ser
  Variant (8)..(8): Xaa in position 8 is any amino acid
  Variant (9)..(10): Xaa in position 9 to 10 is any or no amino acid
  Variant (12)..(13): Xaa in position 12 to 13 is any or no amino acid
  Variant (15)..(15): Xaa in position 15 is any amino acid
  Variant (18)..(18): Xaa in position 18 is any amino acid
  Variant (19)..(19): Xaa in position 19 is Ala or Pro
  Variant (21)..(21): Xaa in position 21 is Ile or Leu
  Variant (22)..(22): Xaa in position 22 is Leu or Met
  Variant (23)..(23): Xaa in position 23 is any amino acid
  Variant (24)..(24): Xaa in position 24 is Ile or Met
  Variant (25)..(25): Xaa in position 25 is any amino acid
  Variant (26)..(26): Xaa in position 26 is Ala, Ile or Leu
  Variant (27)..(27): Xaa in position 27 is Ala or Pro
  Variant (28)..(28): Xaa in position 28 is Ala, Ile or Val
  Variant (30)..(30): Xaa in position 30 is Gln or Ser
  Variant (31)..(31): Xaa in position 31 is Glu, Gln or Arg
DXXXXXLXXXLXXAXKEXXFXXXXXXXXLXX

SEQ ID NO: 78878 - protein, 28 aa, Artificial sequence
  protein pattern
  Variant (2)..(5): Xaa in position 2 to 5 is any or no amino acid
  Variant (7)..(7): Xaa in position 7 is Leu or Val
  Variant (8)..(8): Xaa in position 8 is Phe, Leu or Val
  Variant (9)..(9): Xaa in position 9 is Phe or Trp
  Variant (11)..(11): Xaa in position 11 is Phe, Leu or Met
  Variant (13)..(13): Xaa in position 13 is Trp or Tyr
  Variant (14)..(14): Xaa in position 14 is Leu, Met or Val
  Variant (15)..(15): Xaa in position 15 is any amino acid
  Variant (16)..(16): Xaa in position 16 is Phe, Ile or Leu
  Variant (17)..(17): Xaa in position 17 is any amino acid
  Variant (19)..(19): Xaa in position 19 is Asp, Glu, Gly, Gln or Ser
  Variant (20)..(20): Xaa in position 20 is any amino acid
  Variant (21)..(21): Xaa in position 21 is Ala, Pro or Ser
  Variant (22)..(22): Xaa in position 22 is Trp or Tyr
  Variant (23)..(25): Xaa in position 23 to 25 is any amino acid
  Variant (27)..(27): Xaa in position 27 is Asn, Pro, Gln or Ser
AXXXXHXXXVXPXXXXXLXXXXXXXDXR

SEQ ID NO: 78879 - protein, 19 aa, Artificial sequence
  protein pattern
  Variant (2)..(3): Xaa in position 2 to 3 is any amino acid
  Variant (4)..(4): Xaa in position 4 is Ile, Leu or Met
  Variant (5)..(7): Xaa in position 5 to 7 is any amino acid
  Variant (9)..(9): Xaa in position 9 is Gly, Pro or Ser
  Variant (10)..(11): Xaa in position 10 to 11 is any amino acid
  Variant (14)..(14): Xaa in position 14 is Ile, Leu or Met
  Variant (18)..(18): Xaa in position 18 is Ala or Ser
WXXXXXXLXXXLAXPHVXF

SEQ ID NO: 78880 - protein, 18 aa, Artificial sequence
  protein pattern
  Variant (2)..(2): Xaa in position 2 is Ile, Leu or Met
  Variant (4)..(4): Xaa in position 4 is Ile, Leu or Val
  Variant (6)..(6): Xaa in position 6 is Ala or Gln
  Variant (7)..(7): Xaa in position 7 is any amino acid
  Variant (8)..(8): Xaa in position 8 is Ala, Pro or Ser
  Variant (9)..(9): Xaa in position 9 is Phe, Leu or Val
  Variant (10)..(10): Xaa in position 10 is Leu or Val
  Variant (11)..(11): Xaa in position 11 is any amino acid
  Variant (13)..(13): Xaa in position 13 is any or no amino acid
  Variant (15)..(16): Xaa in position 15 to 16 is any or no amino acid
PXLXPXXXXXXGXQXXTL

SEQ ID NO: 78881 - protein, 18 aa, Artificial sequence
  protein pattern
  Variant (2)..(3): Xaa in position 2 to 3 is any or no amino acid
  Variant (5)..(6): Xaa in position 5 to 6 is any or no amino acid
  Variant (8)..(9): Xaa in position 8 to 9 is Ala or Leu
  Variant (10)..(10): Xaa in position 10 is Ile or Leu
  Variant (12)..(12): Xaa in position 12 is Phe or Leu
  Variant (13)..(13): Xaa in position 13 is any amino acid
  Variant (14)..(14): Xaa in position 14 is Phe, Ile or Val
  Variant (15)..(15): Xaa in position 15 is Phe or Tyr
  Variant (16)..(17): Xaa in position 16 to 17 is any amino acid
  Variant (18)..(18): Xaa in position 18 is Ala or Thr
AXXAXXQXXXPXXXXXXX

SEQ ID NO: 78882 - protein, 17 aa, Artificial sequence
  protein pattern
  Variant (2)..(2): Xaa in position 2 is any amino acid
  Variant (3)..(3): Xaa in position 3 is Ala, Ile or Leu
  Variant (4)..(4): Xaa in position 4 is Ala, Leu or Pro
  Variant (5)..(5): Xaa in position 5 is Ala or Gly
  Variant (6)..(6): Xaa in position 6 is Ala, Gly or Leu
  Variant (7)..(7): Xaa in position 7 is any amino acid
  Variant (8)..(8): Xaa in position 8 is Ala, Gly or Thr
  Variant (9)..(9): Xaa in position 9 is any amino acid
  Variant (10)..(10): Xaa in position 10 is Ile or Val
  Variant (11)..(11): Xaa in position 11 is any amino acid
  Variant (12)..(12): Xaa in position 12 is Pro, Ser or Thr
  Variant (14)..(15): Xaa in position 14 to 15 is any or no amino acid
  Variant (17)..(17): Xaa in position 17 is Glu, Gly, Ser or Thr
PXXXXXXXXXXXAXXLX

SEQ ID NO: 78883 - DNA, 1182 bp, Escherichia coli
  CDS (1)..(1182): transl_table=11
atgacctgttcaacttcattaagcggcaaaaacaggattgtccttatcgctggcattctgatgattgccacaacattacgcgtcacctttaccggcgcagcaccgttactggatacgattcgttccgcttactcgctgacgacagcgcaaaccggcttattgaccaccctgccattattggcctttgcgctaatctcacctttggctgccccggtagcgcgacgttttggtatggaacgtagcctgtttgccgcgttacttttgatctgtgctggtatcgcaattcgctctctcccttcgccttacttattatttggcggtacagcggtcattggcggtgggattgcattaggcaatgtcttactgccaggattaattaaacgcgatttccctcattccgtcgccagacttaccggcgcatattccctgacaatgggagctgcagcggcactgggatcggctatggtcgtgccgctggctttgaacggttttggctggcaaggcgcgttgctcatgctgatgtgttttcctctgctggctctttttttatggctgccacagtggcgaagtcaacaacatgcaaatttgagtacctcgcgcgccttacatactcggggtatctggcgttcaccgcttgcctggcaggtcacattgtttcttgggatcaactcactggtctattacgtgattattggctggcttccggcgatcctcatcagtcacggctatagcgaagcacaggcgggttcactgcatggtttgctgcaactagccacagcagcacccggtttgctgatcccacttttcttacatcatgtgaaagatcagcgtggtattgcagcgttcgttgccttgatgtgcgcagtgggcgcggttgggctctgctttatgccagcgcacgcgatcacctggactctgcttttcggttttggttccggcgcaacaatgatactggggttgacgttcattggtctgcgggctagttctgcgcatcaggcggcggcactctcggggatggcacaatccgtcgggtatttgttggcagcctgtgggccgccgctgatgggtaaaatacacgatgctaacggtaactggtctgtaccacttatgggtgttgccatactttcactactgatggcgattttcggactttgcgccgggagagacaaagaaattcgctaa

SEQ ID NO: 78884 - protein, 393 aa, Escherichia coli
MTCSTSLSGKNRIVLIAGILMIATTLRVTFTGAAPLLDTIRSAYSLTTAQTGLLTTLPLLAFALISPLAAPVARRFGMERSLFAALLLICAGIAIRSLPSPYLLFGGTAVIGGGIALGNVLLPGLIKRDFPHSVARLTGAYSLTMGAAAALGSAMVVPLALNGFGWQGALLMLMCFPLLALFLWLPQWRSQQHANLSTSRALHTRGIWRSPLAWQVTLFLGINSLVYYVIIGWLPAILISHGYSEAQAGSLHGLLQLATAAPGLLIPLFLHHVKDQRGIAAFVALMCAVGAVGLCFMPAHAITWTLLFGFGSGATMILGLTFIGLRASSAHQAAALSGMAQSVGYLLAACGPPLMGKIHDANGNWSVPLMGVAILSLLMAIFGLCAGRDKEIR

SEQ ID NO: 78885 - DNA, 1275 bp, Pseudomonas aeruginosa PAO1
  CDS (1)..(1275): transl_table=11
atgactcacgccttgaatgcccggccgggagcgcaccccggccatcctccggaagaactgctgatcgatgccgaagtcgacgacgaaccagttccgccggcgccgccactacgcccctggctgctcctgctgggcctggtgctggtggcgctgaacctgcgcccggcgctgtccagcctcgcccccctgctcaaccaggtgcgcgacgataccggcctctcggccgctgccgccggcctgctgaccaccgcgccggtactctgcctggggttgttcgcgccgctcgcgccgcgcctggcccggcgtatcggcgccgagcgcagcgtgctgctgatcctcttctgcctggccggcggcatcgtcctgcgcagcctgttcccggtgttcggcctgttcgccggcagcgtcctggccggcgccagcatcggcatcatcggcgtgctcctgccgggcatcgtcaaacgcgacttcccgcgccaggccggggtgatgaccggggtctacaccatggccctgtgcctgggcgcagcgctcgccgccggcgctaccgcgccgctggagaagctcttcggcaactgggaactggcgctggcgttctggtcgctgccggcgatcctcgccgccgccttctggctgccgcagacccgccagggccagcacgcccatcgccaggccttccgtgtcatcggcctgtggcgcgacccgctggcctggcaggtcacgctgtacatgggcctgcaatcgtccctggcctacatcgtcttcggttggctgccgtcgatcctgatcgaccgcggcatgactgcggtagaagccggcctggtgctgtccggctcggtgatgctgcaactgatcaccgccctgctcgcgccctggctcgccgctcgcgccagggaccagcgcctggcggtggtgctggtgatggcgaccaccctcgccggcctgctcggcttcctctatgcgccgctgcagaccatctggggctgggcggtcctgctcggcctcggccagggcggtaccttcagcatcgccctggcgctgatcgtcctgcgctcgcgcgacgcccacgtcgcctcgcatctgtcgggcatggcccagggcgtcggctacaccctggcggccatggggccgttcatggtcggcgtggtccacgacctgaccggcggctggaacgcggtcggctatatcttcatcggcgtcgccatcgccgccaccctgttcggcctcggcgccgggcgcagccagtacgtgggggcccgcagcgaacacctgtag

SEQ ID NO: 78886 - protein, 424 aa, Pseudomonas aeruginosa PAO1
MTHALNARPGAHPGHPPEELLIDAEVDDEPVPPAPPLRPWLLLLGLVLVALNLRPALSSLAPLLNQVRDDTGLSAAAAGLLTTAPVLCLGLFAPLAPRLARRIGAERSVLLILFCLAGGIVLRSLFPVFGLFAGSVLAGASIGIIGVLLPGIVKRDFPRQAGVMTGVYTMALCLGAALAAGATAPLEKLFGNWELALAFWSLPAILAAAFWLPQTRQGQHAHRQAFRVIGLWRDPLAWQVTLYMGLQSSLAYIVFGWLPSILIDRGMTAVEAGLVLSGSVMLQLITALLAPWLAARARDQRLAVVLVMATTLAGLLGFLYAPLQTIWGWAVLLGLGQGGTFSIALALIVLRSRDAHVASHLSGMAQGVGYTLAAMGPFMVGVVHDLTGGWNAVGYIFIGVAIAATLFGLGAGRSQYVGARSEHL

SEQ ID NO: 78887 - DNA, 1182 bp, Escherichia coli O157:H7 EDL933
  CDS (1)..(1182): transl_table=11
  misc_feature (4)..(4): r is g or a
  misc_feature (37)..(37): r is g or a
atgrcctgttcaacttcattaagcggcaaaaacaggrttgtccttatcgctggcattctgatgattgccactacattacgcgtcaccttcaccggcgcagcaccgttactcgatacgattcgttccgcttactcgctgacgactgcgcaaaccggcttattgaccaccctgccattattggcctttgcgctaatctcacctctggctgccccggtggctcgacgttttggtatggaacgtagcctgtttgccgcgttacttttgatctgtgcaggtatcgcaattcgctctctcccttcgccttacttattatttggcggtacagcggtcattggcggtgggattgcattaggtaatgtcttactgccaggattaattaaacgcgatttccctcattccgtcgccagacttaccggcgcatattccctgacaatgggagctgcggcggctctgggatcggctatggtagtgccgctggctttgaacggttttggctggcaaggcgcgttgctcatgctgatgtgttttcctctgctggctctttttttatggctgccacagtggcgaagccaacaacatgcaaatttgagtacttcacgcgccttacatactcggggtatctggcgttcgccgcttgcctggcaggtaacattgtttcttgggatcaactcactggtctattacgtgattattggctggcttccggcgatcctcatcagtcacggctatagcgaagcacaggcgggttcactgcatggtttgctgcaactagccacagcagctcccggtttgctgatcccacttttcttacatcatgtgaaagaccagcgtggtattgcagcgttcgttgccttgatgtgcgcagtgggcgcggttgggctctgcttcatgccagcgcacgcgatcacctggactctgcttttcggttttggttccggcgcaacaatgatactggggttgacgttcattggtctgcgggctagttctgcgcatcaggcggcggcactctcggggatggcacaatccgtcgggtatttgttggcagcctgtgggccgccgctgatgggtaaaatacacgatgctaacggtgactggtccgtaccactaatgggtgttgcaatactttcactactgatggcgattttcggactttgtgccgggagagacaaagaaattcgctaa

SEQ ID NO: 78888 - protein, 393 aa, Escherichia coli O157:H7 EDL933
  misc_feature (2)..(2): The Xaa at location 2 stands for Ala, or Thr.
  misc_feature (13)..(13): The Xaa at location 13 stands for Ile, or Val.
MXCSTSLSGKNRXVLIAGILMIATTLRVTFTGAAPLLDTIRSAYSLTTAQTGLLTTLPLLAFALISPLAAPVARRFGMERSLFAALLLICAGIAIRSLPSPYLLFGGTAVIGGGIALGNVLLPGLIKRDFPHSVARLTGAYSLTMGAAAALGSAMVVPLALNGFGWQGALLMLMCFPLLALFLWLPQWRSQQHANLSTSRALHTRGIWRSPLAWQVTLFLGINSLVYYVIIGWLPAILISHGYSEAQAGSLHGLLQLATAAPGLLIPLFLHHVKDQRGIAAFVALMCAVGAVGLCFMPAHAITWTLLFGFGSGATMILGLTFIGLRASSAHQAAALSGMAQSVGYLLAACGPPLMGKIHDANGDWSVPLMGVAILSLLMAIFGLCAGRDKEIR

SEQ ID NO: 78889 - DNA, 1149 bp, Deinococcus radiodurans R1
  CDS (1)..(1149): transl_table=11
gtgaaccgcgctccccgtccgctgctggttctgggcatagtgctggtggcacttaccctgcggcccgtcattgcgggcttcgggccgctgctgccgcgggtgcaggccgaactgcacgcgagcgcggccaccatgagcctgctcacgaccattccgctggtgtgctggggcatttttgcgctggtcacgccccggctgacgcgctggcgcagtcccgaagttttgattgggctgtgcaccgccctgattgccctcggcacctggctgcggaccggcgccgcgctgccgccgattctgctcggcaccgtgctggtcggcgtgggcatcgccatcgtcaatgtcctactgccaagtctgctgcggcgcgactttccccggcaactgggcctgatgaccgggctgtactcgctcgccgtcgtcgggggtgcagcgctcgcctcggcgctggcggtgccgctggaacgcacgctcggcggctggcgcgggtcgctgggcgtgtgggcgtggctgagcggggccgcgctgctcgcctgggtgccggccatgctggggcgcccggcgcgctcggcaggtccggcagtgcgcggcccgtctgtgtggagcaacccggccaccttgccggtcacgctctatatgggcacgcagtcgctggtgtttttcacctggctgacctggctcgccaggctcttgcaggaccggggtctgagcgccgaggccgccggggcactgctctcgctcggcaacctggtgcagttgccgttcaccctgtcggtgccggtgctggcctcgcggctgggcaacgtgcgcccactggtgttcgggctggtcgcctgcaacgctgccgggctgctgggcctgacgctgtggcccaccgcgtcgccgctgccgtgggtgctgctgctcggtgtgggggcgggcagcgcctttccgctcgcgctgcacctcatcgccgtgcgcgcccgcgacgccgccgaggtgccccggctctcggccacggcgcagggcttcggctacctgctggcggcgagcggcccctttctctttggggcgctgcacgacctcagcggcggctggagcgcctcgctgagcgccctgctggtcggcacggcggcgatgctggtgaccggactgtgggcggcgcagcgctga

SEQ ID NO: 78890 - protein, 382 aa, Deinococcus radiodurans R1
MNRAPRPLLVLGIVLVALTLRPVIAGFGPLLPRVQAELHASAATMSLLTTIPLVCWGIFALVTPRLTRWRSPEVLIGLCTALIALGTWLRTGAALPPILLGTVLVGVGIAIVNVLLPSLLRRDFPRQLGLMTGLYSLAVVGGAALASALAVPLERTLGGWRGSLGVWAWLSGAALLAWVPAMLGRPARSAGPAVRGPSVWSNPATLPVTLYMGTQSLVFFTWLTWLARLLQDRGLSAEAAGALLSLGNLVQLPFTLSVPVLASRLGNVRPLVFGLVACNAAGLLGLTLWPTASPLPWVLLLGVGAGSAFPLALHLIAVRARDAAEVPRLSATAQGFGYLLAASGPFLFGALHDLSGGWSASLSALLVGTAAMLVTGLWAAQR

SEQ ID NO: 78891 - DNA, 1299 bp, Clostridium acetobutylicum ATCC 824
  CDS (1)..(1299): transl_table=11
atgaatcaattatataacgaacacaaaaagaacctgtattcaaaaagaaatgcgcctataatgctgataatcggaattgcatttattgcagcaaatttgcgctcacctttaacagcggttggcccgttggtcaatgaaattcgtggtagcttacatatttcaaatacattagcaggtatgattacaacccttccattattcgcttttgcaggattctcacctttcgctccacgactggcgcgaaaatttggcactaaattggtgctgttttggtcacttatttttctgactttcggaattatattacgttcattgtttggaggggtgggactatttcttggaacattgatcctgggattatcaatttctgtcggcaatgtgctaatacccagtctaatcaaacatgaattttctaaacgggtcggcgtgataactggcatctatactgcttctatgggccttttaggggcgatagcctccggtatcagtgtccctgttgcagaagaatcaagattgggatggagcggagcgttaagcatttgggctgcacttagtttcttatcaattatcatctggatacctcaaataatacgtagaaagcaagaaatgtctattgttaaaaaaacgatcgataatgacattaaaacaaaagtaaaagacatccatgaaggaaaaaatgaaatagagagtattaacggaaatgcgattaacaaggttaatctatggaaatctactttggcatggcaggtaacagtatatatgggattacagtctatgctactctattgcatggttgcatggttaccggctattttaatccagcagggtatgaattcaaacaaagcaggatggatgctctccctttatcaattggtatcgctccctacatcgtttttaggctctgtccttgctgaacgcaaagccaatcaacgtccattagttattactgcctctctatgtgttttggtgggacttttgggcatatccttagaatggacagagcttacattcctatggatgattatgttgggcattggaggaacacttactttttgcctagctatgatattttttagttctcgtacaagaaatgcagatgaagcggcaagactgtccggcatggcacagtcagtcggctacctactcgctgcttttggtccgatgctttttggttttctacatgatgcagccaacaactggcatttaccacttattgtcttaatcggtgcttccggattatgcttgtttgctgggttaggtgcatcacgcaatctgtatattaaatacaactacttataa

SEQ ID NO: 78892 - protein, 432 aa, Clostridium acetobutylicum ATCC 824
MNQLYNEHKKNLYSKRNAPIMLIIGIAFIAANLRSPLTAVGPLVNEIRGSLHISNTLAGMITTLPLFAFAGFSPFAPRLARKFGTKLVLFWSLIFLTFGIILRSLFGGVGLFLGTLILGLSISVGNVLIPSLIKHEFSKRVGVITGIYTASMGLLGAIASGISVPVAEESRLGWSGALSIWAALSFLSIIIWIPQIIRRKQEMSIVKKTIDNDIKTKVKDIHEGKNEIESINGNAINKVNLWKSTLAWQVTVYMGLQSMLLYCMVAWLPAILIQQGMNSNKAGWMLSLYQLVSLPTSFLGSVLAERKANQRPLVITASLCVLVGLLGISLEWTELTFLWMIMLGIGGTLTFCLAMIFFSSRTRNADEAARLSGMAQSVGYLLAAFGPMLFGFLHDAANNWHLPLIVLIGASGLCLFAGLGASRNLYIKYNYL

SEQ ID NO: 78893 - DNA, 1218 bp, Listeria monocytogenes EGD-e
  CDS (1)..(1218): transl_table=11
atgaattcagatttaaccaataaaaaaatccttacacgttcgagtaaggtaatgcttgttttaggaattgttttaattgcggcaaacttacgtacacctattacctctgtaggtccgttacttggaatgattcaatcagatttacatttaaccaatacaatggctggattactaacaacgattccgctacttgcatttgcgggactatccccatttgtttctaaactaagtcgagcacttggtatggaagtattaatttttgtagcacttttgacacttgtacttggtagcttacttcgaccttttggtggcgaacttaatttatttgctggaacgtttatgattggccttgctatcgcagtcggaaatgtcattttgccaagtttgataaaaaaagaatttccatttaaattgggtctaatgactggagtttattccatttcgatgaatttgtgtgcagcaattgcagctggcttaacggttccaattgctatgaacaatcgctttagctggcatggaagtatggttttctgggcaattcttggaatcgttgctttagtcatttggcttccacaactaaaatataatcaacgctcgacggaaaaaattgcaactcacttggttacaacttcggtttggaaatctccgctcgcatggaaaatttctttatttatgggttcgcagtcagcaattttttatatttcgattgcctggttaccaaatattttagcagaccaagggttatctagtacttctagtggtttaatgctttccttaatgcagtttgcggttatgccgattacgtttattattcctattattgccggacgaatgaaaaatcagcaattacttgttggaatttctattttattctttttaattgggatttttggcattatgtttgcttctggtagcatacttattttatccatcgctatcattatctatggaattggctcggggatgtcgtttagtttgtcgatgatgttctttaatttgcgaacaacaagcgcgacagaatcagcggatttatctggaatggcacaatctatcggttacttatttgccgcctctggtccaatattatttggtaccctacacgatgcgcttggtagttggcaaccgaccttatatgttttagtcggtattaccatgcttatgctatactgcggcctagatgctggacgcaataaatttctcttctctcagaaaaagtga

SEQ ID NO: 78894 - protein, 405 aa, Listeria monocytogenes EGD-e
MNSDLTNKKILTRSSKVMLVLGIVLIAANLRTPITSVGPLLGMIQSDLHLTNTMAGLLTTIPLLAFAGLSPFVSKLSRALGMEVLIFVALLTLVLGSLLRPFGGELNLFAGTFMIGLAIAVGNVILPSLIKKEFPFKLGLMTGVYSISMNLCAAIAAGLTVPIAMNNRFSWHGSMVFWAILGIVALVIWLPQLKYNQRSTEKIATHLVTTSVWKSPLAWKISLFMGSQSAIFYISIAWLPNILADQGLSSTSSGLMLSLMQFAVMPITFIIPIIAGRMKNQQLLVGISILFFLIGIFGIMFASGSILILSIAIIIYGIGSGMSFSLSMMFFNLRTTSATESADLSGMAQSIGYLFAASGPILFGTLHDALGSWQPTLYVLVGITMLMLYCGLDAGRNKFLFSQKK

SEQ ID NO: 78895 - DNA, 1218 bp, Listeria innocua Clip11262
  CDS (1)..(1218): transl_table=11
atgaattcagatttaacaaataaaaaaatcctgacgcgttcaagtcgggtgatgcttattgtcggcattattttaattgcagcaaacttgcgtgcaccaattacgtcagttggacctttacttggaatgattcaatcagatttacatttaacaaacacgatggcaggattactaacgacgataccactacttgcttttgctggtttatccccttttgtttcgaaattaagtcgttcactagggatagaagtacttatttttatcgcacttttaactcttgttattggtagtttacttcgaccttttggaggcgaattctatttatttgctgggacatttatgattggacttgctattgcagtgggaaatgtcattttacctagtttgattaagaaggagtttccttttaaattaggattaatgactggggtatattcgatttcaatgaatttatgtgcggcacttgctgctggtttgacggtgccgattgcgatgaataataaattcagctggcatggaagcatggttttttgggcaatgctgggtgttttagcgttagttatctggctaccacagttaagatataaccaacgcagctcagaaaaaattgccacacatttagttactacttcggtgtggaagtcccctcttgcttggaaaatttcattatatatgggttcacagtccgcgattttttatatttcgattgcttggttaccgaacattttagcagatcaaggattatcaagtacttctagcggtcttatgctctcactaatgcagtttgctgttatgccgattacatttattattcctattatagctgggcgaatgaaaaatcagcagttgctcgttgggatttctgttttattatttatgattgggatttttgggattatgttcgcttctggtaatctatttattttagctactgcgattattttatatgggattggttcggggatgtcatttagtctttcgatgatgttctttaatttgcgaacaacaagcgctaccgaatcggcggatttatctggaatggcgcaatcaataggttatttgtttgctgcttccggtccaatattatttggtacactccatgatgctcttggcagttggcaaccaacgttatatgttctgatcggcattaccctaattatgctatattgcggcctagatgctggacgcaataaatttctctttccacagaaaaagtga

SEQ ID NO: 78896 - protein, 405 aa, Listeria innocua Clip11262
MNSDLTNKKILTRSSRVMLIVGIILIAANLRAPITSVGPLLGMIQSDLHLTNTMAGLLTTIPLLAFAGLSPFVSKLSRSLGIEVLIFIALLTLVIGSLLRPFGGEFYLFAGTFMIGLAIAVGNVILPSLIKKEFPFKLGLMTGVYSISMNLCAALAAGLTVPIAMNNKFSWHGSMVFWAMLGVLALVIWLPQLRYNQRSSEKIATHLVTTSVWKSPLAWKISLYMGSQSAIFYISIAWLPNILADQGLSSTSSGLMLSLMQFAVMPITFIIPIIAGRMKNQQLLVGISVLLFMIGIFGIMFASGNLFILATAIILYGIGSGMSFSLSMMFFNLRTTSATESADLSGMAQSIGYLFAASGPILFGTLHDALGSWQPTLYVLIGITLIMLYCGLDAGRNKFLFPQKK

SEQ ID NO: 78897 - DNA, 1281 bp, Ralstonia solanacearum GMI1000
  CDS (1)..(1281): transl_table=11
atgcgccgtaacggcgcccgcgctaacatcggcggctccgccacgtctgccaccgccatgcatcgcccgccgcagcccgccgccaacccgctccacgataccgccggccggcgctctgccggcgcgctggccatgctggtggcggggctggtgctggtgggggtgaacctgcggccggcgctctccagcctgtcgccggtgctcaagcaggtggcggcgggcacgggcctgtccggcgcgacggccggcctgctgaccacgctgcccgtggtgtgcctgggcgtgttcgcgccggccgccgccgtgctggcccggcgctttggcgccgagcgcacggtgggcgggttgctgatcgtgctggcgctcggcatcgcattgcgcagtgcgggcggcatcgtggcgctgtttgccggcacgctggcggccggtgcctgcatcggcgtgacgggcatcctgctgccgggcatcatcaagcgcgacttcggccgccaggccgacctgatgaccggcgtctacaccatggcgctgtgcctgggggcggccgtggcggccggcgccagcgcgccgctggcggcgctgctgggcggctggcagcccgcgctggcgttctgggcgctgcccgccctgctcgccttcgccggctggtggccgcacatgcgccatccgcatgccggcggcgcagccgcgcgcatcgagcgcgtcgccctgtggcggcagccgatcgcgtggcaggtcatgctgtacatggggctgcaatcgtcgctggcgtattgcgtgttcggctggatgccggtgatcctgcaggatcgcggcctctctgcggtgcaatcggggatggtggtggccgtgtcggtcctggtccagctgatcacggcgctgggcggcccgttcatcgcccggctcagccgcgaccagcggcccaccgtgctgctcatgatgctgatgacgtgggccgggctgatgggctgcctgtatgcgccggtctccacgctgtggtggtgggccgtgctgatggggctgggccagggcggcaacttcagcgtggcgctgtcgctgatcgtgctgcgctcggcggatgcgcgggtggcggccagcctgtcggcgatgacgcagggcggcggctacaccctggcggcggccggaccgtacctgatgggcgtgctgcacgacctgaccggcggctgggccgcgatgggctggctgttcagcgcgatcgcgctgagcgcgctcgtcctgggcatgctggccggacgcaaccggacactgcacgccggcgcctga

SEQ ID NO: 78898 - protein, 426 aa, Ralstonia solanacearum GMI1000
MRRNGARANIGGSATSATAMHRPPQPAANPLHDTAGRRSAGALAMLVAGLVLVGVNLRPALSSLSPVLKQVAAGTGLSGATAGLLTTLPVVCLGVFAPAAAVLARRFGAERTVGGLLIVLALGIALRSAGGIVALFAGTLAAGACIGVTGILLPGIIKRDFGRQADLMTGVYTMALCLGAAVAAGASAPLAALLGGWQPALAFWALPALLAFAGWWPHMRHPHAGGAAARIERVALWRQPIAWQVMLYMGLQSSLAYCVFGWMPVILQDRGLSAVQSGMVVAVSVLVQLITALGGPFIARLSRDQRPTVLLMMLMTWAGLMGCLYAPVSTLWWWAVLMGLGQGGNFSVALSLIVLRSADARVAASLSAMTQGGGYTLAAAGPYLMGVLHDLTGGWAAMGWLFSAIALSALVLGMLAGRNRTLHAGA

SEQ ID NO: 78899 - DNA, 1245 bp, Brucella melitensis 16M
  CDS (1)..(1245): transl_table=11
gtgcggtcacagccgcctctgatcgatgccgaggcggacagtgttcccgcgcccgatgctcagcgcccgccgagcaaagctttgcgcattctgctgggggcaagcctcgtgctgatcgcggccaatctgcgcccggttttttccagcgtgtcggtgcttttgccggaaatcattcaggcgactggcatgtcgtccgtatcggcgggcgtgcttacaacgctgcccgtcgtgtgccttggcgctttcgcgcctttcgcaccgcgccttgcacagcgttttggcgctgaacgcacgctgcttttcgtgttgatcgtgctgaccgtcggtacggctattcgcggtttgggcacacagtctttcctttatatgggggcggcgcttgcaagggctgccatcgcggtcggcaatgtgctgctgccgggtgtggtgaagcgcgattttccgaagacggcggccatcatgaccggcctttatacgatggcgctttgtgcggctgcgggcttcaccattccaatcaagaatatgctgggcggttcgtggaatctggcactggccttctgggctgttccggctgcgctggtctttgtgctctggctgccgcaggcgctgcgcgccaagcaccatgtggcccattccggtttcaaggttgccggcctttggcgcgacaggcttgcctggcaggtcacgcttttcatgggactgcaatcgtccaccgcctatatcgtgtttggatggctggcgccgatcctgcgtgaaaggggcatgagtgcaggcacagcgggcggtcttgtttccttctcgatcatggcgcaggtcattacctgtcttctgatcccgtcgattgccgtgcgccagaaaaaccagagcttcatcaatgtgtttctctgcggctgtgcggttctggcactgattggctttctttatctgccaggctgggccttcctgccgctcgccatcattcagggcatagggcagggcgggctcattgccgccgccatgatggtaatcgtcctgcgctctccggattcacatacggctgcacatctttccggcatggcgcaatgtgtgggctatattcttgccgccatcggccccttgctggtcggcatgatccatagcgcgacaggcagcttcgccgcctgcggtgtgctgttcgtcctgcttggccttggcgcctccatcaatggctggggggcagggcgcgccgggcatgtcggtgtgcaggtgtcgaaagacagcgcataa

SEQ ID NO: 78900 - protein, 414 aa, Brucella melitensis 16M
MRSQPPLIDAEADSVPAPDAQRPPSKALRILLGASLVLIAANLRPVFSSVSVLLPEIIQATGMSSVSAGVLTTLPVVCLGAFAPFAPRLAQRFGAERTLLFVLIVLTVGTAIRGLGTQSFLYMGAALARAAIAVGNVLLPGVVKRDFPKTAAIMTGLYTMALCAAAGFTIPIKNMLGGSWNLALAFWAVPAALVFVLWLPQALRAKHHVAHSGFKVAGLWRDRLAWQVTLFMGLQSSTAYIVFGWLAPILRERGMSAGTAGGLVSFSIMAQVITCLLIPSIAVRQKNQSFINVFLCGCAVLALIGFLYLPGWAFLPLAIIQGIGQGGLIAAAMMVIVLRSPDSHTAAHLSGMAQCVGYILAAIGPLLVGMIHSATGSFAACGVLFVLLGLGASINGWGAGRAGHVGVQVSKDSA

SEQ ID NO: 78901 - DNA, 1266 bp, Streptomyces coelicolor A3(2)
  CDS (1)..(1266): transl_table=11
gtgtccgaggtacccggcgaggcgtccgccacgcgcgcgtggacgacctggacgacccgtctgctcatcctcggcatcgtcctggccgcggtgaacctgcgccccgccatcacgagcctgggcgccctcctggaggaggtccgcgacgggctcggcatgagcggcagcatcgccggactgctcacctccgtacccccgctctgcttcgccgtcttcggagtcaccgctccccggctggcccgccgcttcggacccggcgcggtggtctgcgccggcatggtcgccatcaccgcgggcctgctgatccgcccgtacgccggcggcacgggcggcttcctggccgccaccgccctggcactgatgggcatcgcggtcagcaacgtcctgatgccggtcatcgtcaagcgctacttccccgaccgggtcggttccatgaccggcctctactcgatggccctcgccttcggcacctccgtcgccgcggcggcgaccgtgcccctgaccgacgcgctgggcggtcactggcagcccggcctcgccgtctgggccgtcctgcccgcgctggccgtgctgccgtggatccccttcgtgcggaaccggaaggcgccggcctccacggcgccgtacgcgccgcggccggaggacgggcggtccgccgagaagcgcgcggaacagcccccgctgcggatcacccgcagccgtacggcctgggcgctcgccgtcttcttcggcctccaggccacggccgcctacatcaccatggggtggatggcgcagatcttccgggactcgggcgtctcggccggcaccgccgggctgctgctcgccgtgatcatggtgatgggcgtgccgctcgccttcgtcatcccgcgggtggcgagccgcctgccccaccagggtccgatcgtggtggtcctgggcgtgtgcgggctcgccggatacgccggtctgtacttcgcgccggtcggcggcgcctgggcctgggccctgctgctcggcgtctccaactgcgccttcccgctggcgctgaccatggtcgggatgcgggccaggaccggggccggtgtcgcccagctgtccgccttcgcgcagagcaccggctacctgatctccatcccgggtccgctcctggtgggcgtgctctaccagcacagcgggggatgggggctgccgatcgcgctgatgagcgcgctgatggtgccgcagatcgtggtgggcgtcctggcgggacgcgaccgcaccgtggaggacgaggcgggccgctga

SEQ ID NO: 78902 - protein, 421 aa, Streptomyces coelicolor A3(2)
MSEVPGEASATRAWTTWTTRLLILGIVLAAVNLRPAITSLGALLEEVRDGLGMSGSIAGLLTSVPPLCFAVFGVTAPRLARRFGPGAVVCAGMVAITAGLLIRPYAGGTGGFLAATALALMGIAVSNVLMPVIVKRYFPDRVGSMTGLYSMALAFGTSVAAAATVPLTDALGGHWQPGLAVWAVLPALAVLPWIPFVRNRKAPASTAPYAPRPEDGRSAEKRAEQPPLRITRSRTAWALAVFFGLQATAAYITMGWMAQIFRDSGVSAGTAGLLLAVIMVMGVPLAFVIPRVASRLPHQGPIVVVLGVCGLAGYAGLYFAPVGGAWAWALLLGVSNCAFPLALTMVGMRARTGAGVAQLSAFAQSTGYLISIPGPLLVGVLYQHSGGWGLPIALMSALMVPQIVVGVLAGRDRTVEDEAGR

SEQ ID NO: 78903 - DNA, 1251 bp, Streptomyces coelicolor A3(2)
  CDS (1)..(1251): transl_table=11
atgagtccgcagccggcttcggcctcccgccggtactccgcctccgaaacaccggccgccgaccgcgcgcggtccgcccggcccgtcgtgtcggtcgggctcgtcgtcgcgatctgcctcgtggcggcgaacctgcgcaccactctcaccggtgtcggcgcactgctgcccgagatcgagcgcggcagcggtctgtcatcgagctggggcgggctgctgagtacgctcccgctgctgacgttcgccgcgacgtcgccgctggtcgcccgggcttcccaccggtggggcagcgctcgcctgctggtggcgtcgctcggtgtgctggccgtcggaacggtggtccgctcccttccctccgtcgtcttcctgttcaccggaacggtgatcctgtccgccgccatagccttcggcaacgtgctgctgcccgccctgatcagaagaagcgtgcccgcgcaccgcatccagggcgtcagcgccctctacgtgaccgtcatgggcctcatggccgcggtctcctcgggggtgtccgcgccgctggcccacaccgtgccgggttcctggcgcacggcgctcgcctggggtgtcgccttcacggtcgccgcgttcctcgcctggctgccccggatgcgaggtgacaagccccaggcgtccaccggcgggacgcacagcccggtgccctggcggtcgcggctcgcctggcaggtcaccttcttcatgggcctgcagtccctggccttctacaccgccgtcgcgtggctgccgagcatcctgatcgaccgcgggacgagcagcaccacggccggatggatgctgttctactaccaggtggtgtccttggcttccagcagcctcctgcccctgctcacccgcggccggcacgatcagcgctggaccgcggccggggcctcggtcctggtggcgggcggcttcaccgtgctggtcgccgctcccgcgctgaccgtcctggcgtgcaccctgctcggactcggcggcggcgcctgcctcgtcctcgcgctgaccttccagagccagcgcgccggcagctccggcgaagccgccgcgctggcgggcatggcacagtccatcggctacctcgtggcggcggccggccccctcctgctcggcatcctgcacgacaccacgcacagctggacacttccgctcagcgtcctggccgtcctcgggatcgccacggcagtcgccggacacggggcgggacaggaccggcacctccgtcaggacgcccgctga

SEQ ID NO: 78904 - protein, 416 aa, Streptomyces coelicolor A3(2)
MSPQPASASRRYSASETPAADRARSARPVVSVGLVVAICLVAANLRTTLTGVGALLPEIERGSGLSSSWGGLLSTLPLLTFAATSPLVARASHRWGSARLLVASLGVLAVGTVVRSLPSVVFLFTGTVILSAAIAFGNVLLPALIRRSVPAHRIQGVSALYVTVMGLMAAVSSGVSAPLAHTVPGSWRTALAWGVAFTVAAFLAWLPRMRGDKPQASTGGTHSPVPWRSRLAWQVTFFMGLQSLAFYTAVAWLPSILIDRGTSSTTAGWMLFYYQVVSLASSSLLPLLTRGRHDQRWTAAGASVLVAGGFTVLVAAPALTVLACTLLGLGGGACLVLALTFQSQRAGSSGEAAALAGMAQSIGYLVAAAGPLLLGILHDTTHSWTLPLSVLAVLGIATAVAGHGAGQDRHLRQDAR

SEQ ID NO: 78905 - DNA, 1185 bp, Xanthomonas axonopodis pv. citri str. 306
  CDS (1)..(1185): transl_table=11
atgcataccttgtcccgctccaacggcgctacccaagcggccctcctgattggcatcctgctcatcgcggccaaccttcgtggcccgatcacggcgatgccaccgctgctggcacagatccaagcggatttcggccttggcaccacggcagcgggcgcactcaccaccttgccgctactcgcattcgcgctgctgtcccccgtcagtgcactacttgcccgcgagtacgggctggaacgcaccttgttcggcgccctcgtgacgatcgctcttggcattgccctgcgttctgccggtgccgtctggtgcctgtacgtcggcacgaccctcatcggcatgggaatcgcggcgggcaacgtgctgctgcccagtctggtcaagcgcgacttcccccacaacatcgctgcactcaccggcgcttatgcgctggccatgggaatcgcggccgcgctcggctcggctgtggtcgttccgctggcgcattccttgggatggaacggtgcgctcgccaccttgctggtactgcccctggcggcgctggcggtgtggacgacccagttgggtcgccacacggctccccctcccggtacgccctcgccaccgcatggtggcgcggtctggcactccgcgctggcatggcaggtcacgctgtttctcggtctgaattcgacgatctactacatcgccatcggctggctgcccacgatcctcattgaggcgggaatgtcgccggcgaaagccggttcgctgcacggtgtcctgcaattggcgacggccgtacccggactctttttggccgtgctgctgcgtggcaggcgcgaccagagacttccagcagcggcagtggccggcttctctgtcgttgccttgctgggcctgatggtggcaccgcaattggcactggtttggtcgatcctgttcgggcttggaactggggccggcatcattctcggcctgaccttcattggcctgcgtaccggggatgcgcgccaagcggccacgctgtccggcatgtcgcagttgatcggctatctgctggccgcagcaggaccaatggcgatgggggccctgcacgatgcgctcggtggatggcgtgtgcccttgggcgtatgcgtcgtcctcgctctgatcgccgtcttcatgggcctgctggcaggccgggaccgccagatcggccgcgcatga

SEQ ID NO: 78906 - protein, 394 aa, Xanthomonas axonopodis pv. citri str. 306
MHTLSRSNGATQAALLIGILLIAANLRGPITAMPPLLAQIQADFGLGTTAAGALTTLPLLAFALLSPVSALLAREYGLERTLFGALVTIALGIALRSAGAVWCLYVGTTLIGMGIAAGNVLLPSLVKRDFPHNIAALTGAYALAMGIAAALGSAVVVPLAHSLGWNGALATLLVLPLAALAVWTTQLGRHTAPPPGTPSPPHGGAVWHSALAWQVTLFLGLNSTIYYIAIGWLPTILIEAGMSPAKAGSLHGVLQLATAVPGLFLAVLLRGRRDQRLPAAAVAGFSVVALLGLMVAPQLALVWSILFGLGTGAGIILGLTFIGLRTGDARQAATLSGMSQLIGYLLAAAGPMAMGALHDALGGWRVPLGVCVVLALIAVFMGLLAGRDRQIGRA

SEQ ID NO: 78907 - DNA, 1218 bp, Oceanobacillus iheyensis HTE831
  CDS (1)..(1218): transl_table=11
atggtagagactcaagagcatcaaaagagcaacaatcagcttcaatttgtactgttagttatcggaataattgttgtagcatttaatctacgaccggctataacatcggtaggtccattgatcagtcttatccgagaagatattgatatttcaaatggtttggcagggttattaacgagtttgccgttgatagcatttgcagttatttcaccaatggtgccgaacgttgctcataaatttacaagagaaaaagtattaatttatggacttattttaattataattggaatgtcagtccggtctatttcggtatttattttattactaataggaacattaatcattggtacagggatagcaatttgtaatgtattactaccaagtcttattaagagtcactttcctttaaaagtggcgttgatgacaagcatctatactacagtcatgaatatttttgcagcagctggctctggtttaagtaatccccttgcgaaagatctaaacttaggttgggagatttctttacttatttgggcactacctgctgtatttgctgttctaatttgggtagttatcataagaaaagatacaacaaagcaagaaactatcacaccttctaaaaagggaattctttcaggtaatcgtatgtggagaattccacttgcatggattgttgcatcatttttaggtctacaatcaacgcttttttacgttacgatttcttggcttccagaaattctgcatgattttggtatgagtatggcgactgccggatggctcctctctattacacaaattatcgggttaccagcgagctttgccattccaatcttggcaggtaagttacaaaagcaatcctttattgcttgttcgattggtatactctcattgattggctacggtggattgctattaggagattcatgggcaacgataatattcagtttgattttcattggaattgcattaggcggaggatttgctttggctttaactttcataggtctccggtctaaggatgcagaacaagcaacggagctttcgggaatggcacaatctgtcggttatttatttgctgctataggtccatttgcgataggttctatttatgatgttactgcgagctggacgttaccactgttaacattgatggtagtagcggtgttaatgataattactggatatcaagttggtaaggataggtatgtaattgattaa

SEQ ID NO: 78908 - protein, 405 aa, Oceanobacillus iheyensis HTE831
MVETQEHQKSNNQLQFVLLVIGIIVVAFNLRPAITSVGPLISLIREDIDISNGLAGLLTSLPLIAFAVISPMVPNVAHKFTREKVLIYGLILIIIGMSVRSISVFILLLIGTLIIGTGIAICNVLLPSLIKSHFPLKVALMTSIYTTVMNIFAAAGSGLSNPLAKDLNLGWEISLLIWALPAVFAVLIWVVIIRKDTTKQETITPSKKGILSGNRMWRIPLAWIVASFLGLQSTLFYVTISWLPEILHDFGMSMATAGWLLSITQIIGLPASFAIPILAGKLQKQSFIACSIGILSLIGYGGLLLGDSWATIIFSLIFIGIALGGGFALALTFIGLRSKDAEQATELSGMAQSVGYLFAAIGPFAIGSIYDVTASWTLPLLTLMVVAVLMIITGYQVGKDRYVID

SEQ ID NO: 78909 - DNA, 1305 bp, Pseudomonas putida KT2440
  CDS (1)..(1305): transl_table=11
ttgaatcctgagaccgagaaggccatggctgaatccatcacccgtaattccccgtcgaacgagcgggatctcgatgagctgctgatcgacgctgaagctgacgacgaacaggtccagcagcaggctgtggtgttgcggcggccctggctgttgctgctgggcctggtgctggtggccttgaacctgcgcccggcattgtcgagcatggcgccggtgctgggccaagtatctgaaggcttggggctgaatgcttcgcaggctggcttgctgaccaccttgccggtgctctgcctgggcctgtttgctcccttggcgccggtgctggcgcggcgctttggcagcgagcgggtgattcttggcatcctcctcaccctggcacttggcctcgtggtacgaagtacctttggggcaatcggggtgttcctcggcagcctgatggcgggggccagcatcggcattatcggcgtattgttacccggtatcgtcaagcgcgactttccacagcacgctggcacgctgaccggtgtatacaccatggcgttatgcctgggcgcggccatggccgcaggtgccaccgtacctttggcccagcatttcgacggcagctgggcactggggttgggcttctgggtgctgccggctttgctggccatgctggtgtggctgccacaggcccgtcaggggcatgggctgcacaaggtggcctatcgcgtgcgaggcttgtggcgtgacccactggcctggcaggtgaccctgtatatgggcctgcagtcatcactggcttacatcgtgttcggttggttgccatcgatcctgatcggccgcggcctcacccctaccgaggcaggtttggtgctgtcagggtcggtaatcgtgcagttgatcagttcgctcagcgccccctggctggccacccgcggcaaggaccagcggctggcaatcgtggtggtcatgtcgggcacgctggcggggctgttcggttgcctgtatgcgccactttccgggttgtgggggtgggccattgtgctgggcctggggcagggcggtacctttgccctggcgctgaccttgatcgtgctgcgctcgaaggacgcccacgtggcggcgaacttgtcgagcatggcccaaggggtgggttataccctggcctcgatggggccttttgcggtggggctggtgcatgacctgaccggcggctggacggcactgggttggatttttgcggtgctgggcgttggcgccgtggtgttcgggctgggtgccgggcgggcgctgcatgtgcaggtgacctgcgaaaaagtctga

SEQ ID NO: 78910 - protein, 434 aa, Pseudomonas putida KT2440
MNPETEKAMAESITRNSPSNERDLDELLIDAEADDEQVQQQAVVLRRPWLLLLGLVLVALNLRPALSSMAPVLGQVSEGLGLNASQAGLLTTLPVLCLGLFAPLAPVLARRFGSERVILGILLTLALGLVVRSTFGAIGVFLGSLMAGASIGIIGVLLPGIVKRDFPQHAGTLTGVYTMALCLGAAMAAGATVPLAQHFDGSWALGLGFWVLPALLAMLVWLPQARQGHGLHKVAYRVRGLWRDPLAWQVTLYMGLQSSLAYIVFGWLPSILIGRGLTPTEAGLVLSGSVIVQLISSLSAPWLATRGKDQRLAIVVVMSGTLAGLFGCLYAPLSGLWGWAIVLGLGQGGTFALALTLIVLRSKDAHVAANLSSMAQGVGYTLASMGPFAVGLVHDLTGGWTALGWIFAVLGVGAVVFGLGAGRALHVQVTCEKV

SEQ ID NO: 78911 - DNA, 1182 bp, Escherichia coli CFT073
  CDS (1)..(1182): transl_table=11
atgacctgttcaacttcattaagcggcaaaaacaggattgtccttatcgctggcattctgatgattgccacaacattacgcgtcacctttaccggcgcagcaccgttactggatacgattcgttccgcttactcgctaacgacggcgcaaaccggcttattgaccaccctgccattattagcctttgcgctgatctcaccgctggccgccccggtggcgcgacgttttggtgtggaacgtagcctgtttgccgcgttacttttgatctgtgcaggtatcgcaattcgctctctcccttcgccttacttattatttggcggtacagcggtcattggcggtgggattgcattaggcaatgtcttactgccaggattaattaaacgcgatttccctcattccgtcgccagacttaccggcgcatattccctgacaatgggagctgcggcggcactgggatcggcgatggtagtgccgctggctttgaacggttttggctggcaaggcgcgttgctcatgctgatgtgttttcctctgctggctctttttttatggctgccacagtggcgaagtcaacaacatgcaaatttgagtacctcacgcgccttacatactcggggtatcttgcgttcgccgcttgcctggcaggtaacattgtttcttgggatcaactcactggtctattacgtgattattggctggcttccggcgattctcatcagtcacggctatagcgaagcacaggcgggttcactgcatggtttgctgcaactagccacagcagctcccggtttgctgatcccacttttcttacatcatatgaaagatcagcgtggtattgcagcgttcgttgccttgatgtgcgcagtgggcgcggttgggctctgctttatgccagcacacgcgatcacctggactctgcttttcggttttggttccggcgcaacaatgatactggggttgacgttcattggtctgcgggcaagttctgcgcatcaggcggcggcactctcggggatggcacaatccgtcgggtatttgctggcagcctgtgggccgccgctgatgggtaaaatacacgatgctaacggtgactggtccgtaccactgctgggtgttgcaatactttcactactgatggcgattttcggactttgcgccgggagagacaaagaaattcgctaa

SEQ ID NO: 78912 - protein, 393 aa, Escherichia coli CFT073
MTCSTSLSGKNRIVLIAGILMIATTLRVTFTGAAPLLDTIRSAYSLTTAQTGLLTTLPLLAFALISPLAAPVARRFGVERSLFAALLLICAGIAIRSLPSPYLLFGGTAVIGGGIALGNVLLPGLIKRDFPHSVARLTGAYSLTMGAAAALGSAMVVPLALNGFGWQGALLMLMCFPLLALFLWLPQWRSQQHANLSTSRALHTRGILRSPLAWQVTLFLGINSLVYYVIIGWLPAILISHGYSEAQAGSLHGLLQLATAAPGLLIPLFLHHMKDQRGIAAFVALMCAVGAVGLCFMPAHAITWTLLFGFGSGATMILGLTFIGLRASSAHQAAALSGMAQSVGYLLAACGPPLMGKIHDANGDWSVPLLGVAILSLLMAIFGLCAGRDKEIR

SEQ ID NO: 78913 - DNA, 1194 bp, Lactobacillus plantarum WCFS1
  CDS (1)..(1194): transl_table=11
atgaccacaacacatcaacatagccgctatttaacacttggaatgatgttagcggcaacgaatatgcgtttaccaattacaatgatgccgggattaatcagttctttgaaacggacactgggtttgccgagctcgatggcgggattactgaccacgattccattattgacgtttgccattatgtccccattgattgcacattgggggcggcgatttggcaacgaactgacaatttatgtcatgttgatctttctagccgttgggagttatctgcgggtcatcccaacgattgctgcccttttcattgggacgttactagtcgggattggcgcggacggtggcaatgtcttgattccagcgattattaaagataattttccgacgaagattccagtcgcaactagtcaatacacgctctcaatgctattagtcggttcactgggaacgggactttcgggagtgttggcggcacactggtcgttaccactaacgatggcggtgctatcggtgattggactaattaatttggttgtctggttgccaaacttgaaatacaatcatcgcgcaccaacagttgcgatgaccgcgagtgatgggcagtcaacggcaactcacgggagtgtttggcggcggccgttagcgtgggtcgttacggcctttttcggcttgcaagcactagtctactattcattactgacttggttaccaacggtatttgttgcccacggcttctccttgattgtggctggcaatttagttacggtcatgcaattgagcggcctaccgatgtcatatttagtgccagcgacttctggtcatcggcgcggcgtttgggcaatgattatggtggtaggtgtcggttttattgcgggaattggtggtatcttactttccggaacgaatttttgggtggcagcactgtcctgcgtcttactaggattaggctctggagcagccttcagtttggcagtcgtcttctttacgcaaaaaacgaccaatgggtttgaaacggctgacttatctggtatggcccaatccgcgggctatttgttagctgcagtggggcccgtactattcggctggttaggcggtcaattaggctggggaccagtactctggttagctatcattctttccgcgttactagcattatccggcagcatcattttccagcatgcaacgatttatgagtaa

SEQ ID NO: 78914 - protein, 397 aa, Lactobacillus plantarum WCFS1
MTTTHQHSRYLTLGMMLAATNMRLPITMMPGLISSLKRTLGLPSSMAGLLTTIPLLTFAIMSPLIAHWGRRFGNELTIYVMLIFLAVGSYLRVIPTIAALFIGTLLVGIGADGGNVLIPAIIKDNFPTKIPVATSQYTLSMLLVGSLGTGLSGVLAAHWSLPLTMAVLSVIGLINLVVWLPNLKYNHRAPTVAMTASDGQSTATHGSVWRRPLAWVVTAFFGLQALVYYSLLTWLPTVFVAHGFSLIVAGNLVTVMQLSGLPMSYLVPATSGHRRGVWAMIMVVGVGFIAGIGGILLSGTNFWVAALSCVLLGLGSGAAFSLAVVFFTQKTTNGFETADLSGMAQSAGYLLAAVGPVLFGWLGGQLGWGPVLWLAIILSALLALSGSIIFQHATIYE

SEQ ID NO: 78915 - DNA, 1185 bp, Salmonella enterica subsp. enterica serovar Typhi Ty2
  CDS (1)..(1185): transl_table=11
atgacgacagccctttcaccacgcggcaaacagggcgctttactgattgccggtattttgatgatagccactacgctacgcgtaacatttaccggcgctgcgccgttgctggagacaatccgtacggattacggtctttccaccgcccagacgggcctgctaacaaccttgccgcttctggcgtttgcactgatttcgccgctggcggccggtattgcccgccggtttgggatggaacgcagtctgtttgccgcaatgctgctgatttgcgcgggtattgctctccgctccctgccctccgctgcattgttgtttgccggaactgccattattgggtgcgggatagcgctgggtaatgtgctgctaccaggattgattaagcgcgatttttcacaacatgtcgccaggctgacgggcgcgtactcattgacgatgggcgccgccgccgcgttggggtctgcgctggtggttccgctggcgttgcacggttttggctggcgcagcgcgctgttaatgctgatgctgtttccgctgttggcgtttcttatctggttgccgcagtggcgcactacccgctcagctaacctgagtagctcccgggcattacatgaacgcggtatctggcgttcgcctttagcctggcaagttactctgtttcttgggcttaactcactgatttattatgtgattatcggctggttaccaacaatactcatcagccacggttacagcgaagcacaggcaggatcgctacatggcctgctgcaactggcgaccgcggcgcctgggttagctattccgcttattttgcatcgctttaacgttcaacgctggattgccgcgctggtctcactattgtgcgcactgggcgcggcggggctttggtttgtgctgggccaggcgatcatctggacgctactgttcggcttcggttcaggcgcgacgatgatcctcggcctgacgtttatcggcctgcgcgccagttcggcgcatcaggcggcggcgctttccggcatggcgcagtcggtcgggtatttactggcggcatgtgggccgcccgtcatgggaaaacttcatgatgccagcggtagctggtatctgccgctatcgggcgtaacggttctggctatcatcatggcgattttcggcctctacgccggacgcgatcgagagatagcgtcataa

SEQ ID NO: 78916 - protein, 394 aa, Salmonella enterica subsp. enterica serovar Typhi Ty2
MTTALSPRGKQGALLIAGILMIATTLRVTFTGAAPLLETIRTDYGLSTAQTGLLTTLPLLAFALISPLAAGIARRFGMERSLFAAMLLICAGIALRSLPSAALLFAGTAIIGCGIALGNVLLPGLIKRDFSQHVARLTGAYSLTMGAAAALGSALVVPLALHGFGWRSALLMLMLFPLLAFLIWLPQWRTTRSANLSSSRALHERGIWRSPLAWQVTLFLGLNSLIYYVIIGWLPTILISHGYSEAQAGSLHGLLQLATAAPGLAIPLILHRFNVQRWIAALVSLLCALGAAGLWFVLGQAIIWTLLFGFGSGATMILGLTFIGLRASSAHQAAALSGMAQSVGYLLAACGPPVMGKLHDASGSWYLPLSGVTVLAIIMAIFGLYAGRDREIAS

SEQ ID NO: 78917 - DNA, 1254 bp, Chromobacterium violaceum ATCC 12472
  CDS (1)..(1254): transl_table=11
atgcaagaaaacatggggcgatccaaagctatcgccgacgaactgttgattgacgacgaagccgcgccgcgaaccggcagccgccatcgcgtgctgatgttgctgctgggcctggtgctggtgggactcaacctgcgcccggcgctgtccagcctggcgccggtgctggccatggtcagcgccgacaccggcctgagccctgcgatgtccggcctgctgaccacgctgccggtggcttgcctgggcatcttcggcccgctggcgccccacctggcgcgccgcctgggcagcgagaagaccatcgccgccgtcctgctggtcttggccgccggcatcctgctgcgcacccagctcggattgttcggcctgttcgccggctcggcgctggccggtgccgccatcggcgtgatcggcgtgctgctgcccggcatcgtcaaacgcgaattcgccaaccgcgccggcctgatgaccggcgtctacaccatggcgctatgcctgggcgcggcgctggccgccggcttcaccgtgccggtggccgagagcttcggccacgactggcgaccggcgctggcgttgtgggcggtgccggccgcgctggcgctggcggtctggtggccgcaattgagcgcccgccacgccgccagccaaggccaatggcgggtgcggggcattctgcgcgacccgttggcctggcaggtgaccttgttcatgggcctgcaatcctcgctggcctacatcgtgttcggctggctgccgtccatcctgatggaccgcggcctcaccgcgatgcagggcggactgatgctgtccttgtccaccatggtacaggtgccggcgtcgctgctggtgccgatgctggcccaccgctgccgcaaccagcgcccgcccatcgccgtcacgctgctggcggtgatcgccggcctgctgggcatgctgtacgcgcccaccgacagcctgatcctgtgggcggtcctgctcggcttcggccagggcggcctgttcagcaccgcgctcagcctgctggcccaccgctcgccggaccagcacgtggcggcccacctgtccggcatggcccagggcataggctatatgctggcctcgctgggcccgttcgccgtcggcctgatccgcggccacagccatgaagcctggccgctggcgctgctgttcagcctgatcgccgccgcggccttctgcgtcggcatgctggccggccgcaaacggctggtcggcgtgaaggccgaagccgtctaa

SEQ ID NO: 78918 - protein, 417 aa, Chromobacterium violaceum ATCC 12472
MQENMGRSKAIADELLIDDEAAPRTGSRHRVLMLLLGLVLVGLNLRPALSSLAPVLAMVSADTGLSPAMSGLLTTLPVACLGIFGPLAPHLARRLGSEKTIAAVLLVLAAGILLRTQLGLFGLFAGSALAGAAIGVIGVLLPGIVKREFANRAGLMTGVYTMALCLGAALAAGFTVPVAESFGHDWRPALALWAVPAALALAVWWPQLSARHAASQGQWRVRGILRDPLAWQVTLFMGLQSSLAYIVFGWLPSILMDRGLTAMQGGLMLSLSTMVQVPASLLVPMLAHRCRNQRPPIAVTLLAVIAGLLGMLYAPTDSLILWAVLLGFGQGGLFSTALSLLAHRSPDQHVAAHLSGMAQGIGYMLASLGPFAVGLIRGHSHEAWPLALLFSLIAAAAFCVGMLAGRKRLVGVKAEAV

SEQ ID NO: 78919 - DNA, 1317 bp, Desulfotalea psychrophila LSv54
  CDS (1)..(1317): transl_table=11
ttggcgatagacaagaggtggagttctcgcagctccataaggagctttttcaggcgattacagacagagacggcaggcaggcagttacccttcttaatcaaattctttccctccactagagtcacaatgaaaaaaatattttcccctcgtgttgtcctggtaataggtattatctttatagcctttaaccttcgggctcccattacaggcgtcggccctattattgatcttatcaaggaagatctggggcttaataatgtccaggcaggatttatcaccacccttccactgctggcatttgctctcttttctccctttgtgtctaagataagtaagagatttggctctggctataccatgctctttggacttatttttatttttgtcggggagttagttcgatcctataccaactcttctggcctctttgtcggcacagctctgatgggcctgggtattgccataggtaatgtccttatcccctctataataaagcaaaaattctccactcatgttggcagactaaccagtatctataccaccagtatgtgtgtctttgcagcggtgggggccgggctaagtgtgcccatggcttctggctatggtttcggttggcgacatggtcttgccctttgggctatcctcgttgtttttaccattattgtctggctgcctcagcttaaaaaggcagatgctgatcgaacgaactccaatggagctagtgctcctcctagcgaaaaatctatttggacctcgcccatggcctggtgggtaaccctttttatgggaatccaatccctgcttttttattctctggttgcctggcttccctctataattatggcaaggggcatggagagtagttttgccgggacaatggccctcacctttcaactggtgggtctgccggcaacccttgttattccgattattgccgataaatttaaaaatcagaggctcattggtaccgttaaggccacgatctatcttgttggcatgttactcctcttttatgcgaccaccaagcctgtccttatctgttctataatccttctcagcattggtcagggcgggagcattagtttggctattgcctttatctctttgcgtacgccccatgcccggctggcagcagagctgtccggtatggctcagtcggcgggttatctctttgccgcaatagggccgatcctgttgggagtagtgtatgaggtaactggctcgtgggatattcccattcttattcttgtcgcctccaatattctccttttcttctttgtcctcaaggcgggaagggatagacttgttcagccttag

SEQ ID NO: 78920 - protein, 438 aa, Desulfotalea psychrophila LSv54
MAIDKRWSSRSSIRSFFRRLQTETAGRQLPFLIKFFPSTRVTMKKIFSPRVVLVIGIIFIAFNLRAPITGVGPIIDLIKEDLGLNNVQAGFITTLPLLAFALFSPFVSKISKRFGSGYTMLFGLIFIFVGELVRSYTNSSGLFVGTALMGLGIAIGNVLIPSIIKQKFSTHVGRLTSIYTTSMCVFAAVGAGLSVPMASGYGFGWRHGLALWAILVVFTIIVWLPQLKKADADRTNSNGASAPPSEKSIWTSPMAWWVTLFMGIQSLLFYSLVAWLPSIIMARGMESSFAGTMALTFQLVGLPATLVIPIIADKFKNQRLIGTVKATIYLVGMLLLFYATTKPVLICSIILLSIGQGGSISLAIAFISLRTPHARLAAELSGMAQSAGYLFAAIGPILLGVVYEVTGSWDIPILILVASNILLFFFVLKAGRDRLVQP

SEQ ID NO: 78921 - DNA, 1206 bp, Bacillus licheniformis ATCC 14580
  CDS (1)..(1206): transl_table=11
atgcattacattgacgctcgacgcgcccgtttgaacaatatctttttgattgcaggaatcatatttatcgcttttaatttaagaccggctattacagctgtcgggccattgatcagttcgatccgctcggatatggatttgacgaacggcatggccggcttcttgacgacgctgccgctgttatcgttcgccgtcctgtccccggtcgcccctaagctcggacagaagcttggcaatgagagaaccctctgggtcggattggtcatcttattgatcggaattttgctgcgctcttacggagaatctattacattatttgcaggaaccgcattgatcggagtcggcatcgcaatctgcaatgtgctgctgcccagcctgatcaaacataaatttcctgacaaagcgggaattatgacaagtttctatacaacagccatgtcgatttttgcggcgctcgcatcagggatcagcattccgttgtcgcacggcttagcgtggggatggagcgcgtcgctcatggtttgggcgggcctcgcgtttgttgcgattttgatctgggttccccagctccgctatcatgatacgggaaaccgcacggtcagcttaaaggcagacggccaaacggtctggcgctcgaaaattgcctggcaggtcacattctttatgggcatacagtcgtttttgttttactgcacgatcgcctggctgcctgaaattctccgctcgcacgggatgagcatgtcgcttgccggctggatgctgtcgctgatgcagtttgccagcctcccgtcgacatttttgactccggttctcgccgggcggtttcaaaaccagaaaagcatcgtgctcgccctcggcatcctatacttggcggggatgtcagggctattgtacggaggcagtacagcgatgctgacgctatgggtcattttaatcggaattggacaagggtccagcatcagtttagccttgactttaatcgggctgagaagcgaaaatgccgatcaagccgcggcattatcagggatgtcgcaatccgccggatatttgctggcagcgattggtccaagctttgtcggttttctttacgatcacatgcactcatggaacggaccgattttactgttcatcggcgcgctggtcgctttgatcggtgcaggactcggtgcgggaagaaatcaatatatctatgctaaagcagcataa

SEQ ID NO: 78922 - protein, 401 aa, Bacillus licheniformis ATCC 14580
MHYIDARRARLNNIFLIAGIIFIAFNLRPAITAVGPLISSIRSDMDLTNGMAGFLTTLPLLSFAVLSPVAPKLGQKLGNERTLWVGLVILLIGILLRSYGESITLFAGTALIGVGIAICNVLLPSLIKHKFPDKAGIMTSFYTTAMSIFAALASGISIPLSHGLAWGWSASLMVWAGLAFVAILIWVPQLRYHDTGNRTVSLKADGQTVWRSKIAWQVTFFMGIQSFLFYCTIAWLPEILRSHGMSMSLAGWMLSLMQFASLPSTFLTPVLAGRFQNQKSIVLALGILYLAGMSGLLYGGSTAMLTLWVILIGIGQGSSISLALTLIGLRSENADQAAALSGMSQSAGYLLAAIGPSFVGFLYDHMHSWNGPILLFIGALVALIGAGLGAGRNQYIYAKAA

SEQ ID NO: 78923 - DNA, 1344 bp, Azoarcus sp. EbN1
  CDS (1)..(1344): transl_table=11
gtgtgcaggcagaatcaagatattaatcgtcaagatatcgaaattcagataaccggctactctctagaatcgactccatctccccttttcccgcggtggattcgcatgcagccccatccctccgtcacgcagcctgccgcccagggcctgcttatcgtcggcatcttgctgatcgccgcgaacctgcgcgccccggttaccggcgtcggtccggtgctcgccgacatccagcacagcttcggcttcaacgccacgcaggccggcgtgctggcgacgctgccgctgctcgcgttcgcgctcgtctcgccgctcgctgccggtgtcgcgcgtcggcacgggctcgaacgcacgctgttcggagcgctgctgatgctgacggcgggcatcgttgtccgttcgtcgagcaccgtgtggggactgtttggcggcacgatgatactgggcagtgcgatcgcgctgtgcaatgtcctgctgccgagcctgctgaagcgggacttcgccacgaaagtctcgacgatgacgtcgctttacgcggtgacgatgagcgtgaccgccgccttgtgttcggcagtgatgattccgctgacggggatgtcgtcgtccggatggactttcgcgctcgggatctgggccgtccttgccgcgttcagcgcagtggtgtggctgccgcagctgcgcagggcgacgcgcccgatgcagcaggccgccacgactccagcgatcccgatatggcgctcgccgctcgcgtggcaggtgaccgcgttcatggggctcaattcgttcgtctactacgtcgtcatcagctggctgccggcgatcctgcagcaaaatggctattccgcggcgtccgccggctcgctgcacgggctgttgcagctcgcgacggtggttcccggcgtgctcgcagtgccgctgatccatcgcctgaccgatcagcgcgccgccgcgttcctgagtgcggtcctcgccctggtcggcctcgtcggcttcatcgcgctgccgggctggagcgtcgtgtggtgcatcgtctatggcttcggcagcagtgcctgcctgatcctcgcgctgactttcatgagcctgcgcgcaggcagcgtgcatcaggcggcggcgctgtcgggcatggcgcaggcggtgggctacctgctcgccgcggtcggtccgaccctcgttggcgcgctccacgacctcttcggcggctggtccgccgcgctgctgctgtgcgcgacgatatccgcaatccaggccgtgttcgggttgtacgccggccgcccgacgcagatcggcgcgctgtcgccgggggcggtggagccggcgtcggaactggcggtgaggcggcgctga

SEQ ID NO: 78924 - protein, 447 aa, Azoarcus sp. EbN1
MCRQNQDINRQDIEIQITGYSLESTPSPLFPRWIRMQPHPSVTQPAAQGLLIVGILLIAANLRAPVTGVGPVLADIQHSFGFNATQAGVLATLPLLAFALVSPLAAGVARRHGLERTLFGALLMLTAGIVVRSSSTVWGLFGGTMILGSAIALCNVLLPSLLKRDFATKVSTMTSLYAVTMSVTAALCSAVMIPLTGMSSSGWTFALGIWAVLAAFSAVVWLPQLRRATRPMQQAATTPAIPIWRSPLAWQVTAFMGLNSFVYYVVISWLPAILQQNGYSAASAGSLHGLLQLATVVPGVLAVPLIHRLTDQRAAAFLSAVLALVGLVGFIALPGWSVVWCIVYGFGSSACLILALTFMSLRAGSVHQAAALSGMAQAVGYLLAAVGPTLVGALHDLFGGWSAALLLCATISAIQAVFGLYAGRPTQIGALSPGAVEPASELAVRRR

SEQ ID NO: 78925 - DNA, 1209 bp, Bacillus clausii KSM-K16
  CDS (1)..(1209): transl_table=11
atgagcgtacaaagtggcataaagccaactgtggcgaaacagtcgtcttcattgagttgggcgctcatctttggcatcgtcctgatctcactaacgatgcggtcgccactaacgtcggttggcccattggtagggtcgattcgtgaatctctcgggttatcgaacactgtcgcaggcctgctgacgacattgccgttgctggctttcgcgctcctttccccgttcactcctacgttggcgcgccgtttcgggatggaacgagtcttgttttgtgcgttggttctgcttatgatgggaatcgctgttcgctcggtgagtgcaactatttccttgtttgcaggcactgttttacttggcctctcgatcgcagtgtgcaacgtgctcattccgagtctagttaaacgcgacttttctaataatattggactaatgacagggatttacgcagtgtcgatgaatttatgcggtgcgatcgcatctggtatcagcgttccgctcgcccgtaatttcggtttcggctggaatggcgcacttggagtctggggcatacttgctttgatcgctgcgctattttggttccctcgaatccgtgggagtcacccatcagttgtggtcacaacgaatgtggcgatggtaaggcgaagcctgtggcgttcaccactggcgtggaccattactctttttatgggaatgcagtctctccttttctatgttttgatcacttggctgcctgaaatgatgacaagccggggattgagtgaagatagcgctggttggatgctatcgctttttcaaatggctacgcttcccgtatcttttatcgtgccaatccttgcagggcgcatgaagaaccaacgtttactggtcaccataatggctttcttattttttgtttcattaggcggcttttatttcggccatcatgcacttatttcgttatggacgattttactcggaattgccggtggatgtgcgtttagtttggctatgatctttttaagtttgcggacgaaagatgcctacgatgcagcttctttatccggtatgtcccaatctgttggctatttgctggcggcatcagggccgattttgttcggtttcctccatgatgtgacagcaggctggaaccttccacttttgctattgtttttcgttagcgcaatgctgctcttatgcggcctaggtgcgtcaaaaaaccgcactgtataa

SEQ ID NO: 78926 - protein, 402 aa, Bacillus clausii KSM-K16
MSVQSGIKPTVAKQSSSLSWALIFGIVLISLTMRSPLTSVGPLVGSIRESLGLSNTVAGLLTTLPLLAFALLSPFTPTLARRFGMERVLFCALVLLMMGIAVRSVSATISLFAGTVLLGLSIAVCNVLIPSLVKRDFSNNIGLMTGIYAVSMNLCGAIASGISVPLARNFGFGWNGALGVWGILALIAALFWFPRIRGSHPSVVVTTNVAMVRRSLWRSPLAWTITLFMGMQSLLFYVLITWLPEMMTSRGLSEDSAGWMLSLFQMATLPVSFIVPILAGRMKNQRLLVTIMAFLFFVSLGGFYFGHHALISLWTILLGIAGGCAFSLAMIFLSLRTKDAYDAASLSGMSQSVGYLLAASGPILFGFLHDVTAGWNLPLLLLFFVSAMLLLCGLGASKNRTV

SEQ ID NO: 78927 - DNA, 1245 bp, Pseudomonas syringae pv. syringae B728a
  CDS (1)..(1245): transl_table=11
atgaccgagaaactgatgactgccaaggctcaactcagcccccaaccgactgccgatcaacctcattctgccttgaagcgcccctggctgttgctgctgggtctggtgctggtcgccctcaacctgcgcccggcgttgtccagcattgcgccgctgcttgacacggtgtccgacagcctgggcatgtccgctgccgaggccggactgctgaccaccttgccggttttgtgcctgggcctgttcgcgccgctcgcaccgatcctcgcccgccggtttggcagtgagcgggtggtcatggtggtgcttctgacactggctgcaggcttggcagtgcgcagtctgtttggtcaggtcgggctgtttggcggcagcctgctggcgggtgcgagcatcggaatcatcggcgtgttgctgccgggtatcgtcaaacgtgattttccgcacaaggccggagccatgaccggtgtctacaccatggccttgtgcctgggcgcggccattgcagccggttcgacggtgccgctcagtcagtacgtgggtggcagttggcagattggcctgggtttctggctggttccggcactgattgccgccgcgttctggtttccgcaggcgcgtgaagtgcatggcacgcatcgcgatgtttaccgggtccgcggcttgttgcgtgacccgctggcctggcaggtcacgctgtacatgggcctgcaatcgtcgctgtcgtacatcgtcttcggctggttgccgtcgatcctcatcggtcgcggcctgacgcccacccaggccggcctgctgttgtccggctcgatcattgcgcaggtcatcagcgcgctggcggtgccttatctggccacacgcggcaaggatcagcgtctggcgatcatgctggtcatgtcgctgaccctgatcggtctgttcggctgcctgtatgcgccgcttggcgggctgtggggctgggcgatcctgctggggatcgggcagggcggcacgttcagtctggcgctggccttgatcgtcctgcgctcgcgcgactcacatgtcgccgccaacctgtcgagcatggcgcaaggcgtcggctacaccatcgcctcgaccggcccgtttgccgtgggcgtggtgcatgacatgaccggcagctggagcgcgattggctggatcttcgcggtactcgggctgggcgccatcatcgcgggcatgggcgccggtcgggcgctgcaggtgcaggtcagtagcgagaaggtttga

SEQ ID NO: 78928 - protein, 414 aa, Pseudomonas syringae pv. syringae B728a
MTEKLMTAKAQLSPQPTADQPHSALKRPWLLLLGLVLVALNLRPALSSIAPLLDTVSDSLGMSAAEAGLLTTLPVLCLGLFAPLAPILARRFGSERVVMVVLLTLAAGLAVRSLFGQVGLFGGSLLAGASIGIIGVLLPGIVKRDFPHKAGAMTGVYTMALCLGAAIAAGSTVPLSQYVGGSWQIGLGFWLVPALIAAAFWFPQAREVHGTHRDVYRVRGLLRDPLAWQVTLYMGLQSSLSYIVFGWLPSILIGRGLTPTQAGLLLSGSIIAQVISALAVPYLATRGKDQRLAIMLVMSLTLIGLFGCLYAPLGGLWGWAILLGIGQGGTFSLALALIVLRSRDSHVAANLSSMAQGVGYTIASTGPFAVGVVHDMTGSWSAIGWIFAVLGLGAIIAGMGAGRALQVQVSSEKV

SEQ ID NO: 78929 - DNA, 1230 bp, Pseudomonas syringae pv. phaseolicola 1448A
  CDS (1)..(1230): transl_table=11
atgactgccaaggctcaatccagcccccaaccgattaccgatcaagcccatcctgttctaaagcgcccctggctgttgctgctgggtctggtgctggtcgccctcaacctgcgccccgcgttatccagcgttgcgccgttgcttaacgaggtgtccgcaagccttgggatgtcggctgccgaagctggtctgctgaccaccttgccggtgttgtgtctgggcctgttcgcgccattggcaccgattcttgcccggcgttttggcagtgaacgggtggttttggtggtgcttctgacactggcgtcgggtctggcagtacgcagcctgttcggcgaagtcggcctgtttaccggcagcctgctggcgggcgcgagcattgggatcatcggcgtattgttgcccggtatcgtcaagcgcgatttcccgcacaaggccggggccatgactggtgtctacaccatggcgctgtgcctgggcgctgcgattgcagccggttcgacggtgccgctgagccagtacgtcggcgacagctggcaaataggtctgggtttctggctgattccggcgttgattgcggcgctgttctggtttccacaagcacgcgaaatgcatggctcacatcgcgatgtctatcgagttcgcggcctgttgcgtgacccgctggcgtggcaggtcacgctgtatatgggcctgcaatcgtcgctgtcgtacattgtcttcggctggctgccctcgattctcatcggtcgcggcctgacgccgacccaggccggtctgctgctgtccggctcgatcatcgcgcaagtcatcagcgccctggcggtgccctatctggccacacgcggcaaggatcagcgtctggcgatcatgctggtcatgtcgctcacactgaccgggctgttcggctgcctgtacgctccgctcggcgggctgtggggctgggccatcctgctggggatcgggcagggcggcacgttcagcctggcgctggccttgatcgtcctgcgctcgcgcgactcacatgtcgccgccaatctgtcgagcatggcgcaaggctttggctacaccatcgcctcgaccggcccgtttgccgtgggcgtggtgcatgacatgaccggcagctggagcgcgattggctggatcttcgcggtactcgggctgggcgctatcatcgcgggcatgggtgccggtcgggcgctgcaggtgcaggtcagtagcgagaaggtttga

SEQ ID NO: 78930 - protein, 409 aa, Pseudomonas syringae pv. phaseolicola 1448A
MTAKAQSSPQPITDQAHPVLKRPWLLLLGLVLVALNLRPALSSVAPLLNEVSASLGMSAAEAGLLTTLPVLCLGLFAPLAPILARRFGSERVVLVVLLTLASGLAVRSLFGEVGLFTGSLLAGASIGIIGVLLPGIVKRDFPHKAGAMTGVYTMALCLGAAIAAGSTVPLSQYVGDSWQIGLGFWLIPALIAALFWFPQAREMHGSHRDVYRVRGLLRDPLAWQVTLYMGLQSSLSYIVFGWLPSILIGRGLTPTQAGLLLSGSIIAQVISALAVPYLATRGKDQRLAIMLVMSLTLTGLFGCLYAPLGGLWGWAILLGIGQGGTFSLALALIVLRSRDSHVAANLSSMAQGFGYTIASTGPFAVGVVHDMTGSWSAIGWIFAVLGLGAIIAGMGAGRALQVQVSSEKV

SEQ ID NO: 78931 - DNA, 1215 bp, Thermobifida fusca YX
  CDS (1)..(1215): transl_table=11
gtggcaccacacccgacgccgacccgccgcgcccgctggcacctggccgcaggaatcgtcctcgccgccctcaacctgcgcaccgccatcaccagcatcggcccgctgctcaccgaaatcaccaccgacctgcacctgaccccggtcaccaccgggctgctcaccaccctgcccgtcctctgcttcgccggcttcggcgccctcacccccgccctgcagcgccgctggggcgaccaccacgtcctcctcgccgccctcgccgcactcaccctcggcctcgccagccgcgccctcgtcaccgacccgtggctgttcctcgccctcagcaccctcgccctcgccggcggcgccgtcggcaacgtcctcctccccaccctcgtcaaacagcacttcccccaccgcgtaggcctgctcaccgccgcctacaccaccgctatggccctcggcaccaccctcgccgctgccgccaccgtccccctcgccaccgccttccacggcaactggcggcccgcactcgccagctacgccctgctcggcctagtcgccaccatcccctgggcactggccttgcgtaacgaaccccgacgccaccccggcgaccagccgatcagcatccgcactgtcctcaccactgccctcggctggcaaagcaccctgttcttcgcgacccagtccgccatcgcctacatcatgttcggctggttcgcccacttcctccgcgaccacggcatgcccgccccgcacgccggactcgtcctctcctacctgaccgcgctcgcgatccccacctcactcgccgtccccgccgtcgtcgcccgcatgcgcaaccccgtcctcctcatcgccctcttcgtcacctgctacctggtcggctttgccggactcctcaccgctcccgtcaccggcgcctggctgtgggccaccctcatcggcatcggcatgtcctccttccccctcgccctcaccttcttcgggctccgcgcccgcagccctcacggcaccgcagccctctccgccgccacccaaggcgtcggctacctgctcgccggaaccgggccgttcctcttcggcctcctccgcgacctcagcggagactggcggctgtccattggcctgctcgtcgccctcaccttcgcccacggcggctgcggcatcctgctcagccggccccgccacatcgaagacgccgtcgtgcccagcccagtcgccccctga

SEQ ID NO: 78932 - protein, 404 aa, Thermobifida fusca YX
MAPHPTPTRRARWHLAAGIVLAALNLRTAITSIGPLLTEITTDLHLTPVTTGLLTTLPVLCFAGFGALTPALQRRWGDHHVLLAALAALTLGLASRALVTDPWLFLALSTLALAGGAVGNVLLPTLVKQHFPHRVGLLTAAYTTAMALGTTLAAAATVPLATAFHGNWRPALASYALLGLVATIPWALALRNEPRRHPGDQPISIRTVLTTALGWQSTLFFATQSAIAYIMFGWFAHFLRDHGMPAPHAGLVLSYLTALAIPTSLAVPAVVARMRNPVLLIALFVTCYLVGFAGLLTAPVTGAWLWATLIGIGMSSFPLALTFFGLRARSPHGTAALSAATQGVGYLLAGTGPFLFGLLRDLSGDWRLSIGLLVALTFAHGGCGILLSRPRHIEDAVVPSPVAP

SEQ ID NO: 78933 - DNA, 1212 bp, Rhodospirillum rubrum ATCC 11170
  CDS (1)..(1212): transl_table=11
gtgaccccttcctccccctggcatggccgaagcttgctgctggcgggcgccatcgttctggtcgccctcaacctgcgaccggcgctgagcagcgtcggaccggttctcaatgaaatcatggccggtctcggtctatcggccgcccaggccagttggctgaccaccttgccggtgctgtgcctggggctgttcggcccgctggccccccggctggcccgcatcgtcggcaccgaccgcctgatcctggccatgctggtggttctggccgccgccatcgccttgcgcggggcgcatacgcctttggcgctgttcatcggcacggcggtgggcggtttggcgatcggagcggtcaacgtgctgctgcccggggtgctcaagcgcgattaccccggccatgcggtggcgatgaccggggtgatgaccatggcgatgtgcggcggagcggcggtggccgccggggcgacggtgccgctgatgaaccggctggacggcgattgggcggcggccctggcatggtgggtggtgccggccctgatcgccatcgtcgcctgggcccccttcgccttgaggggcaagcggggcggcaaggccggcggcgtgctgccggtggtcggcctgtggcgcgacaaggtggcttggcaggtgaccttgttcatgggcatgcaatcctcgctggcctattgcgtgttcggctggctggcgccgatcctgcgcgaccgtgggatctcggcggtggaggccgggctgatggtttcggtctcggtgctgtgccaattgcccaccgccctggtcacccccagtctggccggtcgggcgcgcgaccagcggctggccgtggtgctgacccaatgcggaacggcgatcggactgatgggctgcatgctggcccccctgtcgctgatctggggcttcgccgtgatcctcgggctggcccagggcgcctccttcgccacggcgctcagcctgatcgttttgcgctcgggcgatagccatatcgccgcccatctctcgggcatggctcaaggggtgggctatagcgtttcggcgatgggccccttgctggtcgggctgatccaccagcagaccggcagttggggtccggtggccgggctgttcctggcgattggcgccttggccctgatcgccggcctgggggccggacggcggcgcaccgtcggcgcccgggtggaaggccatgcgtccgccgcctga

SEQ ID NO: 78934 - protein, 403 aa, Rhodospirillum rubrum ATCC 11170
MTPSSPWHGRSLLLAGAIVLVALNLRPALSSVGPVLNEIMAGLGLSAAQASWLTTLPVLCLGLFGPLAPRLARIVGTDRLILAMLVVLAAAIALRGAHTPLALFIGTAVGGLAIGAVNVLLPGVLKRDYPGHAVAMTGVMTMAMCGGAAVAAGATVPLMNRLDGDWAAALAWWVVPALIAIVAWAPFALRGKRGGKAGGVLPVVGLWRDKVAWQVTLFMGMQSSLAYCVFGWLAPILRDRGISAVEAGLMVSVSVLCQLPTALVTPSLAGRARDQRLAVVLTQCGTAIGLMGCMLAPLSLIWGFAVILGLAQGASFATALSLIVLRSGDSHIAAHLSGMAQGVGYSVSAMGPLLVGLIHQQTGSWGPVAGLFLAIGALALIAGLGAGRRRTVGARVEGHASAA

SEQ ID NO: 78935 - DNA, 1212 bp, Rubrobacter xylanophilus DSM 9941
  CDS (1)..(1212): transl_table=11
gtgaagggctcgggcttcctccggggcgctctgccgttcttctgcgtcgtcctcgccgggctcaacctgcgcgcctccataacctccgtggggccggttatcggggggataagggaggacatggggctctccagcgggctcgccgggctgctcaccaccctcccgctcctcgccttcgccgccttctcgtcgctggccccccggctcgccggccgcttcgggctctcccgcacgctgttcggggggctggtgctgctcgcggcgggcatagctttgcgctcgctgccgcaggaggcggcgctgttcgccgggacggccgtgctcggcgccgccatagccgccgccaacgtccttctccccggcttcgtaaagcgctacttcccccgtcgcgtcggaccggtcacgggcacctacataaccgcgatgaacgttggggccgcgctcggcgccgggctgagcgcgccgctggcacgctcggcggggctcgggtggcagggcgcgctcggggtgtgggccgtaccggtgctgctcgcggtcctcgcgtgggctcccttgctgaaggagcgccccgagcgctcggcgcccggccgtgccccgcgcgggccgtggcgctcggcgctcgcctggcaggtcaccctgtttatggggctgcagtccgtagtgttcttcgtctcgatcacctggctgcccgccatactcggcgagggaggcctgagcgcggtcggggccgggtggatggtctcgctcatgcagctcgtcgggatcccggccaccctcctggtcccggtcctggccgcccgcatgcgctcgcagagcgccctcgccgccggggctgccctgctctccggaacggggatactgggcctcctcttcctcggcgggccgctcagctcggtccccgtcgtcctgctcgggctcggccagggggcggccatcagcctggcgctcaccctcttcgccctgcgcgcggcggacgcggccggggccgccgcgctctccggcatggcgcagacggtgggctatctcttcgcggccgcgggcccgccgctcttcggggcgctgcacgacgccaccggagggtggacggtgcccctggtggtgctctgcctcgtcaccggcgccatgctgctcgccggcatcggggccggccgggacgccgtggtgcgcgtcccggagaggcggcccgcggatgtaagacggcctcgttcctga

SEQ ID NO: 78936 - protein, 403 aa, Rubrobacter xylanophilus DSM 9941
MKGSGFLRGALPFFCVVLAGLNLRASITSVGPVIGGIREDMGLSSGLAGLLTTLPLLAFAAFSSLAPRLAGRFGLSRTLFGGLVLLAAGIALRSLPQEAALFAGTAVLGAAIAAANVLLPGFVKRYFPRRVGPVTGTYITAMNVGAALGAGLSAPLARSAGLGWQGALGVWAVPVLLAVLAWAPLLKERPERSAPGRAPRGPWRSALAWQVTLFMGLQSVVFFVSITWLPAILGEGGLSAVGAGWMVSLMQLVGIPATLLVPVLAARMRSQSALAAGAALLSGTGILGLLFLGGPLSSVPVVLLGLGQGAAISLALTLFALRAADAAGAAALSGMAQTVGYLFAAAGPPLFGALHDATGGWTVPLVVLCLVTGAMLLAGIGAGRDAVVRVPERRPADVRRPRS

SEQ ID NO: 78937 - DNA, 1191 bp, Rhizobium leguminosarum bv. viciae 3841
  CDS (1)..(1191): transl_table=11
gtgcggggagctgcgggtcgttttctgctgggcgcaagcctggtgctgatcgccttcaacctgcgcccggtcttctccagcgcctcggcgctgctgccggaaatccgctcggagctcggcctcagcgcgctgggcgccagcctgctgacgacgctgccggtggtctgcctcggcgccttctcgccgcttgcgccccgtcttgcccagcgcttcggaacggaacgcacgctgctcggcgttctcctgcttctggcgctcggcacgggtttgcgcgggctttcctccgtgccgctgctcttcatcggtacggcccttgccggcgcctgtatcgccgtcggcaacgtgctgctgccggggttggtgaagcgggatttcgccgggcgcgccgcgctgatgaccggcttctatacgatggcgctctgcgccggggcggcaagtgccgccgggctgacgctgccgatcgagcacgcgctcggcggctctctcgagggcgccctcgccgtctgggcgctgcctgccctcatcgtcagcctgctctggctgcctgaggttcttcgcagcggcaggcaggcaagacggaacggcttccacgtcaaaggcctctggcgcgaccggctcgcctggcaggtgacgctgttcatggggctgcaatcggcacttgcctattgcgtcttcggctggctggttccgatcttgcgcgaacgcgggctcgacggcgtcaccgccggggcgatcgtttccctgtcagtgatggtgcaagcggcatcctgcctgatcgtgccgcatatcgccgtccgcggtcgcgaccagcggctgatcaatgcgagcctctgcggcgtcgccgtcaccgccctgctcggcctgctcttcgcaccgctttcgacggtctggctatgggcggtgctgcagggcatcggccagggtgggctgatcgcggcggccatgacgacgatcgtgctgcgctcgcgcgatcccgatgtcgccgcccatctttccggcatggcgcaatgcgtcggctacctgctcgccgccatcggcccgctcatcgtcggcctcatccgcggttggaccggcagcttttcctggtgcgcagccctgttcgtcgcactcggactgggcgcggcgatcaacggctggaaggccggccgggcggtcgagatcaatgtccatgccgccgaaaaggacggttga

SEQ ID NO: 78938 - protein, 396 aa, Rhizobium leguminosarum bv. viciae 3841
MRGAAGRFLLGASLVLIAFNLRPVFSSASALLPEIRSELGLSALGASLLTTLPVVCLGAFSPLAPRLAQRFGTERTLLGVLLLLALGTGLRGLSSVPLLFIGTALAGACIAVGNVLLPGLVKRDFAGRAALMTGFYTMALCAGAASAAGLTLPIEHALGGSLEGALAVWALPALIVSLLWLPEVLRSGRQARRNGFHVKGLWRDRLAWQVTLFMGLQSALAYCVFGWLVPILRERGLDGVTAGAIVSLSVMVQAASCLIVPHIAVRGRDQRLINASLCGVAVTALLGLLFAPLSTVWLWAVLQGIGQGGLIAAAMTTIVLRSRDPDVAAHLSGMAQCVGYLLAAIGPLIVGLIRGWTGSFSWCAALFVALGLGAAINGWKAGRAVEINVHAAEKDG

SEQ ID NO: 78939 - DNA, 1182 bp, Kineococcus radiotolerans SRS30216
  CDS (1)..(1182): transl_table=11
gtgctcctcgcggggttcctcctcgtcgcctgcgccatgcgggcccccctcaccggcgtcggcccggtgctgccggtcctgtccgccgacaccggcctgtccgcgacggccgccggggcgctgacctccctgccgctgctggccttcgccgtcagctccctcgtcgtgccccgcgtcgccgcccgctgcgggacccgcccgacgctggtgctcgccctgttcctgctcgtgctcggggccctgctgcgctgggtccccggcgtcgtgccgctcttcgccggcaccgccgtcgtcggggtggccatcgccgtcgccaacgtcctcatgcccgccctcgcccgcgacgacttcccccgccgcatccccctgctgaccagcacctacgtcgtcctcatgcaggtcgtcgccagcgtctcctccggggtggccgtcccgctggcccgggagctgcccggcggctggcgcagcgcgctcgccgtgtgggccgtgcccgccctggtcggcgggctcctgtggctgccgctggtccgccgccgcggcaccgcccccaccgccccccgcgcccgggccccgtggggctcacccctggcgtgggcggtcacggcgttcctggcggcccagtcggtggtcttctacgtcctgctgtcgtggctggcgacgatcgtccacgaccgctccggcgccgacgccaccgcggccggggtgctgctgtcggtgatgcaggtcgcgggggtcgcgggcagcctgctggtccccctcgccgccgggcgcacggtgacccggacgcggcgggcggcgctgggctccacggcgctgaccctgctcgggctcgtgctgctcctggcggcgccgggcgcggcgacggtcgccgtggtcgtggcggggctggggatgggcgggtcggtggtgctggccctggcgagcgtctcggcgcgggcggccgacggccccacggcggtggcgctgtcggggatggcccaggccgtcggctacctcgcggccgcggcgggcccggtgctcgccggcgccctgcacgcggcgagcggcgggtggacgctgccgctggccgtcctggtcgtggtctgcgccgggcagctggtggcggcgcgcctggccggccgcgacgccctggtgcgctccccggcggcggggccggcgggggacgcccggggccgggcctag

SEQ ID NO: 78940 - protein, 393 aa, Kineococcus radiotolerans SRS30216
MLLAGFLLVACAMRAPLTGVGPVLPVLSADTGLSATAAGALTSLPLLAFAVSSLVVPRVAARCGTRPTLVLALFLLVLGALLRWVPGVVPLFAGTAVVGVAIAVANVLMPALARDDFPRRIPLLTSTYVVLMQVVASVSSGVAVPLARELPGGWRSALAVWAVPALVGGLLWLPLVRRRGTAPTAPRARAPWGSPLAWAVTAFLAAQSVVFYVLLSWLATIVHDRSGADATAAGVLLSVMQVAGVAGSLLVPLAAGRTVTRTRRAALGSTALTLLGLVLLLAAPGAATVAVVVAGLGMGGSVVLALASVSARAADGPTAVALSGMAQAVGYLAAAAGPVLAGALHAASGGWTLPLAVLVVVCAGQLVAARLAGRDALVRSPAAGPAGDARGRA

SEQ ID NO: 78941 - DNA, 1356 bp, Photobacterium sp. SKA34
  CDS (1)..(1356): transl_table=11
atgtcacataaaaacaaaaaaacagtccctaaagttgcacgaccagcattggttatcctgggtattttacttattgcaagtaacctacgtgcgccacttacaggattaggacctattctagagttcatctcacaagatttaggtttaagtgcaacacaagccggtatgttaactactttgcctttgttggcctttgcactattttcaccggtatcatcaggccttgcgcgtaaaattggcttagagccatctcttatgatagcccttgttcttgttggcggcggtgtacttattcgctccggtggatcaaccttaatgctatttttgggtacctgtataataggtctcggtatagcaataggtaacgtactattaccaagcttactaaaaagagacttcccaacaaaagtcactactttaacagctgtctatgtattaatcatgggtattggctcaacattaagctcaagtacagctattccaatgatgaagcttgctggttcaatgggaattactgctattccgcattgggcatttgctttagcaaccgtactgctcttcccaattatttcaattattgtatggttgccacaattatcaggccatactcgcccttctgcagatactgctgagattgatagccacagttatctatggcgttcagctgctgcatggcaagtaactatctttttaggcttgaactctttcatcatgtacatctttatcagctggttaccaagtatccttattgataatggttacacagagaaccaagcgggttacttacatggtgtattacagctttcaactgccattccagcactagtgcttatcccactaatggcaaaaatgaaagacaaacgcggcatgagctttgctatggctgtactgggcttcatcggtattcttggcctacttatgatgcctgaacacgcgttaatctgggtaatttgctttggctttagctgtggtggtggttttatacttggcctgtcatttgttggtattcgtactcatgatgctcaccaagcagccgcactatctggtatggcacaatgtatgggttacttacttgcagcaactggccctataatttttggctcgctacatgaatcaacacatagctgggaagtaccattatatatgacactttcagtctgtgtggtttggggatttttagcactgtttgctggtcgttcacacgttatcgttcgtagcgaaagtggtaaagatatcattatcgacacacctgttcatgaaagtatccatgaagaacttaaacgcttaaaaaatgaattagcgctagtgactgaagaacgtaacgaacttaaaaaagcatttaacgcaaaattttaa

SEQ ID NO: 78942 - protein, 451 aa, Photobacterium sp. SKA34
MSHKNKKTVPKVARPALVILGILLIASNLRAPLTGLGPILEFISQDLGLSATQAGMLTTLPLLAFALFSPVSSGLARKIGLEPSLMIALVLVGGGVLIRSGGSTLMLFLGTCIIGLGIAIGNVLLPSLLKRDFPTKVTTLTAVYVLIMGIGSTLSSSTAIPMMKLAGSMGITAIPHWAFALATVLLFPIISIIVWLPQLSGHTRPSADTAEIDSHSYLWRSAAAWQVTIFLGLNSFIMYIFISWLPSILIDNGYTENQAGYLHGVLQLSTAIPALVLIPLMAKMKDKRGMSFAMAVLGFIGILGLLMMPEHALIWVICFGFSCGGGFILGLSFVGIRTHDAHQAAALSGMAQCMGYLLAATGPIIFGSLHESTHSWEVPLYMTLSVCVVWGFLALFAGRSHVIVRSESGKDIIIDTPVHESIHEELKRLKNELALVTEERNELKKAFNAKF

SEQ ID NO: 78943 - DNA, 1320 bp, Desulfitobacterium hafniense DCB-2
  CDS (1)..(1320): transl_table=11
atgaatcagttaagcactaaaccaacacagcattcatcttcgccaaatagaacagtcctgatcttgatgctgggaatcgccctgctcgcagccaatctgcgggcacctttgacttcagttggacctttggtcagtttaatgcgcgacagcctgcatatttccaacaccttagcgggtatgatgactaccttgcccctgtttgccttcgctttgttttctccccttgttcccggattggcccgcagatttgggatggaacgggtgttgtttggctccgttgtcattcttgccgctggaattttactgcgttcctggtcgggaagtttcggcttgtttctgggaacggcaattctggggctttccatctcagtgggcaatgtattaataccaagtctgataaaaagagagtttcccagacaggtcggagtgatgacaggtgtctacaccgtttccatgaatacctttgcggcactggcctccggtatcagtattcccttagcggtgggcttgggcttaggatggaccggggcgttaaggatttgggcggtacttagcctgatcgccatgttctgctggattccccagttaaggcggaacagccaaggaagctcagctgccggagaatccatcactagggaggccaaagcagaaacctatagacgctctgaagaagttaagcataggaatagggcgcagggagcggacgccaaaagcataaacatgtggaaatcgtctttggcctggcaggtcaccttgtacatggggctgcaatccatggtgttttactgcatggttgcctggctgccggacattttaattcaggcggggatgaattcaggccaagcaggctggatgctttcccttatgcagctggcactgatccccatgacctttgtgggctctgttctggccgggcgcaaggccagtcagcattcattggtgactttcggttcggtgtgcgtgatcatagggcttgcggggctgctcctttggggcgggtcagggctgaccttattatggattatcatattgggaattgggggaggatttaccttcagtctggcgatgatgctcttcagcctgcgcacggaaaatgccgacgaagcggccaggctctccgggatggcccaatcgattggctatctcctggctgccttcgggcctatgttttttgggtatctgcacgatctaaccgctaactggacgatgccgctgatcattctgatcgccgtcgctgttctctgctggcttaccggtttttgtgcatcaggtgatcggtatatcagtgcaactgtgaaaaatagaggggggcgattatga

SEQ ID NO: 78944 - protein, 439 aa, Desulfitobacterium hafniense DCB-2
MNQLSTKPTQHSSSPNRTVLILMLGIALLAANLRAPLTSVGPLVSLMRDSLHISNTLAGMMTTLPLFAFALFSPLVPGLARRFGMERVLFGSVVILAAGILLRSWSGSFGLFLGTAILGLSISVGNVLIPSLIKREFPRQVGVMTGVYTVSMNTFAALASGISIPLAVGLGLGWTGALRIWAVLSLIAMFCWIPQLRRNSQGSSAAGESITREAKAETYRRSEEVKHRNRAQGADAKSINMWKSSLAWQVTLYMGLQSMVFYCMVAWLPDILIQAGMNSGQAGWMLSLMQLALIPMTFVGSVLAGRKASQHSLVTFGSVCVIIGLAGLLLWGGSGLTLLWIIILGIGGGFTFSLAMMLFSLRTENADEAARLSGMAQSIGYLLAAFGPMFFGYLHDLTANWTMPLIILIAVAVLCWLTGFCASGDRYISATVKNRGGRL

SEQ ID NO: 78945 - DNA, 1281 bp, Pseudomonas putida GB-1
  CDS (1)..(1281): transl_table=11
atggctgaatcaatcacacgcaataccccgccaaaggagcgcgagctcgatgagctgctgatcgacgctgaagctgacgacgagcaggtgcagcagcagcccgtgctgctgaggcggccctggtttttgttgctgggcctggtgctggtggcgttgaacttgcgcccggcgctgtcgagcatggcgccggtgctgggccaggtctccgagggcctggggctcaatgcctcgcaggcaggcttgctgaccaccttgccggtgctgtgcctgggcctgttcgcgccgctggcgcctgcgctggcacggcgctttggcagcgagcgggtgatcgtcggcattctggttaccctggcgctgggtatcggggtgcgaagcacatttggcgtcaccggggtgtttctcggtagcctgatggcgggtgccagcatcggcattatcggcgtgttgctgccgggtatcgtcaagcgcgatttcccgcagcacgctggcacgctgaccggtgtgtacaccatggctttgtgcctgggcgcggccatggcggcgggggccaccgtacccttggcccagcatttcgacggcagttgggcgctggggctgggcttctgggggctgccggccttgctggccatgctggtgtggctgcctcaggcccggcacgggcatggcctgcacaaggttgcctatcgcgtgcgtggcctgtggcgcgacccgctggcctggcaggtgaccctgtacatggggctgcagtcgtcgttggcctacatcgtctttggctggttgccgtcgatcctgatcggccgcggcctaagcccgaccgaggcggggctggtgctgtcgggctcggtgatcgtgcagttgatcagctcgctcacagcaccttggttggccacccgtggcaaggaccaacggctggctatcgtggtggtcatgttgatcaccctggcggggttgttcggttgcctgtatgcaccgatctccgggctgtggggctgggccgtggtgcttggtctggggcagggcggtacttttgccctggcgctgaccttgatcgtgctgcgctcgaaggacgcgcacgttgcggcaaacctgtcgagcatggcccagggggtcggttacaccctggcgtcaatggggccatttgcggtggggttggtgcatgacatgaccgggggctgggcggcagtggggtggattttcgcggtgctgggtactggcgccatcgtgttcgggctgggtgccgggcgggcgttgcatgtacaggtgacaagcgagaaggtctga

SEQ ID NO: 78946 - protein, 426 aa, Pseudomonas putida GB-1
MAESITRNTPPKERELDELLIDAEADDEQVQQQPVLLRRPWFLLLGLVLVALNLRPALSSMAPVLGQVSEGLGLNASQAGLLTTLPVLCLGLFAPLAPALARRFGSERVIVGILVTLALGIGVRSTFGVTGVFLGSLMAGASIGIIGVLLPGIVKRDFPQHAGTLTGVYTMALCLGAAMAAGATVPLAQHFDGSWALGLGFWGLPALLAMLVWLPQARHGHGLHKVAYRVRGLWRDPLAWQVTLYMGLQSSLAYIVFGWLPSILIGRGLSPTEAGLVLSGSVIVQLISSLTAPWLATRGKDQRLAIVVVMLITLAGLFGCLYAPISGLWGWAVVLGLGQGGTFALALTLIVLRSKDAHVAANLSSMAQGVGYTLASMGPFAVGLVHDMTGGWAAVGWIFAVLGTGAIVFGLGAGRALHVQVTSEKV

SEQ ID NO: 78947 - DNA, 25 bp, Artificial sequence
  primer
atgacctgttcaacttcattaagcg

SEQ ID NO: 78948 - DNA, 24 bp, Artificial sequence
  primer
ttagcgaatttctttgtctctccc

SEQ ID NO: 78949 - protein, 415 aa, Artificial sequence
  consensus sequence
  Variant (2)..(3): Xaa in position 2 to 3 is any amino acid
  Variant (5)..(6): Xaa in position 5 to 6 is any amino acid
  Variant (7)..(8): Xaa in position 7 to 8 is any or no amino acid
  Variant (10)..(11): Xaa in position 10 to 11 is any amino acid
  Variant (14)..(20): Xaa in position 14 to 20 is any amino acid
  Variant (22)..(37): Xaa in position 22 to 37 is any amino acid
  Variant (39)..(39): Xaa in position 39 is any amino acid
  Variant (45)..(52): Xaa in position 45 to 52 is any amino acid
  Variant (54)..(62): Xaa in position 54 to 62 is any amino acid
  Variant (64)..(71): Xaa in position 64 to 71 is any amino acid
  Variant (73)..(77): Xaa in position 73 to 77 is any amino acid
  Variant (79)..(81): Xaa in position 79 to 81 is any amino acid
  Variant (83)..(89): Xaa in position 83 to 89 is any amino acid
  Variant (92)..(92): Xaa in position 92 is any amino acid
  Variant (94)..(97): Xaa in position 94 to 97 is any amino acid
  Variant (98)..(98): Xaa in position 98 is any or no amino acid
  Variant (100)..(101): Xaa in position 100 to 101 is any amino acid
  Variant (103)..(106): Xaa in position 103 to 106 is any amino acid
  Variant (109)..(109): Xaa in position 109 is any amino acid
  Variant (111)..(113): Xaa in position 111 to 113 is any amino acid
  Variant (115)..(116): Xaa in position 115 to 116 is any amino acid
  Variant (118)..(124): Xaa in position 118 to 124 is any amino acid
  Variant (125)..(125): Xaa in position 125 is any or no amino acid
  Variant (127)..(128): Xaa in position 127 to 128 is any amino acid
  Variant (130)..(135): Xaa in position 130 to 135 is any amino acid
  Variant (136)..(137): Xaa in position 136 to 137 is any or no amino acid
  Variant (139)..(144): Xaa in position 139 to 144 is any amino acid
  Variant (145)..(145): Xaa in position 145 is any or no amino acid
  Variant (147)..(152): Xaa in position 147 to 152 is any amino acid
  Variant (153)..(161): Xaa in position 153 to 161 is any or no amino acid
  Variant (163)..(163): Xaa in position 163 is any amino acid
  Variant (164)..(165): Xaa in position 164 to 165 is any or no amino acid
  Variant (167)..(179): Xaa in position 167 to 179 is any amino acid
  Variant (181)..(181): Xaa in position 181 is any amino acid
  Variant (183)..(199): Xaa in position 183 to 199 is any amino acid
  Variant (200)..(229): Xaa in position 200 to 229 is any or no amino acid
  Variant (231)..(234): Xaa in position 231 to 234 is any amino acid
  Variant (237)..(237): Xaa in position 237 is any amino acid
  Variant (240)..(242): Xaa in position 240 to 242 is any amino acid
  Variant (244)..(245): Xaa in position 244 to 245 is any amino acid
  Variant (247)..(249): Xaa in position 247 to 249 is any amino acid
  Variant (251)..(254): Xaa in position 251 to 254 is any amino acid
  Variant (257)..(258): Xaa in position 257 to 258 is any amino acid
  Variant (261)..(263): Xaa in position 261 to 263 is any amino acid
  Variant (264)..(264): Xaa in position 264 is any or no amino acid
  Variant (266)..(270): Xaa in position 266 to 270 is any amino acid
  Variant (273)..(289): Xaa in position 273 to 289 is any amino acid
  Variant (291)..(298): Xaa in position 291 to 298 is any amino acid
  Variant (299)..(299): Xaa in position 299 is any or no amino acid
  Variant (301)..(312): Xaa in position 301 to 312 is any amino acid
  Variant (313)..(313): Xaa in position 313 is any or no amino acid
  Variant (315)..(316): Xaa in position 315 to 316 is any amino acid
  Variant (318)..(332): Xaa in position 318 to 332 is any amino acid
  Variant (333)..(335): Xaa in position 333 to 335 is any or no amino acid
  Variant (337)..(337): Xaa in position 337 is any amino acid
  Variant (339)..(339): Xaa in position 339 is any amino acid
  Variant (341)..(344): Xaa in position 341 to 344 is any amino acid
  Variant (346)..(352): Xaa in position 346 to 352 is any amino acid
  Variant (354)..(359): Xaa in position 354 to 359 is any amino acid
  Variant (362)..(362): Xaa in position 362 is any amino acid
  Variant (365)..(365): Xaa in position 365 is any amino acid
  Variant (369)..(370): Xaa in position 369 to 370 is any amino acid
  Variant (373)..(374): Xaa in position 373 to 374 is any amino acid
  Variant (376)..(377): Xaa in position 376 to 377 is any amino acid
  Variant (380)..(382): Xaa in position 380 to 382 is any amino acid
  Variant (384)..(390): Xaa in position 384 to 390 is any amino acid
  Variant (391)..(391): Xaa in position 391 is any or no amino acid
  Variant (393)..(409): Xaa in position 393 to 409 is any amino acid
  Variant (411)..(412): Xaa in position 411 to 412 is any amino acid
LXXGXXXXAXXLRXXXXXXXPXXXXXXXXXXXXXXXXGXLTTLPXXXXXXXXPXXXXXXXXXGXXXXXXXXLXXXXXGXXXRXXXXXXXLFXGXXXXXGXXIXXXXVLXPXXXKXXFXXXXXXXXTXXYXXXXXXXXAXXXXXXXPXXXXXXXXXXXXXXXWXXXLXXXXXXXXXXXXXWXPXXXXXXXXXXXXXXXXXXXXXXXXXXXXXXXXXXXXXXXXXXXXXXXWXXXXAWXVTXXXGXXSXXXYXXXXWLXXILXXXXGXXXXXAGXXXXXXXXXXXXXXXXXPXXXXXXXXXQXXXXXXXXXXXXXGXXGXXXXXXXXXXXXXXXXXXGXGXGXXXXLXXXXXXXRXXXXXXAAXLSXMAQXXGYXXAXXGPXXXGXXXXXXXXWXXXXXXXXXXXXXXXXXGXXAGR

SEQ ID NO: 78950 - protein, 38 aa, Artificial sequence
  protein pattern
  Variant (2)..(3): Xaa in position 2 to 3 is any amino acid
  Variant (4)..(5): Xaa in position 4 to 5 is any or no amino acid
  Variant (7)..(8): Xaa in position 7 to 8 is any amino acid
  Variant (9)..(9): Xaa in position 9 is Phe or Tyr
  Variant (10)..(10): Xaa in position 10 is Phe, Leu or Met
  Variant (12)..(12): Xaa in position 12 is any amino acid
  Variant (13)..(13): Xaa in position 13 is Asn or Gln
  Variant (14)..(14): Xaa in position 14 is Ala or Ser
  Variant (15)..(17): Xaa in position 15 to 17 is any amino acid
  Variant (18)..(18): Xaa in position 18 is Phe or Tyr
  Variant (19)..(20): Xaa in position 19 to 20 is any amino acid
  Variant (21)..(21): Xaa in position 21 is Phe, Ile, Leu or Val
  Variant (22)..(22): Xaa in position 22 is Ala, Gly, Ser or Thr
  Variant (24)..(24): Xaa in position 24 is Leu or Met
  Variant (25)..(25): Xaa in position 25 is Ala, Pro or Val
  Variant (26)..(26): Xaa in position 26 is any amino acid
  Variant (27)..(27): Xaa in position 27 is Ile, Leu or Val
  Variant (28)..(28): Xaa in position 28 is Phe, Ile or Leu
  Variant (29)..(29): Xaa in position 29 is any amino acid
  Variant (30)..(30): Xaa in position 30 is Ala, Asp, Glu, Gly, Gln or Ser
  Variant (31)..(31): Xaa in position 31 is any amino acid
  Variant (33)..(33): Xaa in position 33 is any amino acid
  Variant (34)..(34): Xaa in position 34 is Asp, Glu, Asn, Ser or Thr
  Variant (35)..(37): Xaa in position 35 to 37 is any amino acid
  Variant (38)..(38): Xaa in position 38 is Ala, Gly or Ser
AXXXXVXXXXGXXXXXXXXXXXWXXXXXXXXGXXXXXX

SEQ ID NO: 78951 - protein, 39 aa, Artificial sequence
  protein pattern
  Variant (2)..(8): Xaa in position 2 to 8 is any or no amino acid
  Variant (10)..(10): Xaa in position 10 is Ala, Ser or Thr
  Variant (11)..(15): Xaa in position 11 to 15 is any amino acid
  Variant (17)..(17): Xaa in position 17 is Ala, Ser, Thr or Val
  Variant (18)..(18): Xaa in position 18 is any amino acid
  Variant (20)..(20): Xaa in position 20 is Ala or Ser
  Variant (21)..(21): Xaa in position 21 is Ala, Gly or Ser
  Variant (23)..(23): Xaa in position 23 is Ala, Ser or Thr
  Variant (25)..(26): Xaa in position 25 to 26 is any amino acid
  Variant (29)..(30): Xaa in position 29 to 30 is any amino acid
  Variant (31)..(32): Xaa in position 31 to 32 is Ala or Ser
  Variant (33)..(33): Xaa in position 33 is any amino acid
  Variant (36)..(38): Xaa in position 36 to 38 is any amino acid
LXXXXXXXRXXXXXXAXXLXXMXQXXGYXXXXXGPXXXG

SEQ ID NO: 78952 - protein, 21 aa, Artificial sequence
  protein pattern
  Variant (2)..(2): Xaa in position 2 is any or no amino acid
  Variant (4)..(4): Xaa in position 4 is any or no amino acid
  Variant (6)..(6): Xaa in position 6 is Gly, Ser, Thr or Val
  Variant (7)..(7): Xaa in position 7 is Phe, Ile, Leu or Val
  Variant (8)..(8): Xaa in position 8 is Ile, Leu or Val
  Variant (10)..(11): Xaa in position 10 to 11 is any amino acid
  Variant (13)..(13): Xaa in position 13 is Ala, Pro or Ser
  Variant (14)..(15): Xaa in position 14 to 15 is any amino acid
  Variant (16)..(16): Xaa in position 16 is Ala, Ile, Leu or Val
  Variant (17)..(17): Xaa in position 17 is Ala, Gly, Ser or Thr
  Variant (18)..(18): Xaa in position 18 is any amino acid
  Variant (19)..(19): Xaa in position 19 is Ile, Leu, Met or Val
  Variant (21)..(21): Xaa in position 21 is Ala, Gly or Ser
VXLXPXXXKXXFXXXXXXXTX

SEQ ID NO: 78953 - DNA, 276 bp, Escherichia coli
  CDS (1)..(276): transl_table=11
atggcgggttatttgtcctggttattcccccgttgtaaaatctctcctaaacttaacggtacggcaccacacttcggggatgaaatgttcgcgctggtactttttgtttgctacctggatggcggttgtgaagatattgttgtggatgtctacaacacggaacagcagtgtctttattctatgagcgatcaacggatccgccagggcggttgttttccgattgaggattttatagatggtttctggcgacctgcacaggagtacggtgatttttaa

SEQ ID NO: 78954 - protein, 91 aa, Escherichia coli
MAGYLSWLFPRCKISPKLNGTAPHFGDEMFALVLFVCYLDGGCEDIVVDVYNTEQQCLYSMSDQRIRQGGCFPIEDFIDGFWRPAQEYGDF

SEQ ID NO: 78955 - DNA, 192 bp, Salmonella typhimurium LT2
  CDS (1)..(192): transl_table=11
atgttcgcgctggtactttttgtatgttacctggatggaggatgcgaggatattgtcgtggacatctacgataccgagcagcattgtctttattcgatggacgatcaacggattcgccatggcggctgttttccggtagaggattttatcgacggcttctggcgacctgcgcagcaatatagcgatttttaa

SEQ ID NO: 78956 - protein, 63 aa, Salmonella typhimurium LT2
MFALVLFVCYLDGGCEDIVVDIYDTEQHCLYSMDDQRIRHGGCFPVEDFIDGFWRPAQQYSDF

SEQ ID NO: 78957 - DNA, 276 bp, Shigella flexneri 2a str. 301
  CDS (1)..(276): transl_table=11
atggcgggttatttgtcctggttattcccccgttgtaaaatctctcctaaacttaacggtacggcaccacacttcggggatgaaatgttcgcgctggtactttttgtttgctacctggatggcggttgtgaagatattgttgtggatgtctacaacacggaacagcagtgtctttattctatgagcgatcaacggatccgccatggcagttgttttccgattgaggattttatagatggtttctggcaaccagcacaggagtatggtgatttttaa

SEQ ID NO: 78958 - protein, 91 aa, Shigella flexneri 2a str. 301
MAGYLSWLFPRCKISPKLNGTAPHFGDEMFALVLFVCYLDGGCEDIVVDVYNTEQQCLYSMSDQRIRHGSCFPIEDFIDGFWQPAQEYGDF

SEQ ID NO: 78959 - DNA, 276 bp, Escherichia coli CFT073
  CDS (1)..(276): transl_table=11
atggcgggttatttgtccgggttattcccccgttgtaaaatctctcctaaacttaacggtacggcaccacacttcggggatgaaatgttcgcgctggtactttttgtttgctacctggatggcggttgtgaagacattgttgtggatatctacaacacggaacagcagtgtctttattctatgagcgatcaacggatccgccatggcggttgttttccgattgaggattttatagatggtttctggcgacctgcacaggagtacggtgatttttaa

SEQ ID NO: 78960 - protein, 91 aa, Escherichia coli CFT073
MAGYLSGLFPRCKISPKLNGTAPHFGDEMFALVLFVCYLDGGCEDIVVDIYNTEQQCLYSMSDQRIRHGGCFPIEDFIDGFWRPAQEYGDF

SEQ ID NO: 78961 - DNA, 192 bp, Erwinia carotovora subsp. atroseptica SCRI1043
  CDS (1)..(192): transl_table=11
atgtttgcgttagtcatctttgtttgttatctcgggcatggctgtgacgatttggtcgtcggtgcctacaacaccgaagcacagtgtctgcaagcgatgggtgaacagcgcctgcgtcgcgctggctgcttccctatcgaagagtatattgatggcttctggatccccgcgcaggagtacgctgatttttaa

SEQ ID NO: 78962 - protein, 63 aa, Erwinia carotovora subsp. atroseptica SCRI1043
MFALVIFVCYLGHGCDDLVVGAYNTEAQCLQAMGEQRLRRAGCFPIEEYIDGFWIPAQEYADF

SEQ ID NO: 78963 - DNA, 192 bp, Escherichia coli
  CDS (1)..(192): transl_table=11
atgttcgcgctggtactttttgtttgctacctggatggcggttgtgaagatattgttgtggatgtctacaacacggaacagcagtgtctttattctatgagcgatcaacggatccgccagggcggttgttttccgattgaggattttatagatggtttctggcgacctgcacaggagtacggtgatttttaa

SEQ ID NO: 78964 - protein, 63 aa, Escherichia coli
MFALVLFVCYLDGGCEDIVVDVYNTEQQCLYSMSDQRIRQGGCFPIEDFIDGFWRPAQEYGDF

SEQ ID NO: 78965 - DNA, 21 bp, Artificial sequence
  primer
atggcgggttatttgtcctgg

SEQ ID NO: 78966 - DNA, 24 bp, Artificial sequence
  primer
ttaaaaatcaccgtactcctgtgc

SEQ ID NO: 78967 - protein, 63 aa, Artificial sequence
  consensus sequence
  Variant (22)..(22): Xaa in position 22 is any amino acid
  Variant (34)..(34): Xaa in position 34 is any amino acid
  Variant (40)..(40): Xaa in position 40 is any amino acid
  Variant (55)..(55): Xaa in position 55 is any amino acid
  Variant (61)..(61): Xaa in position 61 is any amino acid
MFALVLFVCYLDGGCEDIVVDXYNTEQQCLYSMXDQRIRXGGCFPIEDFIDGFWXPAQEYXDF

SEQ ID NO: 78968 - protein, 59 aa, Artificial sequence
  protein pattern
  Variant (21)..(21): Xaa in position 21 is Ile or Val
  Variant (23)..(23): Xaa in position 23 is Asp or Asn
  Variant (27)..(27): Xaa in position 27 is any amino acid
  Variant (33)..(33): Xaa in position 33 is Asp or Ser
  Variant (39)..(39): Xaa in position 39 is any amino acid
  Variant (41)..(41): Xaa in position 41 is Gly or Ser
  Variant (45)..(45): Xaa in position 45 is Ile or Val
  Variant (54)..(54): Xaa in position 54 is Gln or Arg
  Variant (58)..(58): Xaa in position 58 is Glu or Gln
FALVLFVCYLDGGCEDIVVDXYXTEQXCLYSMXDQRIRXGXCFPXEDFIDGFWXPAQXY

SEQ ID NO: 78969 - protein, 20 aa, Artificial sequence
  protein pattern
  Variant (2)..(2): Xaa in position 2 is any amino acid
  Variant (3)..(3): Xaa in position 3 is any or no amino acid
  Variant (6)..(6): Xaa in position 6 is any amino acid
  Variant (7)..(7): Xaa in position 7 is any or no amino acid
  Variant (9)..(9): Xaa in position 9 is any amino acid
  Variant (10)..(10): Xaa in position 10 is Ile or Leu
  Variant (11)..(11): Xaa in position 11 is Asp or Ser
  Variant (12)..(12): Xaa in position 12 is Gly or Pro
  Variant (13)..(14): Xaa in position 13 to 14 is any amino acid
  Variant (15)..(15): Xaa in position 15 is Glu or Asn
  Variant (16)..(16): Xaa in position 16 is Asp or Gly
  Variant (17)..(17): Xaa in position 17 is any amino acid
  Variant (18)..(18): Xaa in position 18 is Ala or Val
  Variant (19)..(19): Xaa in position 19 is Pro or Val
  Variant (20)..(20): Xaa in position 20 is Asp or His
LXXLFXXCXXXXXXXXXXXX

SEQ ID NO: 78970 - DNA, 1101 bp, Escherichia coli
  CDS (1)..(1101): transl_table=11
atgcgagggaaaaaacgcattgggttattgtttttgctgatagcggttgtggttggtggcggcgggttattgctggcgcaaaaagtcttacataaaacgtcggatacagcattttgcctttcctgccactcgatgagtaaaccttttgaggaatatcagggaactgtccacttttcgaaccagaaagggatacgtgcggaatgtgccgattgccatattccaaagtcagggatggattatttatttgctaaattaaaggcatctaaagatatttatcatgaatttgttagcggcaaaatagacagtgacgataagttcgaagctcatcgccaggaaatggccgaaacagtatggaaagaattaaaagccactgactctgcaacgtgccgtagttgccattcttttgatgccatggatattgcctcgcaaagtgaatctgcgcagaaaatgcataacaaagcacaaaaggacagcgaaacctgtatcgattgtcataaaggcattgcccattttccgccagaaataaaaatggatgacaacgcggcgcatgagctggaaagtcaggccgctacttcagttactaatggcgcacatatttatcctttcaaaacttctcacataggcgagctggctaccgtgaatcctggaaccgatctcaccgtcgttgatgccagtggcaaacagccgatcgttctgttgcagggttatcaaatgcagggcagtgaaaacacgctctacctggcggcaggtcaacggctggcgctagccacattaagtgaagaaggtatcaaggcgctcactgtaaacggggaatggcaggctgacgaatacggcaatcaatggcgtcaggcgtctttacagggtgcgcttaccgatcccgcattagcggaccgtaaaccgctatggcaatacgctgaaaaacttgacgatacctattgcgctggttgtcatgcccctattgccgccgaccattacaccgtcaatgcgtggccgtccattgccaaaggaatgggggcacgaaccagcatgagcgaaaacgaactggacattttaacgcggtatttccagtacaacgccaaagatattaccgagaaacagtaa

SEQ ID NO: 78971 - protein, 366 aa, Escherichia coli
MRGKKRIGLLFLLIAVVVGGGGLLLAQKVLHKTSDTAFCLSCHSMSKPFEEYQGTVHFSNQKGIRAECADCHIPKSGMDYLFAKLKASKDIYHEFVSGKIDSDDKFEAHRQEMAETVWKELKATDSATCRSCHSFDAMDIASQSESAQKMHNKAQKDSETCIDCHKGIAHFPPEIKMDDNAAHELESQAATSVTNGAHIYPFKTSHIGELATVNPGTDLTVVDASGKQPIVLLQGYQMQGSENTLYLAAGQRLALATLSEEGIKALTVNGEWQADEYGNQWRQASLQGALTDPALADRKPLWQYAEKLDDTYCAGCHAPIAADHYTVNAWPSIAKGMGARTSMSENELDILTRYFQYNAKDITEKQ

SEQ ID NO: 78972 - DNA, 1185 bp, Vibrio cholerae O1 biovar eltor str. N16961
  CDS (1)..(1185): transl_table=11
atgaaatcgttaattttaaaaatgtggcacaccatgacgcgtcccgcggtacacattagcttgggggtattgactctcggtggctttatcgctggggtaattttctggggcggctttaacaccgctttggaagcgaccaacacggaagagttctgtatcagttgtcacaccatgcgtgacaacgtgtaccaagagctgcaaaccacagtgcactggaaaaaccactctggcgtgcgagcgacctgtcctgattgtcacgtcccgcatgagtggacggcgaaaattgcacgtaagatgcaagcttcaaaagaagtattcgcacagatctttggtgatttagatacgccagaaaagtttgaagagcgccgaattgaattggcaaaacacgaatgggatcgctttgcggcgaacaaatctctggagtgtaaaaactgccataactacgaatcgatggattttgaccagatgtccgcaacggcgcgtatccaaatgaagcaagcggcagagcgcgatcaaagctgtatcgattgtcacaaggggattgcccacaacttgccgaaaaacatggagagctcaagcggcttgattggtgagctcgaaggtatggcatccaacaccaaatactccaatggtgaaaccttagtcagcgtgcgtttcctccctgtgtatgaagatgatcaagccaaagtggaagcgggtctactcaaccctgcttctgaagtgaaagtgctgactgaaaaaggcgacatgatgcaagtggagatcaacggctggcgtaaatcgaaaggctttggccgtgtgatccaagaagatttcggtatgaacatcgcggtggcgtcgctactgaaagaggccgccatgtcggatgcgattgtgaccacgggtgagcagaaagtcgatgacatgacgggtctaccttgggagcaagtcagcgcgaaagtgtggatgaaaaaagaagccatgctgaacgacatcaacccagtttgggaaaaagcgcgtgaagcttacaagaccaactgttctgtctgtcacacccaaccggatgaagcgcactttgatgccaacacttggcctggcatgttcgacggtatgttggcattcgtcaacttcgataccgacagtgaagcgctggtactgaagtacctgcaaaaacactcttcagatttcgctgaaggccaccactaa

SEQ ID NO: 78973 - protein, 394 aa, Vibrio cholerae O1 biovar eltor str. N16961
MKSLILKMWHTMTRPAVHISLGVLTLGGFIAGVIFWGGFNTALEATNTEEFCISCHTMRDNVYQELQTTVHWKNHSGVRATCPDCHVPHEWTAKIARKMQASKEVFAQIFGDLDTPEKFEERRIELAKHEWDRFAANKSLECKNCHNYESMDFDQMSATARIQMKQAAERDQSCIDCHKGIAHNLPKNMESSSGLIGELEGMASNTKYSNGETLVSVRFLPVYEDDQAKVEAGLLNPASEVKVLTEKGDMMQVEINGWRKSKGFGRVIQEDFGMNIAVASLLKEAAMSDAIVTTGEQKVDDMTGLPWEQVSAKVWMKKEAMLNDINPVWEKAREAYKTNCSVCHTQPDEAHFDANTWPGMFDGMLAFVNFDTDSEALVLKYLQKHSSDFAEGHH

SEQ ID NO: 78974 - DNA, 1179 bp, Shewanella oneidensis MR-1
  CDS (1)..(1179): transl_table=11
atgaagtggttaatcaacctctggcgcacactaaacaaacccacaaaagctctcaccttaggcgctgtcagcattagtgcttttatcatgggcatcatcttctggggcggatttaacaccgcactggaagctaccaataccgaagccttctgcatcagttgccacagtatggagagcaaaccctaccaagagctgcaggaaacagtgcattggtcgaatcactcaggcgtgcgcgccacgtgcccagactgccacgtgccccataactggagccgtaaaattgcccgtaagatggaagcctcccacgacgtttggggctggttattcaatacggtcaacacccctgaaaaatttgaagctaaacgcctcgaaatggcaagccgtgagtggaagcgttttgatcgcgacaactctctggcgtgtaaaaactgccacaactacaactcgatgaagtgggaaagcatgtcaccgctggcgcaaaaacagatgaaacgcgccgctgaaatcgatcaaagctgtatcgattgccacaaaggcattgctcaccatctacctgaaatgggcacggcccgagcacctgaactcatcgccgaagtcggcgctggcgtcagctcactggaaaccaaccaaacctactacagtgccctaactaagccactgttctttagtgaaaaaggcgatgttgaagcaggtaccttaaacgtagccactaaagtcaaagtgctcgaaactaaaggtaagcgcatcaaaattggtatcgatggctggcgtaagaaaatcggcgcaggccgcgtgatctacatggactttggcgtaaacattctgtcggcgcagttaagcaaagatgcagccgaaacagaaggtgttatccaaacctttgaagagaaagaagatccaatgacgggcctaaaatggcaacgcgttgaagcccaaatctggaccgataaggattacctgctcaccgagctgcaaccactctggggctatgcccgcgatacgttccgctcaagctgtagtgtgtgccacacccagccagatgaagcgcatttcgatgccaatacctggcctggcatgttccaaggcatgttggccttcgtgaacatggaccaagacacccaagcactggtgcaaaaatacctgcaagaacattcgtcaaccttcgtgaaaaaagagcactaa

SEQ ID NO: 78975 - protein, 392 aa, Shewanella oneidensis MR-1
MKWLINLWRTLNKPTKALTLGAVSISAFIMGIIFWGGFNTALEATNTEAFCISCHSMESKPYQELQETVHWSNHSGVRATCPDCHVPHNWSRKIARKMEASHDVWGWLFNTVNTPEKFEAKRLEMASREWKRFDRDNSLACKNCHNYNSMKWESMSPLAQKQMKRAAEIDQSCIDCHKGIAHHLPEMGTARAPELIAEVGAGVSSLETNQTYYSALTKPLFFSEKGDVEAGTLNVATKVKVLETKGKRIKIGIDGWRKKIGAGRVIYMDFGVNILSAQLSKDAAETEGVIQTFEEKEDPMTGLKWQRVEAQIWTDKDYLLTELQPLWGYARDTFRSSCSVCHTQPDEAHFDANTWPGMFQGMLAFVNMDQDTQALVQKYLQEHSSTFVKKEH

SEQ ID NO: 78976 - DNA, 1185 bp, Salmonella enterica subsp. enterica serovar Typhi Ty2
  CDS (1)..(1185): transl_table=11
atgcgaaaactctggagagcgttactcaggccaagcacccgttggtcgatactggcgctggtcattgtcgggattgtgatcggcgttgcgctgatcgtgttacctcacgtcggtatcaaactgaccagtacgacagagttttgcgtcagctgccatagtgtgcagccggtgtatcaggaatataaacagtccgtacatttccagaacgcttccggcgtacgcgcggaatgccacgattgccatatcccccccgatattccaggcatggtgaaacgtaagctggaagccagcaacgatctttaccagacatttatcgcccactcgattgataccccggaaaaatttgaagctaaacgcgccgagcttgccgagcgagaatgggcgcgcatgaaagagaataactccgcgacctgtcgttcctgccataactacgatgcgatggatcacgcgaaacagaacccggaagcggcgcggcaaatgaaaatcgccgcgaaagaaaatcaatcctgcatcgactgccataaagggattgcccaccagctaccggatatgagcagcggtttccgcaaacagtttgatgaactgcgcgccagcgccagtacgcataatgacggcgatacgctctattcgctggatatcaagccgatttacgccgctaaaggcgataaagaaccggcaggttcgctgttgcctgcttctgaagtgaaagtccttaaacgggacggtgactggctgcaagtgcaaatcgaaggctggacggagacggacggtcgccagcgcgtgctgacgcagttgcccggtaaacgtatttttgtcgcctcgattcgcggcgatgtgcaacagcatgtgaaaacgctggaagagaccaccgtcgcggcgaccaatactcagtggagcaaattacaggcaaccgcgtggatgcaaaaaggtgacatggtaaatgacattaaaccgatttgggcctatgccgactccctctataacggcacctgtaatcagtgtcacggtgcgccggacaaagcgcactttgacgctaacggctggatcggcacgctcaacggcatgatcggtttcaccagtctggataagcgtgatgaacgtaccttgttgaaatatctccagatgaatgcgtctgataccaccaacacgccgcacagcgataagggagaacacaatgaaaaataa

SEQ ID NO: 78977 - protein, 394 aa, Salmonella enterica subsp. enterica serovar Typhi Ty2
MRKLWRALLRPSTRWSILALVIVGIVIGVALIVLPHVGIKLTSTTEFCVSCHSVQPVYQEYKQSVHFQNASGVRAECHDCHIPPDIPGMVKRKLEASNDLYQTFIAHSIDTPEKFEAKRAELAEREWARMKENNSATCRSCHNYDAMDHAKQNPEAARQMKIAAKENQSCIDCHKGIAHQLPDMSSGFRKQFDELRASASTHNDGDTLYSLDIKPIYAAKGDKEPAGSLLPASEVKVLKRDGDWLQVQIEGWTETDGRQRVLTQLPGKRIFVASIRGDVQQHVKTLEETTVAATNTQWSKLQATAWMQKGDMVNDIKPIWAYADSLYNGTCNQCHGAPDKAHFDANGWIGTLNGMIGFTSLDKRDERTLLKYLQMNASDTTNTPHSDKGEHNEK

SEQ ID NO: 78978 - DNA, 1185 bp, Vibrio vulnificus YJ016
  CDS (1)..(1185): transl_table=11
atgaaatcattgatcattaaattgtggcgtactgtaacgcgcccagcagttcatatcagccttggtgtgctgaccgtgggcggcttcattgccggtgtgattttctggggtggttttaataccgcgttggaagcgactaacaccgaagagttttgtatcagttgtcacaccatgcgtgacaatgtgtaccaagaactgcaagacactgtgcactggaaaaaccactcaggtgttcgcgcgacctgtcctgactgccacgtaccccacaactggacggacaaaattgcacgtaaaatgcaggcgtctaaagaagtttttgcgcaagtatttggcaactacgatgaaccgggcgttttcgaagctcgccgtatcgagctagcaaaacacgaatgggatcgcttctcagccaacaagtcccttgaatgtaaaaactgtcataactacgactcgatggatttcgagcaaatgtctccaacagctcgcatccaaatgaagcaagcggcagagaaagatcaaagctgtgttgattgtcacaaaggtatcgcacacaaactaccagcaggtatggatagcattggcggcatcgtgggtgatctagagcagatggcatccaataccgattactctgtgggtaaagagctcgtgagtgttcgtcacctaccaatctactttgatgcacaaggtcaaaccgaagcgggtctattgaaccctgcgtctaccgtaaaagtattggaagacaaaggcgattatgtcgaaatcgagatcgacggctggcgtaaagcaaaaggctttggtcgtgtaatccaagaagatttcggcaagaacatcgcagtggcttcgctactaaaagaagcgtctatggatgacaagattgtcaccactggtgaagagaaagtggatgagctgactggtcttccatgggaaaaagtggccgcgaaagtttggatcaagaaagagtcaatgctgaacgatatcaacccagtatgggaaaaatctcgtgaagcatacaaaacaaactgttcagtgtgtcacacacaacctgcagaagcgcacttcgatgccaatacttggccaggtatgtttgacggcatgctagcgttcgtaaaccttgatacggatagcgaagcactgatcttgaaatatctacagaagcactcttcagattatgctgaaggtcatcactaa

SEQ ID NO: 78979 - protein, 394 aa, Vibrio vulnificus YJ016
MKSLIIKLWRTVTRPAVHISLGVLTVGGFIAGVIFWGGFNTALEATNTEEFCISCHTMRDNVYQELQDTVHWKNHSGVRATCPDCHVPHNWTDKIARKMQASKEVFAQVFGNYDEPGVFEARRIELAKHEWDRFSANKSLECKNCHNYDSMDFEQMSPTARIQMKQAAEKDQSCVDCHKGIAHKLPAGMDSIGGIVGDLEQMASNTDYSVGKELVSVRHLPIYFDAQGQTEAGLLNPASTVKVLEDKGDYVEIEIDGWRKAKGFGRVIQEDFGKNIAVASLLKEASMDDKIVTTGEEKVDELTGLPWEKVAAKVWIKKESMLNDINPVWEKSREAYKTNCSVCHTQPAEAHFDANTWPGMFDGMLAFVNLDTDSEALILKYLQKHSSDYAEGHH

SEQ ID NO: 78980 - DNA, 1179 bp, Colwellia psychrerythraea 34H
  CDS (1)..(1179): transl_table=11
atgaaatggctcaaaaacctttggcaaacacttaatacgccagccaaatacttaaccttaggctccatcagtttaacagctttcattatgggcgttgttttttggggtggattcaacaccgctttagaggcaaccaatactgaagaattctgtattggttgtcatagtatggaaagtaaaccttatcaagaattacaaaaaacagtgcattggtctaatcactctggcgtacgtgccacttgcccagactgtcatgttccacatagctggggtcgtaaaattgctagaaaaatggaagcatccagtgatgtttggggttgggtttttaacaccgttaacaccagtgaaaaattcgaagataaacgtttagaaatggcgtcacgtgaatgggctcgcttcgagagagatgactcgttggcttgtaagaattgtcacaactatgactcgatgaaatgggacaccatgtctaagttggcgcaaaaacaaatgaagcgtgccgccgaaaaagatcaaagctgtgttgattgccacaaagggatcgcacacatattacccgatatgggaaccgcaagagcaccgcagttaattgctgaagtaggcactggaccaagtaaattcaccaatgaacaatactacttcagtgcattgaccaagccactattttttagcgctaaaggtgatgtagaagcaggcacgttaaatgtcgcaaccaaggttaaaatattagagagcaaagagaacagagttaaagtttcaattagtggttggcgtaaacaaattggtgctggccgagttatttattatgactttggtatcaatatgttaacagcacaattatcaaaagaagcggcaaaaactgaaggtgtcatcaatggctttgaagaaaaagaagacgagatgaccggtttgaaatggcaacgtgttgaaacaacattatggactgatgctgaatacctaattaccgagcaacagccactttgggattatgctcgtacaacctttagaagcagctgtagtgtttgccacacgcaaccagacgaagctcactttgacgcaaatacttggccaggcatgttccaaggcatgatagcttttgtcaacatggaccaagatacccaagcattagtacaaaaatatctacaacaacattcatcaacttttgttaaaaaagaacattaa

SEQ ID NO: 78981 - protein, 392 aa, Colwellia psychrerythraea 34H
MKWLKNLWQTLNTPAKYLTLGSISLTAFIMGVVFWGGFNTALEATNTEEFCIGCHSMESKPYQELQKTVHWSNHSGVRATCPDCHVPHSWGRKIARKMEASSDVWGWVFNTVNTSEKFEDKRLEMASREWARFERDDSLACKNCHNYDSMKWDTMSKLAQKQMKRAAEKDQSCVDCHKGIAHILPDMGTARAPQLIAEVGTGPSKFTNEQYYFSALTKPLFFSAKGDVEAGTLNVATKVKILESKENRVKVSISGWRKQIGAGRVIYYDFGINMLTAQLSKEAAKTEGVINGFEEKEDEMTGLKWQRVETTLWTDAEYLITEQQPLWDYARTTFRSSCSVCHTQPDEAHFDANTWPGMFQGMIAFVNMDQDTQALVQKYLQQHSSTFVKKEH

SEQ ID NO: 78982 - DNA, 1179 bp, Rhodobacter sphaeroides 2.4.1
  CDS (1)..(1179): transl_table=11
atgatcagcaggatttggaaggctttctggcgaccgagcacgaaatgggggctcggcgtcctgctcgtgaccggcggcatcgccggtgcggtcggatggaacgggttccactatgtggtggaaaagaccaccacgacggaattctgcatcagctgccactcgatgcgggacaacaactacgaggaatacaagaccaccatccactaccagaacacctcgggcgtgcgggcggaatgcgccgactgtcacgtcccgaaatccggctggaagctctaccgcgcgaagctcctcgccgcgaaggacctctggggcgaaattcagggcaccatcgacacgcgtgagaagttcgaggcgcaccggctcgagatggccgagaccgtctgggccgacatgaaggccaacgactcggccacctgccggacctgccactcgttcaacgcgatggacttcgcccaccagaagcccgaggcctcgaagcagatgcagcaggcgatgaacgagggcggaacctgcatcgactgccacaagggcatcgcccacaagctgcccgacatggccagcggctaccgcgcgctgttctcgaagctcgagaaggcctcgcagtcgctcaagcccagcaagggcgagacgctctatccgctccagaccatcgaggcctatctcgagcggccctcgggcgacaaggcgaaggccgacggccggcttctggccgcgacgccgatgcaggtggtcgacgtgaagggtgagtgggtgcaggtcgcggtgaagggctggcagcaggaaggcgccgagcgggtcatctacgagaagcagggcaagcggatcttcaacgccgcactggcgccgacggccacgggctcgatcgtggcgggcgcgtccatggtcgatccggacaccgaacagacctggacggatgtctcgctgacggcctgggtgcgcaaccgcgacctgaccgacgaccaggaagcgctctggcagtatggcaagcagatgttcaacggtgcctgcggcatgtgtcacgtcctgccccacaccgagcatttcctcgccaaccagtggatcggcacgctcaacgccatgaagagccgggcgccgctcgatgacgaacagttccgcctcgtgcagcgctacgtccagatgcatgcgaaggacgtggaaccggaaggagctgcggaatga

SEQ ID NO: 78983 - protein, 392 aa, Rhodobacter sphaeroides 2.4.1
MISRIWKAFWRPSTKWGLGVLLVTGGIAGAVGWNGFHYVVEKTTTTEFCISCHSMRDNNYEEYKTTIHYQNTSGVRAECADCHVPKSGWKLYRAKLLAAKDLWGEIQGTIDTREKFEAHRLEMAETVWADMKANDSATCRTCHSFNAMDFAHQKPEASKQMQQAMNEGGTCIDCHKGIAHKLPDMASGYRALFSKLEKASQSLKPSKGETLYPLQTIEAYLERPSGDKAKADGRLLAATPMQVVDVKGEWVQVAVKGWQQEGAERVIYEKQGKRIFNAALAPTATGSIVAGASMVDPDTEQTWTDVSLTAWVRNRDLTDDQEALWQYGKQMFNGACGMCHVLPHTEHFLANQWIGTLNAMKSRAPLDDEQFRLVQRYVQMHAKDVEPEGAAE

SEQ ID NO: 78984 - DNA, 1137 bp, Haemophilus somnus 129PT
  CDS (1)..(1137): transl_table=11
ttgggggaaaagcgaatggcaaaatcaaataaaaaatggctgtttagtggaatcgttggtatgttattaggggggattattttagcgggagtacagtatgcaatgaaagcaaccagtaccactgaattttgcgtttcttgccattcaatgcaacaacctcaagcagaatgggaagcctctatacatttctctaaccgaaaagggattcgtgccgaatgtgcggattgccatatcccgcaagataacgttttccattatgtgaaaacaaaagtctttgcagtgaaagatctttggcatacttatgttactgataaattgcctgatgaagaagcatttgaaaagcatcgtttagaaatggcgaagtccgtttggcaagatttaaaagaatcagattctgccacttgtcgcagttgtcatagtttcgaagcaatggaaatgtcttcgcaaacaccgacagcacaaaaaatgcacaaaaccggcatcgaaacaaatcaaacttgtattgattgccataaaggtattgctcattttatgcctgaaatagaggttgatgatacagccgcatatggtgaattaactaaacatgcaggagaatttaagcaaaccgataaaatattatatagtttggcaatgagtccggcacagctggcacaaggcgatgaagtgcggttaatgccgtttgcagaagtgaatgattggaaattgcaagatgacaatgttatcggcacaattcacggctggcaacaagtaggggcggaaacaatagtctatgcacaattagggcaacgcattatgttggctttaggtgatggaattgagaaaaatgtgaacgtgttgcaaactgttcatgacaaagtcacagattctgagtggaaagaggttacgtttgaaataaacgtggcaaaaaatgcactaacgtctaatttagaggcattaaatcagtttggaaataatttaaatcaaactcattgtagtggttgtcatgcaccaattggggcagatcattacactgcaaatcaatggattggtgttgtaaattcgatgaaagatcgtacatcaatgacagcagatgacgtacgatctgtaacaatctatttacaacgcaatgccaaagattttggcgaaaaaagccattaa

SEQ ID NO: 78985 - protein, 378 aa, Haemophilus somnus 129PT
MGEKRMAKSNKKWLFSGIVGMLLGGIILAGVQYAMKATSTTEFCVSCHSMQQPQAEWEASIHFSNRKGIRAECADCHIPQDNVFHYVKTKVFAVKDLWHTYVTDKLPDEEAFEKHRLEMAKSVWQDLKESDSATCRSCHSFEAMEMSSQTPTAQKMHKTGIETNQTCIDCHKGIAHFMPEIEVDDTAAYGELTKHAGEFKQTDKILYSLAMSPAQLAQGDEVRLMPFAEVNDWKLQDDNVIGTIHGWQQVGAETIVYAQLGQRIMLALGDGIEKNVNVLQTVHDKVTDSEWKEVTFEINVAKNALTSNLEALNQFGNNLNQTHCSGCHAPIGADHYTANQWIGVVNSMKDRTSMTADDVRSVTIYLQRNAKDFGEKSH

SEQ ID NO: 78986 - DNA, 1170 bp, Haemophilus somnus 129PT
  CDS (1)..(1170): transl_table=11
atgagaatatttaaatcaataaaacaattctttgttaagccatctgcaaaaatagggttaggtatccttttggtcggcggtgcctttgcaggaattgtaggttggattatctttaatgccattcttgaccataccagtcaagaagaattttgtataagctgccattctatgcaatatccattagaagaactcaaacaaaccgctcattggtccaatgataaaggggtttccgcaagttgccctgattgtcatttacctcacaatacggtggataaatatattcgtaagattcaagcaacaaaggaaatttttgccgaattaagcggtaaaatttcttcgaaaacagactttgaaaaacaccgtctagaaatggcagaaagggaatgggcgagaatgtccgctaacggttcggcggaatgtaaagcttgtcacagctatgatcgaatggattttgataaaatgtcggagattgcacgcaatgccatgatacctgcagctgaaaaagatcaaagctgtattgattgccataaaggaattgcacatcatcttcctgaaatgtcacattcatcatcaaaaggcaatggtttaccatcaaactctttacaagcaaataaaatctattatacggaaaataatgtcgctctttttgcagatgaaacaatggggcaagaaatcgggcagttagaaactggtgtaccagtacattttgtgaaaacaacaccaaacgcggatttagttgaactggaaatgtggcgaaaagacaaaggctttggacgaatttggtataaccaattcggaaaaaatataaccgatgccatactaacaaaagaatttatgtctgcagaacctaaatatgatgtattagaaagtattgaagatcctattaccggtctaacttggcaaaaagtaaaactttctgtatggattggtaaaaatcaacttattgaaaatattgataatttatgggctgaagcggaaaaaatttataaaacacaatgcagtacttgtcatagacaacctgatgtaaaacattttgattcaaatacttggattgggctgtttaatggtatggtcggttttactaatattgataaaccaacaggaaaacgtgttttacgctatttgcagatgcattcatctgattttcaaccgcacgataataatcattaa

SEQ ID NO: 78987 - protein, 389 aa, Haemophilus somnus 129PT
MRIFKSIKQFFVKPSAKIGLGILLVGGAFAGIVGWIIFNAILDHTSQEEFCISCHSMQYPLEELKQTAHWSNDKGVSASCPDCHLPHNTVDKYIRKIQATKEIFAELSGKISSKTDFEKHRLEMAEREWARMSANGSAECKACHSYDRMDFDKMSEIARNAMIPAAEKDQSCIDCHKGIAHHLPEMSHSSSKGNGLPSNSLQANKIYYTENNVALFADETMGQEIGQLETGVPVHFVKTTPNADLVELEMWRKDKGFGRIWYNQFGKNITDAILTKEFMSAEPKYDVLESIEDPITGLTWQKVKLSVWIGKNQLIENIDNLWAEAEKIYKTQCSTCHRQPDVKHFDSNTWIGLFNGMVGFTNIDKPTGKRVLRYLQMHSSDFQPHDNNH

SEQ ID NO: 78988 - DNA, 1179 bp, Shewanella sp. MR-7
  CDS (1)..(1179): transl_table=11
atgaagtggttaaccaacctctggcgcacactaaacaaacccacaaaagctctcaccttaggcgctgtcagcatcagtgcttttatcatgggcatcatcttctggggcggatttaacaccgcactggaagccaccaataccgaagccttctgtatcagctgccacagtatggaaagcaagccttaccaagagttacaggaaacggtgcattggtcgaatcactctggcgtgcgcgccacctgccccgactgccacgtgccccacaactggagccgtaagattgcccgtaagatggaagcttcccacgatgtttggggctggttattcaatacggtcaacacccctgaaaaatttgaagctaaacgcctcgaaatggcgagccgcgaatggaaacgtttcgatcgcgacaattctctggcctgtaaaaactgccacaactacaactcgatgaagtgggaaagcatgtcaccactggcgcaaaaacagatgaaacgcgccgccgaaatcgaccaaagctgtatcgattgccacaaaggtattgcccaccatttacctgaaatgggcacggcccgcgcacccgaactcatcgccgaagtgggtgcaggcgtcagctcagtcgaaaccaaccaaacctactacagcgccctgactaagccactgttctttagtgaaaaaggtgacgttgaagccggtaccttaaacgtagccactaaagtcaaagtgctcgaaacccaaggtaagcgcatcaaaattggcatcgatggctggcgtaagaaaatcggcgcaggccgcgtgatctacatggactttggggtaaacattctgtcggcgcagttaagcaaagatgccgccgaaaccgaaggtgttatccaaacctttgaagagaaagaagacccaatgacaggcctgaaatggcaacgggttgaagcccaaatctggaccgataaggattacctgctcaccgagctacaaccactctggggatatgcccgcgatacgttccgctcaagctgtagcgtgtgccacacccagccagatgaagcgcatttcgatgccaatacctggcctggcatgttccaaggcatgttagccttcgtgaacatggaccaagacacccaagcgctggtgcagaaatacctgcaggaacattcgtcaaccttcgtgaaaaaagagcactaa

SEQ ID NO: 78989 - protein, 392 aa, Shewanella sp. MR-7
MKWLTNLWRTLNKPTKALTLGAVSISAFIMGIIFWGGFNTALEATNTEAFCISCHSMESKPYQELQETVHWSNHSGVRATCPDCHVPHNWSRKIARKMEASHDVWGWLFNTVNTPEKFEAKRLEMASREWKRFDRDNSLACKNCHNYNSMKWESMSPLAQKQMKRAAEIDQSCIDCHKGIAHHLPEMGTARAPELIAEVGAGVSSVETNQTYYSALTKPLFFSEKGDVEAGTLNVATKVKVLETQGKRIKIGIDGWRKKIGAGRVIYMDFGVNILSAQLSKDAAETEGVIQTFEEKEDPMTGLKWQRVEAQIWTDKDYLLTELQPLWGYARDTFRSSCSVCHTQPDEAHFDANTWPGMFQGMLAFVNMDQDTQALVQKYLQEHSSTFVKKEH

SEQ ID NO: 78990 - DNA, 1179 bp, Shewanella sp. ANA-3
  CDS (1)..(1179): transl_table=11
atgaagtggttaatcaacctctggcgcacactaaacaaacccacaaaagctctcaccttaggcgctgtcagcatcagtgcttttatcatgggcatcatcttctggggcggatttaacaccgcactggaagccaccaacaccgaagccttctgtattagctgccacagtatggaaagcaagccttaccaagagttgcaggaaactgtgcattggtcgaatcactctggcgtgcgcgccacctgccccgactgtcacgtgccccacaactggagccgtaagattgcccgtaagatggaagcttcccacgatgtctggggctggttattcaacacggtcaacacccctgaaaaatttgaagctaaacgcctcgaaatggcgagccgcgaatggaaacgtttcgatcgcgacaattctctggcctgtaaaaactgccacaactacaactcgatcaagtgggaaagcatgtcaccactggcgcaaaaacagatgaaacgcgccgccgaaatcgaccaaagctgtatcgattgccacaaaggcattgcccaccatttacctgaaatgggcacggcccgcgcacccgaactcatcgccgaagtcggcgctggcgtcagctcagtcgaaaccaaccaaacctactacagcgccctgactaagccactgttctttagtgaaaaaggtgacgttgaagccggtactttaaacgttgcgactaaagtaaaagtgctcgaaacccaaggtaagcgtatcaaaattggtatcgatggctggcgtaagaaaatcggcgcaggccgcgtgatctacatggactttggcgtaaacattctgtcggcgcagttaagcaaagatgcagccgaaaccgaaggtgttatccaaacctttgaagagaaagaagacccaatgacaggcctgaaatggcaacgggtagaagcccaaatctggaccgataaggattacctgctcaccgagctgcaaccactctggggctatgcccgcgacacgttccgctcaagctgtagtgtgtgccacacccagccagatgaagcgcatttcgatgccaatacctggccaggcatgttccaaggcatgttggccttcgtgaacatggaccaagacacccaagcgctggtgcagaaatacctgcaggaacattcgtcaaccttcgtgaaaaaagagcactaa

SEQ ID NO: 78991 - protein, 392 aa, Shewanella sp. ANA-3
MKWLINLWRTLNKPTKALTLGAVSISAFIMGIIFWGGFNTALEATNTEAFCISCHSMESKPYQELQETVHWSNHSGVRATCPDCHVPHNWSRKIARKMEASHDVWGWLFNTVNTPEKFEAKRLEMASREWKRFDRDNSLACKNCHNYNSIKWESMSPLAQKQMKRAAEIDQSCIDCHKGIAHHLPEMGTARAPELIAEVGAGVSSVETNQTYYSALTKPLFFSEKGDVEAGTLNVATKVKVLETQGKRIKIGIDGWRKKIGAGRVIYMDFGVNILSAQLSKDAAETEGVIQTFEEKEDPMTGLKWQRVEAQIWTDKDYLLTELQPLWGYARDTFRSSCSVCHTQPDEAHFDANTWPGMFQGMLAFVNMDQDTQALVQKYLQEHSSTFVKKEH

SEQ ID NO: 78992 - DNA, 1122 bp, Haemophilus somnus 2336
  CDS (1)..(1122): transl_table=11
atggcaaaatcaaataaaaaatggctgtttagtggaatcgttggtgtgttattaggggtgattattttagcgggagtacagtatgcaatgaaagcaaccagtaccactgaattttgcgtttcttgccattcaatgcaacaacctcaagcagaatgggaagcctctatacatttctctaaccgaaaagggattcgtgccgaatgtgcggattgccatatcccgcaagataacgttttccattatgtgaaaacaaaagtctttgcagtgaaagatctttggcatacttatgttactgataaattgcctgatgaagaagcatttgaaaagcatcgtttagaaatggcgaagtccgtttggcaagatttaaaagaatcagattctgccacttgtcgcagttgtcatagtttcgaagcaatggaaatgtcttcgcaaacaccgacagcacaaaaaatgcacaaaaccggcatcgaaacaaatcaaacttgtattgattgccataaaggtattgctcattttatgcctgaaatagaggttgatgatacagccgcatatggtgaattaactaaacatgcaggagaatttaagcaaaccgataaaatattatatagtttggcaatgagtccggcacagctggcacaaggcgatgaagtgcggttaatgccgtttgcagaagtgaatgattggaaattgcaagatgacaatgttatcggcacaattcacggttggcaacaagtaggggcggaaacaatagtctatgcacaattagggcaacgcattatgttggctttaggtgatggaattgagaaaaatgtgaacgtgttgcaaactgttcatgacaaagtcacagattctgagtggaaagaggttacgtttgaaataaacgtggcaaaaaatgcactaacgtctaatttagaggcattaaatcagtttggaaataatttaaatcaaactcattgtagtggttgtcatgcaccaattggggcagatcattacactgcaaatcaatggattggtgttgtaaattcgatgaaagatcgtacatcaatgacagcagatgacgtacgatctgtaacaatctatttacaacgcaatgccaaagattttggcgaaaaaagccattaa

SEQ ID NO: 78993 - protein, 373 aa, Haemophilus somnus 2336
MAKSNKKWLFSGIVGVLLGVIILAGVQYAMKATSTTEFCVSCHSMQQPQAEWEASIHFSNRKGIRAECADCHIPQDNVFHYVKTKVFAVKDLWHTYVTDKLPDEEAFEKHRLEMAKSVWQDLKESDSATCRSCHSFEAMEMSSQTPTAQKMHKTGIETNQTCIDCHKGIAHFMPEIEVDDTAAYGELTKHAGEFKQTDKILYSLAMSPAQLAQGDEVRLMPFAEVNDWKLQDDNVIGTIHGWQQVGAETIVYAQLGQRIMLALGDGIEKNVNVLQTVHDKVTDSEWKEVTFEINVAKNALTSNLEALNQFGNNLNQTHCSGCHAPIGADHYTANQWIGVVNSMKDRTSMTADDVRSVTIYLQRNAKDFGEKSH

SEQ ID NO: 78994 - DNA, 1179 bp, Photobacterium sp. SKA34
  CDS (1)..(1179): transl_table=11
atgaaatcatttttgcttaaagcttggcagactctatcacgtccaagcgttcatattagcctaggtgtactcacccttggcggctttattgctggcgttattttctggggtggttttaatactgcactagaagcaaccaatactgaagagttctgtgttggttgtcacgctgaaaactttgctcctgaatacgcaaacactattcatgacaaaaaccgttctggtgttcgtgcaacctgtcctgactgtcacgttccgcatgactggacagataaaatcgcgcgtaaagttcaagcaagtaaagaagtcttcgcccacatggccggcttcattgatactcctgaaaaatttgaagaccgccgtattgttctggctcaacacgagtgggaacgctttaaagctaatggatctcaagaatgtagagactgccatgactataaaggcatggacttcactaagatgtctcctattgctcgcgttcaaatgaagaacgcagcagagcgtgatcaaagctgtgtggattgtcacaaaggtattgctcaccacctaccgaaagatatggataccagtggtggcatgatatctgagttagtacagctatctcacgacactaagtacaacaaaggcgaagaagtttatagcgtgcgtttccttcctgtttatgaagataaagacatgaaagtagaagccggccttttaaaccctgcttctggcgtaaaagttatcgatgaaactgacaacgcagttgaagttgaaattgcaggctggcgtaaagacaagggctatggccgagttattcaagaagacttcggtatgaatattcctgttgcatcgcttctaaaagaatcagcgcaaaacgacaaggttgtcgataaatacgaagagaaagttgatgacttaacaggccttccttggcaacgtgtaacagcaaaagtatggatgccaaaagactcgcttgttaatgacatcacaccagtttgggaaaaagcgaaatcagcttacaccactaactgttcagtttgtcatacccaacctgctgaaagccacttcgatgccaatacttggcctggaatgttcaacggtatgttagcgttcgttaactttgaccgtgatagtgaagctgtcgtgcgtaaataccttcagaaacattcttctgatttttctgacgcacagcactaa

SEQ ID NO: 78995 - protein, 392 aa, Photobacterium sp. SKA34
MKSFLLKAWQTLSRPSVHISLGVLTLGGFIAGVIFWGGFNTALEATNTEEFCVGCHAENFAPEYANTIHDKNRSGVRATCPDCHVPHDWTDKIARKVQASKEVFAHMAGFIDTPEKFEDRRIVLAQHEWERFKANGSQECRDCHDYKGMDFTKMSPIARVQMKNAAERDQSCVDCHKGIAHHLPKDMDTSGGMISELVQLSHDTKYNKGEEVYSVRFLPVYEDKDMKVEAGLLNPASGVKVIDETDNAVEVEIAGWRKDKGYGRVIQEDFGMNIPVASLLKESAQNDKVVDKYEEKVDDLTGLPWQRVTAKVWMPKDSLVNDITPVWEKAKSAYTTNCSVCHTQPAESHFDANTWPGMFNGMLAFVNFDRDSEAVVRKYLQKHSSDFSDAQH

SEQ ID NO: 78996 - DNA, 1167 bp, Photobacterium sp. SKA34
  CDS (1)..(1167): transl_table=11
atgaaaaaactttggcagatgttgacaaagccaagtagcaagtattcgattcttgctcttgtgtttgttggtattgtgatcacccttgttggtatctttgctgtacataaaggctttgaacacgcatcaaccaatgaattctgtatcggttgtcataccatgcagcaaaacttcgacgagtataaagaatctgtacattttaaaaacgcttctggtgttcgtgctgactgtgtggactgtcaccaacctaaagatttagttggtatggttcaaactaagttgatggcatcaaaagacgtatataaccagtttgttactaaaaagattgatacgcctgaaaagtttgaagaacaccgtttagaattagctcagatggtatgggatcgaatgaaaaagcaaaattcgagcacctgtaagagctgtcacaattactctgcaatggatcacgctaaacaatcacctgaagctgctgctgcaatgacagatgctgctgcaaaagacatgaactgtatcgagtgtcacaaaggtattgcacacgaattacctaacatggctggcggtttccagaaagacttccaaagcctacaaactgaagcaactgcacaaggtgcaacagctgacaagctttactctctaggtgaaaaagatctatttgcgactgacaatgctaacgctaaatcagaaggtaaattacttccagcgtctgaagtaacggtacttgaacgtaaaggcgacatgctaaaagttgaagtaaatggctggctagagaaagcgggtaaaggccgagttatgacagagtacatgggtaagcgcgtatttaaagcgactatccgtggtgacatcaaagctaacgagaagattgttaaagaagaaacagatccagcaactgatattgtatggcaaaacgtaaccgtacaagcttggatcactaaagctgacatgatcgatagcatccagcctatctggaactacgcagaagaaatgtacggctctacttgtaacgcctgtcacgcggcgccagcacctagccattttactgcaaatggctggatagcaagtctgaaagccatgagcgcttactaccgtctgtctaagacagaagaacgtacgctactgaaataccttcagaaccacggtagcgatactggcggtgcaggcgcgcactaa

SEQ ID NO: 78997 - protein, 388 aa, Photobacterium sp. SKA34
MKKLWQMLTKPSSKYSILALVFVGIVITLVGIFAVHKGFEHASTNEFCIGCHTMQQNFDEYKESVHFKNASGVRADCVDCHQPKDLVGMVQTKLMASKDVYNQFVTKKIDTPEKFEEHRLELAQMVWDRMKKQNSSTCKSCHNYSAMDHAKQSPEAAAAMTDAAAKDMNCIECHKGIAHELPNMAGGFQKDFQSLQTEATAQGATADKLYSLGEKDLFATDNANAKSEGKLLPASEVTVLERKGDMLKVEVNGWLEKAGKGRVMTEYMGKRVFKATIRGDIKANEKIVKEETDPATDIVWQNVTVQAWITKADMIDSIQPIWNYAEEMYGSTCNACHAAPAPSHFTANGWIASLKAMSAYYRLSKTEERTLLKYLQNHGSDTGGAGAH

SEQ ID NO: 78998 - DNA, 1185 bp, Photobacterium sp. SKA34
  CDS (1)..(1185): transl_table=11
atgaagtcgtccttaaaaaaagtttggataacactgtggcggcctgcaaccaaaataagccttggcgtactcgcattaggtggttttattgcaggggttatattttgggggggatttaataccgcccttgaaatgaccaacacagaaaaattttgtatcagttgccactccatgagtgacaccgtttatcctgagctgcaagaaaccgtgcactggtcaaatcactcaggtgtccgcgctacttgccctgattgtcatgttccccataattggacggataaaattgctcgaaaaatgcaggcgagtaaagaagtctttggagctattgctggcaccattgatactcctgcaaagtttgaagcaaaaaggctggaattagcccagcatgaatggaaacgctttgctgcgaatggatcgttggaatgtaaaagttgccacaattatgacagcatgaaatgggatgaaatgtcaccacgtgcgcaggtacaaatgaaacaggccgcagcgaaagaccaaagctgtcttgattgccacaaaggtattgctcaccatcttcctgctgatatggcctcatctggtgggattgtgtctgaattgtccgccgcatcccatagtactgattattcaaaagatgacacatactacagcgtacagtttttacccctttatgaagatgaagctaaaactaaagacgggggttctttagagcctgcatctgcggttaaagtggtggcgattaaaaacgacatgctgcaaattgaactaagcggttggcgtaaagtaaaaggctttggtcgggttattaatcaagatttcgggatgaatataccaacagctgcactaagtaaaaatgccgcgcaaagcgctgatattgtaaaaggtttcgagcaaaaagaagatgacgtcacagggctaaaatggcaacaagtaaccgcaacactgtgggttgagaaaaagaactttgttagtgatatcagtactgtttggactgccgcaaaatcggcatacaacaccaactgtagcgtatgtcatacccagccagcagaaaaccattttgacgcaaatacttggcctggcatgtttaacggtatgcttgcatttgtgaattttgatactgatagcgaagctattgtattgaaatatttacaaaaccattcgtcagatttttctaaagctgaacattaa

SEQ ID NO: 78999 - protein, 394 aa, Photobacterium sp. SKA34
MKSSLKKVWITLWRPATKISLGVLALGGFIAGVIFWGGFNTALEMTNTEKFCISCHSMSDTVYPELQETVHWSNHSGVRATCPDCHVPHNWTDKIARKMQASKEVFGAIAGTIDTPAKFEAKRLELAQHEWKRFAANGSLECKSCHNYDSMKWDEMSPRAQVQMKQAAAKDQSCLDCHKGIAHHLPADMASSGGIVSELSAASHSTDYSKDDTYYSVQFLPLYEDEAKTKDGGSLEPASAVKVVAIKNDMLQIELSGWRKVKGFGRVINQDFGMNIPTAALSKNAAQSADIVKGFEQKEDDVTGLKWQQVTATLWVEKKNFVSDISTVWTAAKSAYNTNCSVCHTQPAENHFDANTWPGMFNGMLAFVNFDTDSEAIVLKYLQNHSSDFSKAEH

SEQ ID NO: 79000 - DNA, 1179 bp, Photobacterium sp. SKA34
  CDS (1)..(1179): transl_table=11
atgaagaagttctggcactttcttataaagccaagcagtcgctattccgttttagcaattgcagttgtttgtgtattaattacacttgcaggcgtatttactttccacaaatcgattgaattcacttctactaacgagttttgtactgcttgtcactcgatgaaggaaaattacaacgaatataaaacaagtattcactttaagaacgcttacggtgttcgtgcacagtgtcgtgattgtcatatccctgagaataacccaattgattttatgaaagccaaaatgggcggtattggtgatatttacagtgagttcattggtaaagatatcgatacgccgaagaagttcgaagaaaatcgtctacgcatggcacaaaatgtatggaaaatgatgaaggacaccaactctgcgacgtgtaagagctgtcactcttactctgcgatggatcacgctaagcaatcacctgcagctgcggctgcaatgacaggtgctgcagcgaaagatatgaactgtatcgagtgtcacaaaggtattgctcaccagttgccacatatcaacaatgacttccaagcaacgtttaagcagctaagcatcaatgcagcgaaagcacctgaagcgacaacactttattctctaacatctaagcagctgtttgtgaaagatgctgcttctgacgatgcacaaggtcaattgtacccagcatcagaagtgaaagtcgttggtcaaagtggtgacatgctaaaagtcgaactaacaggttgggaaatcaaaggttcaacaacaggtatgctagttcaagatatggcgatgcaaattcaaatcgcttcgattgatcctgaactacagaaaacacaaaaagtacttaacacccaaaccgcaactgatggtcaagtttggcagcaagtacaagttgcagcgtggatgacacaacgtgacatgctagcaagcatcaagcctatttggggctatggtaaagaaatcctagatgcaagctgtaaccagtgtcacgcaacgccagatccaaaacacctaacttcaaacgcatgggttgatggcctaaaagcaatgcaacagtactacaagcttgataagaacgaagagcgtgtactacttaaatatctacaagctcacgctaaagatgcagcagcagaaactgcggtagagcaagcaactgagtaa

SEQ ID NO: 79001 - protein, 392 aa, Photobacterium sp. SKA34
MKKFWHFLIKPSSRYSVLAIAVVCVLITLAGVFTFHKSIEFTSTNEFCTACHSMKENYNEYKTSIHFKNAYGVRAQCRDCHIPENNPIDFMKAKMGGIGDIYSEFIGKDIDTPKKFEENRLRMAQNVWKMMKDTNSATCKSCHSYSAMDHAKQSPAAAAAMTGAAAKDMNCIECHKGIAHQLPHINNDFQATFKQLSINAAKAPEATTLYSLTSKQLFVKDAASDDAQGQLYPASEVKVVGQSGDMLKVELTGWEIKGSTTGMLVQDMAMQIQIASIDPELQKTQKVLNTQTATDGQVWQQVQVAAWMTQRDMLASIKPIWGYGKEILDASCNQCHATPDPKHLTSNAWVDGLKAMQQYYKLDKNEERVLLKYLQAHAKDAAAETAVEQATE

SEQ ID NO: 79002 - DNA, 1101 bp, Escherichia coli B
  CDS (1)..(1101): transl_table=11
atgcgagggaaaaaacgcattgggttattgtttttgctgatagcggttgtggttggtggcggcgggttattgctggcgcaaaaagccttacataaaacgtcggatacagcattttgcctttcctgccactcgatgagtaaaccttttgaggaatatcagggaactgtccacttttcgaaccagaaagggatacgtgcggaatgtgccgattgccatattccaaagtcagggatggattatttatttgctaaattaaaagcatctaaagatatttatcatgaatttgttagcggcaaaatagacagtgacgataagttcgaaactcatcgccaggaaatggccgaaacagtatggaaagaattaaaagcaactgactctgcaacgtgccgtagttgccattcttttgatgccatggatattgcctcgcaaagtgaatctgcgcagaaaatgcataacaaagcacaaaagggcggcgaaacctgtatcgattgtcataaaggcattgcccattttccgccagaaataaaaatggatgacaacgcggcgcatgagctggaaagtcagaccgctacttcagtgactaatggcgcacatatttatcctttcaaaacttctcgcataggcgagctggctaccgtgaatcctggtaccgatctcaccgtcgttgatgccagtggcaaacagccgatcgttctgttgcagggttatcaaatgcagggcagtgaaaacacgctctacctggcggcaggtcaacggctggcgctagccacattaagtgaagaaggtatcaaggcgctcacggtaaacggggaatggcaggctgacgaatacggcaatcaatggcgtcaggcgtctttacagggtgcgcttaccgatcccgcattagcggaccgtaaaccgctatggcaatacgctgaaaaacttgacgatacctattgcgctggttgtcatgcccctattgccgccgaccattacaccgtcaatgcgtggccgtccattgccaaaggaatgggggcacgaaccagcatgagcgaaaacgaactggacattttaacgcggtatttccagtacaacgccaaagatattaccgagaaacagtga

SEQ ID NO: 79003 - protein, 366 aa, Escherichia coli B
MRGKKRIGLLFLLIAVVVGGGGLLLAQKALHKTSDTAFCLSCHSMSKPFEEYQGTVHFSNQKGIRAECADCHIPKSGMDYLFAKLKASKDIYHEFVSGKIDSDDKFETHRQEMAETVWKELKATDSATCRSCHSFDAMDIASQSESAQKMHNKAQKGGETCIDCHKGIAHFPPEIKMDDNAAHELESQTATSVTNGAHIYPFKTSRIGELATVNPGTDLTVVDASGKQPIVLLQGYQMQGSENTLYLAAGQRLALATLSEEGIKALTVNGEWQADEYGNQWRQASLQGALTDPALADRKPLWQYAEKLDDTYCAGCHAPIAADHYTVNAWPSIAKGMGARTSMSENELDILTRYFQYNAKDITEKQ

SEQ ID NO: 79004 - DNA, 1107 bp, Vibrio cholerae O1 biovar eltor str. N16961
  CDS (1)..(1107): transl_table=11
atgtgtaagcttatgtcgatcaaaaaaaggtatgttgcactgcttgttgccattggggtggcaattggctgggtcactttaggtggcagtgctgcagtgatgcattacacctcaagcaccgagttttgtctctcctgccattctatggagatcccttttaaggagtatcaaggctctgttcacttttccaatgcgaaaggcattcgcgccgaatgtgccgattgccatattccgagcgatcccatcggttatttcgtcactaaggtacgagcgaccaaagacatctaccacgaatttgtaacaggtaagattgatacgcctgagaagtatgaggcgcaccgacaagagttagcggagatggtatggcagcagatgcgcggtaacgattcggcaacgtgtcgctcttgccatgattttgatgccatggagccgtttgagcagtcacacgaagcggtgaaaatgcatgagtatgccaaagccaataaccaaacctgtattgattgccacaaaggtgtcgcgcacttcgcacctgaagcggagcttgatagcaaagcctttgaaaccttgatggcctttaccgaaaaaacggccgctgacgcgcagcgagtttaccccgtcaccacgattgcgatgggtgaattgggtacgatcaacccgacgactgctctggatgttgtgagtaccaagggcactgaacgtaccgtgcaaatcaacgcttaccaaatgaaaggcgcagaacaagtactgtatatgggtgaggggcaacgtgcggttgtcgcgactttaactgaacaaggccaaaaagcgctgcaagcacaagactacaaaaccgatgcttacggtaaccaatggcgcgcggtgaatttaaccgccaccatcacatcgcctgtggtggatagtttagagccggtttggtcttatgccgaacagcttgataacgtttactgtgcgacctgccatgcgaaaattccagccagtcactttaccgtgaatgcttgggggccagtggcgaaaagtatgggagagcggacggatatttccgctgagaatctggagattctcaccaagttcttccagcaccatgccaaagatatggttagccactga

SEQ ID NO: 79005 - protein, 368 aa, Vibrio cholerae O1 biovar eltor str. N16961
MCKLMSIKKRYVALLVAIGVAIGWVTLGGSAAVMHYTSSTEFCLSCHSMEIPFKEYQGSVHFSNAKGIRAECADCHIPSDPIGYFVTKVRATKDIYHEFVTGKIDTPEKYEAHRQELAEMVWQQMRGNDSATCRSCHDFDAMEPFEQSHEAVKMHEYAKANNQTCIDCHKGVAHFAPEAELDSKAFETLMAFTEKTAADAQRVYPVTTIAMGELGTINPTTALDVVSTKGTERTVQINAYQMKGAEQVLYMGEGQRAVVATLTEQGQKALQAQDYKTDAYGNQWRAVNLTATITSPVVDSLEPVWSYAEQLDNVYCATCHAKIPASHFTVNAWGPVAKSMGERTDISAENLEILTKFFQHHAKDMVSH

SEQ ID NO: 79006 - DNA, 1101 bp, Haemophilus influenzae Rd KW20
  CDS (1)..(1101): transl_table=11
atgtcaaaaatgaaaaaaatagtaaccgcactttgtttagtcggtgtcggggtgggagcattatggggttctcagtggataatgcacaaaacgagtacaccagagttttgtgctagttgtcattcaatgagttatccacaacaggagtgggaaggttctagccattttgctaatgcaaaaggggttagagcacaatgttcagattgtcatattccaaaagaaggttggcattatgtcaaggctaaatttattgctttaaaagacttgtggtatgaagcacaaggtaagattgagaataaagaaaaatatgaagctcatcgtgcagaaatggcacaacgagtgtggaaggatatgaaagccaatgattcagaaacctgtcgtagctgtcacagttttgatgcaatggagctttcaaaacaaactaaattagcaaaacaaactcatacggaggcgcaaacaaacggtcaaacttgtattgattgtcacaagggcattgttcacttcctacctgaagtgcatggcgatcaaaatacacaaaaatcctctgcagtacaaggtggtactctctctgatggctcagctatttttgccactgaaatggtaaaagcgaccaatgataaaggaaatgaggttcgcctaatgccttatgcagaattaatgcaatggaaagtggatggtgatcaaattcaaggcactttacatggttggcaacaagtgggggctgaagcagttgtgtatcaagaattaggtaaacgtatcacgcttgctttaatggacgaagatgcacgtaatcatgttcaagtattaaaaatagttcatgatgcagtaacagattctgattggaaagaaatcagtgttgcggtgaatgtcgcaaaagaaaaaatgacatcagatttaaccacgcttaatcaatacggtaatcagttaaaccaaactcaatgtagtggttgtcacgcagcaattggtgcagatcattacacggctaaccaatggattggtgtggtgaattctatgaaagaccgtacatcaatgaaaaaagatgaagtacgtgcattaactatttatctgcaacgcaatgccaaagatatggcaaaacaataa

SEQ ID NO: 79007 - protein, 366 aa, Haemophilus influenzae Rd KW20
MSKMKKIVTALCLVGVGVGALWGSQWIMHKTSTPEFCASCHSMSYPQQEWEGSSHFANAKGVRAQCSDCHIPKEGWHYVKAKFIALKDLWYEAQGKIENKEKYEAHRAEMAQRVWKDMKANDSETCRSCHSFDAMELSKQTKLAKQTHTEAQTNGQTCIDCHKGIVHFLPEVHGDQNTQKSSAVQGGTLSDGSAIFATEMVKATNDKGNEVRLMPYAELMQWKVDGDQIQGTLHGWQQVGAEAVVYQELGKRITLALMDEDARNHVQVLKIVHDAVTDSDWKEISVAVNVAKEKMTSDLTTLNQYGNQLNQTQCSGCHAAIGADHYTANQWIGVVNSMKDRTSMKKDEVRALTIYLQRNAKDMAKQ

SEQ ID NO: 79008 - DNA, 1173 bp, Shigella flexneri 2a str. 301
  CDS (1)..(1173): transl_table=11
atgcggaaactctggaacgcgctacgccgacccagtgctcgttggtcggtactggcgctggtcgcaattgggattgtgattggcattgcgctgattgtattgccacacgttgggatcaaagtcaccagcacaaccgaattttgtgtcagttgccacagtatgcaaccggtgtatgaagaatataaacagtcggtgcatttccagaacgcctccggcgtgcgagctgaatgccatgactgtcatatcccgccggatattccaggcatggtgaagcgcaaactggaagcgagcaacgacatttaccagacctttattgcccactccattgatacacctgaaaaattcgaagccaaacgcgcggaacttgccgagcgtgaatgggcgcgaatgaaagaaaacaactcggcaacctgtcgctcctgccataactacgatgcgatggatcatgccaggcagcatcctgaagcggcacgtcagatgaaggtggcagcgaaagataatcaatcctgcatcgactgtcataaaggtattgcccaccagttaccggatatgagtagcggcttccgtaagcagttcgatgagctgcgcgccagtgctaatgacagtggtgacacgctgtactctattgatattaagccaatttatgcggcgaaaggcgataaagaagcctctggttctctgctgcctgcttcggaagtgaaagtccttaaacgtgacggcgactggctgcaaattgaaattaccggctggacggaaagcgccggacgtcagcgtgtactcacccaattcccaggtaaacgcatctttgttgcctcgattcgtggtgatgtgcagcagcaggtgaaaacgctggagaaaaccaccgttgccgacaccaataccgagtggagcaagttgcaggccaccgcgtggatgaagaaaggcgacatggtgaacgatatcaaaccgatctgggcctatgcggattcgttgtacaacggcacctgtaacgagtgccacggcgcaccggaaatcgcccactttgacgctaacggttggatcggcacgctcaacggcatgattggctttaccagtctcgataaacgtgaagaacgcactttgttgaaatatctgcaaatgaatgcgtctgacaccgcaggtaaggctcacggcgataagaaggaagaaaaataa

SEQ ID NO: 79009 - protein, 390 aa, Shigella flexneri 2a str. 301
MRKLWNALRRPSARWSVLALVAIGIVIGIALIVLPHVGIKVTSTTEFCVSCHSMQPVYEEYKQSVHFQNASGVRAECHDCHIPPDIPGMVKRKLEASNDIYQTFIAHSIDTPEKFEAKRAELAEREWARMKENNSATCRSCHNYDAMDHARQHPEAARQMKVAAKDNQSCIDCHKGIAHQLPDMSSGFRKQFDELRASANDSGDTLYSIDIKPIYAAKGDKEASGSLLPASEVKVLKRDGDWLQIEITGWTESAGRQRVLTQFPGKRIFVASIRGDVQQQVKTLEKTTVADTNTEWSKLQATAWMKKGDMVNDIKPIWAYADSLYNGTCNECHGAPEIAHFDANGWIGTLNGMIGFTSLDKREERTLLKYLQMNASDTAGKAHGDKKEEK

SEQ ID NO: 79010 - DNA, 1101 bp, Shigella flexneri 2a str. 301
  CDS (1)..(1101): transl_table=11
atgcgagggaaaaaacgcattgggttattgtttttgctgatagcggttgtggttggtggcggcgggttattgctggcgcaaaaagccttacataaaacgtcggatacagcattttgcctttcctgccactcgatgagtaaaccttttgaggaatatcagggaactgtccacttttcgaaccagaaagggatacgtgcggaatgtgccgattgccatattccaaagtcagggatggattatttatttgctaaattaaaagcatctaaagatatttatcatgaatttgttagcggcaaaatagacagtgacgataagttcgaaactcatcgccaggaaatggccgaaacagtatggaaagaattaaaagcaactgactctgcaacgtgccgtagttgccattcttttgatgccatggatattgcctcgcaaagtgaatctgcgcagaaaatgcataacaaagcacaaaagggcggcgaaacctgtatcgattgtcataaaggcattgcccattttccgccagaaataaaaatggatgacaacgcggcgcatgagctggaaagtcaggccgctacttcagtgactaatggcgcacatatttatcctttcaaaacttctcgcataggcgagctggctaccgtgaatcctggtaccgatctcaccgtcgttgatgccagtggcaaacagccgatcgttctgttgcagggttatcaaatgcagggcagtgaaaacacgctctacctggcggcaggtcaacggctggcgctagccacattaagtgaagaaggtatcaaggcgctcacggtaaacggggaatggcaggctgacgaatacggcaatcaatggcgtcaggcgtctttacagggtgcgcttaccgatcccgcattagcggaccgtaaaccgctatggcaatacgctgaaaaacttgacgatacctattgcgctggttgtcatgcctctattgccgccgaccattacaccgtcaatgcgtggccgtccattgccaaaggaatgggggcacgaaccagcatgagcgaaaacgaaccggacattttaacgcggtatttccagtacaacgccaaagatattaccgagaaacagtga

SEQ ID NO: 79011 - protein, 366 aa, Shigella flexneri 2a str. 301
MRGKKRIGLLFLLIAVVVGGGGLLLAQKALHKTSDTAFCLSCHSMSKPFEEYQGTVHFSNQKGIRAECADCHIPKSGMDYLFAKLKASKDIYHEFVSGKIDSDDKFETHRQEMAETVWKELKATDSATCRSCHSFDAMDIASQSESAQKMHNKAQKGGETCIDCHKGIAHFPPEIKMDDNAAHELESQAATSVTNGAHIYPFKTSRIGELATVNPGTDLTVVDASGKQPIVLLQGYQMQGSENTLYLAAGQRLALATLSEEGIKALTVNGEWQADEYGNQWRQASLQGALTDPALADRKPLWQYAEKLDDTYCAGCHASIAADHYTVNAWPSIAKGMGARTSMSENEPDILTRYFQYNAKDITEKQ

SEQ ID NO: 79012 - DNA, 1101 bp, Escherichia coli CFT073
  CDS (1)..(1101): transl_table=11
atgcgagggaaaaaacgcattgggttattgtttttgctgatagcggttgtggttggtggcggcgggttattgctggcgcaaaaagccttacataaaacgtcggataccgcattttgcctttcctgccactcgatgagtaaaccttttgaggaatatcagggaactgtccacttttcaaaccagaaagggatacgtgcggaatgtgccgattgccatattccaaagtcagggatggattatttatttgctaaattaaaagcatctaaagatatttatcatgaatttgttagcggcaaaatagacagtgatgataagttcgaagctcatcgccaggaaatggccgaaacagtatggaaagaattaaaagcaactgactctgcaacctgccgtagttgccattcttttgatgccatggatattgcctcgcaaagtgaatctgcgcagaaaatgcataataaagcgcaaaaggacggcgaaacctgtatcgattgccataaaggcattgcccattttccgccagaaataaaaatggatgacaacgcggcgcatgagctggaaagtcaggccgctacttcagttactaatggcgcacatatttatcctttcaaaacttctcgcataggcgaactggctaccgtgactcctggtaccgatcttaccgtcgttgatgccagtggcaaacagccaattgttcggttgcagggttatcaaatgcagggcagtgaaaacacgctctacctggcggcaggccaacggctggcgctcgccacattaagtgaagaaggtatcaaggcgctaacggtaaacggggaatggcaggctgacgaatacggcaatcaatggcgtcaggcgtctttgcagggggcgcttatcgatcccgcattagcggaccgtaaaccgctatggcaatacgctgaaaaacttgacgatacctattgcgctggctgccatgcccctattgccgccgaccattacaccgtcaatacatggccgtccattgccaaaggaatgggtgcgcgaaccagcatgagcgaaaacgaactggacattttgacgcggtacttccagtacaacgccaaagatattaccgagaaacagtga

SEQ ID NO: 79013 - protein, 366 aa, Escherichia coli CFT073
MRGKKRIGLLFLLIAVVVGGGGLLLAQKALHKTSDTAFCLSCHSMSKPFEEYQGTVHFSNQKGIRAECADCHIPKSGMDYLFAKLKASKDIYHEFVSGKIDSDDKFEAHRQEMAETVWKELKATDSATCRSCHSFDAMDIASQSESAQKMHNKAQKDGETCIDCHKGIAHFPPEIKMDDNAAHELESQAATSVTNGAHIYPFKTSRIGELATVTPGTDLTVVDASGKQPIVRLQGYQMQGSENTLYLAAGQRLALATLSEEGIKALTVNGEWQADEYGNQWRQASLQGALIDPALADRKPLWQYAEKLDDTYCAGCHAPIAADHYTVNTWPSIAKGMGARTSMSENELDILTRYFQYNAKDITEKQ

SEQ ID NO: 79014 - DNA, 1095 bp, Vibrio parahaemolyticus RIMD 2210633
  CDS (1)..(1095): transl_table=11
atgtcaataaaaaaacgatatattgcattgctagttgctgctggcgttggtgtgggttggttaactttgggcggcagtgcagcggtgatgcactacacgtctgacactgagttttgtgtctcatgccactctatggaaatcccttataaagagtatcaaggctcagttcacttcagtaatgcaaagggcattcgcgcggaatgttctgactgtcatattcctcaagaaccaatggattacctgatcaccaaaattcgtgcgtcgaaagacatttaccacgaatttgtgacaggcaagatcgacacgccagagaaatacgaagcacatcgtaaagacatggctgaaactgtatgggctcagttccgtgaaaacgattcagcgacgtgtcgttcgtgtcatgatttcgatgcaatggaagagtttgagcaatcacgcgatgcggcgaagatgcacgaatacgcgaaagcgaacgatcaaacgtgtatcgattgtcacaaaggtgtggctcactttgcaccagaagcagagctagacagcaaagcattcgaaacgctgatgagcttcacgacgaagacagcggctaacgcgaaggtagtttacccagtaacaacgattaatatgggtgaaatgggtaccatcaatccaacaacaaaactggaagtgatgagcgcggaaggcgacaaccgcactgttaagttgaacgcattccaaatgaaaggtgcagaacaagtgctttacatgggagaaggtcaacgtgccatcgtagcaacgctaacagagcaaggccaacaagcgcttgaagctggtgaatttgaggcggatgtttacggcaacgaatggcgcgcagtttctctaacaggtgctattgattctccagttgtagacacgcttgatccagtatggtcatacgcagaagagttggacaacgtttactgtgccacttgtcacgcgaaaattccttcaaatcacttcacagtgaatgcatggggaccggtagcgaaaagtatgggtgatcgaactgatatttcagccgagaacctagaaattctaaccaagttcttccagcaccacgcgaaagatgtggttggtcactaa

SEQ ID NO: 79015 - protein, 364 aa, Vibrio parahaemolyticus RIMD 2210633
MSIKKRYIALLVAAGVGVGWLTLGGSAAVMHYTSDTEFCVSCHSMEIPYKEYQGSVHFSNAKGIRAECSDCHIPQEPMDYLITKIRASKDIYHEFVTGKIDTPEKYEAHRKDMAETVWAQFRENDSATCRSCHDFDAMEEFEQSRDAAKMHEYAKANDQTCIDCHKGVAHFAPEAELDSKAFETLMSFTTKTAANAKVVYPVTTINMGEMGTINPTTKLEVMSAEGDNRTVKLNAFQMKGAEQVLYMGEGQRAIVATLTEQGQQALEAGEFEADVYGNEWRAVSLTGAIDSPVVDTLDPVWSYAEELDNVYCATCHAKIPSNHFTVNAWGPVAKSMGDRTDISAENLEILTKFFQHHAKDVVGH

SEQ ID NO: 79016 - DNA, 1119 bp, Haemophilus ducreyi 35000HP
  CDS (1)..(1119): transl_table=11
atgtctaaggtaaaattgtcattagtgagtggtgttatttgtgcagcgattggtgcggtagcacttttgggaactcaagcggtgctaaaatcaacgaattccactgaattttgtgtgagttgccattcaatgactcatccacaagcagaatgggaaggtagcgtgcatttttctaatcgaaaagggattcgggcagaatgtgctgattgccacgttccacaagatagttggcattatgttaaagcaaaagtggcggccgttaaagatgtatggcatacctttgttactaataaaattccagatcaagaagcgtatgaaaaacatcgcttagaaatggcacaacatgtttggcaagatatgaaagagacagattctgctacttgtcgaagttgccatagttttgacgcgatggtattagccgaacaacgcgaagcggcacaaaaaatgcataaaattgctcaagaaaccaatcaaacttgtattgattgccataaaggcattgcgcattttatgcctgaaatgcctgcagataattcagcggctttaggtgagcttgctaaacatgggggtaaatttaattcagcagataaagtcttatatagcttagccatgacctctgctaaattagcacaaggcagtgaaattcggttattaccttttgctgaattacataattggcaagaagaaggcgataaaatcgtagccgtggttaaaggttggcaacaagttggtgcagaaggcgttatttatagtggattaggtcagcgtattatggtgggtttggttgatgatgctgctaaagataaattaaccgttcatcaagtggtaaatgataaagtgactaattcagattggaaagaagtaagcacatccgtttcattaccaaaagcagcattaacggcggatattaagtcgcttaatgattttggtagcaatttaaatcaaacacattgtagtggttgtcacgctccaattagcgccaatcattacacagcaaatcaatggattggtgtggttaactccatgaaagatcgtacctcaatgtcagcagacgatgttcgtgcggtgaccatttatttacaacgtaatgctaaagatatggcaggcagttcacactaa

SEQ ID NO: 79017 - protein, 372 aa, Haemophilus ducreyi 35000HP
MSKVKLSLVSGVICAAIGAVALLGTQAVLKSTNSTEFCVSCHSMTHPQAEWEGSVHFSNRKGIRAECADCHVPQDSWHYVKAKVAAVKDVWHTFVTNKIPDQEAYEKHRLEMAQHVWQDMKETDSATCRSCHSFDAMVLAEQREAAQKMHKIAQETNQTCIDCHKGIAHFMPEMPADNSAALGELAKHGGKFNSADKVLYSLAMTSAKLAQGSEIRLLPFAELHNWQEEGDKIVAVVKGWQQVGAEGVIYSGLGQRIMVGLVDDAAKDKLTVHQVVNDKVTNSDWKEVSTSVSLPKAALTADIKSLNDFGSNLNQTHCSGCHAPISANHYTANQWIGVVNSMKDRTSMSADDVRAVTIYLQRNAKDMAGSSH

SEQ ID NO: 79018 - DNA, 1101 bp, Mannheimia succiniciproducens MBEL55E
  CDS (1)..(1101): transl_table=11
atgtcgaaacgcaaaaaaatttcaatgtgggctgcggctgttttgctggtgattggtgctttattgttattgggcagtcaatatgtcatgaaggcgaccagttctacggaattttgcgtaagctgccattcaatggaatatcctgccgaagaatggaaagcatccggtcatttttccaatacaaaaggaataagagcggaatgcgcagattgtcatattcctcatgacggcattgattacgtcaaagctaaagttattgcgttaaaagatgtatggttcactttgactaataaaatccctgaccgggctacgttcgaagaacagcgcggagaactggctcaacgggtttgggatgaaatgaaagcgaatgattccgctacctgccgttcttgtcataatgaagatgccatgattgtttcggaacaatcggattccgcgcaaaaaatgcataaactcgcaaaagaaaccaatcaaacctgtattgattgtcataaagggctggttcattttatgccggagacacatgcggttgcttccgttcaggaaaatgtaccgccacaagcggtgcaaattgtcgataatcagcctttgtatgcttccaatgtttcaacggcaacgctgattgacggcggtgaggcgcgtttattgccttatgccgaattggcaaactggaaagaagaagacaataactttatcggtactattgaaggttggcaacaaacgggagccgaaagcttaatttataaggagttaggtaagcgtattaatgttgcggtattaaatgaggaagctaaaactcatgtaaatgtagttaacaccgttcatgatgaagtgaccgattcggattggaaaaaagtaaacattaacgttagcgtaccgaaaagtgcggttacttctaacttagaatctttaaatcaatacggccataatttaaaccaaactcattgcagcggttgccatgcggcgattggagcggatcattacacggccaaccaatggattggggtagtcaattcaatgaaagatcgtacgtccatgacggcgaatgaagtaagagcgcttactatctacttgcaacgtcatgcaaaagatatgcactaa

SEQ ID NO: 79019 - protein, 366 aa, Mannheimia succiniciproducens MBEL55E
MSKRKKISMWAAAVLLVIGALLLLGSQYVMKATSSTEFCVSCHSMEYPAEEWKASGHFSNTKGIRAECADCHIPHDGIDYVKAKVIALKDVWFTLTNKIPDRATFEEQRGELAQRVWDEMKANDSATCRSCHNEDAMIVSEQSDSAQKMHKLAKETNQTCIDCHKGLVHFMPETHAVASVQENVPPQAVQIVDNQPLYASNVSTATLIDGGEARLLPYAELANWKEEDNNFIGTIEGWQQTGAESLIYKELGKRINVAVLNEEAKTHVNVVNTVHDEVTDSDWKKVNINVSVPKSAVTSNLESLNQYGHNLNQTHCSGCHAAIGADHYTANQWIGVVNSMKDRTSMTANEVRALTIYLQRHAKDMH

SEQ ID NO: 79020 - DNA, 1179 bp, Rhodospirillum rubrum ATCC 11170
  CDS (1)..(1179): transl_table=11
atgattaagcgcatctggactgttgtatggaagcccagcgcccgctggggattgggtgttcttctgatcgttggcgcggtgggcggcgtggtgggctggaacgtgttccatggcgcgcttgaacacacgaattcgatcgaattctgtatttcctgccatacgatggagaatacggttttccaggaatacaaacaaagcccccactataagaacgcctcgggcgtgcgcgccggctgtccggattgccacgtgcccaaggaaggtctgccgctgtacgcagccaagttgagggcgtcgaaggacgtttaccacgagatcctggggacgattgacaccccccagaaattcgaggatcgccgcctggagatggcccaaagggtttgggcgcgcatggaagagaccgattcgcgcgaatgccggtcgtgccattcctacgactcgatggacttccacgctcagaagcccaaggcggcggcgatgatggaaaaggccatgggcgagggggaaacctgcatcgcctgccacaagggcatcgcccacaagcttcccgatatgtcggcgggctacaagaagactttcgccaatttgcaagccctggcggccaaggaaggcgccaaggccaagaccctgatcaatcttgataccaagccgctgtttcttgaccgcgccacggcgagcgccggcggcaagggcgatggcaagctgctgtcgggcagcgaggtcgccgttgccgagcgggatggcgactggctgaaggtgacggtgtcgggctggcagcaggaaggcgccgagcgggtgatctacgccctcaagggccagcgcatcttcaccgccgcgcttgacgcctcggccacggcggcggtcaccgtcaccgaaaccgtcgtcgatgccgataccgagctgacctggaaaaaggtgacgctgcaggcttggctgtcgaaggacgccatgttgggcgatagcgacaagctgtgggcctatggcaaggagatgtacggcgccgcctgcggcacctgccattccctgcgcgcccccgatcacttcctggccaaccagtggatcggcaccctgaaggcgatgaagcgcttcgtcagccttgatgatgagcagtaccgcttcttgcagaagtacctccagcttaacgccaaggatactggcggggccggggcccatgggtaa

SEQ ID NO: 79021 - protein, 392 aa, Rhodospirillum rubrum ATCC 11170
MIKRIWTVVWKPSARWGLGVLLIVGAVGGVVGWNVFHGALEHTNSIEFCISCHTMENTVFQEYKQSPHYKNASGVRAGCPDCHVPKEGLPLYAAKLRASKDVYHEILGTIDTPQKFEDRRLEMAQRVWARMEETDSRECRSCHSYDSMDFHAQKPKAAAMMEKAMGEGETCIACHKGIAHKLPDMSAGYKKTFANLQALAAKEGAKAKTLINLDTKPLFLDRATASAGGKGDGKLLSGSEVAVAERDGDWLKVTVSGWQQEGAERVIYALKGQRIFTAALDASATAAVTVTETVVDADTELTWKKVTLQAWLSKDAMLGDSDKLWAYGKEMYGAACGTCHSLRAPDHFLANQWIGTLKAMKRFVSLDDEQYRFLQKYLQLNAKDTGGAGAHG

SEQ ID NO: 79022 - DNA, 1119 bp, Actinobacillus pleuropneumoniae serovar 1 str. 4074
  CDS (1)..(1119): transl_table=11
atgtctaaatttaaattatcactggcaggcggagtgatttgcgccgtattgggtgctgtagcgttatttggcgtacagtcggtaatgaaagcgaccagctctactgaattttgcgtaagttgccattcgatgagtcatccgcaagcggaatgggaaggtacggtacacttttcaaatcgtaaaggaattcgagcggaatgttccgattgccacgttccgcaagacggtttgcattatgtaaaagctaagataattgccttgaaagacgtatggcatacctttgtcaccgataaattgcccgatcaagaagcctatgaaaaacatcgcttggatatggcgcaacgtgtttgggcggaaatgaaagaaaccgattcggcgacttgtcgtagttgccattcatttgaaacaatggtgcttaccgaacaaaaagaatcggcacagaaaatgcataagttggcacaagaaaccaaccaaacctgtatcgactgccataaaggtattgcccactttatgccggaaatgcaagtagataacagtgcggcattgggcgaattaaccaaacacgccggacaatttagtgcgagtgacaaaacattgtataacttggcgatggcgccggcacaagtggcacagggcggagaaattcgtttattaccgtttgcggaagtatcacaatggaaagaatccggtgataaagtgtccggtacgattaaaggctggcaacaagcgggggcggaaagcattatttatatgggactaggccagcggattatggtcggtttagtcgcagatgaagcaaaagataaactcacggttcatcaaacggttcatgacaatgtgaccaattcggactggaaagaagtcagcgttgaagtttcattaccgaaaacggcggtgacttccgatattaattcgcttaatcatttcggcgataatttaaatcaaacccattgtagcggttgtcatgcgccgattggtgcggatcactatacggcgaatcaatggatcggtgtagtgaattccatgaaagaccgtacttcaatgacggcggacgatgtacgtgcggtcactatctatctacaacgtaacgcaaaagatgttgcgggtagttcacactaa

SEQ ID NO: 79023 - protein, 372 aa, Actinobacillus pleuropneumoniae serovar 1 str. 4074
MSKFKLSLAGGVICAVLGAVALFGVQSVMKATSSTEFCVSCHSMSHPQAEWEGTVHFSNRKGIRAECSDCHVPQDGLHYVKAKIIALKDVWHTFVTDKLPDQEAYEKHRLDMAQRVWAEMKETDSATCRSCHSFETMVLTEQKESAQKMHKLAQETNQTCIDCHKGIAHFMPEMQVDNSAALGELTKHAGQFSASDKTLYNLAMAPAQVAQGGEIRLLPFAEVSQWKESGDKVSGTIKGWQQAGAESIIYMGLGQRIMVGLVADEAKDKLTVHQTVHDNVTNSDWKEVSVEVSLPKTAVTSDINSLNHFGDNLNQTHCSGCHAPIGADHYTANQWIGVVNSMKDRTSMTADDVRAVTIYLQRNAKDVAGSSH

SEQ ID NO: 79024 - DNA, 1092 bp, Haemophilus influenzae R2846
  CDS (1)..(1092): transl_table=11
atgaaaaaaatagtaaccgcactttgtttagtcggtgtcggggtgggagcattatggggttctcagtggataatgcacaaaacgagtacaccagagttttgtgctagttgtcattcaatgagttatccacaacaggagtgggaaggttctagccattttgctaatgcaaaaggggttagagcacaatgttcagattgtcatattccaaaagaaggttggcattatgtcaaggctaaatttattgctttaaaagacttgtggtatgaagcacaaggtaagattgagaataaagaaaaatatgaagctcatcgtgcagaaatggcacaacgagtgtggaaggatatgaaagccaatgattcagaaacctgtcgtagctgtcacagttttgatgcaatggagctttcaaaacaaactaaattagcaaaacaaactcatacggaggcgcaaacaaacggtcaaacttgtattgattgtcataagggcattgttcacttcctacctgaagtgcatggcgatcaaaatacacaaaaatcctctgcagtacaaggtggtactctctctgatggctcagctatttttgccactgaaatggtgaaagcgaccaatgataaaggaaatgaggttcgcttaatgccttatgctgaattaatgcaatggaaagtggatggtaatcaaattcaaggtactttacatggctggcaacaagtgggggctgaagcagttgtgtatcaagaattaggtaaacgtatcacgcttgctttaatggacgaagatgcacgtaatcatgttcaagtattaaaaacagttcatgatgcagtaacagattctgattggaaagaaatcagtgttacggtgaatgtagctaaagaaaaaatgacatcagatttgaccgcacttaatcaatacggtaatcagttaaaccaaactcaatgtagtggatgtcattctgcgattggttctgaccactatacagctaaccaatggattggtgtggtgaactcaatgaaaaatcgcacatcattaaataaagatgaagttcgtgcattaactatttatttacaacgcaatgccaaagatatggcaaaacaataa

SEQ ID NO: 79025 - protein, 363 aa, Haemophilus influenzae R2846
MKKIVTALCLVGVGVGALWGSQWIMHKTSTPEFCASCHSMSYPQQEWEGSSHFANAKGVRAQCSDCHIPKEGWHYVKAKFIALKDLWYEAQGKIENKEKYEAHRAEMAQRVWKDMKANDSETCRSCHSFDAMELSKQTKLAKQTHTEAQTNGQTCIDCHKGIVHFLPEVHGDQNTQKSSAVQGGTLSDGSAIFATEMVKATNDKGNEVRLMPYAELMQWKVDGNQIQGTLHGWQQVGAEAVVYQELGKRITLALMDEDARNHVQVLKTVHDAVTDSDWKEISVTVNVAKEKMTSDLTALNQYGNQLNQTQCSGCHSAIGSDHYTANQWIGVVNSMKNRTSLNKDEVRALTIYLQRNAKDMAKQ

SEQ ID NO: 79026 - DNA, 1101 bp, Haemophilus influenzae R2866
  CDS (1)..(1101): transl_table=11
atgtcaaaaatgaaaaaaatagtaaccgcactttgtttagtcggtgtcggggtgggagcattatggggttctcagtggataatgcacaaaacgagtacaccagagttttgtgctagttgtcattcaatgagttatccacaacaggagtgggaaggttctagccattttgctaatgcaaaaggggttagagcacaatgttcagattgtcatattccaaaagaaggttggcattatgtcaaggctaaatttattgctttaaaagacttgtggtatgaagcacaaggtaagattgagaataaagaaaaatatgaagctcatcgtgcagaaatggcacaacgagtgtggaaggatatgaaagccaatgattcagaaacctgtcgtagctgtcacagttttgatgcaatggagctttcaaaacaaactaaattagcaaaacaaactcatacggaggcgcaaacaaacggtcaaacttgtattgattgtcataagggcattgttcacttcctacctgaagtgcatggcgatcaaaatgcacaaaaatcctctgcagtacaaggtggtactctctctgatggctcagctatttttgccactgaaatggtaaaagcgaccaatgctaaaggaaatgaggttcgcttaatgccttatgctgaattaatgcaatggaaagtggatggtaatcaaattcaaggtactttacatggctggcaacaagtgggggctgaagcagttgtgtatcaagaattaggtaaacgtatcacgcttgctttaatggacgaagatgcacgtaatcatgttcaagtattaaaaacagttcatgatgcagtaacagattctgattggaaagaaatcagtgttacggtgaatgtagctaaagaaaaaatgacatcagatttgaccgcacttaatcaatacggtaatcagttaaaccaaactcaatgtagtggatgtcatgctgcgattggttctgaccactatacagctaaccaatggattggtgtggtgaactcaatgaaaaatcgcacatcattaaataaagatgaagttcgtgcattaactatttatttacaacgcaatgccaaagatatggcaaaacaataa

SEQ ID NO: 79027 - protein, 366 aa, Haemophilus influenzae R2866
MSKMKKIVTALCLVGVGVGALWGSQWIMHKTSTPEFCASCHSMSYPQQEWEGSSHFANAKGVRAQCSDCHIPKEGWHYVKAKFIALKDLWYEAQGKIENKEKYEAHRAEMAQRVWKDMKANDSETCRSCHSFDAMELSKQTKLAKQTHTEAQTNGQTCIDCHKGIVHFLPEVHGDQNAQKSSAVQGGTLSDGSAIFATEMVKATNAKGNEVRLMPYAELMQWKVDGNQIQGTLHGWQQVGAEAVVYQELGKRITLALMDEDARNHVQVLKTVHDAVTDSDWKEISVTVNVAKEKMTSDLTALNQYGNQLNQTQCSGCHAAIGSDHYTANQWIGVVNSMKNRTSLNKDEVRALTIYLQRNAKDMAKQ

SEQ ID NO: 79028 - DNA, 1101 bp, Photobacterium sp. SKA34
  CDS (1)..(1101): transl_table=11
atgggaagaataaaaaggaaaactatcctctttgttattattattttcatcctttcttttggaatagtaaaagcgactgattttgcattgcacaaatcatctgaaactgaattttgtatttcatgtcactcaatgacaattccatatgatgattatataaaaagcccacactatgccaaccaacatggtgtttctgcgcaatgtaaagattgccatattaatgagaaaagtaatatcgaatacttaactgccaaattaggtggaataaaagatatttggtttgagacaacgggtaaaatagattctaaagaaaaatatgaagaacatagaatggaaatggctcaaactgtttggaaacaaatggaagccaataattccgctacgtgtcgtaattgtcactcttacgacaaaatgaatttcgacgagatgtctgcaaaagctaaacagcaaatgcagattgccgctagtaagaatcaaagctgtatagactgccacaaaggtattgcgcatagcctacctaaggtcaagtcatatacatttgatatcaatgagttaaaaagtggttcaacggcttatacaacaacaatttcaccgctttataacgaccaagactttgcttcaattaaagcaaaaattctaccttatacccagtttactgttttagataaagcaaatggtgccaccaaaatcaaactcagcggatggcaagaagcacataagaatttgctctacgcgatggaaggtaaacgaattactgacgctgtaataagaggtttagataatattaaagagaccggtaaaacttattataacgataccactaaaaagtcttggaaagagctaagtataattgcttgggtaaagaacacacctgttacttccaatattaatcagcaatgggaaaagaatacattcgaatacgaatctaaatgtgcgcaatgccaccagaaggtacaagaacatcattttagtagtaatgattggccagctcaatttaaaggtatggcacgtcaagctaaattaacgaaaaatgaaacgcaagggatcttaaaataccttcaatatcattcatcagatctatcaaataacttggaaaactaa

SEQ ID NO: 79029 - protein, 366 aa, Photobacterium sp. SKA34
MGRIKRKTILFVIIIFILSFGIVKATDFALHKSSETEFCISCHSMTIPYDDYIKSPHYANQHGVSAQCKDCHINEKSNIEYLTAKLGGIKDIWFETTGKIDSKEKYEEHRMEMAQTVWKQMEANNSATCRNCHSYDKMNFDEMSAKAKQQMQIAASKNQSCIDCHKGIAHSLPKVKSYTFDINELKSGSTAYTTTISPLYNDQDFASIKAKILPYTQFTVLDKANGATKIKLSGWQEAHKNLLYAMEGKRITDAVIRGLDNIKETGKTYYNDTTKKSWKELSIIAWVKNTPVTSNINQQWEKNTFEYESKCAQCHQKVQEHHFSSNDWPAQFKGMARQAKLTKNETQGILKYLQYHSSDLSNNLEN

SEQ ID NO: 79030 - DNA, 1131 bp, Photobacterium sp. SKA34
  CDS (1)..(1131): transl_table=11
atgaaacttaaaaaacgtaccgcagtacttctactcgcgataggtgtgggagtcggttggttaaccctagcaacaactcaaaccgttcttcataaaacatcagatacagaattttgtatttcctgtcattctatgcaaaaacctctagctgaatatcaaggaacaatccactttcagaatgagcatggcgttcgtgcagaatgtgctgactgccatataccgacaggaaaagttgactacttaattactaagatccgtgcaagtaaagatatctaccatgaatttattacaggcaagattaatagcgacgaaaaattcgagcagcaccgtggagaaatggctcaaacggtttgggatcagatgaaagaaacagattcatctgcttgtcgtagttgtcatgaatttaatgctatgagtatcttagagcaacgtccagcagctcaaaaaatgcatacacaagcgatgtctgacggcagcacatgtattgattgtcacaagggtattgctcatttacttcctgacacaacagataaagcacaagcaggtgctgatgaattgtcaaaagcagcagcatcaagttcaacgtctgcaaccgttctatatagcattgccactcaacctttctttatgacaaaagatgacgaatacaaccaaggtaatttaatgccaagtaccaaggttggcgttatttctcgtgaaggcgatcgcgtccaagcaaccatatctggctggcaacaagatggcgtagactccgtcatttatgcagctaaaggtaaacgtattatctcagctttactcagtgacgattctaaaaaggccttaaaagaaaatgggacagagacagatccagcaacaggattggtatggcacaaggtaagtttagatatctgggctgataataagagttttgtcgatagtgaagaacctctttgggcatattcatctaatttgatgaattcaaattgtacaggctgtcatggtttaactgctcttgatcactacaacgccaaccagtggattggagttattaaagcaatggaaacgcgaacctctttaaccaaagagcaaagccgtatgcttactcaatatgttcagaaacacgctagtgatatggctgggagcgaaaaataa

SEQ ID NO: 79031 - protein, 376 aa, Photobacterium sp. SKA34
MKLKKRTAVLLLAIGVGVGWLTLATTQTVLHKTSDTEFCISCHSMQKPLAEYQGTIHFQNEHGVRAECADCHIPTGKVDYLITKIRASKDIYHEFITGKINSDEKFEQHRGEMAQTVWDQMKETDSSACRSCHEFNAMSILEQRPAAQKMHTQAMSDGSTCIDCHKGIAHLLPDTTDKAQAGADELSKAAASSSTSATVLYSIATQPFFMTKDDEYNQGNLMPSTKVGVISREGDRVQATISGWQQDGVDSVIYAAKGKRIISALLSDDSKKALKENGTETDPATGLVWHKVSLDIWADNKSFVDSEEPLWAYSSNLMNSNCTGCHGLTALDHYNANQWIGVIKAMETRTSLTKEQSRMLTQYVQKHASDMAGSEK

SEQ ID NO: 79032 - DNA, 1095 bp, Vibrio sp. Ex25
  CDS (1)..(1095): transl_table=11
atgtcaataaaaaaacgatatgttgcactgctggttgctgccggcattggtgtgggctggttaacattaggtggtactgcagcggtaatgcattacacctctgatactgagttttgtctctcgtgccactctatggaaatcccttacaaagagtatcaaggctcagtgcacttcagtaatgcgaaaggcattcgtgccgagtgttctgattgccacatcccacaagaaccgatggactacctgatcacgaagattcgtgcatcgaaagacatctaccatgagttcgtgactggcaagatcgacacgccagaaaaatacgaagcgcaccgcaaagagcttgcggagatggtgtgggagcagttccgtgaaaacgactctgcaacgtgccgttcttgccacgactttgacgcgatggaagaatttgagcaatctcgcgatgcagcgaaaatgcacgagtacgcaaaagcgaacgatcaaacgtgtatcgattgtcacaaaggcgttgctcactttgcaccagaagcagagctagacagcaaggcatttgaaacgttgatgagcttcaccacaaaaacatcacctggtgccaaagtcgtttaccctgtgactgaaatcgcaatgggtgagatgggtaaaattaacccaacgacgaaattagaagtaatcagctctgaaggtgatgagcgtactgttaagttggacgcattccaaatgaaaggcgcagagcaagtgctgtacatgggtgaaggtcaacgtgccatcgtagcaacgctaaccgagcaaggtcagcaagctcttgagggcggtgagtttaaggccgacgtttacggcaacgaatggcgcgcagtgtcactaacaggcacgatcgattctcctgttgtggatacacttgacccagtttggtcatacgcagaagagctagacaacgtttattgtgcaacttgtcacgcgaaaattccttcaaatcacttcacagtgaacgcatggggaccagtggcgaagagtatgggtgatcgaacagacatcactgccgaaaacctagaaattcttactaagttcttccagcaccacgcgaaagatgtggttggtcactaa

SEQ ID NO: 79033 - protein, 364 aa, Vibrio sp. Ex25
MSIKKRYVALLVAAGIGVGWLTLGGTAAVMHYTSDTEFCLSCHSMEIPYKEYQGSVHFSNAKGIRAECSDCHIPQEPMDYLITKIRASKDIYHEFVTGKIDTPEKYEAHRKELAEMVWEQFRENDSATCRSCHDFDAMEEFEQSRDAAKMHEYAKANDQTCIDCHKGVAHFAPEAELDSKAFETLMSFTTKTSPGAKVVYPVTEIAMGEMGKINPTTKLEVISSEGDERTVKLDAFQMKGAEQVLYMGEGQRAIVATLTEQGQQALEGGEFKADVYGNEWRAVSLTGTIDSPVVDTLDPVWSYAEELDNVYCATCHAKIPSNHFTVNAWGPVAKSMGDRTDITAENLEILTKFFQHHAKDVVGH

SEQ ID NO: 79034 - DNA, 1215 bp, Rhodobacter sphaeroides
  CDS (1)..(1215): transl_table=11
atggggcgttctcgcggtcgggcttcggaggcaaaagtgatcagcaggatttggaaggctttctggcgaccgagcacgaaatgggggctcggcgtcctgctcgtgaccggcggcatcgccggtgcggtcggatggaacgggttccactatgtggtggaaaagaccaccacgacggaattctgcatcagctgccactcgatgcgggacaacaactacgaggaatacaagaccaccatccactaccagaacacctcgggcgtgcgggcggaatgcgccgactgtcacgtcccgaaatccggctggaagctctaccgcgcgaagctcctcgccgcgaaggacctctggggcgaaattcagggcaccatcgacacgcgtgagaagttcgaggcgcaccggctcgagatggccgagaccgtctgggccgacatgaaggccaacgactcggccacctgccggacctgccactcgttcaacgcgatggacttcgcccaccagaagcccgaggcctcgaagcagatgcagcaggcgatgaacgagggcggaacctgcatcgactgccacaagggcatcgcccacaagctgcccgacatggccagcggctaccgcgcgctgttctcgaagctcgagaaggcctcgcagtcgctcaagcccagcaagggcgagacgctctatccgctccagaccatcgaggcctatctcgagcggccctcgggcgacaaggcgaagggcgacgggcggcttctggccgcgacgccgatgcaggtggtcgacgtgaagggtgagtgggtgcaggtcgcggtgaagggctggcagcaggaaggcgccgagcgggtcatctacgagaagcagggcaagcggattttcaacgccgcactggcgccgacggccacgggctcgatcgtggcgggcgcgtccatggtcgatccggacaccgaacagacctggacggatgtctcgctgacggcgtgggtgcgcaaccgcgacctgacagacgaccaggaagcgctctggcagtatggcaagcagatgttcaacggtgcctgcggcatgtgtcacgtcctgccccacaccgagcatttcctcgccaaccagtggatcggcacgctcaacgccatgaagagccgggcgccgctcgatgacgaacagttccgcctcgtgcagcgctacgtccagatgcatgcgaaggacgtggaaccggaaggagctgcggaatga

SEQ ID NO: 79035 - protein, 404 aa, Rhodobacter sphaeroides
MGRSRGRASEAKVISRIWKAFWRPSTKWGLGVLLVTGGIAGAVGWNGFHYVVEKTTTTEFCISCHSMRDNNYEEYKTTIHYQNTSGVRAECADCHVPKSGWKLYRAKLLAAKDLWGEIQGTIDTREKFEAHRLEMAETVWADMKANDSATCRTCHSFNAMDFAHQKPEASKQMQQAMNEGGTCIDCHKGIAHKLPDMASGYRALFSKLEKASQSLKPSKGETLYPLQTIEAYLERPSGDKAKGDGRLLAATPMQVVDVKGEWVQVAVKGWQQEGAERVIYEKQGKRIFNAALAPTATGSIVAGASMVDPDTEQTWTDVSLTAWVRNRDLTDDQEALWQYGKQMFNGACGMCHVLPHTEHFLANQWIGTLNAMKSRAPLDDEQFRLVQRYVQMHAKDVEPEGAAE

SEQ ID NO: 79036 - DNA, 1179 bp, Shewanella massilia
  CDS (1)..(1179): transl_table=11
atgaagtggttaaccaacctctggcgcacactgaacaaacccaccaaagcgctgaccttaggcgccgtcagtatcagcgcttttatcatgggcatcatcttctggggcggatttaacactgcactcgaagccaccaataccgaagctttttgtattagctgccacagtatggaaagcaaaccctaccaagagctgcaggaaactgtgcattggtcgaatcactctggcgttcgcgccacctgccccgattgccacgtgccccataattggagccgtaaaatcgcccgtaagatggaagcctcccacgacgtctggggctggttatttaacacagtcaacacccctgaaaaattcgaagccaaacgcttagaaatggccagtcgcgaatggaaacgtttcgatcgcgataattcactggcctgtaaaaactgtcacaactacaactcgatgaaatgggaagccatgtccccgctggcacaaaaacagatgaaacgcgccgccgagatcgaccaaagctgtatcgattgccataaaggtattgcccaccacttaccagaaatgggcacggcccgcgcacctgaactcatagccgaagtcggcgctggcgtcagctcagtcgaaaccaaccaaacttactatagcgccctgactaaacccttattcttcacagataaaggcgatgtggaagcaggcacgctcaatgtagcaacgaaagtcaaagtgctcgaaacccaaggcaaacgcatcaagatcggcatcgatggctggcgtaaaaagattggtgctggccgcgtgatctacatggactttggtgtgaacattctgtcggcacagttaaccaaagacgcagccgaaaccgaaggtgttatccaaacctttgaagaaaaagaagatcctatgacaggccttaaatggcagcgtatcgaagcacaaatctggaccgataaggattatctgctgaccgagctgcaaccactttggggttatgcccgcgataccttccgctccagctgcagtgtttgccatacccaacccgatgaggcgcactttgacgccaatacttggccgggaatgttccaaggcatgttggccttcgtgaatatggaccaagacactcaagcactagtgcagaaatatctgcaggaacattcgtcaacttttgtgaaaaaagagcactaa

SEQ ID NO: 79037 - protein, 392 aa, Shewanella massilia
MKWLTNLWRTLNKPTKALTLGAVSISAFIMGIIFWGGFNTALEATNTEAFCISCHSMESKPYQELQETVHWSNHSGVRATCPDCHVPHNWSRKIARKMEASHDVWGWLFNTVNTPEKFEAKRLEMASREWKRFDRDNSLACKNCHNYNSMKWEAMSPLAQKQMKRAAEIDQSCIDCHKGIAHHLPEMGTARAPELIAEVGAGVSSVETNQTYYSALTKPLFFTDKGDVEAGTLNVATKVKVLETQGKRIKIGIDGWRKKIGAGRVIYMDFGVNILSAQLTKDAAETEGVIQTFEEKEDPMTGLKWQRIEAQIWTDKDYLLTELQPLWGYARDTFRSSCSVCHTQPDEAHFDANTWPGMFQGMLAFVNMDQDTQALVQKYLQEHSSTFVKKEH

SEQ ID NO: 79038 - DNA, 2202 bp, Rhodobacter sphaeroides
  CDS (294)..(1508): transl_table=11
agcgtctggcggctgaccgggtcgtcctcgacgacgagcatgtggtagtttttcttcatgacgcgcagggtctccgacggccgaccgggcctattgcgccttatcgcgcctcgaattcaacggcaattcatcgacttggccgccgttaacatcctgttcacatcattttacgcccggttaacaggctgacgcaacgcggttcacaccgcccctccactgtcctgctcaacggaaaggcagcaagccggcggaccttcgggaatgggccggcgcgcccgccgcggtcctgcggcatggggcggtcttgcggccaggcttcggaggcaaaggtgatcggcaggatttggaaggctttctggcgaccgagcacgaaatgggggctcggcgtcctcctcgtgaccggcggcatcgccggcgcggtcggctggaacgggttccactatgtcgtggaaaagacgaccacgacggaattctgcatcagctgccactcgatgcgggacaacaactacgaggaatacaagaccaccatccactaccagaacacctcgggcgtgcgggcggaatgcgccgactgtcacgtcccgaaatccggctggaagctctaccgcgcgaagctcctcgcggcgaaggacctctggggcgagatccggggcacgatcgacacgcgtgagaagttcgaggcgcaccggctcgagatggccgagaccgtctgggccgacatgaaggccaacgactcggccacctgccggacctgccactcgttcgaggccatggacttcgcccaccagaagcccgaggcctccaagcagatgcagcaggcgatgaacgagggcggcacctgcatcgactgccacaagggcatcgcccacaagatgcccgacatggccagcggctaccgcgcgctcttctcgaagctcgagaaggcctcgcagtcgctgaagccccgcaagggcgagacgctctatccgctccggaccatcgaggcctatctcgaaaagccctcgggcgagaaggcgaaggccgacggccggcttctggccgcgacgccgatgcaggtggtggacgtgacgggagactgggtgcaggtcgcggtgaagggctggcagcaggaaggggccgagcgggtcatctacgagaagcagggcaagcggatcttcaacgcggcgctggctccggcggccacgggttcggtcgtgccgggtgcctccatggtcgatccggacaccgagcagacctggacggatgtctcgctgacggcctgggtgcgcaaccgcgacctgaccggcgatcaggaggcgctctggcaatatggcaagcagatgtacaatggcgcctgcggcatgtgccacgtcctgccccaccccgagcatttcctcgccaaccagtggatcggcacgctgaacgccatgaagagccgggcgccgctcgacgacgagcagttccgcctcgtgcagcgctacgtccagatgcatgcgaaggatgtggaaccggaaggagccgcggaatgaccctcgcgcctcccgttcccggtcccctcctgcccgtccccgcgcctgccgccggggcgggcgagttggcccccctctgcgcctggctggccgaggtcttcatcgcgccgccgacggcccccgggatcggcgcctaccgccgcgggcaggccgcagcctggctcgaaagcctcgcggccctgcccgacttcgcccccggcgccgccgccatgcggcaggcgctggcaggggaaggcagcgacgaggccctcgcagcccggctcgggacggccttcaaccggctgtttctgggcttcggcggccgccgcacggtggtgccgtgcgaatccgcctggcagggaaacgggcggctctatcaggccccggcggccgagatgcagcatctcctcgcccgggccgacctctcgctcggcgcaggctgcgtcgagccgcccgaccatatctcggtcgagctcgcgctcctgtccttcctgctcatgagcggggatcccggcacggacgccatgaaagaacgcctgcagggctggatcccggccttctgcgcgcgctgcctcgaagaggatacgacgggcttctggggaggcgctgcgcgtctccttgccgctgcggtggccgcatgccccgcccggaacgaagcccggcaagaccgtcttacggaagaaaggaaagccagatgacgaagttgtcaggtcag

SEQ ID NO: 79039 - protein, 404 aa, Rhodobacter sphaeroides
MGRSCGQASEAKVIGRIWKAFWRPSTKWGLGVLLVTGGIAGAVGWNGFHYVVEKTTTTEFCISCHSMRDNNYEEYKTTIHYQNTSGVRAECADCHVPKSGWKLYRAKLLAAKDLWGEIRGTIDTREKFEAHRLEMAETVWADMKANDSATCRTCHSFEAMDFAHQKPEASKQMQQAMNEGGTCIDCHKGIAHKMPDMASGYRALFSKLEKASQSLKPRKGETLYPLRTIEAYLEKPSGEKAKADGRLLAATPMQVVDVTGDWVQVAVKGWQQEGAERVIYEKQGKRIFNAALAPAATGSVVPGASMVDPDTEQTWTDVSLTAWVRNRDLTGDQEALWQYGKQMYNGACGMCHVLPHPEHFLANQWIGTLNAMKSRAPLDDEQFRLVQRYVQMHAKDVEPEGAAE

SEQ ID NO: 79040 - DNA, 1164 bp, Pasteurella haemolytica
  CDS (1)..(1164): transl_table=11
atgttaggttcaatcaaagcattatttactcggcctgcaaccaaaatcgggttgggagtgttagttggtatcggttttattgccggagcaattagctggcatcaatttaataaagcgatggatcataccagcactgaagagttttgcgtgagttgccactcaatgcagcagccgttagaggagcttaaaaaaaccgcccactggtcgaataaaagcggggtaacggcaacctgttcaagctgccacttaccgcacgattataccgaaaaatatgcccgcaaagtgcaggcaagccgtgaggcgtgggcagaattatccggcaaatataaagaagaaggctcatttgaaaaacaccgcttagaaatggcagagcgtgagtgggcaagatttgccgccaatggttcaaaagagtgtaaggcttgccacagctatgagcgaatgaattttgataaaatgggcgaagcagctcgtaaggcaatgaaaccggctgcggagaaagatcaaagttgtatggattgccacaaaggcattgctcaccacttaccgaaagccgatgaaaatgcactgaaatcgaagtttgatcagtttgtgaataaatccccaaaccaaggcaaatcttactacaccaaagggaatgccgaattatttctagacgaaggtttaagccaagctatcgggcaattagaaaccgccgtgccggtggcatttgtgcaagcgggcaaaaatgcggatttggttgagctgacaatgtggcgtaaagagaaaggtttcggtcgcatttggtatcacgatttcgggaaaaacattaccgatgcggttctaaccaaagagtttatggcaaatcagccgaaatttgaggtgttggaaaccaaagaagatccgattaccggcttgaattggcaaaaagtgaaactacaagcgtggattggcaaagctcaattattagacgatgttaccccaatctgggcgaatgcagaaaaccaatacaaaacccaatgtagcacttgccacagacagcctgatgtcgcccacttcgattccaacagctggatcggcttattcaacggaatggtcggctttaccaatatggataaacagaccggcaaagaggtgctacgttatttacaaatgcacgcctccgatagtgaagaagcgaagcattaa

SEQ ID NO: 79041 - protein, 387 aa, Pasteurella haemolytica
MLGSIKALFTRPATKIGLGVLVGIGFIAGAISWHQFNKAMDHTSTEEFCVSCHSMQQPLEELKKTAHWSNKSGVTATCSSCHLPHDYTEKYARKVQASREAWAELSGKYKEEGSFEKHRLEMAEREWARFAANGSKECKACHSYERMNFDKMGEAARKAMKPAAEKDQSCMDCHKGIAHHLPKADENALKSKFDQFVNKSPNQGKSYYTKGNAELFLDEGLSQAIGQLETAVPVAFVQAGKNADLVELTMWRKEKGFGRIWYHDFGKNITDAVLTKEFMANQPKFEVLETKEDPITGLNWQKVKLQAWIGKAQLLDDVTPIWANAENQYKTQCSTCHRQPDVAHFDSNSWIGLFNGMVGFTNMDKQTGKEVLRYLQMHASDSEEAKH

SEQ ID NO: 79042 - DNA, 1173 bp, Escherichia coli O157
  CDS (1)..(1173): transl_table=11
atgcggaaactctggaacgcgctacgccgacccagtgctcgttggtcggtactggcgctggtcgctattgggattgtgattggcattgcgctgattgtattgccacacgttgggatcaaagtcaccagcacaaccgaattttgtgtcagttgccacagtatgcaaccagtgtatgaagaatataaacagtcggtgcatttccagaacgcctccggcgtgcgagctgaatgccatgactgtcatatcccgccggatattccaggcatggtgaagcgcaaactggaagcgagcaacgatatctaccagacctttattgcccactccattgatacacctgaaaaatttgaagccaaacgcgcggaacttgccgagcgtgaatgggcgcgaatgaaagaaaacaactcggcaacctgtcgctcctgccataactacgatgcgatggatcatgcgaagcagcatcctgaagcggcacgtcagatgaaggtggcagcgaaagataatcaatcctgcatcgactgtcataaaggtattgcccaccagttaccggatatgagtagcggcttccgtaagcagttcgatgagctgcgcgccggtgctaatgacagtggtgacacgctgtactctattgatattaagccaatttatgcggcgaaaggcgataaagaagcctctggttctctgctgcctgcctcggaagtgaaagtccttaaacgtgacggcgactggctgcaaattgaaattaccggctggacagaaagcgccggacgtcagcgtgtactcacccaattcccaggtaaacgcatctttgttgcctcgattcgtggtgatgtgcagcagcaggtaaaaacgctggagaaaaccaccgttgccgacaccaataccgagtggagcaagttgcaggccaccgcgtggatgaagaaaggtgacatggtgaacgatatcaaaccgatctgggcttatgcggattcgttgtacaacggcacctgtaaccagtgccacggcgcaccggaaatctctcactttgacgctaacggctggattggcacgctcaacggcatgatcggctttaccagcctcgataaacgtgaagaacgcaccttgttgaaatatctgcaaatgaatgcgtctgacaccgcaggtaaggctcacggcgataagaaggaagaaaaataa

SEQ ID NO: 79043 - protein, 390 aa, Escherichia coli O157
MRKLWNALRRPSARWSVLALVAIGIVIGIALIVLPHVGIKVTSTTEFCVSCHSMQPVYEEYKQSVHFQNASGVRAECHDCHIPPDIPGMVKRKLEASNDIYQTFIAHSIDTPEKFEAKRAELAEREWARMKENNSATCRSCHNYDAMDHAKQHPEAARQMKVAAKDNQSCIDCHKGIAHQLPDMSSGFRKQFDELRAGANDSGDTLYSIDIKPIYAAKGDKEASGSLLPASEVKVLKRDGDWLQIEITGWTESAGRQRVLTQFPGKRIFVASIRGDVQQQVKTLEKTTVADTNTEWSKLQATAWMKKGDMVNDIKPIWAYADSLYNGTCNQCHGAPEISHFDANGWIGTLNGMIGFTSLDKREERTLLKYLQMNASDTAGKAHGDKKEEK

SEQ ID NO: 79044 - DNA, 1173 bp, Escherichia coli
  CDS (1)..(1173): transl_table=11
atgcggaaactctggaacgcgctacgccgacccagtgctcgttggtcggtactggcgctggtcgcaattgggattgtgattggcattgcgctgattgtattgccacacgttgggatcaaagtcaccagcacaaccgaattttgtgtcagttgccacagtatgcaaccggtgtatgaagaatataaacagtcggtgcatttccagaacgcctccggcgtgcgagctgaatgccatgactgtcatatcccgccggatattccaggcatggtgaagcgcaaactggaagcgagcaatgatatctaccagacctttattgctcactccattgatacacctgaaaaattcgaagccaaacgcgcggaacttgccgagcgtgaatgggcgcgaatgaaagaaaacaactcggcaacctgccgctcctgccataactacgatgcgatggatcatgcgaagcagcatcctgaagcggcacgtcagatgaaggtggcagcgaaagataatcaatcctgcatcgactgtcataaaggtattgcccaccagttaccggatatgagtagcggcttccgtaagcagttcgatgagctgcgcgccagtgctaatgacagtggtgacacgctgtactctattgatattaagccaatttatgcggcgaaaggcgataaagaagcctctggttctctgctgcctgcttcggaagtgaaagtccttaaacgtgacggcgactggctgcaaattgaaattaccggctggacggaaagcgccggacgtcagcgtgtactcacccaattcccaggtaaacgcatctttgttgcctcgattcgtggtgatgtgcagcagcaggtaaaaacgctggagaaaaccaccgttgccgacaccaataccgagtggagcaagttgcaggccactgcgtggatgaagaaaggcgacatggtgaacgatatcaaaccgatctgggcttatgcggattcgttgtacaacggcacctgtaaccagtgccacggcgcaccggaaatcgcccactttgacgctaacggttggatcggcacgctcaacggcatgattggctttaccagtctcgataaacgtgaagaacgcaccttgttgaaatatctgcaaatgaatgcgtctgacaccgcaggtaaggctcacggcgataagaaggaagaaaaataa

SEQ ID NO: 79045 - protein, 390 aa, Escherichia coli
MRKLWNALRRPSARWSVLALVAIGIVIGIALIVLPHVGIKVTSTTEFCVSCHSMQPVYEEYKQSVHFQNASGVRAECHDCHIPPDIPGMVKRKLEASNDIYQTFIAHSIDTPEKFEAKRAELAEREWARMKENNSATCRSCHNYDAMDHAKQHPEAARQMKVAAKDNQSCIDCHKGIAHQLPDMSSGFRKQFDELRASANDSGDTLYSIDIKPIYAAKGDKEASGSLLPASEVKVLKRDGDWLQIEITGWTESAGRQRVLTQFPGKRIFVASIRGDVQQQVKTLEKTTVADTNTEWSKLQATAWMKKGDMVNDIKPIWAYADSLYNGTCNQCHGAPEIAHFDANGWIGTLNGMIGFTSLDKREERTLLKYLQMNASDTAGKAHGDKKEEK

SEQ ID NO: 79046 - DNA, 1107 bp, Haemophilus influenzae
  CDS (1)..(1107): transl_table=11
gtggctatgtcaaaaatgaaaaaaatagtaaccgcactttgtttagtcggtgtcggggtgggagcattatggggttctcagtggataatgcacaaaacgagtacaccagagttttgtgctagttgtcattcaatgagttatccacaacaggagtgggaaggttctagccattttgctaatgcaaaaggggttagagcacaatgttcagattgtcatattccaaaagaaggttggcattatgtcaaggctaaatttattgctttaaaagacttgtggtatgaagcacaaggtaagattgagaataaagaaaaatatgaagctcatcgtgcagaaatggcacaacgagtgtggaaggatatgaaagccaatgattcagaaacctgtcgtagctgtcacagttttgatgcaatggagctttcaaaacaaactaaattagcaaaacaaactcatacggaggcgcaaacaaacggtcaaacttgtattgattgtcacaagggcattgttcacttcctacctgaagtgcatggcgatcaaaatacacaaaaatcctctgcagtacaaggtggtactctctctgatggctcagctatttttgccactgaaatggtaaaagcgaccaatgataaaggaaatgaggttcgcctaatgccttatgcagaattaatgcaatggaaagtggatggtgatcaaattcaaggcactttacatggttggcaacaagtgggggctgaagcagttgtgtatcaagaattaggtaaacgtatcacgcttgctttaatggacgaagatgcacgtaatcatgttcaagtattaaaaatagttcatgatgcagtaacagattctgattggaaagaaatcagtgttgcggtgaatgtcgcaaaagaaaaaatgacatcagatttaaccacgcttaatcaatacggtaatcagttaaaccaaactcaatgtagtggttgtcacgcagcaattggtgcagatcattacacggctaaccaatggattggtgtggtgaattctatgaaagaccgtacatcaatgaaaaaagatgaagtacgtgcattaactatttatctgcaacgcaatgccaaagatatggcaaaacaataa

SEQ ID NO: 79047 - protein, 368 aa, Haemophilus influenzae
MAMSKMKKIVTALCLVGVGVGALWGSQWIMHKTSTPEFCASCHSMSYPQQEWEGSSHFANAKGVRAQCSDCHIPKEGWHYVKAKFIALKDLWYEAQGKIENKEKYEAHRAEMAQRVWKDMKANDSETCRSCHSFDAMELSKQTKLAKQTHTEAQTNGQTCIDCHKGIVHFLPEVHGDQNTQKSSAVQGGTLSDGSAIFATEMVKATNDKGNEVRLMPYAELMQWKVDGDQIQGTLHGWQQVGAEAVVYQELGKRITLALMDEDARNHVQVLKIVHDAVTDSDWKEISVAVNVAKEKMTSDLTTLNQYGNQLNQTQCSGCHAAIGADHYTANQWIGVVNSMKDRTSMKKDEVRALTIYLQRNAKDMAKQ

SEQ ID NO: 79048 - DNA, 23 bp, Artificial sequence
  primer
atgcgagggaaaaaacgcattgg

SEQ ID NO: 79049 - DNA, 27 bp, Artificial sequence
  primer
ttactgtttctcggtaatatctttggc

SEQ ID NO: 79050 - protein, 363 aa, Artificial sequence
  consensus sequence
  Variant (2)..(12): Xaa in position 2 to 12 is any amino acid
  Variant (13)..(14): Xaa in position 13 to 14 is any or no amino acid
  Variant (16)..(19): Xaa in position 16 to 19 is any amino acid
  Variant (22)..(22): Xaa in position 22 is any amino acid
  Variant (28)..(32): Xaa in position 28 to 32 is any amino acid
  Variant (33)..(33): Xaa in position 33 is any or no amino acid
  Variant (35)..(39): Xaa in position 35 to 39 is any amino acid
  Variant (41)..(42): Xaa in position 41 to 42 is any amino acid
  Variant (44)..(45): Xaa in position 44 to 45 is any amino acid
  Variant (47)..(47): Xaa in position 47 is any amino acid
  Variant (50)..(50): Xaa in position 50 is any amino acid
  Variant (52)..(52): Xaa in position 52 is any amino acid
  Variant (56)..(56): Xaa in position 56 is any amino acid
  Variant (58)..(66): Xaa in position 58 to 66 is any amino acid
  Variant (67)..(67): Xaa in position 67 is any or no amino acid
  Variant (69)..(70): Xaa in position 69 to 70 is any amino acid
  Variant (72)..(73): Xaa in position 72 to 73 is any amino acid
  Variant (75)..(89): Xaa in position 75 to 89 is any amino acid
  Variant (90)..(90): Xaa in position 90 is any or no amino acid
  Variant (92)..(93): Xaa in position 92 to 93 is any amino acid
  Variant (95)..(95): Xaa in position 95 is any amino acid
  Variant (97)..(97): Xaa in position 97 is any amino acid
  Variant (99)..(101): Xaa in position 99 to 101 is any amino acid
  Variant (103)..(109): Xaa in position 103 to 109 is any amino acid
  Variant (111)..(112): Xaa in position 111 to 112 is any amino acid
  Variant (114)..(115): Xaa in position 114 to 115 is any amino acid
  Variant (118)..(121): Xaa in position 118 to 121 is any amino acid
  Variant (123)..(130): Xaa in position 123 to 130 is any amino acid
  Variant (132)..(137): Xaa in position 132 to 137 is any amino acid
  Variant (139)..(144): Xaa in position 139 to 144 is any amino acid
  Variant (155)..(156): Xaa in position 155 to 156 is any amino acid
  Variant (158)..(217): Xaa in position 158 to 217 is any amino acid
  Variant (218)..(230): Xaa in position 218 to 230 is any or no amino acid
  Variant (233)..(235): Xaa in position 233 to 235 is any amino acid
  Variant (236)..(236): Xaa in position 236 is any or no amino acid
  Variant (238)..(245): Xaa in position 238 to 245 is any amino acid
  Variant (246)..(246): Xaa in position 246 is any or no amino acid
  Variant (248)..(252): Xaa in position 248 to 252 is any amino acid
  Variant (254)..(271): Xaa in position 254 to 271 is any amino acid
  Variant (272)..(276): Xaa in position 272 to 276 is any or no amino acid
  Variant (278)..(280): Xaa in position 278 to 280 is any amino acid
  Variant (281)..(281): Xaa in position 281 is any or no amino acid
  Variant (283)..(313): Xaa in position 283 to 313 is any amino acid
  Variant (314)..(314): Xaa in position 314 is any or no amino acid
  Variant (316)..(317): Xaa in position 316 to 317 is any amino acid
  Variant (320)..(325): Xaa in position 320 to 325 is any amino acid
  Variant (327)..(329): Xaa in position 327 to 329 is any amino acid
  Variant (331)..(331): Xaa in position 331 is any amino acid
  Variant (333)..(338): Xaa in position 333 to 338 is any amino acid
  Variant (340)..(355): Xaa in position 340 to 355 is any amino acid
  Variant (357)..(357): Xaa in position 357 is any amino acid
  Variant (359)..(362): Xaa in position 359 to 362 is any amino acid
GXXXXXXXXXXXXXTXXXXFCXSCHSMXXXXXXEXXXXXHXXNXXGXRAXCXDCHXPXXXXXXXXXXKXXAXXDXXXXXXXXXXXXXXXXEXXRXEXAXXXWXXXXXXXSXXCXXCHXXXXMXXXXXXXXAXXXXXXAXXXXXXCIDCHKGIAHXXPXXXXXXXXXXXXXXXXXXXXXXXXXXXXXXXXXXXXXXXXXXXXXXXXXXXXXXXXXXXXXXXXXXXXXXXXXGWXXXXGXXXXXXXXXGXXXXXAXXXXXXXXXXXXXXXXXXXXXXXTXXXXWXXXXXXXXXXXXXXXXXXXXXXXXXXXXXXXXCXXCHXXXXXXHXXXNXWXXXXXXMXXXXXXXXXXXXXXXXYXQXXXXD

SEQ ID NO: 79051 - protein, 26 aa, Artificial sequence
  protein pattern
  Variant (2)..(3): Xaa in position 2 to 3 is any amino acid
  Variant (4)..(4): Xaa in position 4 is Ala, Glu, Gly, Gln or Thr
  Variant (5)..(5): Xaa in position 5 is Ser or Thr
  Variant (6)..(6): Xaa in position 6 is any amino acid
  Variant (8)..(8): Xaa in position 8 is Phe, Trp or Tyr
  Variant (9)..(9): Xaa in position 9 is any amino acid
  Variant (11)..(12): Xaa in position 11 to 12 is any amino acid
  Variant (14)..(14): Xaa in position 14 is Ile or Val
  Variant (17)..(17): Xaa in position 17 is Glu, Gly, Gln or Thr
  Variant (19)..(19): Xaa in position 19 is any amino acid
  Variant (23)..(23): Xaa in position 23 is Ile or Val
  Variant (25)..(25): Xaa in position 25 is any amino acid
  Variant (26)..(26): Xaa in position 26 is Asp, Glu, Gly, Asn or Ser
EXXXXXHXXNXXGXRAXCXDCHXPXX

SEQ ID NO: 79052 - protein, 34 aa, Artificial sequence
  protein pattern
  Variant (2)..(5): Xaa in position 2 to 5 is any or no amino acid
  Variant (7)..(7): Xaa in position 7 is any amino acid
  Variant (9)..(9): Xaa in position 9 is Leu or Met
  Variant (11)..(13): Xaa in position 11 to 13 is any amino acid
  Variant (15)..(15): Xaa in position 15 is any amino acid
  Variant (16)..(16): Xaa in position 16 is Asp, Glu, Gln or Arg
  Variant (17)..(17): Xaa in position 17 is Phe, Leu or Met
  Variant (18)..(19): Xaa in position 18 to 19 is any amino acid
  Variant (20)..(20): Xaa in position 20 is Asp, Asn, Gln, Ser or Thr
  Variant (21)..(21): Xaa in position 21 is any amino acid
  Variant (23)..(23): Xaa in position 23 is any amino acid
  Variant (24)..(24): Xaa in position 24 is Ala, Glu or Thr
  Variant (26)..(26): Xaa in position 26 is Lys or Arg
  Variant (27)..(27): Xaa in position 27 is Ala, Asn, Ser or Thr
  Variant (30)..(30): Xaa in position 30 is Asp, Glu, Asn or Ser
  Variant (31)..(31): Xaa in position 31 is Phe or Tyr
  Variant (32)..(32): Xaa in position 32 is Asp, Glu, Asn or Ser
  Variant (33)..(33): Xaa in position 33 is any amino acid
KXXXXRXEXAXXXWXXXXXXXSXXCXXCHXXXXM

SEQ ID NO: 79053 - protein, 54 aa, Artificial sequence
  protein pattern
  Variant (2)..(8): Xaa in position 2 to 8 is any or no amino acid
  Variant (11)..(11): Xaa in position 11 is Ala, Gly, Ser or Thr
  Variant (12)..(15): Xaa in position 12 to 15 is any amino acid
  Variant (16)..(16): Xaa in position 16 is Ala, Asp, Asn or Ser
  Variant (18)..(18): Xaa in position 18 is Phe or Tyr
  Variant (19)..(19): Xaa in position 19 is any amino acid
  Variant (20)..(20): Xaa in position 20 is Ala or Val
  Variant (22)..(22): Xaa in position 22 is Ala, Gly, Gln or Thr
  Variant (24)..(24): Xaa in position 24 is Gly, Ile or Pro
  Variant (25)..(25): Xaa in position 25 is Ala, Gly, Pro or Ser
  Variant (26)..(28): Xaa in position 26 to 28 is any amino acid
  Variant (29)..(29): Xaa in position 29 is Ala, Gly or Ser
  Variant (31)..(34): Xaa in position 31 to 34 is any amino acid
  Variant (35)..(35): Xaa in position 35 is Asp, Asn, Arg or Ser
  Variant (36)..(36): Xaa in position 36 is Phe, Ile, Leu or Met
  Variant (37)..(39): Xaa in position 37 to 39 is any amino acid
  Variant (40)..(40): Xaa in position 40 is Asp, Glu, Asn, Gln, Ser or Thr
  Variant (41)..(43): Xaa in position 41 to 43 is any amino acid
  Variant (44)..(44): Xaa in position 44 is Ile, Leu or Val
  Variant (45)..(46): Xaa in position 45 to 46 is any amino acid
  Variant (47)..(47): Xaa in position 47 is Phe or Tyr
  Variant (48)..(48): Xaa in position 48 is Phe, Leu or Val
  Variant (50)..(51): Xaa in position 50 to 51 is any amino acid
  Variant (52)..(52): Xaa in position 52 is Ala, Gly or Ser
  Variant (53)..(53): Xaa in position 53 is any amino acid
  Variant (54)..(54): Xaa in position 54 is Asp or Thr
TXXXXXXXCHXXXXXXHXXXNXWXXXXXXMXXXXXXXXXXXXXXXXXXQXXXXX

SEQ ID NO: 79054 - protein, 20 aa, Artificial sequence
  protein pattern
  Variant (2)..(4): Xaa in position 2 to 4 is any amino acid
  Variant (5)..(5): Xaa in position 5 is Asp, Gly, Asn or Ser
  Variant (6)..(6): Xaa in position 6 is any amino acid
  Variant (7)..(7): Xaa in position 7 is Asn, Ser or Thr
  Variant (10)..(10): Xaa in position 10 is Ala, Asp or Glu
  Variant (15)..(15): Xaa in position 15 is Ile, Leu or Val
  Variant (16)..(16): Xaa in position 16 is Ala or Val
  Variant (18)..(19): Xaa in position 18 to 19 is any amino acid
AXXXXXXCIXCHKGXXHXXP

SEQ ID NO: 79055 - protein, 13 aa, Artificial sequence
  protein pattern
  Variant (2)..(2): Xaa in position 2 is Asn, Ser or Thr
  Variant (3)..(3): Xaa in position 3 is Asp, Ser or Thr
  Variant (4)..(5): Xaa in position 4 to 5 is any amino acid
  Variant (8)..(8): Xaa in position 8 is Ala, Ile, Leu or Val
  Variant (12)..(12): Xaa in position 12 is Ser or Thr
TXXXXFCXSCHXM

SEQ ID NO: 79056 - DNA, 801 bp, Escherichia coli
  CDS (1)..(801): transl_table=11
atgacagaaccgttaaccgaaacccctgaactatccgcgaaatatgcctggttttttgatcttgatggaacgctggcggaaatcaaaccgcatcccgatcaggtcgtcgtgcctgacaatattctgcaaggactacagctactggcaaccgcaagtgatggtgcattggcattgatatcagggcgctcaatggtggagcttgacgcactggcaaaaccttatcgcttcccgttagcgggcgtgcatggggcggagcgccgtgacatcaatggtaaaacacatatcgttcatctgccggatgcgattgcgcgtgatattagcgtgcaactgcatacagtcatcgctcagtatcccggcgcggagctggaggcgaaagggatggcttttgcgctgcattatcgtcaggctccgcagcatgaagacgcattaatgacattagcgcaacgtattactcagatctggccacaaatggcgttacagcagggaaagtgtgttgtcgagatcaaaccgagaggtaccagtaaaggtgaggcaattgcagcttttatgcaggaagctccctttatcgggcgaacgcccgtatttctgggcgatgatttaaccgatgaatctggcttcgcagtcgttaaccgactgggcggaatgtcagtaaaaattggcacaggtgcaactcaggcatcatggcgactggcgggtgtgccggatgtctggagctggcttgaaatgataaccaccgcattacaacaaaaaagagaaaataacaggagtgatgactatgagtcgtttagtcgtagtatctaa

SEQ ID NO: 79057 - protein, 266 aa, Escherichia coli
MTEPLTETPELSAKYAWFFDLDGTLAEIKPHPDQVVVPDNILQGLQLLATASDGALALISGRSMVELDALAKPYRFPLAGVHGAERRDINGKTHIVHLPDAIARDISVQLHTVIAQYPGAELEAKGMAFALHYRQAPQHEDALMTLAQRITQIWPQMALQQGKCVVEIKPRGTSKGEAIAAFMQEAPFIGRTPVFLGDDLTDESGFAVVNRLGGMSVKIGTGATQASWRLAGVPDVWSWLEMITTALQQKRENNRSDDYESFSRSI

SEQ ID NO: 79058 - DNA, 828 bp, Bradyrhizobium sp. ORS278
  CDS (1)..(828): transl_table=11
ttgagaatgcctgagaattccgacctgatcgtccccggcgccgcggagccggccgagatcgtgccgacgcccctgagcctcgtgccgcatctgcgcgaggtcgcgatcctgctcgacatcgacggcaccttgctcgatctcgcgccgacgccgcgcgaggtctgggtgccgccgggattgatggagacgctcaatactttgctggcacggacgtccggtgcgctggcgctggtctccggtcgctcgctcaacgacatcgatctcatcttcgcgcccgagatctatccggccgtcggcggtcacggcgcggagatgcggctggccggcggcagcgaggccgacgccatcaaggcgccgcccttggacaaggagctgaagcgcaggctggcggcgatcgccaagctcagcccgggcattctgctcgaggataagggctattcgctggcgctgcattatcgtctcgcgccgcaggcagagaaggcgatctacgaagaggtgtcgcgcattcgcgccgagctgcctggcgcgcccatcgaggtgctgcccggcaagagcgtctgcgaaatcaagcatgccggcttcaccaaggcgagcggcgtgcgcgagctgatgcggcgcgcgccgttcgaaggacgtaagccgttctttatcggcgacgacgtcaccgatgaaaccgttttcgcgatcatgcccgatttctccggtctttcattctcggtcggccgccgcgcgctcggagtcgacgggcatttcgacgcacccgatgacgtgcgcgaatttcttgcacggcttgcgacaggcgaagctaacagcgtcacgtcacgatga

SEQ ID NO: 79059 - protein, 275 aa, Bradyrhizobium sp. ORS278
MRMPENSDLIVPGAAEPAEIVPTPLSLVPHLREVAILLDIDGTLLDLAPTPREVWVPPGLMETLNTLLARTSGALALVSGRSLNDIDLIFAPEIYPAVGGHGAEMRLAGGSEADAIKAPPLDKELKRRLAAIAKLSPGILLEDKGYSLALHYRLAPQAEKAIYEEVSRIRAELPGAPIEVLPGKSVCEIKHAGFTKASGVRELMRRAPFEGRKPFFIGDDVTDETVFAIMPDFSGLSFSVGRRALGVDGHFDAPDDVREFLARLATGEANSVTSR

SEQ ID NO: 79060 - DNA, 1104 bp, Oryza sativa (japonica cultivar-group)
  CDS (1)..(1104)
atgacgaaccaggacgtggtggtttctgagatgggcatcgcggcaggcgcggcgctgccgggaggaccggccggcccggcgggcggcctcttcgcgtgccgcagcgcggccgcgtcgatgaggcagacgtacctcgacctcgccgcggcggcggtggcggcgcgctccgcgagctgcaccagctgggccgacgccatgcgcgcctcctcccccacccgctcgtcccgctccgcctccgacgtcgacgagttcaccgcctgggtgaggaagcacccgtcggcgcttagcaagttcgaggagatcgccgccaagtccagggggaagaagatcgtaatgttcatggactacgacggcacgctctctcccatcgtcgccgaccccgacacggcctacatgagcgacgcgatgagggcggcggtgcgcgaagtcgccaagaccttcccgacggcgatcgtcagcgggcggtgccgcgacaaggttcgcaacttcgtcggcctctccgacctctactacgccggcagccatggcatggacatcaagggaccaagctccaacccggagtctgccctttgccagccagcaagcgagttcctccccatgatcgacgaggtgtacaagacgctggtggaaaagacgaaatctacacctggagccaaggtggagaacaacaagttctgcctgtccgtccacttcagatgtgtagatgaaaagagatggaatgctttgggggagcaggtcaaggccgtgatcaaggaatacccaaagttgaagcttacccaaggaaggaaggttttggagatcaggccgagcattgagtgggacaagggcaaggctctggagttcttgcttgaatcgctgggattcgccaactgcggcgacgtcatgccggtgtacatcggtgacgaccgcaccgacgaggacgccttcaaggtgttgagaaagagaggtcagggcctgggaatcctagtctccaagtgccccaaggacaccaacgcctcctactctctccaggacccaacagaggtgatggagttcttgctcaggctggtggagtggaagcggaagtcgtcgtcgtcgtcgttgatgattcgtccgagagtgtag

SEQ ID NO: 79061 - protein, 367 aa, Oryza sativa (japonica cultivar-group)
MTNQDVVVSEMGIAAGAALPGGPAGPAGGLFACRSAAASMRQTYLDLAAAAVAARSASCTSWADAMRASSPTRSSRSASDVDEFTAWVRKHPSALSKFEEIAAKSRGKKIVMFMDYDGTLSPIVADPDTAYMSDAMRAAVREVAKTFPTAIVSGRCRDKVRNFVGLSDLYYAGSHGMDIKGPSSNPESALCQPASEFLPMIDEVYKTLVEKTKSTPGAKVENNKFCLSVHFRCVDEKRWNALGEQVKAVIKEYPKLKLTQGRKVLEIRPSIEWDKGKALEFLLESLGFANCGDVMPVYIGDDRTDEDAFKVLRKRGQGLGILVSKCPKDTNASYSLQDPTEVMEFLLRLVEWKRKSSSSSLMIRPRV

SEQ ID NO: 79062 - DNA, 792 bp, Mesorhizobium loti MAFF303099
  CDS (1)..(792): transl_table=11
atgatctctctctcgccaaacctcgccgtgcctgtcgttccgcaagggccatgcagcctgttcctcgatatcgacggcacgcttctcgaacatgccgcgcatcccgatgcggtggttgtcggtgatgaattgcgcaccctgctggtgcggctcgaagcgcaactggacggagcactggcgttcatcacgggacgctcgatcgccgccgtcgaccatctcttccggcctctcaggctgcgcgccgcggggctttacggcctcgagcacaggctggcgcgcgatggtccggtcgaggcggccagcgagccggctgatattgcagctcttgccaacgaaatcgcgacggaactggacaatgcagatgtctatatcgagcgcaagggacccatcctggccattcatacacgcgcggcaccgcatttgcttcaacgcgcgacggagttggtcgaacaggcactagacagattgcctgcgggataccgggttttggccggaaatgccggtgtggaactgatgccgctggaggcggcgaagggagcagccatccggcgcttcatgcaaattccggctttcaggggacggcgcccggtgttcctcggggacgatacatccgacgagaacgggttcgagaccgtcaacgaattggacggcatctcggttcgcataaagccgcagggatcgacagctgcaccttttgcactggccggcgtggacgcggccttggcctggctggacgagatgagcaggagcgagaccgcgaaagcggcgacgctggccgcaatgcccaaatga

SEQ ID NO: 79063 - protein, 263 aa, Mesorhizobium loti MAFF303099
MISLSPNLAVPVVPQGPCSLFLDIDGTLLEHAAHPDAVVVGDELRTLLVRLEAQLDGALAFITGRSIAAVDHLFRPLRLRAAGLYGLEHRLARDGPVEAASEPADIAALANEIATELDNADVYIERKGPILAIHTRAAPHLLQRATELVEQALDRLPAGYRVLAGNAGVELMPLEAAKGAAIRRFMQIPAFRGRRPVFLGDDTSDENGFETVNELDGISVRIKPQGSTAAPFALAGVDAALAWLDEMSRSETAKAATLAAMPK

SEQ ID NO: 79064 - DNA, 801 bp, Escherichia coli O157:H7 EDL933
  CDS (1)..(801): transl_table=11
gtgacagaaccgttaaccgaaacccctgaactatccgcgaaatatgcctggttttttgatctcgatggaacgctggcggaaatcaaaccgcatcccgatcaggtcgtcgtacctgacaatattctgcaaggacttcagctactggcaaccgcaagtgatggtgcattggcattgatatcagggcgctcaatggtggagctggacgcactggcaaaaccttatcgcttcccgttagcgggcgtgcatggggcggagcgccgtgacatcaatggtaaaacgcatatcgttcatctgccggatgcgattgcacgtgatattaacgtgcaactgcatacggtcatcgcccagtatcccggtgcggagctggagacgaaagggatggcttttgcgctgcattatcgtcaggctccgcagcatgaagacgcattaatgacattagcgcaacgtattactcagatctggccacaaatggcgttacagcagggaaagtgtgttgtcgagatcaaaccgagaggtaccagtaaaggtgaggcgattgctgcctttatgcaggaagctccctttatcgggcgaacgcccgtatttctgggcgatgatttaaccgatgaatctggcttcgcagtcgttaaccgactgggcggaatgtcagtaaaaattggcacaggcgcaactcaggcatcatggcgactggcgggcgtaccggatgtctggagctggcttgaaatgataaccaccgcattacaacaaaaaagagaaaataacaggagtgatgactatgagtcgtttagtcgtagtatctaa

SEQ ID NO: 79065 - protein, 266 aa, Escherichia coli O157:H7 EDL933
MTEPLTETPELSAKYAWFFDLDGTLAEIKPHPDQVVVPDNILQGLQLLATASDGALALISGRSMVELDALAKPYRFPLAGVHGAERRDINGKTHIVHLPDAIARDINVQLHTVIAQYPGAELETKGMAFALHYRQAPQHEDALMTLAQRITQIWPQMALQQGKCVVEIKPRGTSKGEAIAAFMQEAPFIGRTPVFLGDDLTDESGFAVVNRLGGMSVKIGTGATQASWRLAGVPDVWSWLEMITTALQQKRENNRSDDYESFSRSI

SEQ ID NO: 79066 - DNA, 789 bp, Ralstonia solanacearum GMI1000
  CDS (1)..(789): transl_table=11
ttgtctcggatcgcatcacccgcctcctctgcccgcgcggcgccgctgccgcccatcgacccggcgcgcacggcctttctgctcgacttcgacggcacgctcgttgacatcgcgccgcagccggaagccgttcacgtcgcgccggacctgcgcgccaccctcgccgccctgcagcgcgcaagcggcggcgcgctggcggtcatcagcggccgcacggtggccgacctcgaaacgcggctcgacctgcccggcctggtgatcgccggcgtgcatggcgccgagcgccggcacgccgacggcagcttccatcgcttgcagaccgacagcgaggcactggccgcgctcgaacgcgaactgcgcgcgcagctgcccagcgtgccgggcgtggtgctcgagtccaagggcatcgcctttgccctgcactaccgccatctgccgcaggccgccgacgccgtgtgcgcgctcgcccggcgcctggccgaccggtatgccgaccacgtgcggctgcaggcaggcaagatggtggtcgagctcaagccgcgcggggccagcaagggcgcggtggtcggccacctgatgcgcgccgcgccgtttgccggccgcatcgcgctcttcgccggcgacgacctgaccgacgagagcgccttcgaggcggtcaacaccctgggcggctggtcgatcaaggtcggcatggggcccagccaggcgcattggcgcgtgcccgatccggccgcattgcgcgactggctcgcggcgctggcccggcgcgcgggagggcgtgcggcatga

SEQ ID NO: 79067 - protein, 262 aa, Ralstonia solanacearum GMI1000
MSRIASPASSARAAPLPPIDPARTAFLLDFDGTLVDIAPQPEAVHVAPDLRATLAALQRASGGALAVISGRTVADLETRLDLPGLVIAGVHGAERRHADGSFHRLQTDSEALAALERELRAQLPSVPGVVLESKGIAFALHYRHLPQAADAVCALARRLADRYADHVRLQAGKMVVELKPRGASKGAVVGHLMRAAPFAGRIALFAGDDLTDESAFEAVNTLGGWSIKVGMGPSQAHWRVPDPAALRDWLAALARRAGGRAA

SEQ ID NO: 79068 - DNA, 759 bp, Xanthomonas axonopodis pv. citri str. 306
  CDS (1)..(759): transl_table=11
atggcagacgcgcaatcccccctaccgtcgccgccattgctggacgatgcctgtgcattgtttctggacgtggacggcaccctcatcgactttgccgaccgccccgaggcggtgcagctattgcccgacgtgcgcgaggccatcggcctgctgagcgagcgcctcaagggcgccgtcgcactggtcagcggccggccactcgcccagctggatgccctgttcgctcccttgctgctgccggccgccggtctgcacgggcatgagctgcgcagcgatctcgcggcacgcgcggcaatgccccaagacacgtcccagtggctgcacggcctgcatcaacgcgccgcggcgctgacgcaccaccaccccggcgtgctggtcgaagacaagggcgccagcgtggcgctgcactggcgcgcccggccgcaggccggccccgaggtgctcgccttcgcgcagcaggaaatcgcacagctttccggctatcgcctgcagcctggcgaccacgtggtggaattcgttcccgaaggcagcaacaagggtctggcggtcgagcagctgatgcagcacggcaccttcgccggtcgcacgccggtgttcgtcggcgacgaccttaccgacgaattcggcttcgacgccgccaaccggctcggcggctggagcgtgctcgtcggcgatcgcgcgcagaccagcgcgcgctttcgcgtcggcggcacccccgacgtacacgcgtggttgcaacgcaacgcacgcagccgctga

SEQ ID NO: 79069 - protein, 252 aa, Xanthomonas axonopodis pv. citri str. 306
MADAQSPLPSPPLLDDACALFLDVDGTLIDFADRPEAVQLLPDVREAIGLLSERLKGAVALVSGRPLAQLDALFAPLLLPAAGLHGHELRSDLAARAAMPQDTSQWLHGLHQRAAALTHHHPGVLVEDKGASVALHWRARPQAGPEVLAFAQQEIAQLSGYRLQPGDHVVEFVPEGSNKGLAVEQLMQHGTFAGRTPVFVGDDLTDEFGFDAANRLGGWSVLVGDRAQTSARFRVGGTPDVHAWLQRNARSR

SEQ ID NO: 79070 - DNA, 801 bp, Shigella flexneri 2a str. 301
  CDS (1)..(801): transl_table=11
gtgacagaaccgttaaccgaaacccctgaactatccgcgaaatatgcctggttttttgatcttgatggaacgctggcggaaatcaaaccgcatcccgatcaggtcgtcgtgcctgacaatattctgcaaggactacagctactggcaaccgcaagtgatggtgcattggcattgatatcagggcgctcaatggtggagcttgacgcactggcaaaaccttatcgcttcccgttagcgggcgtgcatggggcggagcgccgtgacatcaatggtaaaacacatatcgttcatctgccggatgcgattgcgcgtgatattagcgtgcaactgcatacggtcatcgctcagtatcccggcgcggagctggaggcgaaagggatggcttttgcgctgcattatcgtcaggctccgcagcatgaagacgcattaatgacattagcgcaacgtattactcagatctggccacaaatggcgttacagcagggaaagtgtgttgtcgagatcaaaccgagaggtaccagtaaaggtgaagcgattgcagcctttatgcaggaagctccttttatcgggcgaacgcccgtatttctgggcgatgatttaaccgatgaatctggcttcgcagtcgttaaccgactgggcggaatgtcagtaaaaattggcacaggtgcaactcaggcatcatggcgactggcgggtgtgccggatgtctggagctggcttgaaatgataaccgccgcattacaacaaaaaagagaaaataacaggagtgatgactatgagtcgtttagtcgtagtatctaa

SEQ ID NO: 79071 - protein, 266 aa, Shigella flexneri 2a str. 301
MTEPLTETPELSAKYAWFFDLDGTLAEIKPHPDQVVVPDNILQGLQLLATASDGALALISGRSMVELDALAKPYRFPLAGVHGAERRDINGKTHIVHLPDAIARDISVQLHTVIAQYPGAELEAKGMAFALHYRQAPQHEDALMTLAQRITQIWPQMALQQGKCVVEIKPRGTSKGEAIAAFMQEAPFIGRTPVFLGDDLTDESGFAVVNRLGGMSVKIGTGATQASWRLAGVPDVWSWLEMITAALQQKRENNRSDDYESFSRSI

SEQ ID NO: 79072 - DNA, 822 bp, Drosophila melanogaster
  CDS (1)..(822)
atgcctgagaaacaagtggcacctgtaattagtaatctcgaggattttgcgaataatttacctgggtatctaatttctgaaagtccagttgccgtactcctggactacgatggcaccctagctcccattgcggataatccagcgaagaccaaaatgcccgtggaactggaggccatactgcacaagatagccaagcatcccaaagtttttctcgctgtgatctcgggtcgcggactgaaagatgtgcaaaaacaagtaaatatcgatggcattacatatgctggtaatcatggactggaaatcgagtatcccgatggctccaggcacgattacgagctacccacggagatccagaaaaactacacacaaatggttagggagctcaaggagaaggtggagaagaatggagcctgggtggaggataagaaggtgtcactcacctaccactacagagatacgcccgcagccctgaaggatcagcaaaagcagttggcttcggagatctgcacaaagttcggattccgtgcgaatcaggcccatgaagccatcgaagctaagcccccagtgaattggaacaagggagaggctgccgtgtatattctgaagcagaaattcggggataattggtcgcagaaagtgagtgtggtctttgcgggcgatgacaccaccgatgaagatgccatgagagtgcttcgaggcttgggtcgctcgtttagaatttctgctgatgcccagattcaaacttatgcggatttccggttgcccaagcaggctgtaatgaccgatcttctcaaatggatagccaatgtgtatgtttcttag

SEQ ID NO: 79073 - protein, 273 aa, Drosophila melanogaster
MPEKQVAPVISNLEDFANNLPGYLISESPVAVLLDYDGTLAPIADNPAKTKMPVELEAILHKIAKHPKVFLAVISGRGLKDVQKQVNIDGITYAGNHGLEIEYPDGSRHDYELPTEIQKNYTQMVRELKEKVEKNGAWVEDKKVSLTYHYRDTPAALKDQQKQLASEICTKFGFRANQAHEAIEAKPPVNWNKGEAAVYILKQKFGDNWSQKVSVVFAGDDTTDEDAMRVLRGLGRSFRISADAQIQTYADFRLPKQAVMTDLLKWIANVYVS

SEQ ID NO: 79074 - DNA, 858 bp, Escherichia coli CFT073
  CDS (1)..(858): transl_table=11
atgtctgtaaagcgcgttctgcgcaacacaataagaaaagagaaggaggagaaccgggtgacagaaccgttaaccgaaacccctgaactatccgcgaaatatgcctggttttttgatctcgatggaacgctggcggaaatcaaaccgcatcccgatcaggtcgtcgtacctgacactattctgcaaggacttcagctactggcaaccgcaagtgatggtgcattggcattgatatcagggcgctcaatggtggagcttgatgcactggcaaaaccttatcgcttcccattagcgggcgtgcatggggcggagcgccgtgacatcaatggtaaaacgcatatcgttcatctgccggatgcgattgcgcgtgatattagcgtgcaactgcatacggtcatcgcccagtatcccggcgcggagctggaggctaaagggatggcttttgcgctgcattatcgtcaggctccgcagcatgaagacgcattaatgacattagcgcaacgtattactcagatctggccacaaatggcgttacagcagggaaagtgtgttgtcgagatcaaaccgaaaggtaccagtaaaggtgaggcgattgctgcctttatgcaggaagctccctttatcgggcgaacgcccgtatttctgggcgatgatctgaccgatgaatctggcttcgcagtcgttaaccggctgggcggaatgtcagtaaaaattggcacaggtgcaactcaggcatcatggcgactggcgggcgtgccggatgtctggagctggcttgaaatgataaccaccgcattacaacaaaaaagagaaaataacaggagtgatgactatgagtcgtttagtcgtagtatctaa

SEQ ID NO: 79075 - protein, 285 aa, Escherichia coli CFT073
MSVKRVLRNTIRKEKEENRVTEPLTETPELSAKYAWFFDLDGTLAEIKPHPDQVVVPDTILQGLQLLATASDGALALISGRSMVELDALAKPYRFPLAGVHGAERRDINGKTHIVHLPDAIARDISVQLHTVIAQYPGAELEAKGMAFALHYRQAPQHEDALMTLAQRITQIWPQMALQQGKCVVEIKPKGTSKGEAIAAFMQEAPFIGRTPVFLGDDLTDESGFAVVNRLGGMSVKIGTGATQASWRLAGVPDVWSWLEMITTALQQKRENNRSDDYESFSRSI

SEQ ID NO: 79076 - DNA, 822 bp, Bradyrhizobium japonicum USDA 110
  CDS (1)..(822): transl_table=11
atgaaatcggaacttgcggaaatggcagtggaccagaagcgcaccatgcccgttgacgacgatgtgccggaaacggtgccggtgccgcatgcgctcgtgccacatctcgacgagaccgcgatcctgctcgacatcgacggcacgctgctcgacctgatgccgacgccgcgcgaagtgtgggtgccgccgggcctgtcggagacgctcaagcggctggtggaacgcacctccggggcgttggcgctggtcagcggccgctcgctcaacgacatcgacttgatcttcgcgcccgacgtctatcgcgccgtcgccggccacggcgcggagatgcggctgtcggtggacaatgaagtggatgatgtgcacgcgccgccgctggacaaggagttgaagcggcggctcgctgcgatcgcaaagctcagtccgggcattctgctcgaggacaagggctattcgctcgcgctgcactatcgcctcgcaccgcatgcggagaaggcgatcttcgaggctgtctcgctgatccgcgccgatctgcccaatgcgccgatcgaggtgctgcccggaaagttcgtctgcgagatcaagcattccggcttcaccaaggcgaccggcgtgcacgagttgatgaagcacgaaccgttcaggggacggcgtccactgttcatcggcgacgacgtcaccgacgagaccgtgttcgcgatcatgcctgacatgaacgggctcgctttttcggtgggccgccgtgccatgggtgtgaatggtcacttcgatgcgccgagcgatgtgcgcgcgttcctcgcgcgcctgctcgatccgaggtga

SEQ ID NO: 79077 - protein, 273 aa, Bradyrhizobium japonicum USDA 110
MKSELAEMAVDQKRTMPVDDDVPETVPVPHALVPHLDETAILLDIDGTLLDLMPTPREVWVPPGLSETLKRLVERTSGALALVSGRSLNDIDLIFAPDVYRAVAGHGAEMRLSVDNEVDDVHAPPLDKELKRRLAAIAKLSPGILLEDKGYSLALHYRLAPHAEKAIFEAVSLIRADLPNAPIEVLPGKFVCEIKHSGFTKATGVHELMKHEPFRGRRPLFIGDDVTDETVFAIMPDMNGLAFSVGRRAMGVNGHFDAPSDVRAFLARLLDPR

SEQ ID NO: 79078 - DNA, 804 bp, Salmonella enterica subsp. enterica serovar Typhi Ty2
  CDS (1)..(804): transl_table=11
gtggcagaaccgttaaccgtatcccccgaactcactgcgaactatgcgtatttttttgaccttgatggcacattggcagagataaagcctcatcccgatcaggtagtggtaccgcataaaatccttcagttgttagaccgtctcgcggcgcacaacgcaggggcactggcattgatttcagggcgttcaatgactgagctggatgctttggcgaagccttttcgctttccgctcgctggcgttcacggggcagagcgtcgtgacatcagtggtaaaacccatatcgtgcgccttcctgaagcggtagtccgtgaggtggaggcgttattacgttcgacgcttgcagcgctgcccggaacggagctggagacaaaggggatggcgtttgcgctgcactaccgtcaggctccggaacatgaagcggcgctgttggcgcttgcgcaacacgttacgcagcactggccgcaactggcgttgcagcctggtaaatgtgttgtggaaatcaaacctaagggaactaataaaggcgaagcgattgccgcctttatgcaggaggcgccctttacgggacggattcccgtttttgtgggcgacgatttgaccgatgaggctggctttggcgtggtgaatcacgctggcggaatttccgtaaaagtgggcgtcggggcaacccaggcggcatggcggctggaaagcgtacccgatgtctggcgctggctggaacaaatcaattatccacaacaagaacaacaagtaatgaataacaggagagatggctatgagtcgtttagtcgtagtatctaa

SEQ ID NO: 79079 - protein, 267 aa, Salmonella enterica subsp. enterica serovar Typhi Ty2
MAEPLTVSPELTANYAYFFDLDGTLAEIKPHPDQVVVPHKILQLLDRLAAHNAGALALISGRSMTELDALAKPFRFPLAGVHGAERRDISGKTHIVRLPEAVVREVEALLRSTLAALPGTELETKGMAFALHYRQAPEHEAALLALAQHVTQHWPQLALQPGKCVVEIKPKGTNKGEAIAAFMQEAPFTGRIPVFVGDDLTDEAGFGVVNHAGGISVKVGVGATQAAWRLESVPDVWRWLEQINYPQQEQQVMNNRRDGYESFSRSI

SEQ ID NO: 79080 - DNA, 798 bp, Rhodopseudomonas palustris CGA009
  CDS (1)..(798): transl_table=11
atgacgaccaaactcgttcgaccatctgatcaggccacctcaaatcaggttccggtccccggcgcgctggtgccgcatctcgatcagtgtgcgctgctgctggacatcgatggtacgttgttggacctggcgccgaccccgcgcgaagtctgggtgccgccagagctggaacaaacgctcaccaatcttctggtcaggacgtcgggtgcgctggcgctcgtcagcgggcgttcgatcaacgacatcgatctgattttcgcgccgatgcgattgcccgccgtcggtggtcatggcgccgagatgcggctgtcgggcgagggcgaagcgatcgcgacgcacgcgccgccgctcgattccgagctgaagagccggctcgccgcaatcgctcgcatcagccccggtattttgttggaggacaaaggctactcattggcactgcactatcgtctggcgccgcacactgagaaagcgatctacgaagcggttgcagcgatccgcgcggagaatccggaagcgccgctggaggtcctgcccgggaaatctgtatgcgagatcaagcattcgggtttcaccaaggcgacaggcgtgctggaactgatgactcgcgcgccgttcaaaggccggcgaccgatcttcatcggcgacgacgttactgacgaaacggtgttcgccatcatgccggaacttcgaggcctcgcattctcggttgggcgctatagcgaactgacctccggacacttcgacgagccgcgcgatgtgcgcaattggctcgcacgtttactcgaaccagccaattag

SEQ ID NO: 79081 - protein, 265 aa, Rhodopseudomonas palustris CGA009
MTTKLVRPSDQATSNQVPVPGALVPHLDQCALLLDIDGTLLDLAPTPREVWVPPELEQTLTNLLVRTSGALALVSGRSINDIDLIFAPMRLPAVGGHGAEMRLSGEGEAIATHAPPLDSELKSRLAAIARISPGILLEDKGYSLALHYRLAPHTEKAIYEAVAAIRAENPEAPLEVLPGKSVCEIKHSGFTKATGVLELMTRAPFKGRRPIFIGDDVTDETVFAIMPELRGLAFSVGRYSELTSGHFDEPRDVRNWLARLLEPAN

SEQ ID NO: 79082 - DNA, 753 bp, Geobacter sulfurreducens PCA
  CDS (1)..(753): transl_table=11
atgatctatctgttcagccatgccggtctcagagatctgcgggatttcatcgaccggtccaccctgtttgcctttgatctcgacggcaccctggctccgatcgtttccgatccggcagggatcatgatcccgccggacgtgcacgagcgcctggtccgcctgaacggtacggcatccgttgccgtcgttaccggccgagcccgggtcgatgcggcgcggcaccttggcttcgcgccccgcttcctggtgggaaaccacggggccgaggggcttcccggcgccgatgccgcggagcgggaattcatcggtctctgccgcggctggatgacgcaactgggggagctcctgccggagggggagggcaccggcatcgtcatggaggacaagagcgccacactgtcgctccattaccgaaacgcccctgatcgcgagaacgctcatcaacgcatcctggctgccgtttcccggctgctgcccgcgccccggcgggtttccggcaagttggtcgagaacctcgtgccggcggccgccccccacaagggagacgcgcttcggtgcatcatgcgccatctcggctgtgcccgcgcgctctttgtcggtgacgatgtgaccgacgaggatgtgttccgtctcggcgacgaagccatcttcgggattcgggtcgggaactctggtgggagcgcggcccgctacttcatccggggccaggatgagatggccccgctgcttgatgagatcctggccgtgctctga

SEQ ID NO: 79083 - protein, 250 aa, Geobacter sulfurreducens PCA
MIYLFSHAGLRDLRDFIDRSTLFAFDLDGTLAPIVSDPAGIMIPPDVHERLVRLNGTASVAVVTGRARVDAARHLGFAPRFLVGNHGAEGLPGADAAEREFIGLCRGWMTQLGELLPEGEGTGIVMEDKSATLSLHYRNAPDRENAHQRILAAVSRLLPAPRRVSGKLVENLVPAAAPHKGDALRCIMRHLGCARALFVGDDVTDEDVFRLGDEAIFGIRVGNSGGSAARYFIRGQDEMAPLLDEILAVL

SEQ ID NO: 79084 - DNA, 771 bp, Mycobacterium sp. JLS
  CDS (1)..(771): transl_table=11
gtggccgacggcgtaccgacagatctccgccaggcgctcgacggcgccgcacgacttccgcgtctgctgatcgcctgtgactacgacggcacgctggcgccgatcgtgtccaaccccgccgacgcccgtccgctgcccgcgtcggcggccgcggtggaggaactggctgcgctgcccgccaccacggtcgcgctgatctccggccgcgcactgggcgtgctcaaggaactctccggggtgtccggccgtgtgcacctcgtcggcagccacggagcggagttcgacaccgggttcctgtcccccatcgatgagcgagccgaagcactgctggtcgagatcaaacagaccctcgacgagatcgccgccgaatacgccggtgtgacaaccgaactcaaacccgccagtgtcgcgctgcacgtgcgcaacgcctcgaccgacgacggtgaagcggcgatgcaccgcgcgaacgaggcggccgcgcggtgggatgcgcaggtcaccgacggcaaggcggtcaaggagttcgccgtcatccagaccgacaagggacaggccgtcgacatcctgcgcgatcagcacgacgcctcggcggtgctgttcctcggcgacgacgtcaccgacgagaaggcgttccgccggatgcgcgacggcgacatcggtgtgaaggtcggccccggcgacaccgcggcggcgtaccgggtcgacgaaccccgcgacgtggccgaggtgctcgagtacctgctggccgtgcggcgtcgtgctcactcctga

SEQ ID NO: 79085 - protein, 256 aa, Mycobacterium sp. JLS
MADGVPTDLRQALDGAARLPRLLIACDYDGTLAPIVSNPADARPLPASAAAVEELAALPATTVALISGRALGVLKELSGVSGRVHLVGSHGAEFDTGFLSPIDERAEALLVEIKQTLDEIAAEYAGVTTELKPASVALHVRNASTDDGEAAMHRANEAAARWDAQVTDGKAVKEFAVIQTDKGQAVDILRDQHDASAVLFLGDDVTDEKAFRRMRDGDIGVKVGPGDTAAAYRVDEPRDVAEVLEYLLAVRRRAHS

SEQ ID NO: 79086 - DNA, 753 bp, Burkholderia vietnamiensis G4
  CDS (1)..(753): transl_table=11
atgcaatccgttccggcttccctgtccctgaccgataccgcgttctttttcgacttcgacggcacgctcgtcgagctcgcccccacgcccgacagcattcacgtgccgccgtcgctgctgacgctgctcgatacgctcaggcagcgctcgcatggcgcggtcgcggtggtgtcggggcgcggcatcgacaatctcgacacgttcctgagcatgcccgatctgccgatcgccggcctgcacggcgccgagcgtcgtgattcgaacggcgacacgcagcgcatcggcttcaacgacgaacgcctgctgcgcatcgagcgcgagctggcggccgtggtcgaccgtcatccgggcatgctgctggagatcaagggcgcggccgtcgcgctgcactaccgcaacgcggccgaccgtgagccggtcgcgcgcgaagcggccgagcgcctcgtcgccgaatatgcggacgcgtacgtactgcagcccggcaagatggtgttcgaaatcaagccgaagggcgtcgacaaggggcgcgcgctggccgcgttcctcgacgagccgccgttcgcgggccgcgtgccgctgttcgcgggcgacgatctgaccgacgagaagggcttcgcggtggtgaacgcgcgtggcggcctgtcgatcaaggtcggcgccggcgagacgtcggcgcgcatgcggctcgattcggtcgccgcgctgcacgcgcagatcgcccgctggctcgatctggagctgccgggcgcatga

SEQ ID NO: 79087 - protein, 250 aa, Burkholderia vietnamiensis G4
MQSVPASLSLTDTAFFFDFDGTLVELAPTPDSIHVPPSLLTLLDTLRQRSHGAVAVVSGRGIDNLDTFLSMPDLPIAGLHGAERRDSNGDTQRIGFNDERLLRIERELAAVVDRHPGMLLEIKGAAVALHYRNAADREPVAREAAERLVAEYADAYVLQPGKMVFEIKPKGVDKGRALAAFLDEPPFAGRVPLFAGDDLTDEKGFAVVNARGGLSIKVGAGETSARMRLDSVAALHAQIARWLDLELPGA

SEQ ID NO: 79088 - DNA, 864 bp, Acinetobacter sp. ADP1
  CDS (1)..(864): transl_table=11
gtgaataaaatgaacaataatatccttaaaaaaaatgatctttcatcacaagaagagtctactcatgagattcaagatgtgttggatcagttggatttttatacctataaaattgctttatttttagatatcgacggtacactcgcagattttaaaatagatcctctcgcatgttttatatcgaaaaaaatattaaaatcaattcaagatattcagagcaaaggttgcttggtcagtgtaattactggacgcgattataattcagctcagaaattattagcggatgtcagtctgcctatagcagcattacatgggttagacattcatattaatgaaaaaactcaattaaatgctataaatcaaaataatcaaatatttattcaaaattttttatgccgtctgaaagaagaaattaaataccaacccgatctaagtatcgaaaataagcatcattctattgctttacattatcgtaaaaatcctgatctttatgatattgctaaacatattatgaatacagtcaaaaaggataatgatgagttcaaggttatcgaaggtaaatatgttttcgagttaataccaaaaaattcaaataaaggaagtgcgattaaaactctattatcttattttgatgcagaacattatcttagtatttttattggtgatgatattaccgatgaagatggcttcaacatggttaatcagcttgaaggaataagtattaaggttggatctggcaaaacagttgccagatttagattgaaaaatattgagcacgtcgaagaatttttaaacttgctctctcatcattttccagattcatctactcaaattactaaaaaatatggagaacaacatgtctag

SEQ ID NO: 79089 - protein, 287 aa, Acinetobacter sp. ADP1
MNKMNNNILKKNDLSSQEESTHEIQDVLDQLDFYTYKIALFLDIDGTLADFKIDPLACFISKKILKSIQDIQSKGCLVSVITGRDYNSAQKLLADVSLPIAALHGLDIHINEKTQLNAINQNNQIFIQNFLCRLKEEIKYQPDLSIENKHHSIALHYRKNPDLYDIAKHIMNTVKKDNDEFKVIEGKYVFELIPKNSNKGSAIKTLLSYFDAEHYLSIFIGDDITDEDGFNMVNQLEGISIKVGSGKTVARFRLKNIEHVEEFLNLLSHHFPDSSTQITKKYGEQHV

SEQ ID NO: 79090 - DNA, 810 bp, Burkholderia pseudomallei K96243
  CDS (1)..(810): transl_table=11
atgcgcacattcgcccggcgggcgcgcccgccggcagccattctcttcagcgaatcgatgcaatccatcccgctttccctgcccctttcccgcaccgcgttcttcttcgatttcgacggcacgctcgtcgacctcgcgccgacgcccgacgccatccaggtgccgcccgacgtgcccgtgctcgtcgacgcgctgcggcagctgtcgcacggcgcggtcgcgatcgtgtccgggcgcggcatcgacagcatcgacgcatacctcaacctgcccggcctgccggtggcgggcctgcacggcgccgagcggcgcgacgcgaacggcgacacgcagcggatcggcttcgacgatccgcggctgctgcgtatcgagcgcgaactcgcggcgctcgtcgatcgccacccgggcatgctgctcgagatcaagggcgcggcgctcgcgctgcattttcgcaacgcgcccgaacgcgagggcgtcgcgcgcgcggcggccgagcggctcgtcgccgattacgcggatgcgtacgtgctgcagccgggcaagatggtgttcgagatcaagccgaagggcgtcgacaaggggcgcgcggttgccgcgttcctgaacgagccgccgttcgccggccgcatgccggtgttcgccggcgacgatctgaccgacgagcagggcttcgccgtcgccaacgcgaacggcggattgtcgatcaaggtcggtgcgggcgacacgacggcgcgcgcgcgcgtcgattcggtcgccgcgttgcgcgcgcagctcgcgcgctggatcgccgcggggcgcgcgcccgcatga

SEQ ID NO: 79091 - protein, 269 aa, Burkholderia pseudomallei K96243
MRTFARRARPPAAILFSESMQSIPLSLPLSRTAFFFDFDGTLVDLAPTPDAIQVPPDVPVLVDALRQLSHGAVAIVSGRGIDSIDAYLNLPGLPVAGLHGAERRDANGDTQRIGFDDPRLLRIERELAALVDRHPGMLLEIKGAALALHFRNAPEREGVARAAAERLVADYADAYVLQPGKMVFEIKPKGVDKGRAVAAFLNEPPFAGRMPVFAGDDLTDEQGFAVANANGGLSIKVGAGDTTARARVDSVAALRAQLARWIAAGRAPA

SEQ ID NO: 79092 - DNA, 798 bp, Ralstonia eutropha JMP134
  CDS (1)..(798): transl_table=11
atgccccctttaccgcttatcgaacccaataccgcgctgtttctcgacttcgacggtacgctggccgatctcgccccgcggcccgagcttgtgcaggtagagcccgaactggtcgggacgctgcgcaggctgtacgaccgtctggatggcgcgctcgccatcgtatccggccgaccgatcattgaactagaccatttcctgcagccgctgttgctgccggccgccggcgtgcacggtgcggaactccgcaccgccggcgcgcagatcgagatgaagcccgcgcccggcctggagccgttgatcccgccgcttgaagcacttgtgcgccggcatcccggcctgcgcctcgagcgcaagtccgtggccgtcgccatccactatcgcgaagcgcccgaactcgaaggcctggtgcgcgcggccgtcaccgacgtgctgcgccatgcgaacgggctggagggcatgcccggcaagatggtggtggagatcaagcccgccggcatcaacaagggcgatgcgatcgcagctttcatgaacatgccgccattcgctggacgtggcccgctctttgcgggcgacgatgtgactgacgaagcaggcttcgcggtcgtgcgcaagctcggcggggtcggcgtgctggtgggccagcgcgagaccatggctacggtcagcgtcaccgggccggccgcactgcgctgctggctacaccgctcagcgcgcgcattcgatggcacaccggccccggacgagcggccggcggtgtccgatccacaacgagatcttgagggggattcgctgtga

SEQ ID NO: 79093 - protein, 265 aa, Ralstonia eutropha JMP134
MPPLPLIEPNTALFLDFDGTLADLAPRPELVQVEPELVGTLRRLYDRLDGALAIVSGRPIIELDHFLQPLLLPAAGVHGAELRTAGAQIEMKPAPGLEPLIPPLEALVRRHPGLRLERKSVAVAIHYREAPELEGLVRAAVTDVLRHANGLEGMPGKMVVEIKPAGINKGDAIAAFMNMPPFAGRGPLFAGDDVTDEAGFAVVRKLGGVGVLVGQRETMATVSVTGPAALRCWLHRSARAFDGTPAPDERPAVSDPQRDLEGDSL

SEQ ID NO: 79094 - DNA, 783 bp, Rhodobacter sphaeroides 2.4.1
  CDS (1)..(783): transl_table=11
atgcaccaacctgccctgcatcccgaccaagatgacggcgcggcggtcctgcgatccgcgctgcgcgatgcgcccgacgagtgggcgctctttctcgacatcgacgggacgctggtcgacatcgccgagcagccgcacgacgtgcgcgtggccgcgagtctgccgcaggatctggcgcgactggccgaccggctcgggggggctctggctctcgtgaccgggcggcgggtcgactggatcgacgcccacttcgggccgcatctctttcctgccgcgggtcttcacggggtcgagcgccgccgcgcctcgggagaactcgaccgcgcgggcctcgcgccgtccctgaacgcgctgcgcaaggatctgggtcggcgcacggcgcggatgcccggcgtcctcctcgaggacaaggtggctgcggtggcgctgcattaccggcaggcgcccgaacgcgagcccgatgtgcgggcgatgatggaaatggctttgaaggtgatgggagacggttgggtgctgcagcacggcaagatggtggtggaactgcggccggcctcggccaacaagggcacggcgctcgaggcctttctgacggagccgcccttcgccgggcggaggcccgttgcgataggcgacgacgtgaccgacgaggagatgttccgggtggtcaatgcctgcggcggcctctcggtgcggatctgcgagaccgaggcgccgacgctggcccgggcgcggctcgcctcgccgcaggcgctccgcgacctcgtggcggagctcggcgcatga

SEQ ID NO: 79095 - protein, 260 aa, Rhodobacter sphaeroides 2.4.1
MHQPALHPDQDDGAAVLRSALRDAPDEWALFLDIDGTLVDIAEQPHDVRVAASLPQDLARLADRLGGALALVTGRRVDWIDAHFGPHLFPAAGLHGVERRRASGELDRAGLAPSLNALRKDLGRRTARMPGVLLEDKVAAVALHYRQAPEREPDVRAMMEMALKVMGDGWVLQHGKMVVELRPASANKGTALEAFLTEPPFAGRRPVAIGDDVTDEEMFRVVNACGGLSVRICETEAPTLARARLASPQALRDLVAELGA

SEQ ID NO: 79096 - DNA, 753 bp, Burkholderia sp. 383
  CDS (1)..(753): transl_table=11
atgcaatccgttccggcttccctgtccctgaccgataccgcgttcttcttcgacttcgacggcacgctcgtcgagttggcgccgacgcccgacagcattcatgttccgccgtcgctgctgacgctgctcgacgagctgcagcgccgctcgcacggcgcggtcgcgatcgtgtccgggcgcgggatcgacaacatcgacacgttcctgaagatgcccgacatgccgatcgccggcctgcacggcgcggagcgtcgcgatgcgaacggcgacacgcaacgtatcggcttcaacgacgaacgcctgctgcgcatcgagcgcgagctggcggccgtcgtcgaccgtcatccgggcatgctgctcgaaatcaagggcgcggccgtcgcgctgcactaccgcaacgcgcccgagcgcgaggcggcggcgcgcgcggccaccgagcgcctcgtcgccgactatgccgatgcgtatgtgctgcagcccggcaagatggtgttcgagatcaagccgaaaggcgtcgacaaggggcgcgcgctcgccgcgttcctcgacgagccgccgtttgccggccgcgtgccggtgttcgcgggcgacgacctgaccgacgagaagggcttcgcggtggtcaacgcgcgcggcggcctgtcgatcaaggtcggcgcgggcgagacgtccgcccgcatgcggctcgattcggtcgacgcgctgcatgagcagatcgcgtgctggcttggtgcggggcagtcggacgcatga

SEQ ID NO: 79097 - protein, 250 aa, Burkholderia sp. 383
MQSVPASLSLTDTAFFFDFDGTLVELAPTPDSIHVPPSLLTLLDELQRRSHGAVAIVSGRGIDNIDTFLKMPDMPIAGLHGAERRDANGDTQRIGFNDERLLRIERELAAVVDRHPGMLLEIKGAAVALHYRNAPEREAAARAATERLVADYADAYVLQPGKMVFEIKPKGVDKGRALAAFLDEPPFAGRVPVFAGDDLTDEKGFAVVNARGGLSIKVGAGETSARMRLDSVDALHEQIACWLGAGQSDA

SEQ ID NO: 79098 - DNA, 762 bp, Moorella thermoacetica ATCC 39073
  CDS (1)..(762): transl_table=11
atgtctccggatcagctggcagctagggtacaggagtacccggaactactgctgatgtgcgactacgacggcaccctggttcccctggcccccaggccggaagatgccgtccccgaccccggcctcctgaaattactgcggcaactggtttcccggccaggcttacacctggccgttattagtggccgtcccctggccgacctccgcgacctgctgccgatccccggactcctcctcgccggcctgcacggggcccaggtagccggaccagagggacctgttatcaacctcctccccccaccgccggggaaaaacccctggccggaaatttttagcctggcccggcaactggcggcaggtgttcccggccttcttgtggaaaataaaggcgaaggggtggccctccattaccggctggccgaacccgatgccgctgcgggaatcctggaggaattccggcatgccctggaaccctttttacaggatggcctggaactaatccccggccacaaggtactggaggttcgccgccggggcgtaaataaaggcctggcagtaacctacttcactcgccgctggcctcgggccttccctgtatacctgggcgacgatcgtaccgatgaggacgcctttgcagccctgcccgggaacggcctggctataggcgtcggccaacggcagtcaggctatgcccattatttccttgcttcaccggcagaggttatcgagtttctccagctcttaaaccgtagccgcacctaa

SEQ ID NO: 79099 - protein, 253 aa, Moorella thermoacetica ATCC 39073
MSPDQLAARVQEYPELLLMCDYDGTLVPLAPRPEDAVPDPGLLKLLRQLVSRPGLHLAVISGRPLADLRDLLPIPGLLLAGLHGAQVAGPEGPVINLLPPPPGKNPWPEIFSLARQLAAGVPGLLVENKGEGVALHYRLAEPDAAAGILEEFRHALEPFLQDGLELIPGHKVLEVRRRGVNKGLAVTYFTRRWPRAFPVYLGDDRTDEDAFAALPGNGLAIGVGQRQSGYAHYFLASPAEVIEFLQLLNRSRT

SEQ ID NO: 79100 - DNA, 810 bp, Burkholderia thailandensis E264
  CDS (1)..(810): transl_table=11
atgcgcacattcgcccggcgggcgcgcccgccagcggccattctcttcagcgaatcgatgccatccatcccgctttcccttcctctcgctcgcgccgcgttcttcttcgacttcgacggcacgctcgtcgacctcgcgccgacacccgacgcgattcaggtgccgcccgacgtgcccgcgctcgtcgacgatctgcggcggctgtcgcacggcgcggtcgcgatcgtctcggggcgcggcatcgacagcatcgacgcgtatctgaacctgcccgatctgccggtggcgggcctgcacggcgccgagcggcgcgacgcgaacggcgacacgcagcgcatcggcttcgacgatccgcgcctgttgcgcatcgagcgcgagctcgcggcggtcgtcgaccggcatccgggcatgctgctcgagatcaagggcgcggcgctcgcgctgcactttcgcaatgcgcccgagcgcgaaggcgtggcgcgcgcggcggccgagcggctcgtcgccgactatccggacgcgtacgtgctgcagccgggcaagatggtgttcgagatcaagccgaagggcgtcgacaaggggcgcgcggtcgccgcgttcctgaacgagccgccgttcgccgggcgcatgcccgtcttcgccggtgacgatctgaccgacgagcagggcttcgccgtcgtcaacgcgagcggcgggctgtcgatcaaagtcggcgcgggcgatacggcggcgcatgtgcgcgtcgattcggtcgccgcgttccgcgagcagctcgcgcgctggatcgacgcggggcgcgcgctcgcatga

SEQ ID NO: 79101 - protein, 269 aa, Burkholderia thailandensis E264
MRTFARRARPPAAILFSESMPSIPLSLPLARAAFFFDFDGTLVDLAPTPDAIQVPPDVPALVDDLRRLSHGAVAIVSGRGIDSIDAYLNLPDLPVAGLHGAERRDANGDTQRIGFDDPRLLRIERELAAVVDRHPGMLLEIKGAALALHFRNAPEREGVARAAAERLVADYPDAYVLQPGKMVFEIKPKGVDKGRAVAAFLNEPPFAGRMPVFAGDDLTDEQGFAVVNASGGLSIKVGAGDTAAHVRVDSVAAFREQLARWIDAGRALA

SEQ ID NO: 79102 - DNA, 2247 bp, Syntrophus aciditrophicus SB
  CDS (1)..(2247): transl_table=11
atgaccagccgttcacgccgggccgatacagccctctgctggtggactgaacccatgaaatggctgttcccactggacgtccagctttccgggagaggcgacaagttccggggcgggctcattgtcgcttccaaccgggaaccgtacgcacaccgaatgaccgatcagggattgcaactggaattctctgttggcggggtcgtttcagccctcgatacggtcctgcgggtgacagggggaacatgggttgcctggggaagcggcagcggcgaccgggagggggcggatgccggtggccgtctgtgggtcccgccggaaaacccggcctataccctcagaagaatctggctttccgcggcagcggtggaaaattattatcacgggttctgcaatctggtcctctggccgctctttcatgacgaaacggatcgtatcgtctacgctccccctttctgggcggagtatgaaaagaccaaccgggtgtttgccgaagcgattctcgaagaatgcagggcggattccacgatctggatccatgactatcacctctgcctcgttccccggatgctacgcggggtgtccccggatcggaccatcgcccatttctggcacataccctggcccgagcgggaactgttcgcctgtgccccccatggcgaagaaatccttgccgggcttctcggaaatgaccttctcggctttcagattcctctctatgcagggaatttcatggcctgtgccgcggcatgtctcggtgcgggcatcgattacgatgccatgaccgttgcctgggaggggcgcatcacccggattcggcgcctcagggaaaaataccgtctgccccggcgtgtcggccttgcggtcgaccggctcgactacaccaagggaatcgttcagcgactccgggcgcttgagctttttttccgagacaaccctgacttccgggggaaattttccttcattcaggttgccgtcatgactcggaacggggagccgtacctgcgccaccgccgggaagtcgagaaccgaatcgcccgaatcaacgcggagttcggcacggcggactggagaccgatcatctatttcaaaaacaaactagatcagcaggatcttgttgcctgttaccggatggcggatgtggccgtcatcaccccgcttcgtgacgggatgaacctggtggcgaaggaatatgtggcctccaggggagacggggacggcgtcctgatcctgggcagacaggccggcgcagccgccgaactgaccgagtcgattcttgtcgatccaactgatatcgaggcatgcgccgccgccatccatgaggctctcactctgtccagcggggagaaaaaaaagcggatgacgcagttaagggaacaggtgcaggggaatacggtttattcctgggtcggcgacatcctcgatgagctttccctcctccccgtcacgaaacagggaggaaaacatgccctcgcgcatgaggatgaaatcgccgcccgccttgccgggcgggaactctttctctgcctggatttcgacggcactctcgcccccatcgtggagcagccggaactggcggccataccggacgatatccgcctcctcctcgccgtgctgcaggagcattatcctgtcgcagtgatcagcggcagaagccttgacgacatcaggaatcgtgtgggtttgccgggccttgtgtatgcggggagccatggggcggagacggaaaagggaacgggcggcgacggcggccgcgccgcactggatgcatttctcgccgcggtgcaccaggcattggcctgccttcccggggttcagatagaggacaagggattgacggtcagcatccatttcaggcggatagcgccggtgcttctggagaatttcctggattctttccaggggattgcccggaagtttgtgggaacggtcagtgtgatcgaagggagaaaggtcttcgagatccggccgcagggggcaaccggcaaaggggacgcagtgcggcagctactggagggaataggtaaaggagggcttccggtctatatgggagatgacacgaacgatgaagaagcgttccgggcggttcgggggaatgggataaccgtcgccgtcgggggaagcacggaggcggaattctatttgaggaaccagggggaggtcaggaaattcctcgcgttgctggcccggatctcacttcccgatgaaaaacaatgctacgcagtggacgaagggggtacaacaaaatga

SEQ ID NO: 79103 - protein, 748 aa, Syntrophus aciditrophicus SB
MTSRSRRADTALCWWTEPMKWLFPLDVQLSGRGDKFRGGLIVASNREPYAHRMTDQGLQLEFSVGGVVSALDTVLRVTGGTWVAWGSGSGDREGADAGGRLWVPPENPAYTLRRIWLSAAAVENYYHGFCNLVLWPLFHDETDRIVYAPPFWAEYEKTNRVFAEAILEECRADSTIWIHDYHLCLVPRMLRGVSPDRTIAHFWHIPWPERELFACAPHGEEILAGLLGNDLLGFQIPLYAGNFMACAAACLGAGIDYDAMTVAWEGRITRIRRLREKYRLPRRVGLAVDRLDYTKGIVQRLRALELFFRDNPDFRGKFSFIQVAVMTRNGEPYLRHRREVENRIARINAEFGTADWRPIIYFKNKLDQQDLVACYRMADVAVITPLRDGMNLVAKEYVASRGDGDGVLILGRQAGAAAELTESILVDPTDIEACAAAIHEALTLSSGEKKKRMTQLREQVQGNTVYSWVGDILDELSLLPVTKQGGKHALAHEDEIAARLAGRELFLCLDFDGTLAPIVEQPELAAIPDDIRLLLAVLQEHYPVAVISGRSLDDIRNRVGLPGLVYAGSHGAETEKGTGGDGGRAALDAFLAAVHQALACLPGVQIEDKGLTVSIHFRRIAPVLLENFLDSFQGIARKFVGTVSVIEGRKVFEIRPQGATGKGDAVRQLLEGIGKGGLPVYMGDDTNDEEAFRAVRGNGITVAVGGSTEAEFYLRNQGEVRKFLALLARISLPDEKQCYAVDEGGTTK

SEQ ID NO: 79104 - DNA, 834 bp, Syntrophus aciditrophicus SB
  CDS (1)..(834): transl_table=11
ttgaatacagttcctgtttttcccatagccatcggcggcgttccggagttctgggggaaacttcgatccgcacgggtgggttttctcgcactggactatgatggaactgttgccccgtttcatgtttcgcggatgatggcccgtcccatggccggaataccggagcttattgtacaaattcgggacagaaccaacggcgccgttgccgtgatttcgggaaggcctctgtcggagctcacaaggcttctcgacataccgggcatcatgatggtcggaagccatggatacgagttccgctatcccgatgggaccctggagacacggaaacctctttacgttcagcgcgaaggtctatacagggctttggataccggtttccgaaggggattgatttctcggctcgaagccaaaatagccgctcttgctctccatacccgcggccagccggaaaatgaggcactgtccatggaggggtgggccatggaaaactggacgcccattgccctcgcgcacaaccttgaagtgagacggttcaacggcggggtggagcttcggtgccccggcatggacaagggaagcgccctgcagatcatcctttcccgtcagcctgacgacgccttctccgtttacatcggggacgatgaaaccgacgaagacgcattcagatttctcaaaggacgggggataggaattcgggtcggtcatcccgacgcacccacatccgcatcagggttccttcctgatattcaggcagttaaagactttctccggggatgggccgctctcgccccggagggattatccggaggagtgacatggaaacgcgaaggttag

SEQ ID NO: 79105 - protein, 277 aa, Syntrophus aciditrophicus SB
MNTVPVFPIAIGGVPEFWGKLRSARVGFLALDYDGTVAPFHVSRMMARPMAGIPELIVQIRDRTNGAVAVISGRPLSELTRLLDIPGIMMVGSHGYEFRYPDGTLETRKPLYVQREGLYRALDTGFRRGLISRLEAKIAALALHTRGQPENEALSMEGWAMENWTPIALAHNLEVRRFNGGVELRCPGMDKGSALQIILSRQPDDAFSVYIGDDETDEDAFRFLKGRGIGIRVGHPDAPTSASGFLPDIQAVKDFLRGWAALAPEGLSGGVTWKREG

SEQ ID NO: 79106 - DNA, 711 bp, Novosphingobium aromaticivorans DSM 12444
  CDS (1)..(711): transl_table=11
gtggttctgcacgaagccacgcttttcctggatctcgacggcactctattcgaacttgtcgacaaccccgaggatgtccgcgccgatcatcggacacaggccctgatcgggcaactcttgcagcacatggatggcagggtcgcagtggtcagcggacgttcgctggcccagattgacgacatgctgggcgatgctgcgggtacgctctggatttccggcagccatggctgcgaataccgctgggacggtgtcatccaaagcccctcgcgcccggccgcgcttgacgacgtcgcagccagtttccgcaattttgcgcaaaaccagcccggcgttctggtcgaggagaagagcctcggcgttgccctgcattaccgcacggcccccgaagccggggcctctgccctcgcgctggcgcaggaaatggctggcctgcacgacctctatcttcagcacggcaagtccatggtggaactgcgcgcaggcagcgagaacaaaggtagcgccatcctcaccatgatggcgcacccgggccttgccggcacgaccccggtcttcgctggcgacgacgtgaccgatgaacccggcttcgaagcggtcctcgaacttggcggccacgcgatccttgtcggcgaacccaggcccacgcttgccaccttccgcctgcgctcgccggaggaacttcgcgaatggctctggagagcaacggtatga

SEQ ID NO: 79107 - protein, 236 aa, Novosphingobium aromaticivorans DSM 12444
MVLHEATLFLDLDGTLFELVDNPEDVRADHRTQALIGQLLQHMDGRVAVVSGRSLAQIDDMLGDAAGTLWISGSHGCEYRWDGVIQSPSRPAALDDVAASFRNFAQNQPGVLVEEKSLGVALHYRTAPEAGASALALAQEMAGLHDLYLQHGKSMVELRAGSENKGSAILTMMAHPGLAGTTPVFAGDDVTDEPGFEAVLELGGHAILVGEPRPTLATFRLRSPEELREWLWRATV

SEQ ID NO: 79108 - DNA, 810 bp, Burkholderia xenovorans LB400
  CDS (1)..(810): transl_table=11
atgcgcggtaagatgcgcacacttttccggccgcacaaggctgaaaggcataaccaaccgatgcaagcactcccggctgttctgtctccaggcgagacggcatttttcttcgatttcgacggcacactcgtcgaactcgctcccacgccggacggcgtgctggtgcaacctcgcgtgatcgacttgctgagcgagttgcgcagcctgacgaacggtgccgtcgcggtggtgtcggggcgtgggatcgacagcatcgacagttttctgggtattcccgatctgccgattgccggtctgcacggcgccgaacggcgtgacgcgaacggcgacacgcaacgcatcggctttcatgacgagcggctcctgcgcatggagcaggtgctcgcgcaagtggtcaacgaaaaccccggcatgctgctcgagatcaagggcgcggccgtggcgctgcactaccggaatgcgccggaccgcgagccggtggcgcgcgaggcaaccagccggctggtcgccgattacgccggcgcctacgtgttgcagccgggcaagatggtctacgaaatcaaaccgaaagatgtcgacaagggccgcgcgctgcgcgcctttctcgacgagccgcctttcgtcggccgccagccggtctttgccggcgacgatctgaccgacgagaaaggcttcgccgtcgtcaacgaacgcggcgggctgtcgatcaaggtcggcccgggcgagacgatggcgcgaacgcgcatcgactcggtcccggcgctgctcgactggctggcatcgatcgtcgcggccgcgcgcgcggcatga

SEQ ID NO: 79109 - protein, 269 aa, Burkholderia xenovorans LB400
MRGKMRTLFRPHKAERHNQPMQALPAVLSPGETAFFFDFDGTLVELAPTPDGVLVQPRVIDLLSELRSLTNGAVAVVSGRGIDSIDSFLGIPDLPIAGLHGAERRDANGDTQRIGFHDERLLRMEQVLAQVVNENPGMLLEIKGAAVALHYRNAPDREPVAREATSRLVADYAGAYVLQPGKMVYEIKPKDVDKGRALRAFLDEPPFVGRQPVFAGDDLTDEKGFAVVNERGGLSIKVGPGETMARTRIDSVPALLDWLASIVAAARAA

SEQ ID NO: 79110 - DNA, 819 bp, Ralstonia metallidurans CH34
  CDS (1)..(819): transl_table=11
gtgttacggtcttgcgtgatgtcttcgctacctctcatcgaacccgataccgcgctgtttctggatttcgacggcacgctggctgacctcgcgccacgccccgagctggtgcaggtcgagccggaactggttggcacgctgcgcgcgctgcacacctgcctggacggcgccctggccattatctcgggccggcccgttgccgagctcgatggcttcctgcagccgctgaggctccccgcggcaggcgtgcacggcgccgaactgcgccatgacggcgaagcgctgttcatgccaccggccccgggcatcacggcattgatgccgaggctcgaagccttcgtcgcgcgccatcccggcctacgcatcgagcggaaatccgtggcagtcgccattcactatcgacaggctccggaactcgaggcacaggtgcgagcgatggtggccgacaccctgcacgacgtggatgggctggaaggcttgcccggaaaaatggttgtcgagatcaagcctgccggcgtcgacaaggggggcgcgatcgccgcgttcatgcgcatggcccccttcgaaggacgcaagccgctgttcgcgggtgacgatgtcaccgacgaagccggtttcgttgtggcgcgtgaactcggcggggtgggcgtgctggttggcgagcgcgccaccgccgccacggtcagcgtgaccgggcccgctgcgttgcgttgctggcttcatcgatccgcccatgctcttctggcgctcagggcgcaacgcggcggcaagccgcagtccgtctcatccacttcgtccgaaacggaggactcgctgtga

SEQ ID NO: 79111 - protein, 272 aa, Ralstonia metallidurans CH34
MLRSCVMSSLPLIEPDTALFLDFDGTLADLAPRPELVQVEPELVGTLRALHTCLDGALAIISGRPVAELDGFLQPLRLPAAGVHGAELRHDGEALFMPPAPGITALMPRLEAFVARHPGLRIERKSVAVAIHYRQAPELEAQVRAMVADTLHDVDGLEGLPGKMVVEIKPAGVDKGGAIAAFMRMAPFEGRKPLFAGDDVTDEAGFVVARELGGVGVLVGERATAATVSVTGPAALRCWLHRSAHALLALRAQRGGKPQSVSSTSSETEDSL

SEQ ID NO: 79112 - DNA, 777 bp, Mesorhizobium sp. BNC1
  CDS (1)..(777): transl_table=11
atggccggcgaagcagaacctctttcatcactcgattgttcggcactgaaaccgaacagcatagcgatcttcctcgatttcgacgggacccttgcggatatcgccgaacgcccggacgaagtttccgttcccccaaccacgcgcgaggcgctcgcgcgccttctgaagagcaccgacggcgcaattgccattatcaccggccggccgatcgaggtcatcgatcattttctggcgcctctcctcctgccggtggccggtgtgcatgggatggagcgcaggaccgccggcggacaacatgtcgggagcgtaattgatgaggaggagctttcggcagtgcgcgctaaactgcaggcattcgccgactcgcatgaggggcttctgctggagttaaagcacggttcgctggctcttcactatcggcagcgacccgacctcgaagccgcctcgatagcagccgtgcacgcggcggcgaacgactcaaaggggcttcatctcctgcatggcaagatggtgcttgaggtgaagggcgggaaggcaacgaaggccgatgctctgaccgcctttatgcaggaggacccttttcgcggacgcacacccctttttgcgggggatgacgtcaccgacgaggatgccttcaaccagatcgcgcatataaacgggttctccataaagatcggaggcggtaaaacatctgcccgatttagggctgatgaagccagcagttttcgcgaatggctcgaacgcctggccgcgaggttcgagtcccgggactattga

SEQ ID NO: 79113 - protein, 258 aa, Mesorhizobium sp. BNC1
MAGEAEPLSSLDCSALKPNSIAIFLDFDGTLADIAERPDEVSVPPTTREALARLLKSTDGAIAIITGRPIEVIDHFLAPLLLPVAGVHGMERRTAGGQHVGSVIDEEELSAVRAKLQAFADSHEGLLLELKHGSLALHYRQRPDLEAASIAAVHAAANDSKGLHLLHGKMVLEVKGGKATKADALTAFMQEDPFRGRTPLFAGDDVTDEDAFNQIAHINGFSIKIGGGKTSARFRADEASSFREWLERLAARFESRDY

SEQ ID NO: 79114 - DNA, 774 bp, Alkalilimnicola ehrlichei MLHE-1
  CDS (1)..(774): transl_table=11
atggactctgggcacaagacgcacctctggcggcgaccggacctggccttcttcctcgatctcgacggcaccctcctccccatcgtcccccatcccgacgacgccacgctggacgcttgtggccgcaccgtcctgcgcgagctgatggcgctcagtggcggcgccgtcgccctggtcagtggccgcaccatctccgccgtcgaccgggtcgtcgagccgctgcgcctgccggtggcgggggtgcacggggcggaatggcgcgatcccgccggccgctaccaccggccctctgcgccctcgccgcggctcatgacggcccttcgcgatcgcctccgcgccctcaccgccgcctacccgggaaccttcgtcgaggagaagggcatcgcccttgccgttcacttccgccgggcgcccgaataccaaatgccgatccagcgggccctgagtgagatcgcggccggcgccgccggtcagctcacgctgcaagccggcaagtgcgtctacgaacttcgcccggccgacggggacaagggccgggcggtcagacactttatggccgaggccccgttcgccagccgggccccggtctacctgggcgatgacctgacggatgaacacgcctttgtggcagtgaatgccctgggcggctatagcattaaggtgggtgccggtcacaccgaggcgcgctggcgcctgcccgatcaaccggcggtgatcgactggctccgaggaaatcgtccggccgccgctatcaggggggagcacggtgactga

SEQ ID NO: 79115 - protein, 257 aa, Alkalilimnicola ehrlichei MLHE-1
MDSGHKTHLWRRPDLAFFLDLDGTLLPIVPHPDDATLDACGRTVLRELMALSGGAVALVSGRTISAVDRVVEPLRLPVAGVHGAEWRDPAGRYHRPSAPSPRLMTALRDRLRALTAAYPGTFVEEKGIALAVHFRRAPEYQMPIQRALSEIAAGAAGQLTLQAGKCVYELRPADGDKGRAVRHFMAEAPFASRAPVYLGDDLTDEHAFVAVNALGGYSIKVGAGHTEARWRLPDQPAVIDWLRGNRPAAAIRGEHGD

SEQ ID NO: 79116 - DNA, 702 bp, Hyphomonas neptunium ATCC 15444
  CDS (1)..(702): transl_table=11
ttgcttgatccatccgccgcgctgttccttgattttgacggaacgatggcgccactccagtctgatccggatacggtgtttcttccagagggaggcgccgagattttgctgagaacagctgagaatcttcatggcgctctggtgatcctcagtgggcgggatattcgtgatcttgcctcgcgcattcctgatggactttggcgcgctggcggtcatggtgcttacgtttgccctccaggacatgcgccgccgggcgaacttcccgaagcgccggaaaatctcgttgcggagatttctgccttgatcgaagagatccctggggtgcgcatggaatcaaaaggaccggtgctggcggtacattatcgcgagataccggaagcggcgggcccccttgaagcaggtttgacaacactgcttgaagcatttccggaatacacgcttcaatctggaaagatggtgatggaagcaagaccagccagtgcgcacaaaggaaaatgcgttcgtgagctgatgaagcaggcgcccttttcgggccgggcgcccataatggttggagatgatacaactgatgaagatgccatgcgcgcaagtctcgacttcggaggcactgccatcaaggtaggcgctggggcgacggctgcgccctaccggctggccgacccggcagcggtttgggactggctcaagagaggactgacatga

SEQ ID NO: 79117 - protein, 233 aa, Hyphomonas neptunium ATCC 15444
MLDPSAALFLDFDGTMAPLQSDPDTVFLPEGGAEILLRTAENLHGALVILSGRDIRDLASRIPDGLWRAGGHGAYVCPPGHAPPGELPEAPENLVAEISALIEEIPGVRMESKGPVLAVHYREIPEAAGPLEAGLTTLLEAFPEYTLQSGKMVMEARPASAHKGKCVRELMKQAPFSGRAPIMVGDDTTDEDAMRASLDFGGTAIKVGAGATAAPYRLADPAAVWDWLKRGLT

SEQ ID NO: 79118 - DNA, 750 bp, Mycobacterium smegmatis str. MC2 155
  CDS (1)..(750): transl_table=11
gtgagtctttcgggggatctgcagcgcgcgctcaccgcggtcgctgccacaccgcacctgctggtcacatccgatttcgacggcacactcgcgccgatcgtcaacaaccccgccgacgcgcggccgctcgccgatgccgccgaggccctcgccgcactcgcggaactgccgcagaccgcctcggcgctgatctccggacgtgccctcgaggtgctgcgcgcattgtccgggatgccggacacggtgcacctggtgggaagccacggcgcggagttcacctccgggttcggccacgacatcgacaccgctctgctgcaacggatcaccgatcggctccacacgatcgcatcgggcaggcccggtgtcaccgtggagaccaaaccggcaagcgttgcgctgcacgtgcgtaacgcctcgcccgaacacggcgcggccgcgttgaccgaggcacgcacggccgccgcggagtgggacgctcagctcaccgagggcaaggcagtgctcgaattcgcggttatccagaccgacaagggtgaggcggtcgacatcctgcggcaacaggaaaacgccacggcagtggtgtttttcggcgacgacgtcaccgacgagaaggcgttccgccggttgcgcggcgacgacgtcggcgtcaaggtcggaccgggtgagagcctcgcggcgtaccgtgtcgactcaccggaagacgttgccgcagcgcttgatcaccttctcgccgtgcgccgcggcgcatag

SEQ ID NO: 79119 - protein, 249 aa, Mycobacterium smegmatis str. MC2 155
MSLSGDLQRALTAVAATPHLLVTSDFDGTLAPIVNNPADARPLADAAEALAALAELPQTASALISGRALEVLRALSGMPDTVHLVGSHGAEFTSGFGHDIDTALLQRITDRLHTIASGRPGVTVETKPASVALHVRNASPEHGAAALTEARTAAAEWDAQLTEGKAVLEFAVIQTDKGEAVDILRQQENATAVVFFGDDVTDEKAFRRLRGDDVGVKVGPGESLAAYRVDSPEDVAAALDHLLAVRRGA

SEQ ID NO: 79120 - DNA, 732 bp, Acidovorax sp. JS42
  CDS (1)..(732): transl_table=11
atgcccacgccgcctctgccgacttcccgccacgccctgttcctcgacttcgacggcacgctggccgacattgccgcacagccgcatgccgtgcagctgccacccggcgtggtggactgcctgcaagcactgcatgtgcggctggagggggcgctggccatcgtcaccggccgcaccatggccgatatcgaccattttttggacccactgcgcctgcccgtggcctgcgagcatggcgcgcagtaccgcctgggcaacgggcgcagcggcggcctgccggcgctgccactgcagccgctgctggccgcgctgcgcccgctgatggcgcagcaccccgagctgctgctggaggccaagagcgccggcctggcgctgcactaccggcaggcgccgcaactgcaggcgctgtgcctgcaggcgatcacacaggcgctgcgcgaggtgccgggcgccgagttgctgcacggcaagttcgtgtacgaggtcaagcccgtgggaccggacaagggccgcgcgatcacggacttcatgcgcctggctcccttcgccgggcgcgcgccgctgttcgtgggtgacgatgtgacggacgaagccggctttgccgccgcgcagtcgctggggggcctgggcatcaaggtgggcgaaggcgccacgcgcgcccacgcgcggctggccacacctgctgccgtacgccagtggctgcagcacgccgtgggcgaggagataacatga

SEQ ID NO: 79121 - protein, 243 aa, Acidovorax sp. JS42
MPTPPLPTSRHALFLDFDGTLADIAAQPHAVQLPPGVVDCLQALHVRLEGALAIVTGRTMADIDHFLDPLRLPVACEHGAQYRLGNGRSGGLPALPLQPLLAALRPLMAQHPELLLEAKSAGLALHYRQAPQLQALCLQAITQALREVPGAELLHGKFVYEVKPVGPDKGRAITDFMRLAPFAGRAPLFVGDDVTDEAGFAAAQSLGGLGIKVGEGATRAHARLATPAAVRQWLQHAVGEEIT

SEQ ID NO: 79122 - DNA, 744 bp, Erythrobacter sp. NAP1
  CDS (1)..(744): transl_table=11
atgcagtcagcccttgctccaggagcgccgccgtcgcttgcgaccctgctcgaagggcaagacattgcgctttttctggatttcgatgggacgctggtagaattggccgagggaccggacgccatcgcgccagtgcccgatctggccgatcggctcgccaatctcgcgcatcgtctcggggggcgctgcgctatcgtgagcgggcggggcatcgacgatatcgagcgacacacgggaccgctatctctggcgatggctggctcgcatggatccgatattcgaggcgccgatggcgcggctctcggtagcgggcctgcagaaatccccgcctcgatcgaacagcgcctccgggaattcgccgcgagcgagggactggactacgaacacaagccccacggtggcgcacttcactacagacggaaccctcacaaagggccgagcgctcatcaattcgccgaagcactcgcggcggagcatggctgggctgcgcagggcggtaaatgcgtggtggagctggtggcaggcgatgcgaataagggggctgccgtctgcgccttgatgcagacggaagcattctcaggcgcacgccctttcttcataggcgacgacctcaccgacgaagcaggctttcgggcctgcgatgggatgggcggagcaggcatccttgtcggcgagcgcgaggaaacgcgcgcgaagtatcgcctaaatacggtttcgatggttcattcatggctggagctttga

SEQ ID NO: 79123 - protein, 247 aa, Erythrobacter sp. NAP1
MQSALAPGAPPSLATLLEGQDIALFLDFDGTLVELAEGPDAIAPVPDLADRLANLAHRLGGRCAIVSGRGIDDIERHTGPLSLAMAGSHGSDIRGADGAALGSGPAEIPASIEQRLREFAASEGLDYEHKPHGGALHYRRNPHKGPSAHQFAEALAAEHGWAAQGGKCVVELVAGDANKGAAVCALMQTEAFSGARPFFIGDDLTDEAGFRACDGMGGAGILVGEREETRAKYRLNTVSMVHSWLEL

SEQ ID NO: 79124 - DNA, 828 bp, Xanthobacter autotrophicus Py2
  CDS (1)..(828): transl_table=11
gtgctgacccaactgcacccgtccgcgacccgtgaagcttcggccggacaggcgttcgaggggcaccggcccgacgcgccgttcccggcggcctgcgcgggcgtacgcgccgacacccatgctttcttcctcgacgtggacggcagcctgatcgacatcgcggaccaccccgacgccgtggaggttcccgaggatctcccgcagcttctggccgcgctggcggagcaggccgacggcgcgctggccctcgtcagcgggcggaccatccaggccctcgacattctgctgcacccgttcggcttcgcggcggcgggtagccatggcgcccagatgcggcttgagcccgacggcaggatcctctccgcgccggcgctggacaccgcgcttgccgacgcggtgaaagaggtggcggacgggttcgacggcgtgttcgccgaggacaagggcaccgccatcgcggttcattaccgtgccgtgcccgatgctgcgccctccctcaggcgcgcgctgctggagctcctccgcgcgcggcaggatgtgcgcctgatgcctggccattgcgtgttcgaggtgaagcccgccagcctcgacaagggcacggcggtggcggatttcatggcccgcgccccgtttgccgggcgtgttcccgtcttcatcggcgacgatgtcaccgacgaggccggttttggcgccgtcgccgcgcgcgggggccttgcccttgcggtcggttcgccgcgaccgggcacccagggggtgcttgccgatccccggtcggtccgggctttcctcacccacctcgcggcggtgccgcagcaacgacggaggtga

SEQ ID NO: 79125 - protein, 275 aa, Xanthobacter autotrophicus Py2
MLTQLHPSATREASAGQAFEGHRPDAPFPAACAGVRADTHAFFLDVDGSLIDIADHPDAVEVPEDLPQLLAALAEQADGALALVSGRTIQALDILLHPFGFAAAGSHGAQMRLEPDGRILSAPALDTALADAVKEVADGFDGVFAEDKGTAIAVHYRAVPDAAPSLRRALLELLRARQDVRLMPGHCVFEVKPASLDKGTAVADFMARAPFAGRVPVFIGDDVTDEAGFGAVAARGGLALAVGSPRPGTQGVLADPRSVRAFLTHLAAVPQQRRR

SEQ ID NO: 79126 - DNA, 1074 bp, Oryza sativa subsp
  CDS (1)..(1074)
atgggcatcgcggcaggcgcggcgctgccgggaggaccggccggcccggcgggcggcctcttcgcgtgccgcagcgcggccgcgtcgatgaggcagacgtacctcgacctcgccgcggcggcggtggcggcgcgctccgcgagctgcaccagctgggccgacgccatgcgcgcctcctcccccacccgctcgtcccgctccgcctccgacgtcgacgagttcaccgcctgggtgaggaagcacccgtcggcgcttagcaagttcgaggagatcgccgccaagtccagggggaagaagatcgtaatgttcatggactacgacggcacgctctctcccatcgtcgccgaccccgacacggcctacatgagcgacgcgatgagggcggcggtgcgcgaagtcgccaagaccttcccgacggcgatcgtcagcgggcggtgccgcgacaaggttcgcaacttcgtcggcctctccgacctctactacgccggcagccatggcatggacatcaagggaccaagctccaacccggagtctgccctttgccagccagcaagcgagttcctccccatgatcgacgaggtgtacaagacgctggtggaaaagacgaaatctacacctggagccaaggtggagaacaacaagttctgcctgtccgtccacttcagatgtgtagatgaaaagagatggaatgctttgggggagcaggtcaaggccgtgatcaaggaatacccaaagttgaagcttacccaaggaaggaaggttttggagatcaggccgagcattgagtgggacaagggcaaggctctggagttcttgcttgaatcgctgggattcgccaactgcggcgacgtcatgccggtgtacatcggtgacgaccgcaccgacgaggacgccttcaaggtgttgagaaagagaggtcagggcctgggaatcctagtctccaagtgccccaaggacaccaacgcctcctactctctccaggacccaacagaggtgatggagttcttgctcaggctggtggagtggaagcggaagtcgtcgtcgtcgtcgttgatgattcgtccgagagtgtag

SEQ ID NO: 79127 - protein, 357 aa, Oryza sativa subsp
MGIAAGAALPGGPAGPAGGLFACRSAAASMRQTYLDLAAAAVAARSASCTSWADAMRASSPTRSSRSASDVDEFTAWVRKHPSALSKFEEIAAKSRGKKIVMFMDYDGTLSPIVADPDTAYMSDAMRAAVREVAKTFPTAIVSGRCRDKVRNFVGLSDLYYAGSHGMDIKGPSSNPESALCQPASEFLPMIDEVYKTLVEKTKSTPGAKVENNKFCLSVHFRCVDEKRWNALGEQVKAVIKEYPKLKLTQGRKVLEIRPSIEWDKGKALEFLLESLGFANCGDVMPVYIGDDRTDEDAFKVLRKRGQGLGILVSKCPKDTNASYSLQDPTEVMEFLLRLVEWKRKSSSSSLMIRPRV

SEQ ID NO: 79128 - DNA, 780 bp, Rhizobium leguminosarum
  CDS (1)..(780): transl_table=11
atgcagagtttggagaatgccgtgcaggacgacgacgctactcaggaaatgctttcactggtcttggaagagcccgaccactgggcgatgtttctcgatatcgatgggacgctgctcaatctcgcgcccacgccggatgcgatcgaggtcccagaggcgctccccggacaacttcatcgcctgtcgaacaagcttggcggtgccttggcactggtcaccggccgatcgcttgcctatgcagacgcgctgttcaaaccctttgcatttccgacagcaggcctgcacggcgcggaaatcaggaacgccgcgggcatgcagacggtcgaggcgacagctgagtttcaggcgctgaagcatgcgctgacggaggaagccgagcactatcctggagtcttgatcgaggataagggtgcggccgttgccgcccattaccggctcgcgcccgaatatgaaaaggtgctcgcagaccgcatgcaccactatgctgagctcgccgggccgaactgggcattgcagctcggcaagatggtattcgagctgcgtccggcacggtcgagcaagggcgatgcgctggaacggtttttccagtccgacccgttcaagaaccgctgcccgattaccatcggcgatgatctgaccgacgagtcgatgtttgcgatcgccaatgcgcgcggcggcgtttccgtgcgggtcggtgcgatcggcgcccctagctgcgccacaagccggctgtcctcttctgcgctggtcagaaacgtcatcgcagccctggccgcctga

SEQ ID NO: 79129 - protein, 259 aa, Rhizobium leguminosarum
MQSLENAVQDDDATQEMLSLVLEEPDHWAMFLDIDGTLLNLAPTPDAIEVPEALPGQLHRLSNKLGGALALVTGRSLAYADALFKPFAFPTAGLHGAEIRNAAGMQTVEATAEFQALKHALTEEAEHYPGVLIEDKGAAVAAHYRLAPEYEKVLADRMHHYAELAGPNWALQLGKMVFELRPARSSKGDALERFFQSDPFKNRCPITIGDDLTDESMFAIANARGGVSVRVGAIGAPSCATSRLSSSALVRNVIAALAA

SEQ ID NO: 79130 - DNA, 1068 bp, Zea mays
  CDS (1)..(1068)
atgacgaagcgcaccgccttcgccgcggacgacgcgatcatcgccgccgccgccgccgtcacgtcgcagcccggccggcggttcacgtcgtacccgccggcgagggcgcgcggcggatgcaggctggccccggcggcggcggcgcgccaggccacggacgaccccggcgccgctgggtcctggccagaactagtcgtgccgcggcacgccgacttcgacgactggatggagaagcacccgtcggcattggccgcgttcgagtcggtgctggccgccgccaaaggcaagaagatcgtcatgttcctcgactacgacggcaccctgtcgccgatcgtcagggaccccgacagcgccgtcatgtccgaggagatgcgggacgcggtgagaggcgtggccgagcacttcccgacggcgatcgtgagcgggaggtgtagagacaaggtgttcaacttcgtgaagctggcggagctgtactacgccgggagccacggcatggacatcaagggccccacagcacagtccaagcacaccaaggcaaaggccggagccgttctatgccaacctgcgagggcgttcctgccggtcattgaggaggtgtaccgcgcgctgacggcgagcacggcgccgatccccggcgcgacggtggagaacaacaagttctgcctctccgtccacttccgctgcgtccaggaggagaaatggcgcgctctggaggagcaggtccggtcggtgctcaaggagtacccggacctccgcctcaccaagggcaggaaggtcctcgagatccggccgtccatcaagtgggacaagggcaacgccctgcagttcttgctcgagtctctcggttttgctggcagtaacagtgtcttcccgatatatatcggagacgatagcaccgacgaggacgcgttcaaggtcctgcgcaacttggggcaagggatcgggatcctggtgagcaagattccgaaggagacccgcgcatcctactccctgcgtgaaccttctgaggtggaggagttcctgcgcaagttggtcagctggtccaaggagagcaggcaacgggactag

SEQ ID NO: 79131 - protein, 355 aa, Zea mays
MTKRTAFAADDAIIAAAAAVTSQPGRRFTSYPPARARGGCRLAPAAAARQATDDPGAAGSWPELVVPRHADFDDWMEKHPSALAAFESVLAAAKGKKIVMFLDYDGTLSPIVRDPDSAVMSEEMRDAVRGVAEHFPTAIVSGRCRDKVFNFVKLAELYYAGSHGMDIKGPTAQSKHTKAKAGAVLCQPARAFLPVIEEVYRALTASTAPIPGATVENNKFCLSVHFRCVQEEKWRALEEQVRSVLKEYPDLRLTKGRKVLEIRPSIKWDKGNALQFLLESLGFAGSNSVFPIYIGDDSTDEDAFKVLRNLGQGIGILVSKIPKETRASYSLREPSEVEEFLRKLVSWSKESRQRD

SEQ ID NO: 79132 - DNA, 2637 bp, Aspergillus oryzae
  CDS (1)..(2637)
atgtcttcggagtcgtcaaatgctacccctactactcctgctcaggcagccaaggatgcgaggtcgagaattgaactcttgcgtcgtttgagcctgagggagacgcccaaagtgctggaggcagatctacgtcaacaacacccagggttgcgtctctctggacgaatcattagtgccgccttctgtatcccatacaaggtttactatcggcgagagtcttcttgggagctcaaaccccgtccgggaacctcggcactattcgattctttggcatatttgggttccgaggagactaattggtcacatacgctcgttggctggaccggcgaagtagaaccagttccggaggacacagtgcctttgcagcaaatccccataaacactagtgcgaagctgccagctgcgactaatggtacagcaaaacctctcaataaggcggcagcacctgtccctgtggacgccaatcagcggccacctagccatcctcttctagatggtttcacagtcagccaggacgatcgaagtcgactagatgcacagttaagctctgggcgatacggtaaaattgcccccgtgtggctgtcggctgagacagaaatccccgaggatacaatcttcttggaggaccaaggcagatggaggcgatatgcagaaagggagctgtaccctctcctgcattacaagcaacatggccccactgacggccggtctgaacgcaactggtgggcggattacgtccgaatgaatcggttatttgcggaccgaattctaaaagaatatcaggaaggcgatattgtttggatccatgactaccatcttttccttttgcccagcatgttgaggcagcggatcccaaacatttacattggcttcttcctacatgccccatttcccagtagcgagtttatgcgctgtctagctaagcgcaaggaggtgcttaccggagtattgggtgcgaacatgattggttttcagactttctcatattcccgccatttttcatcctgctgcactcgggtgctcggatttgactccaactctgccggagttgatgcgtatggcgctcacgtggccgtggacgtcttccctattggtatcgatgccaaggcaatccaaaatattgccttcggtgcctctgagattgagaacgctgtgacagggatacgcaagctttacgccgggaagaagatcattgtcggccgtgatcggttggacagtgtccgtggtgtggcccagaagttgcagtctttcgaagtgttcctagagcggtaccctgaatggcgcgataaggtcgtgcttatccaagtgaccagtccgaccagtgtcgaagaggaaaaggaggagaacaaaattgcaagtcaaatctccaatcttgtttccaccataaacggccgctttgggtctttgagcttctcacccgtcaagtactacccgcaatatctctcccagcatgagtattttgccttgctgcgcgtggctgatgtcggtctgatcaccaccgttcgagatggcatgaacacgactagtttggagtatatcatttgccaacagcaaagccacggtcctttgatcctctccgagttctcaggaactgcagggaccctctcaagtgcgatccatatcaatccttgggacacggcaggcgtagctggagccatcaatcaggccttgacaatgtcacctgagagtaaaaaggcaagccatcagaagctctacaagcatgtcacaacaaacacagtgtcggcttggtccacacaatatctctctcgtttgctgaccaacctttcttcgtttgaccaatctgtggcgactcccgctctcgatcgagccaagctattgaagcagtatcgtaaggcacggaagaggcttttcatgttcgactatgatggcacacttaccccaatcgtcaaagatccacaagctgctataccatctgaccgcgtcttgcggaccatcaaaactctagccgcagactcccgcaacgcagtatggattatcagtgggcgcgaccaagcatttctcgacgaatggatgggtcacatacctgaattaggcttgagtgccgagcatggttgcttcatccggaaaccacgctcggacgactgggagaatttggctgaacgatcgaacatgggatggcagaaagaggtcatggagatattccagcactatactgaacgtactcaaggctctttcattgagaggaaacgggttgctttgacatggcattatcggcgggcagaccctgagtatggtgcgttccaggctcgggagtgccgaaaacatctagaggagactgtagggaaaagatgggacgtggaagtcatggcaggcaaggccaatttggaagttcgtccgacttttgtcaacaaagggttcatcgcaagccgactagtcaacgaatacgggactggccctggacaggctcctgaattcatcttctgctctggggacgactttactgatgaagatatgtttcgagcccttcaaaagttcgacctcccacaagatcatgtctactccgtaaccgtcggtgctagttcgaagcagacttctgccagttggcatctgttggagccagctgacgtgattgagacagtcacgatgctcaacagtagctccactcaagactactga

SEQ ID NO: 79133 - protein, 878 aa, Aspergillus oryzae
MSSESSNATPTTPAQAAKDARSRIELLRRLSLRETPKVLEADLRQQHPGLRLSGRIISAAFCIPYKVYYRRESSWELKPRPGTSALFDSLAYLGSEETNWSHTLVGWTGEVEPVPEDTVPLQQIPINTSAKLPAATNGTAKPLNKAAAPVPVDANQRPPSHPLLDGFTVSQDDRSRLDAQLSSGRYGKIAPVWLSAETEIPEDTIFLEDQGRWRRYAERELYPLLHYKQHGPTDGRSERNWWADYVRMNRLFADRILKEYQEGDIVWIHDYHLFLLPSMLRQRIPNIYIGFFLHAPFPSSEFMRCLAKRKEVLTGVLGANMIGFQTFSYSRHFSSCCTRVLGFDSNSAGVDAYGAHVAVDVFPIGIDAKAIQNIAFGASEIENAVTGIRKLYAGKKIIVGRDRLDSVRGVAQKLQSFEVFLERYPEWRDKVVLIQVTSPTSVEEEKEENKIASQISNLVSTINGRFGSLSFSPVKYYPQYLSQHEYFALLRVADVGLITTVRDGMNTTSLEYIICQQQSHGPLILSEFSGTAGTLSSAIHINPWDTAGVAGAINQALTMSPESKKASHQKLYKHVTTNTVSAWSTQYLSRLLTNLSSFDQSVATPALDRAKLLKQYRKARKRLFMFDYDGTLTPIVKDPQAAIPSDRVLRTIKTLAADSRNAVWIISGRDQAFLDEWMGHIPELGLSAEHGCFIRKPRSDDWENLAERSNMGWQKEVMEIFQHYTERTQGSFIERKRVALTWHYRRADPEYGAFQARECRKHLEETVGKRWDVEVMAGKANLEVRPTFVNKGFIASRLVNEYGTGPGQAPEFIFCSGDDFTDEDMFRALQKFDLPQDHVYSVTVGASSKQTSASWHLLEPADVIETVTMLNSSSTQDY

SEQ ID NO: 79134 - DNA, 705 bp, Thermus thermophilus
  CDS (1)..(705): transl_table=11
atgagggcggaaaaccccgtcttctttctggactacgacggcaccctggcccccatcgcccaaaggcccgaggaggccttcccccaccccgaggccccccgggtcctccgggccctcatggagcgccaccccgtctacgtggtcacgggaagaagggtgaggggcctcgagcccctcctccccctcccgggccttcccgtggtgggggggcacggcctggaggaaggggtgctcttcggggaggtgcggcccctcttccccgtggaccttggccccttgcgggcaaggcttccctcctgccccggggtgcgggtggaggacaagggcttcgccctggccctgcactaccggggggcggaggacgaggagaaggcccgggcctgcctcgaggcctggcttaaggcggtggaggggctcctggaagccttgggcctcgaggccctccccggcaagaaggtcctggagctcaagcccaagggggtggacaagggccaagcggtcctcaggctcctcggacgccacccggaccacacccccgtttacatcggggacgacaccaccgacgaggccgccttcctcgccttaaggggccggggcctcaccttcaaggtgggggaaggccccacggcggcccaaggccggctcaaggacgtggaggaggtcctggcctacttgcaaacctacctccgacccactagcctttag

SEQ ID NO: 79135 - protein, 234 aa, Thermus thermophilus
MRAENPVFFLDYDGTLAPIAQRPEEAFPHPEAPRVLRALMERHPVYVVTGRRVRGLEPLLPLPGLPVVGGHGLEEGVLFGEVRPLFPVDLGPLRARLPSCPGVRVEDKGFALALHYRGAEDEEKARACLEAWLKAVEGLLEALGLEALPGKKVLELKPKGVDKGQAVLRLLGRHPDHTPVYIGDDTTDEAAFLALRGRGLTFKVGEGPTAAQGRLKDVEEVLAYLQTYLRPTSL

SEQ ID NO: 79136 - DNA, 801 bp, Pseudomonas syringae pv
  CDS (1)..(801)
atgacagaaccgttaaccgaaccccctgaactatccgcgaaatatgcctggttttttgatcttgatggaacgctggcggaaatcaaaccgcatcccgatcaggtcgtcgtgcctgacaatattctgcaaggactacagctactggcaaccgcaagtgatggtgcattggcattgatatcagggcgctcaatggtggagcttgacgcactggcaaaaccttatcgcttcccgttagcgggcgtgcatggggcggagcgccgtgacatcaatggtaaaacacatatcgttcatctgccggatgcgattgcgcgtgatattagcgtgcaactgcatacagtcatcgctcggtatcccggcgcggagctggaggcgaaagggatggcttttgcgctgcattatcgtcaggctccgcagcatgaagacgcattaatgacattagcgcaacgtattactcagatctggccacaaatggcgttacagcagggaaagtgtgttgtcgagatcaaaccgagaggtaccagtaaaggtgaggcaattgcagcttttatgcaggaagctccctttatcgggcgaacgcccgtatttctgggcgatgatttaaccgatgaatctggcttcgcagtcgttaaccgactgggcggaatgtcagtaaaaattggcacaggtgcaactcaggcatcatggcgactggcgggtgtgccggatgtctggagctggcttgaaatgataaccaccgcattacaacaaaaaagagaaaataacaggagtgatgactatgagtcgtttagtcgtagtatctaa

SEQ ID NO: 79137 - protein, 266 aa, Pseudomonas syringae pv
MTEPLTEPPELSAKYAWFFDLDGTLAEIKPHPDQVVVPDNILQGLQLLATASDGALALISGRSMVELDALAKPYRFPLAGVHGAERRDINGKTHIVHLPDAIARDISVQLHTVIARYPGAELEAKGMAFALHYRQAPQHEDALMTLAQRITQIWPQMALQQGKCVVEIKPRGTSKGEAIAAFMQEAPFIGRTPVFLGDDLTDESGFAVVNRLGGMSVKIGTGATQASWRLAGVPDVWSWLEMITTALQQKRENNRSDDYESFSRSI

SEQ ID NO: 79138 - DNA, 903 bp, Arabidopsis thaliana
  CDS (1)..(903)
atgaagattacggatatttccggaaagatcgagactttggttgattccttaagggatatgtccccgacccgtgtcagatcttccttctctgatgaacatgtatccgagaacgatgacgagagaagctcctggattgctcttcatccgtcagcattggatatgttcgaacaaatcatgcgtgatgctgaaggcaaacaaattattatgtttcttgattacgacggaactctctcgctaatcactgaagatcacgacagagcctacataaccgacgagatgcgagaagttgtaaaggaagtggctacatatttcaagacagcgatcatcagcggacgaagcactgacaaagtacagagttttgtgaaactcactggtattcactacgctgggagccacggcatggacattaagggtccgacaaataccgatcaggtggttaatgttttgaaggaaaagacaaaatctatccctggagctacggtcgagcacaacaagttttgtctaacagtacattttcgtcgggtcgatgaaacgggatgggctgcattagctgagcaagtgagattggttctcattgattatccgaaattgagactgacacaaggcagaaaggtcttagaactccgaccttccatcaaatgggacaagggaaaggctctcgaatttttgctaaactcattagggatagcagaatctaaagatgttttaccggtttacattggagatgaccgtactgatgaagatgcatttaaggttttatgtgaaaggggacaaggttttgggattatcgtctcaaaaactattaaggaaacgtacgcctcttactctcttcaagacccatctcaggttaaagaatttctggagcgtttggtaaagtggaagaaacaaacacttggagaataa

SEQ ID NO: 79139 - protein, 300 aa, Arabidopsis thaliana
MKITDISGKIETLVDSLRDMSPTRVRSSFSDEHVSENDDERSSWIALHPSALDMFEQIMRDAEGKQIIMFLDYDGTLSLITEDHDRAYITDEMREVVKEVATYFKTAIISGRSTDKVQSFVKLTGIHYAGSHGMDIKGPTNTDQVVNVLKEKTKSIPGATVEHNKFCLTVHFRRVDETGWAALAEQVRLVLIDYPKLRLTQGRKVLELRPSIKWDKGKALEFLLNSLGIAESKDVLPVYIGDDRTDEDAFKVLCERGQGFGIIVSKTIKETYASYSLQDPSQVKEFLERLVKWKKQTLGE

SEQ ID NO: 79140 - DNA, 705 bp, Thermus caldophilus
  CDS (1)..(705): transl_table=11
atgagggcggaaaaccccgtcttcttcctggactacgacggcaccctggcccccatcgcccaaaggcccgaggaggccttcccccaccccgaggccccccgggtcctccgggccctcatggagcgccaccccgtctacgtggtcacgggaagaagggtgagggacctcgagcccctcctccccctcccgggccttcccgtggtgggggggcacggcctggaggaaggggtgctcttcggggaggtgcggcccctcttccccgtggaccttggccccttgcgggcaaggcttccctcctgccccggggtgcgggtggaggacaagggcttcgccctggccctgcactaccggggggcggaggacgaggagaaggcccgggcctgcctcgaggccctgcttaaggcggtggagggcctcctggaagccttgggcctcgaggccctccccggcaagaaggtcctggagctcaagcccaagggggtggacaagggccaagcggtcctcaggctcctcggacgccacccggaccacacccccgtttacatcggggacgacaccaccgacgaggccgccttcctcgccttaaggggccggggcctcaccttcaaggtgggggaaggccccacggcggcccaaggccggctcaaggacgtggaggaggtcctggcctacttgcaaacctacctccgacccactagcctttag

SEQ ID NO: 79141 - protein, 234 aa, Thermus caldophilus
MRAENPVFFLDYDGTLAPIAQRPEEAFPHPEAPRVLRALMERHPVYVVTGRRVRDLEPLLPLPGLPVVGGHGLEEGVLFGEVRPLFPVDLGPLRARLPSCPGVRVEDKGFALALHYRGAEDEEKARACLEALLKAVEGLLEALGLEALPGKKVLELKPKGVDKGQAVLRLLGRHPDHTPVYIGDDTTDEAAFLALRGRGLTFKVGEGPTAAQGRLKDVEEVLAYLQTYLRPTSL

SEQ ID NO: 79142 - DNA, 798 bp, Rhizobium sp
  CDS (1)..(798)
atgtcatgccagacgcagcttctcagcgcctcggaggccgccttaggagaggacttcctctccgctctctcgacggatctggacaattgggctctgttcctcgatatcgatggtactttgcttgacctggccgaaacgccggacgccgtagccgttccgccttcgctgcctgcaagtctcgatcacttgtcgaaaaaactcggcggcgctttggcactcgtgaccggtcgcggccttgattatgccgaccagcttttttcgccggccaattttcccattgcgggccttcatggtgccgagcgccgcgacccggatggccgtgtgcacaaagccgcagagacggcggattttgagcgactgaaggccgagctggtcgccgctactgccagctgggcgggcgttctgatcgaggacaagggggcggcggtcgctgcccattatcggcttgcgccggatagacaactcgaacttgaacagctgatggagtgggcgttgtatcgagccggaccagactgggcaatccagcacggcaagatggtcgtcgaaatccgtccagccagagccaacaagggcgatgcagttgcggcatttctcggccagccgccctttgccggcagacgcgcgatcgcgatcggcgacgatgtgaccgacgaagcgatgtttcgcacggtcaaccggctcggcggcctttcgatccgcatcggaccgcctgtgcctgcgagcgaagcgctcggctccatcccttctgccgaggccctgcgcggcatcatcgccgcattggccctcctgaatatttga

SEQ ID NO: 79143 - protein, 265 aa, Rhizobium sp
MSCQTQLLSASEAALGEDFLSALSTDLDNWALFLDIDGTLLDLAETPDAVAVPPSLPASLDHLSKKLGGALALVTGRGLDYADQLFSPANFPIAGLHGAERRDPDGRVHKAAETADFERLKAELVAATASWAGVLIEDKGAAVAAHYRLAPDRQLELEQLMEWALYRAGPDWAIQHGKMVVEIRPARANKGDAVAAFLGQPPFAGRRAIAIGDDVTDEAMFRTVNRLGGLSIRIGPPVPASEALGSIPSAEALRGIIAALALLNI

SEQ ID NO: 79144 - DNA, 1080 bp, Brassica napus
  CDS (1)..(1080)
atggtgagattcatcgaagagaatattactaaaatgttggagacaaagatcatctctaagtcggaagttttatatgctggaggagacgacggagacacgtcgccggcgactaaaatttttcaagattttcagatcaacgaagaagacgtcggaagaggaggagggctaataagatcatgggttgattccatgagagcatgttctcctactcatctcaaacctttcgacaaccaatcttcttggatcaaagaacatccatcagctttgaacatgttcgaagaaatacttcatgaatcagaaggaaaacaaatcgtcatgtttcttgattacgatggtactctctcccccattgttgatgatcctgatcgcgctttcatgtctaacaagatgcgaaacactgtaaggaaacttgcaatgtgttttccaacagtcatagttagtgggcgatctagagagaaggtttatagttttgtgaaactaactgagttgtactatgctggaagtcacggaatggacatcaaaggaccagagcaaaattccaaatacaaaaaaaaaacccaatctcttctttgtcaacccgcgacggagttccttccggtgattagtgaggtgtatatgaaactagtcgagaaaacaaaatcgattcaaggagccaaagttgaaaacaacaaattttgtgcttctgttcactttcgatgcgtagacgaaaataaatggagtgacttggcccatctagttcgatcagttctgaagaactaccccaagctcatgcttacgcaaggaagaaaagtgttggagattcgtccaatcattaaatgggacaaaggcaaagcacttgagttcttgttagaatccctcggatatgagaattgtacccatgtcttccctatatatattggagatgatcgtaccgacgaagatgcctttaagattttgagagataaaagacaaggtcttgggatccttgtatccaaatacgcgaaggagaccaatgcttcttattctttgcaggagccagacgaggttatggattttttggaacgtctggtggaatggaaaaagttaaagagtggggaatga

SEQ ID NO: 79145 - protein, 359 aa, Brassica napus
MVRFIEENITKMLETKIISKSEVLYAGGDDGDTSPATKIFQDFQINEEDVGRGGGLIRSWVDSMRACSPTHLKPFDNQSSWIKEHPSALNMFEEILHESEGKQIVMFLDYDGTLSPIVDDPDRAFMSNKMRNTVRKLAMCFPTVIVSGRSREKVYSFVKLTELYYAGSHGMDIKGPEQNSKYKKKTQSLLCQPATEFLPVISEVYMKLVEKTKSIQGAKVENNKFCASVHFRCVDENKWSDLAHLVRSVLKNYPKLMLTQGRKVLEIRPIIKWDKGKALEFLLESLGYENCTHVFPIYIGDDRTDEDAFKILRDKRQGLGILVSKYAKETNASYSLQEPDEVMDFLERLVEWKKLKSGE

SEQ ID NO: 79146 - DNA, 1146 bp, Zea mays
  CDS (1)..(1146)
atggatttgaagacaggcctcaattcacctgttattgctgaccatctccctacgttagcattgcctgctgctgtcatgactttcacaacacctactagctttccctctccggggctttgcttgaacactacaaagaagatacctctgcctggtaagattgaagaagttcgtgctgctggatggcttgatctcatgaaggcctcatcacctacccgcaaaaggcagatcaaggatgtcatctgtgatgctcaatctgatcttgatttgcaatactgcaactggacagtgaactatccttctgctttgatctcatttgaggcaattagtgatcttgctgggagtaaaaggttggcattgtttcttgactatgacggaacactttcaccgattgtggacaatcctgaaaatgcattaatgtctgatgagatgcgtgctgcagtgaggcatgcggcatcacttttcccaactgcaatcattagcggaagatctcgtgataaggtttttgactttgtgaagctaaatgaattgtactacgctggaagccatggaatggacataatgggccctgttaggaagactactgactccaatggcgtggaatgtattcggtcaactgatgtgcatggtaaagaagtcaacctgttccaacctgctagtgagtttttacctatgatcactgaggtgtatgaaaaacttggtgagagtgttaaggacattgatggtgcaaggatggaagacaacaagttctgtgtatctgtgcattaccgtaatgtggcggaagatgactataaaaaggttttccatcgtgtaactgctgttttggaaggttacccttgcctaagactaacccatgggaggaaggtttttgaggtccgtcctgttattgattggaacaaaggtaaagctgtggagtttttacttgaatcgcttgggctcagcgagagtgaagatgttctccctatctatgttggagatgacagaacagatgaagatgcattcaaagttctgaaggcaagcaaccgtggctttggaatattggtgtcgtctatacccaaagagagtgacgccttctactccttgagggatccagctgaggtgatggaatttctgagaatgttggcagcatggaaggagcagtccacctga

SEQ ID NO: 79147 - protein, 381 aa, Zea mays
MDLKTGLNSPVIADHLPTLALPAAVMTFTTPTSFPSPGLCLNTTKKIPLPGKIEEVRAAGWLDLMKASSPTRKRQIKDVICDAQSDLDLQYCNWTVNYPSALISFEAISDLAGSKRLALFLDYDGTLSPIVDNPENALMSDEMRAAVRHAASLFPTAIISGRSRDKVFDFVKLNELYYAGSHGMDIMGPVRKTTDSNGVECIRSTDVHGKEVNLFQPASEFLPMITEVYEKLGESVKDIDGARMEDNKFCVSVHYRNVAEDDYKKVFHRVTAVLEGYPCLRLTHGRKVFEVRPVIDWNKGKAVEFLLESLGLSESEDVLPIYVGDDRTDEDAFKVLKASNRGFGILVSSIPKESDAFYSLRDPAEVMEFLRMLAAWKEQST

SEQ ID NO: 79148 - DNA, 1128 bp, Helianthus annuus
  CDS (1)..(1128)
atgacgaacccgaatgcggttgtatccgacgcccaatctgccattgcgatggcgatcacagcggctgtcaacacctcctccttatactccccctctgtccctaactccccttgcaatatcacccttttttcaagaaacaagttcccaaaaagcattgaaaccgcggtcaccgccaccgccacgggaactcaaagtggaatagggaaaaacattgcatgggttgatgtcatgagagcttcttctcccactagaaactcttctgaagatagtgaaattaaaagagtttggattatgaaacacccttcagcattgggtgtgtttgaagagatcatgagtgctgcaaaaatgaaacaaattgccatttttcttgattatgatggcactttatctccaattgttgaaaatccggatcaagcctacatggatcctcagatgagagaggcagtgaagaatgttgcaaagtactttcctacagcaatagttagcgggagatgcagagccaaggtttataattttgtaagattatcagagttatactatgctggtagtcatgggatggacatcaaaggaccatcttctcgcaagcatcaaaagggaaatcaaaatgtactttgtcaacctgctaaggaatttttgccaatgatgtccgaggttaatgaaattctgatggaaaaaataaaggacatcgatggtgccaatgtggaaaacaacaagttctgcctgtctgtacattacagatgtgttgaagaacatagttggagtgatttagccgatcgagttaaatcggttcttaaagactaccctaagcttaagttgactcaaggacgaatggttctcgagattcgaccaaccatcaagtgggacaaaggcaaagctattgagttcttgttggaatcattaggttatgcaaactctaaagatgtattgcctatttatattggagatgatcgtaccgatgaagatgcatttagggtgctacgaaaacgagggcaaggatttggtattcttgtgtctaaaacacctaaagaaaccgaagcggtttattctctacaacaaccattcgaggttatgcagtttcttcaacgtttagtgacatggaaacgatcgattcttcaacgcaactattag

SEQ ID NO: 79149 - protein, 375 aa, Helianthus annuus
MTNPNAVVSDAQSAIAMAITAAVNTSSLYSPSVPNSPCNITLFSRNKFPKSIETAVTATATGTQSGIGKNIAWVDVMRASSPTRNSSEDSEIKRVWIMKHPSALGVFEEIMSAAKMKQIAIFLDYDGTLSPIVENPDQAYMDPQMREAVKNVAKYFPTAIVSGRCRAKVYNFVRLSELYYAGSHGMDIKGPSSRKHQKGNQNVLCQPAKEFLPMMSEVNEILMEKIKDIDGANVENNKFCLSVHYRCVEEHSWSDLADRVKSVLKDYPKLKLTQGRMVLEIRPTIKWDKGKAIEFLLESLGYANSKDVLPIYIGDDRTDEDAFRVLRKRGQGFGILVSKTPKETEAVYSLQQPFEVMQFLQRLVTWKRSILQRNY

SEQ ID NO: 79150 - DNA, 1125 bp, Brassica napus
  CDS (1)..(1125)
atggtgagccaaaacgtcgtcgtatcagacgccaatacaggaatcataaccgtctccaactcctccgtctttgctccttccgctcaaaaaccaccgactgttcctggtcacatctcaatttccaagaagaaactactcaagaacctagaactcagtggcgctcaaagtcagagactcaactcttgggttgactccatgagagcttcttctcctactcatctcaaatcactttcttctctttcatcagaagaagagctcaattcttggcttaaacgacatccatcggctcttgacatgtttgaaagaatcaccgaagcttcaagaggaaaacaaatcgttatgtttcttgactatgacgggactctttctccaatcgtcgctgatccagacagagctttcataaccagcaagatgagaagaacagtgaaaaaactggccaaatccttcccaactgcaatagttaccggtagatgcatagacaaggtgtataactttgtgaagctagcagaactgtattatgctggaagccatggaatggacattaaaggtccaacaaaaggtttctccagacacaagaaggataaaccatctctgctgtaccaaccagccagtgactatcttcccatgatcgatgaagtctataaacaactattggagaaaaccaaatcaactcctggagtcatagtagaaaacaacaagttcaccgcttctgtgcactttcgttgcgtcgaagagaagaaatggagcgaactggttctacaggttcggtcggtattaaagaaatatcctacgctcaaactgagccaaggtcggaaggttttcgaaatccgtcctatgatcgaatgggataaaggaaaagctcttgagttcttgttagagtcacttgggtttgggaactctaacaacgttttcccagtttacatcggtgacgaccggaccgacgaagatgcatttaagctgctacgagacagaggtgaaggctttggcatacttgtctccaaatttcccaaagatacagatgcttcgtattctctgcaagatccgtccgaggtgatgaatttcttgcgacgattggtggagtggaaacaaatgcagccaaagaatatgaagaggatgtatgtataa

SEQ ID NO: 79151 - protein, 374 aa, Brassica napus
MVSQNVVVSDANTGIITVSNSSVFAPSAQKPPTVPGHISISKKKLLKNLELSGAQSQRLNSWVDSMRASSPTHLKSLSSLSSEEELNSWLKRHPSALDMFERITEASRGKQIVMFLDYDGTLSPIVADPDRAFITSKMRRTVKKLAKSFPTAIVTGRCIDKVYNFVKLAELYYAGSHGMDIKGPTKGFSRHKKDKPSLLYQPASDYLPMIDEVYKQLLEKTKSTPGVIVENNKFTASVHFRCVEEKKWSELVLQVRSVLKKYPTLKLSQGRKVFEIRPMIEWDKGKALEFLLESLGFGNSNNVFPVYIGDDRTDEDAFKLLRDRGEGFGILVSKFPKDTDASYSLQDPSEVMNFLRRLVEWKQMQPKNMKRMYV

SEQ ID NO: 79152 - DNA, 1128 bp, Brassica napus
  CDS (1)..(1128)
atggtgagttttgtcatggagaaaccacacaggatgtcagagagtcaaaacgttgtcgtctcagaggcggcaaggtctatcatccccaacaactcttcggctcctcctggtttcatctcaatctccaagaaaaagcttctcaagaacctagaaatcatcaatgatggcgaaagaatcaacgcttgggtagattcaatgcgagcttcttctcctactcatccaaaatcactcccttcttccatctcctcagagcaacaactcagttcatggatcatgcagcatccttctgcgttagaaatgtttgagaaaatcacagaagcttcgggagggaaacaaatagtaatatttctagattatgacggtactctctctcccatcgttgatgatccagacagagctttcatgtcaagcaagatgagaagaacagtaaaaaaactggctaagtgttttccaactgctatagttactggtagatgcctagacaaggtgtataactttgtcaagctagctgagctgtattatgctggcagccatggcatggacattaaagggccagcaaaaggcttctccagacacaagagggttaaacagtctcttctgtaccaaccagccagtgactatcttcccatgatcgatgaagtctatagacaacttttggagaaaaccaaatcaactcctggagtcatagtagaaaacaacaagttctgtgcttctgtgcactttcgttgcgtcgatgagaagaaatggagcgaactggttctacaggttcggtcggtattaaaggaataccctaggcttaaactgaaccaaggtcgaaaggttttcgaaatacgtcctatgattgaatgggataaaggaaaagctcttgagttcttgttagagtcacttgggtttggaaactctaacaacgttttcccagtttacatcggtgatgaccggaccgacgaagatgcatttaagctgctacgagacagaggtgaaggctgtggcgttcttgtctccaaattccccaaagatacggatgcttcatattatttgcaagatccgtccgaggtgatgaatttcttgcaacgattggtggcgtggaaacaaatgcagccaaagagtgtgaagaggatgtatgtataa

SEQ ID NO: 79153 - protein, 375 aa, Brassica napus
MVSFVMEKPHRMSESQNVVVSEAARSIIPNNSSAPPGFISISKKKLLKNLEIINDGERINAWVDSMRASSPTHPKSLPSSISSEQQLSSWIMQHPSALEMFEKITEASGGKQIVIFLDYDGTLSPIVDDPDRAFMSSKMRRTVKKLAKCFPTAIVTGRCLDKVYNFVKLAELYYAGSHGMDIKGPAKGFSRHKRVKQSLLYQPASDYLPMIDEVYRQLLEKTKSTPGVIVENNKFCASVHFRCVDEKKWSELVLQVRSVLKEYPRLKLNQGRKVFEIRPMIEWDKGKALEFLLESLGFGNSNNVFPVYIGDDRTDEDAFKLLRDRGEGCGVLVSKFPKDTDASYYLQDPSEVMNFLQRLVAWKQMQPKSVKRMYV

SEQ ID NO: 79154 - DNA, 1101 bp, Brassica napus
  CDS (1)..(1101)
atggtgagccaaaacgtcgtcgtatcagacgccaatacaggaatcataaccgtctccaactcctccgtctttgctccttccgctcaaaaaccaccgactgttcctggtcacatctcaatttccaagaagaaactactcaagaacctagaactcagtggcgctcaaagtcaaagactcaactcttgggttgactccatgagagcttcttctcctactcatctcaaatcactttcttctctttcatcagaagaagagctcaattcttggcttaaacgacatccatcggctcttgacatgtttgaaagaatcatcgaaacttcaagaggaaaacagatcgttatgtttcttgactatgacggtactctttctccaatcgtcgctgatccagacagagcttttataaccagcaagatgagaagaacagtgaaaaaactggccaagtcctttccaacttctatagttactggtagatgcatagacaaggtgtatagctttgtgaagctagcagaactgtattatgctggtagccatggaatggatattaaaggtccaacaaaaggtttctccagatacaataaggataaaccatctgttctttatcaaccagctggagactttcttcccatgatcgatgaggtttttaaacaattagtggagaaaaccaaatcaacaccaggagccaaagtggagaacaacaagttctgtctttctgtacacttccgttgcgtcgatgagaagaaatggagcgacctggctttaaaagttcggtcggtggtaaagaactatccgacattgaaactgtcccaaggtcggaaggtttttgaaatccgacctatgattaaatgggacaaaggcaaggctcttgagtttttgttagagtcacttggatttgagaactctaacgatgtatttccgatatacattggtgacgatcgaaccgatgaagatgcttttaagctgcttcaagagagaggacaaggcttcggcattcttgtctccaaatttcccaaagacactaatgcatcgtattctttgcaagatccacccgaggtgatggatttcttgcgacggttggtggagtggaaacaaattcaacaatga

SEQ ID NO: 79155 - protein, 366 aa, Brassica napus
MVSQNVVVSDANTGIITVSNSSVFAPSAQKPPTVPGHISISKKKLLKNLELSGAQSQRLNSWVDSMRASSPTHLKSLSSLSSEEELNSWLKRHPSALDMFERIIETSRGKQIVMFLDYDGTLSPIVADPDRAFITSKMRRTVKKLAKSFPTSIVTGRCIDKVYSFVKLAELYYAGSHGMDIKGPTKGFSRYNKDKPSVLYQPAGDFLPMIDEVFKQLVEKTKSTPGAKVENNKFCLSVHFRCVDEKKWSDLALKVRSVVKNYPTLKLSQGRKVFEIRPMIKWDKGKALEFLLESLGFENSNDVFPIYIGDDRTDEDAFKLLQERGQGFGILVSKFPKDTNASYSLQDPPEVMDFLRRLVEWKQIQQ

SEQ ID NO: 79156 - DNA, 1104 bp, Glycine max
  CDS (1)..(1104)
atgaaatatttatttcttctccttgtcactttcaagattatgaagaggaagttcacacagctacgggagtctatggggtttcaaacatcgcatagcactaaacggataccacagccaattttcaaagcaaaggaggacttaattgatgcacatgaaaactcattaattcgaaggactacactgaacttgactgatcatacccaaaccaattccatgttcactctctctggctatgattcatgggtggtaaggcacccttctgcattgaactcgtttgataggttgatgaaagccgccagtgggaagaggatcatcgtttttttggactacgatggtaccttatcaccaattgttaatgaccctgatcgtgctttcatgtctgatgagatgcgtgcagctgtatatgaagttgctacttattttccaacagcaataattagtggaagaagcagagataaggtaaaaggtttcgtgaagttaaataatttatattatgctgggagccatggcatggacataatggcaccatcaatggcagttacatcttctgacggcaagcattttgacattgcccgtaacacaaatggcactgaagttccctttcaacctgcgaagaagtttttgccggcaattggagagataataagagtactaaagaatgaagtaaaggaaataaaaggagcaatgatagaggacaacggattctgcctctctgtacatttccgacaggtccaagaaaaggattatgatgttttggaagcgaaagtgaagtctgtgcttgaaaataatccagaattttgcctaacagagggtaaaaaggttatggaaataaggccatctataaagtggaacaaaggaaatgctgtagaatattttcttgacacattaggattaagcagttgcaatgatatccttccagtgtatattggcgatgatagaactgatgaagacgcttttaaggtcatacagagtagagagcaaggttatccaattatagtgtcttcaattccaagagaaactaacgctttatactctttgcgtgacccatctgaagtactaatctttttgtcacggttggcaaaatggaggaaaacctcttactaa

SEQ ID NO: 79157 - protein, 367 aa, Glycine max
MKYLFLLLVTFKIMKRKFTQLRESMGFQTSHSTKRIPQPIFKAKEDLIDAHENSLIRRTTLNLTDHTQTNSMFTLSGYDSWVVRHPSALNSFDRLMKAASGKRIIVFLDYDGTLSPIVNDPDRAFMSDEMRAAVYEVATYFPTAIISGRSRDKVKGFVKLNNLYYAGSHGMDIMAPSMAVTSSDGKHFDIARNTNGTEVPFQPAKKFLPAIGEIIRVLKNEVKEIKGAMIEDNGFCLSVHFRQVQEKDYDVLEAKVKSVLENNPEFCLTEGKKVMEIRPSIKWNKGNAVEYFLDTLGLSSCNDILPVYIGDDRTDEDAFKVIQSREQGYPIIVSSIPRETNALYSLRDPSEVLIFLSRLAKWRKTSY

SEQ ID NO: 79158 - DNA, 1086 bp, Glycine max
  CDS (1)..(1086)
atgacgcagaatgcgatagtgtccaagacaaaatcggggatcaaccgggacataaccgtgccacaaaagccactggcggcggcggcggcggcgggggggtacattcccattccgaggaggagggttttgaagaacctggaaatcaatgcatgggttgattccatgagatcctcttctccaaccaattccaaatccacctcttctctcgcagaagaacacagcacttggattcttcgccacccctcagcattagacatgttcgagcaaattatggatgcgtcccggggaaagcaaattgtcatgtttctcgactatgatggtactttgtcgcctattgttgatgacccagaccgtgctttcatgtcggattcgatgaggagaacggtgaggaaacttgcaaggtgttttcctactgctatagttaccggcagatgcaaagacaaggtttacaattttgttcgcttggctgagctatattatgctggaagccatggcatggatattcaagggccaacaagagactgcaaatacagcaaagacaaaggagagccagttctttttcaacctgccagtgaatttcttcccatgattgatgaggtgtaccatcaattagttgagaaaatgaaatcaattcctggagccatggtggagaacaacaagttctgctgttctgttcattttcgctgcgttgatgaaaagaaatggagtgaactggcacaggaagtgagatcagtattaaaagagtacccgaagcttcgtcttaaccaaggaaggaaggtattagagattcgtccatctattaaatgggacaaagggaaggcgctggaatttttgttagagtcacttggatttgccaactgtaacgatgtctttcctgtttacattggagatgataaaaccgatgaagatgcattcaagaaattaagagacagaggacaaggttttgggattcttgtctcgaaatttccaaaggacactactgcatcatactctttacaagaaccaaacgaggtgatggatttccttcaacgtttggtggagtggaaacaagtatccctccgactcagaacacgttctcgggtgtaa

SEQ ID NO: 79159 - protein, 361 aa, Glycine max
MTQNAIVSKTKSGINRDITVPQKPLAAAAAAGGYIPIPRRRVLKNLEINAWVDSMRSSSPTNSKSTSSLAEEHSTWILRHPSALDMFEQIMDASRGKQIVMFLDYDGTLSPIVDDPDRAFMSDSMRRTVRKLARCFPTAIVTGRCKDKVYNFVRLAELYYAGSHGMDIQGPTRDCKYSKDKGEPVLFQPASEFLPMIDEVYHQLVEKMKSIPGAMVENNKFCCSVHFRCVDEKKWSELAQEVRSVLKEYPKLRLNQGRKVLEIRPSIKWDKGKALEFLLESLGFANCNDVFPVYIGDDKTDEDAFKKLRDRGQGFGILVSKFPKDTTASYSLQEPNEVMDFLQRLVEWKQVSLRLRTRSRV

SEQ ID NO: 79160 - DNA, 1089 bp, Glycine max
  CDS (1)..(1089)
atgacgcagaatgcgatagtgtccaagacaaaatcggggatcaaccgggacataaccgtgccacaaaagccactggcggcggcggcggcggcgggggggtacattcccattccgaggaggagggttttgaagaacctggaaatcaatgcatgggttgattccatgagatcctcttctccaaccaattccaaatccacctcttctctcgcagaagaacacagcacttggattcttcgccacccctcagcattagacatgttcgagcaaattatggatgcgtcccggggaaagcaaattgtcatgtttctcgactatgatggtactttgtcgcctattgttgatgacccagaccgtgctttcatgtcggattcgatgaggagaacggtgaggaaacttgcaaggtgttttcctactgctatagttaccggcagatgcaaagacaaggtttacaattttgttcgcttggctgagctatattatgctggaagccatggcatggatattcaagggccaacaagaacctccaaatacagcaacaaagataaaggagagcctgttctttttcaacctgctagtgaatttcttcccatgattgatgaggtgtaccatcaattagttgagaaaatgaaatcaattcctggagccatggtggagaacaacaagttctgctgttctgttcattttcgctgcgttgatgaaaagaaatggagtgaactggcacaggaagtgagatcagtattaaaagagtacccgaagcttcgtcttaaccaaggaaggaaggtattagagattcgtccatctattaaatgggacaaagggaaggcgctggaatttttgttagagtcacttggatttgccaactgtaacgatgtctttcctgtttacattggagatgataaaaccgatgaagatgcattcaagaaattaagagacagaggacaaggttttgggattcttgtctcgaaatttccaaaggacactactgcatcatactctttacaagaaccaaacgaggtgatggatttccttcaacgtttggtggagtggaaacaagtatccctccgactcagaacacgttctcgggtgtaa

SEQ ID NO: 79161 - protein, 362 aa, Glycine max
MTQNAIVSKTKSGINRDITVPQKPLAAAAAAGGYIPIPRRRVLKNLEINAWVDSMRSSSPTNSKSTSSLAEEHSTWILRHPSALDMFEQIMDASRGKQIVMFLDYDGTLSPIVDDPDRAFMSDSMRRTVRKLARCFPTAIVTGRCKDKVYNFVRLAELYYAGSHGMDIQGPTRTSKYSNKDKGEPVLFQPASEFLPMIDEVYHQLVEKMKSIPGAMVENNKFCCSVHFRCVDEKKWSELAQEVRSVLKEYPKLRLNQGRKVLEIRPSIKWDKGKALEFLLESLGFANCNDVFPVYIGDDKTDEDAFKKLRDRGQGFGILVSKFPKDTTASYSLQEPNEVMDFLQRLVEWKQVSLRLRTRSRV

SEQ ID NO: 79162 - DNA, 1119 bp, Glycine max
  CDS (1)..(1119)
atgacgaaccgtaatgtgaataacacccttgtggagttggcaatgtcgatttcaaacacaagtgctctacctagagctacggtgcctggaataatggccttgcttggtggggttttgggcctaccccagaagaagctcttaatgaaaactttggaagatggaagtgttaataaaggagggaccaaagttattaacacatggattgattcaatgagagcctcttctcccacacgagtcaaatccacacaaaaccaagacccaacaagtccttggacactttaccacccttcggcactgagcatgtttgatcagattgtatgtgagtccaaaggaaagcagattgtgacttttcttgactatgatggaactctctccccaattgttgcagatccagataaagcatacatgagtaaaaagatgaggaccacattgaaggacttagcaaggcatttccccactgccatcgtgagtggaaggtgcctagacaaggtgtataactttgtaagattggcagaactgtactatgctgggagccatggaatggacatcaagggaccaacaaataagcgaagtactaagaaggaaaatgaacaagtgctcttccaacccgctagtgaattcttgcccatgatcaatgaggtgtacaacatcttggtggaaaaaacaaagtctgtccctggggctaaggtagaaaataacaagttttgcttgtccgtgcactttcgctgtgttgacgaaaagagttgggtgtcattggctgaacaagtgagcttcgtgctcaacgagtacccaaaacttaagctaactcaagggagaaaagtgcttgagattcgaccaaccataaaatgggacaagggcaaggctcttgaattcttgctagagtcactgggatatgctaattctgataatgtatttccaatctatattggggatgatcgaactgatgaagatgcttttaaggttttacggaggaggggtcatggggttgggattctagtttctaaaattccaaaagaaactgatgcttcctacactttgcaagatccaacagaggttgggcagtttttgaggcatttggtggagtggaaaagaacgagttcccaataccacaagttgtag

SEQ ID NO: 79163 - protein, 372 aa, Glycine max
MTNRNVNNTLVELAMSISNTSALPRATVPGIMALLGGVLGLPQKKLLMKTLEDGSVNKGGTKVINTWIDSMRASSPTRVKSTQNQDPTSPWTLYHPSALSMFDQIVCESKGKQIVTFLDYDGTLSPIVADPDKAYMSKKMRTTLKDLARHFPTAIVSGRCLDKVYNFVRLAELYYAGSHGMDIKGPTNKRSTKKENEQVLFQPASEFLPMINEVYNILVEKTKSVPGAKVENNKFCLSVHFRCVDEKSWVSLAEQVSFVLNEYPKLKLTQGRKVLEIRPTIKWDKGKALEFLLESLGYANSDNVFPIYIGDDRTDEDAFKVLRRRGHGVGILVSKIPKETDASYTLQDPTEVGQFLRHLVEWKRTSSQYHKL

SEQ ID NO: 79164 - DNA, 1071 bp, Zea mays
  CDS (1)..(1071)
atgacgaaccaggacgtggtcgtgtcggagatgggcattgcggccgggaccgcgctgccgggctcaagcccggccctcctggcctgccggggcgcggcggccggcgccatgtccctgcggtacctcgacctggcagcggcggcggcgcgctcggccagctgcacctgggtcgaggccatgcgcgcctcctcgcccacccgctcccgcgccgccgccgacgtcgacgagctcacggcctggatgaggaagcacccgtcggcgctcgggaagttcgagcagattgccagcgcgtcccaggggaagaaggtcgtcatgttcctagactacgacggcacgctcgcccccatcgtcgccgacccggacgccgcctacatgagcgacgtgatgagagcggcggtgcgcgacgtcgcgaagcacttcccgacggcgatcgtgagcgggcgctgccgcgacaaggtgcgcagcttcgtcgacctgtcggagctctactacgccggcagccatggcatggacatcgaaggaccaagctccaatcccgagtcagttctgtgccaacctgcgagcgagttcctccccgtgatcgacgaggtgtacaaggcgctggtggagaagacgaagtccacgcctggcgccaaggtggagaacaacaagttctgcctgtccgtgcacttcagatgtgtagatgaaaagagatggaacgcattggccgagcaggtcaaggcagtgatcaaggactaccccaagctaaagctcactcaaggcaggaaggttctggagatccgtccgagcatcatgtgggacaagggcaaggccttggagtttctgctcgaatcgctcggattcgccagctgcagcgacgccctcccggtgtacatcggtgacgaccgcaccgacgaggacgccttcaaggtgctgaggaagaggggccaaggcgtcgggatcctcgtgtccaagtgccccaaggagacgaacgcctcctactcgctgcaggaccccggcgaggtcatggacttcttgctccgcctggtggagtggaagcggaaatccacgacgactcggccgccggtgtag

SEQ ID NO: 79165 - protein, 356 aa, Zea mays
MTNQDVVVSEMGIAAGTALPGSSPALLACRGAAAGAMSLRYLDLAAAAARSASCTWVEAMRASSPTRSRAAADVDELTAWMRKHPSALGKFEQIASASQGKKVVMFLDYDGTLAPIVADPDAAYMSDVMRAAVRDVAKHFPTAIVSGRCRDKVRSFVDLSELYYAGSHGMDIEGPSSNPESVLCQPASEFLPVIDEVYKALVEKTKSTPGAKVENNKFCLSVHFRCVDEKRWNALAEQVKAVIKDYPKLKLTQGRKVLEIRPSIMWDKGKALEFLLESLGFASCSDALPVYIGDDRTDEDAFKVLRKRGQGVGILVSKCPKETNASYSLQDPGEVMDFLLRLVEWKRKSTTTRPPV

SEQ ID NO: 79166 - DNA, 1077 bp, Triticum aestivum
  CDS (1)..(1077)
atgatgaaccacgccacctttgctgccgaggaggcggtcaccgccgtggcggcgccggcgcagccgggtcgccatttcgtgtcgctcccgccgcggagggcgcgcgattgcaggaaggcctccctgggccgcatggacctcgccacctcggcggtgctgatgggcgggtctctgctggactcgatgaaggcctcctcgccccgccaccccatgtcccccgccggcgccgacaacgaggagtggatcgagaagcacccgtcagcattggagtggttcgagggcgtgctcgcggcggccgaggggaagcagatcgtcatgttcctcgactacgacggcaccctttcgccgatcgtccaggaccccgaccgcgccgtcatgaccgaggagatgagggatgcggtgaggggcgtcgcgcagcatttcccgacggccatcgtgagtgggagatgcagagacaaggtgttcaactttgtgaaactggaggagctgtactacgccgggagccacggcatggacatcaagggccccaccaaagtgtctaaccacaaggcaaaggctgacgaggttctgtgccagccggcgaccaagttcttgcctgtcatccagaaggtgtataagaagctgacggcgaagatggagtccatcccgggggccatggtggagaacaacaagttctgcctctcggtgcacttccgctgcgtcgaggaggcggagtgggacgctcttgggagggaggtgaaggcagtgctggacgactaccagaaactcgacatcaccgagggaagaaaggtcctagagatccggcccaccatcgagtggcacaagggaaacgccctccagttcttgcttgagtctctcggctttgcggggcgcagcgacgttttcccgatatacatcggggatgaccgtacagacgaggatgcattcaaggtgctgcacaacatgggacaaggcatcgggatccttgtgaccaagtttccaaaggacaccagcgcatcctactctctgcgtgagcctgctgaggtaaaggagttcatgcgcaagctagtgaagagcaacgggataaagaagggttaa

SEQ ID NO: 79167 - protein, 358 aa, Triticum aestivum
MMNHATFAAEEAVTAVAAPAQPGRHFVSLPPRRARDCRKASLGRMDLATSAVLMGGSLLDSMKASSPRHPMSPAGADNEEWIEKHPSALEWFEGVLAAAEGKQIVMFLDYDGTLSPIVQDPDRAVMTEEMRDAVRGVAQHFPTAIVSGRCRDKVFNFVKLEELYYAGSHGMDIKGPTKVSNHKAKADEVLCQPATKFLPVIQKVYKKLTAKMESIPGAMVENNKFCLSVHFRCVEEAEWDALGREVKAVLDDYQKLDITEGRKVLEIRPTIEWHKGNALQFLLESLGFAGRSDVFPIYIGDDRTDEDAFKVLHNMGQGIGILVTKFPKDTSASYSLREPAEVKEFMRKLVKSNGIKKG

SEQ ID NO: 79168 - DNA, 1122 bp, Triticum aestivum
  CDS (1)..(1122)
atggcgcagacgactgtggtggtgccggaggtgggcatgacggctgccacgcccactgcgtgcccctgccctgggtcgctgttcccgtacccgccgccgcgtgccgggatggccgtgagccgcaagtgcctgcgggcggcgcaggcggagcttggcgcggggatgctcagtggcctggtcgagtccatgcgggcgtcctcccccacgcacgccagggccgccgccgccctcgccgccggcgtcgacgacgagcacgccgcctggatggcaaggcacccgtccgccctgggaaagttcgaggagatcgtggccgcgtccaaggggaagcagatcgtcatgttcctggactacgacggcacgctgtcccccatcgtcgatgaccccgacgccgccttcatgagcgagacgatgcggatggcagtgcgcagcgtggccaagcacttcccgacggcgatcgtgagcggtcggtgccgcgacaaggtgtttgagttcgtgaagctggcggagctctactacgccggcagccacggcatggacatcaagggcccagccaaatcctcaaagtccaaggccaaaggagttctcttccaaccagcaagcgagttcctgcccatgatagaagaggtgcatcaacggctgatagaggagacgaagcacgtagccggggccaaggtggagaacaacaagttctgcgtgtccgtccacttcagatgcgtcgacgaaaagagctggggcgcgctggcggagacggtgaagggcgtgatgcgggagtacccgaagctgcgcatgtcgcaggggcggatggtgttcgaggtgcggcccaccatcaagtgggacaagggcaaggccctcgagttcctgctcgagtcgctgggcttcgccgactgccccaacgtgctgcccgtctacatcggcgacgaccgcaccgacgaggacgccttcaaggtgctgcgccggcggggccagggcgtcgggatcctcgtctccaagcaccccaaggacaccagcgcctccttctcgctgcaggagccggccgaggtcatggagttcctgctccgcctcgtcgagtggaagcagctctccaaggcgcgcctcaggctgcggcggcaggccgacgcctga

SEQ ID NO: 79169 - protein, 373 aa, Triticum aestivum
MAQTTVVVPEVGMTAATPTACPCPGSLFPYPPPRAGMAVSRKCLRAAQAELGAGMLSGLVESMRASSPTHARAAAALAAGVDDEHAAWMARHPSALGKFEEIVAASKGKQIVMFLDYDGTLSPIVDDPDAAFMSETMRMAVRSVAKHFPTAIVSGRCRDKVFEFVKLAELYYAGSHGMDIKGPAKSSKSKAKGVLFQPASEFLPMIEEVHQRLIEETKHVAGAKVENNKFCVSVHFRCVDEKSWGALAETVKGVMREYPKLRMSQGRMVFEVRPTIKWDKGKALEFLLESLGFADCPNVLPVYIGDDRTDEDAFKVLRRRGQGVGILVSKHPKDTSASFSLQEPAEVMEFLLRLVEWKQLSKARLRLRRQADA

SEQ ID NO: 79170 - DNA, 1188 bp, Zea mays
  CDS (1)..(1188)
atgccgatggcgaagccgagcgtggcggtggcggaggcttccggcgtcccagcgcaggcgtcgtgctcgtgcccctgcccggggacgacgctgttcccgtacccgccgccgcgcggcgccagcgggatcgcagccgccgccgtgcgccgcaagtgcttgcaggcggaggtgggcggcggcgcctgctggggcgtggagtccatgcgggcgtcgtcgcccacgcacgccagggccgcagccgcgctcgccggcgccggcgccgacgaggaggaggagcgcgccgcctggatggcgcggcacccgtcggcgctgggcaagttcgagaggatcgtggcggcgtccgagggcaggcgcatcgtcatgttcctggactacgacggcacgctgtcgcccatcgtggacgaccccgacgccgccttcatgagcgagacgatgcggatggccgtgcgtagcgtcgccaagcatttcccgacggcgatcgtgagcggccggtgccgcgacaaggtgttcgggttcgtgaagctggcggagctctactacgccggcagccacggcatggacatcaagggtccggccaaggcctcttcttcccggcacgagaaggccaaggcaaaaggagtcctgttccaaccggcaacggcgagcgagttcctgcccatgatagaggctgtgcacgagcgcctggtagagacgacgcgcagcatacccggggccaaggtggagaacaacaggttctgcgtctccgtccacttcagatgcgtcgacgaaaagatgtggggcgagctgtgggagtcggtgaagggcgttctgcgggagtaccccaggctgcggctgacgcaggggcggatggtgctggaggtgcggcccaccatcaagtgggacaagggcaaggcgctcgagttcctgctcgagtcgctcggcttcgcgggctgcaccaacgtcctgcccgtgtacatcggcgacgaccgcaccgacgaggacgccttcagggcgctgcggcgccggggccagggccagggccagggcgtcggcatcctggtgtccaagcaccccaaggagaccagcgcctcctactcgctccaggagcccgccgaggtgatggagttcttgctgcggctcgtcgagtggaagcgcctctccaggctgagtcggacgcaatcagacgacgcaacggaccaagctaactga

SEQ ID NO: 79171 - protein, 395 aa, Zea mays
MPMAKPSVAVAEASGVPAQASCSCPCPGTTLFPYPPPRGASGIAAAAVRRKCLQAEVGGGACWGVESMRASSPTHARAAAALAGAGADEEEERAAWMARHPSALGKFERIVAASEGRRIVMFLDYDGTLSPIVDDPDAAFMSETMRMAVRSVAKHFPTAIVSGRCRDKVFGFVKLAELYYAGSHGMDIKGPAKASSSRHEKAKAKGVLFQPATASEFLPMIEAVHERLVETTRSIPGAKVENNRFCVSVHFRCVDEKMWGELWESVKGVLREYPRLRLTQGRMVLEVRPTIKWDKGKALEFLLESLGFAGCTNVLPVYIGDDRTDEDAFRALRRRGQGQGQGVGILVSKHPKETSASYSLQEPAEVMEFLLRLVEWKRLSRLSRTQSDDATDQAN

SEQ ID NO: 79172 - DNA, 1101 bp, Zea mays
  CDS (1)..(1101)
atgacgaagcacgccgcctactccagcgaggacgtggtcgcggccgtggcggcgccggcgccggccggccggcatttcacgtcgttccaggcgctgaagggcgcgcccctcgactgcaagaagcacgccgccgtggacctgtccgcgtccggggcggccgtcgtgggcggcggcccctggtttgagtccatgaaggcttcgtcgccgcggcgcgccgccgacgccgagcacggcgactggatggagaagcacccgtccgcattggcccagttcgagccgctgcttgccgccgccaaggggaagcagatcgtgatgttcctggactacgacggcaccctgtcaccgatcgtcgaggaccccgaccgcgccgtcatgtcggaggagatgagagaagccgtgcggcgcgtcgccgagcacttccccaccgcgattgtgagcggaagatgcagggacaaggtgctcaacttcgtgaagctgacggagctgtactacgccgggagccatggcatggacatccagggccccgccgcctgcaggcagcccaaccacgtccagcaggtcgtacacacgcaggctgaagccgcagctgtccattaccaagctgcgagtgagttcctgccggtcatcgaagaggtgttccgcacgctgacggccaagatggagtccatcgccggcgccagggtggagcacaacaagtactgcctgtccgtccacttccgctgcgtccgggaggaggaatggaatgccgtgaacgaggaggtcaggtcggtgctcagggagtacccgaacctcaagctcactcacggcagaaaggtgctggagattcgtccgtccatcaagtgggacaagggcaaggccctcgagttcttgctcaagtctcttggctatgctgggcgcaacgacgtcttcccgatttacatcggagatgatcgcactgacgaggacgctttcaaggtgctccgcaacatggggcagggcatcggaatcctggtgtccaagcttcctaaggagacggcggcatcctactcgctcagtgaccctgccgaggtcaaggagttcctccgcaagctggccaataacaagggggcgcgccaaccatga

SEQ ID NO: 79173 - protein, 366 aa, Zea mays
MTKHAAYSSEDVVAAVAAPAPAGRHFTSFQALKGAPLDCKKHAAVDLSASGAAVVGGGPWFESMKASSPRRAADAEHGDWMEKHPSALAQFEPLLAAAKGKQIVMFLDYDGTLSPIVEDPDRAVMSEEMREAVRRVAEHFPTAIVSGRCRDKVLNFVKLTELYYAGSHGMDIQGPAACRQPNHVQQVVHTQAEAAAVHYQAASEFLPVIEEVFRTLTAKMESIAGARVEHNKYCLSVHFRCVREEEWNAVNEEVRSVLREYPNLKLTHGRKVLEIRPSIKWDKGKALEFLLKSLGYAGRNDVFPIYIGDDRTDEDAFKVLRNMGQGIGILVSKLPKETAASYSLSDPAEVKEFLRKLANNKGARQP

SEQ ID NO: 79174 - DNA, 1068 bp, Zea mays
  CDS (1)..(1068)
atgacgaagcacaccgccttcgccgcggacgacgcgatcatcgccgccgccgccgccatcacgtcgcagcccggccggcggttcacgtcgtacccgccggcgagggcgcgcggcggctgcaggctggccccggcggcggcggcgcgccaggccacggacgatcccggcgccgctgtgtcctggccagaactagtcgtgccgcggcacgccgacttcgacgactggatggagaagcacccgtcggcattggccgcgttcgagtcggtgctggccgccgccaaaggcaagaagatcgtcatgttcctcgactacgacggcaccctgtcgccgatcgtcagggaccccgacagcgccgtcatgtccgaggagatgcgggacgcggtgagaggcgtggccgagcacttcccgacggcgatcgtgagcgggaggtgtagagacaaggtgttcaacttcgtgaagctggcggagctgtactacgccgggagccacggcatggacatcaagggccccacaacacagtccaagcacactaaggcaaaggccggagccgttctatgccaacctgcgagggcgttcctgccggtcattgaggaggtgtaccgcgcgctgacggcgagcacggcgccgatccccggcgcgacggtggagaacaacaagttctgcctctccgtccacttccgctgcgtccaggaggagaaatggcgcgctctggaggagcaggtccggtcggtgctcaaggagtacccggacctccgcctcaccaagggcaggaaggtcctcgagatccggccgtccatcaagtgggacaagggcaacgccctgcagttcttgctcgagtctctcggttttgctggcagtaacagtgtcttcccgatatatatcggagacgatagcaccgacgaggacgcgttcaaggtcctgcgcaacttggggcaagggatcgggatcctggtgagcaagattccgaaggagacccgcgcatcctactccctgcgtgaaccttctgaggtggaggagttcctgcgcaagttggtcagctggtccaaggagagcaggcaacgggactag

SEQ ID NO: 79175 - protein, 355 aa, Zea mays
MTKHTAFAADDAIIAAAAAITSQPGRRFTSYPPARARGGCRLAPAAAARQATDDPGAAVSWPELVVPRHADFDDWMEKHPSALAAFESVLAAAKGKKIVMFLDYDGTLSPIVRDPDSAVMSEEMRDAVRGVAEHFPTAIVSGRCRDKVFNFVKLAELYYAGSHGMDIKGPTTQSKHTKAKAGAVLCQPARAFLPVIEEVYRALTASTAPIPGATVENNKFCLSVHFRCVQEEKWRALEEQVRSVLKEYPDLRLTKGRKVLEIRPSIKWDKGNALQFLLESLGFAGSNSVFPIYIGDDSTDEDAFKVLRNLGQGIGILVSKIPKETRASYSLREPSEVEEFLRKLVSWSKESRQRD

SEQ ID NO: 79176 - DNA, 24 bp, Artificial sequence
  primer
atgacagaaccgttaaccgaaacc

SEQ ID NO: 79177 - DNA, 24 bp, Artificial sequence
  primer
ttagatactacgactaaacgactc

SEQ ID NO: 79178 - protein, 274 aa, Artificial sequence
  consensus sequence
  Variant (2)..(2): Xaa in position 2 is any amino acid
  Variant (4)..(4): Xaa in position 4 is any amino acid
  Variant (9)..(14): Xaa in position 9 to 14 is any amino acid
  Variant (16)..(37): Xaa in position 16 to 37 is any amino acid
  Variant (38)..(39): Xaa in position 38 to 39 is any or no amino acid
  Variant (41)..(43): Xaa in position 41 to 43 is any amino acid
  Variant (46)..(60): Xaa in position 46 to 60 is any amino acid
  Variant (61)..(63): Xaa in position 61 to 63 is any or no amino acid
  Variant (66)..(66): Xaa in position 66 is any amino acid
  Variant (69)..(83): Xaa in position 69 to 83 is any amino acid
  Variant (84)..(116): Xaa in position 84 to 116 is any or no amino acid
  Variant (118)..(119): Xaa in position 118 to 119 is any amino acid
  Variant (120)..(125): Xaa in position 120 to 125 is any or no amino acid
  Variant (127)..(128): Xaa in position 127 to 128 is any amino acid
  Variant (129)..(129): Xaa in position 129 is any or no amino acid
  Variant (131)..(138): Xaa in position 131 to 138 is any amino acid
  Variant (140)..(140): Xaa in position 140 is any amino acid
  Variant (142)..(167): Xaa in position 142 to 167 is any amino acid
  Variant (168)..(173): Xaa in position 168 to 173 is any or no amino acid
  Variant (175)..(176): Xaa in position 175 to 176 is any amino acid
  Variant (178)..(178): Xaa in position 178 is any amino acid
  Variant (180)..(184): Xaa in position 180 to 184 is any amino acid
  Variant (185)..(187): Xaa in position 185 to 187 is any or no amino acid
  Variant (190)..(190): Xaa in position 190 is any amino acid
  Variant (192)..(203): Xaa in position 192 to 203 is any amino acid
  Variant (204)..(209): Xaa in position 204 to 209 is any or no amino acid
  Variant (211)..(213): Xaa in position 211 to 213 is any amino acid
  Variant (217)..(217): Xaa in position 217 is any amino acid
  Variant (221)..(222): Xaa in position 221 to 222 is any amino acid
  Variant (224)..(234): Xaa in position 224 to 234 is any amino acid
  Variant (235)..(240): Xaa in position 235 to 240 is any or no amino acid
  Variant (242)..(247): Xaa in position 242 to 247 is any amino acid
  Variant (248)..(259): Xaa in position 248 to 259 is any or no amino acid
  Variant (261)..(273): Xaa in position 261 to 273 is any amino acid
FXDXDGTLXXXXXXPXXXXXXXXXXXXXXXXXXXXXXXXAXXXGRXXXXXXXXXXXXXXXXXXAGXHGXXXXXXXXXXXXXXXXXXXXXXXXXXXXXXXXXXXXXXXXXXXXXXXXLXXXXXXXXGXXXEXXXXXXXXHXRXXXXXXXXXXXXXXXXXXXXXXXXXXXXXXXXGXXVXEXXXXXXXXKGXAXXXXXXXXXXXXXXXXXXPXXXGDDXTDEXXFXXXXXXXXXXXXXXXXXVXXXXXXXXXXXXXXXXXXAXXXXXXXXXXXXXL

SEQ ID NO: 79179 - protein, 16 aa, Artificial sequence
  protein pattern
  Variant (2)..(2): Xaa in position 2 is Phe, Ile, Leu or Val
  Variant (3)..(3): Xaa in position 3 is any amino acid
  Variant (4)..(4): Xaa in position 4 is Ala, Ile, Leu or Val
  Variant (8)..(8): Xaa in position 8 is any amino acid
  Variant (12)..(15): Xaa in position 12 to 15 is any or no amino acid
PXXXGDDXTDEXXXXA

SEQ ID NO: 79180 - protein, 14 aa, Artificial sequence
  protein pattern
  Variant (5)..(5): Xaa in position 5 is any amino acid
  Variant (6)..(6): Xaa in position 6 is Asp, Glu or Pro
  Variant (7)..(7): Xaa in position 7 is Ile or Leu
  Variant (8)..(10): Xaa in position 8 to 10 is any amino acid
  Variant (12)..(13): Xaa in position 12 to 13 is any amino acid
  Variant (14)..(14): Xaa in position 14 is Ala, Ile or Val
DGTLXXXXXXPXXX

SEQ ID NO: 79181 - DNA, 234 bp, Escherichia coli
  CDS (1)..(234): transl_table=11
atgaaaaatatcgttcctgattaccgccttgatatggtgggtgaaccctgcccttatccggcagtcgcaacccttgaggcgatgccgcagttaaaaaaaggggaaatcctggaagtggtgagcgactgtccgcagtcgatcaataatattccactggatgcgcgtaatcacggctatacggtgctggatattcagcaagacgggccgaccattcgttatttaattcagaagtaa

SEQ ID NO: 79182 - protein, 77 aa, Escherichia coli
MKNIVPDYRLDMVGEPCPYPAVATLEAMPQLKKGEILEVVSDCPQSINNIPLDARNHGYTVLDIQQDGPTIRYLIQK

SEQ ID NO: 79183 - DNA, 249 bp, Pseudomonas aeruginosa PAO1
  CDS (1)..(249): transl_table=11
atgagccagaccgacaaaccgaccctgtcgcttgacctgcgcggcgaacattgcccgtacaacgccatcgccaccctggaaaccctggcgaccatgcagccgggcgaacgcctggaagtggtcaccgactgctcgcaatcggtccacgggattcccgaagatacccagcgccagggctacaaatgcctggcggtggagcagcatggcgcgctgttccgcttcctcatagaggtgccgctggaaagctga

SEQ ID NO: 79184 - protein, 82 aa, Pseudomonas aeruginosa PAO1
MSQTDKPTLSLDLRGEHCPYNAIATLETLATMQPGERLEVVTDCSQSVHGIPEDTQRQGYKCLAVEQHGALFRFLIEVPLES

SEQ ID NO: 79185 - DNA, 228 bp, Campylobacter jejuni subsp. jejuni NCTC 11168
  CDS (1)..(228): transl_table=11
gtgaaaattacttatagtttaaatttacaaggtgaagcttgtccttatcctgctatagcaacacttgatgtcttacctaagcttaaaagtggagaaattttagaagtactttgtgattgtccacaaagtatcaattccatacctcaagatgcaaaaaaccgtggttttaaagtgcttgaaatcgatcaaagtggacccacactaagatttttaatccaaaagccttaa

SEQ ID NO: 79186 - protein, 75 aa, Campylobacter jejuni subsp. jejuni NCTC 11168
MKITYSLNLQGEACPYPAIATLDVLPKLKSGEILEVLCDCPQSINSIPQDAKNRGFKVLEIDQSGPTLRFLIQKP

SEQ ID NO: 79187 - DNA, 240 bp, Sulfolobus tokodaii str. 7
  CDS (1)..(240): transl_table=11
atggctgaaatcaagattgcaaaaacattagatgttaagggaatgtactgccctgggccagtaatggagactgcaaaagcaataaagcaaattggaattggtgaggttttagaggttttagcaacagatcccgcagctaaaccagatattgaggcttgggcaagaaggaccggccaacaaattcttgatattcagcagcaaggcggagttacaagaatactaataaagagggttaagtaa

SEQ ID NO: 79188 - protein, 79 aa, Sulfolobus tokodaii str. 7
MAEIKIAKTLDVKGMYCPGPVMETAKAIKQIGIGEVLEVLATDPAAKPDIEAWARRTGQQILDIQQQGGVTRILIKRVK

SEQ ID NO: 79189 - DNA, 249 bp, Sulfolobus tokodaii str. 7
  CDS (1)..(249): transl_table=11
atgggcgataaaattaaatcaactaagccagatgtgacacttgatctaagaggtgaaccttgtccagagcctcaaattgaaatagttaaaatgcttaaccacatgaaagaaggacaagtacttgagatactcagtgatgatgaaccagcagaactttcgattccagttatatgtgaatcacgaggttatccttgtgagatagaaaggcaaggaaacacttttagaataagaattttgaaaactaaataa

SEQ ID NO: 79190 - protein, 82 aa, Sulfolobus tokodaii str. 7
MGDKIKSTKPDVTLDLRGEPCPEPQIEIVKMLNHMKEGQVLEILSDDEPAELSIPVICESRGYPCEIERQGNTFRIRILKTK

SEQ ID NO: 79191 - DNA, 243 bp, Thermoanaerobacter tengcongensis MB4
  CDS (1)..(243): transl_table=11
atgagtaatgatgtaaagcctacctatactttagatgaaagaggagaggtgtgccctgttccagatgtggacacaagaagaaaactcaaagagatgaaatcaggtgaaatactggaagtactcgttgattacgctctttctaaagagagaattccagcaggagtaaaggaagtaggaggagaggtaatatccattgaagaaatagggccaagcgagtggcgaattctcattaaaaagctttga

SEQ ID NO: 79192 - protein, 80 aa, Thermoanaerobacter tengcongensis MB4
MSNDVKPTYTLDERGEVCPVPDVDTRRKLKEMKSGEILEVLVDYALSKERIPAGVKEVGGEVISIEEIGPSEWRILIKKL

SEQ ID NO: 79193 - DNA, 243 bp, Nitrosomonas europaea ATCC 19718
  CDS (1)..(243): transl_table=11
atgaatcataatcatcaaccggatttatcactggatttgcggggtgaacattgcccgtacaacgccattgccacccttgaagccctggccgatatgacggccggccaggtgctggaagtcatcaccgactgtgcccagtcagtcaacggtatccctgaagatgcgcgcgccaaaggttatgactgcctggcagtagaacaacacggaccgctgtttcgctttctgatccgcgtgcccggttaa

SEQ ID NO: 79194 - protein, 80 aa, Nitrosomonas europaea ATCC 19718
MNHNHQPDLSLDLRGEHCPYNAIATLEALADMTAGQVLEVITDCAQSVNGIPEDARAKGYDCLAVEQHGPLFRFLIRVPG

SEQ ID NO: 79195 - DNA, 240 bp, Helicobacter hepaticus ATCC 51449
  CDS (1)..(240): transl_table=11
atgcaacaagaaattatcccaaattttagattagacttgcaaggtgagccttgcccttatcctgcggtaagaactctggaggttttgcctgagcttaaaagtggcgagattttggaagtgctaagtgattgcccacaaagcattaataatatccccattgatgcgaaaaatcacggctatgaagtgttaggagtagagcagctaggagccacgataaggtatcttatcaagaagccttaa

SEQ ID NO: 79196 - protein, 79 aa, Helicobacter hepaticus ATCC 51449
MQQEIIPNFRLDLQGEPCPYPAVRTLEVLPELKSGEILEVLSDCPQSINNIPIDAKNHGYEVLGVEQLGATIRYLIKKP

SEQ ID NO: 79197 - DNA, 270 bp, Yersinia pseudotuberculosis IP 32953
  CDS (1)..(270): transl_table=11
atgagccattctccatccgtagaaacaccccaactggcagcgcctattgtgcctgattatcgcctcgatatggtgggcgagccgtgcccgtatcctgcggttgcaacgctggaggccatgccacaactgaagccgggcgaaattctggaggtgatcagcgactgcccgcagtcgatcaataatattccgctggatgcccgcaattacggctataccgtgctggatattcagcaggatgggccaactgttcgctatttgattcagcgctga

SEQ ID NO: 79198 - protein, 89 aa, Yersinia pseudotuberculosis IP 32953
MSHSPSVETPQLAAPIVPDYRLDMVGEPCPYPAVATLEAMPQLKPGEILEVISDCPQSINNIPLDARNYGYTVLDIQQDGPTVRYLIQR

SEQ ID NO: 79199 - DNA, 234 bp, Carboxydothermus hydrogenoformans Z-2901
  CDS (1)..(234): transl_table=11
atggaagagaaacggtatgttttggatttacggggggaaccctgtccttatccggtggtgtattccctgcaggttctggcagaactggaaagcggagcgcttttggagattttagccgactgtccgcaatcgtttaaatcggttccggaagaagtggtaaaagctgggtacgaaatggtcgaacccccgcaaaaaatcgggccaacgttaaggtttttggtaagaaaaccgtaa

SEQ ID NO: 79200 - protein, 77 aa, Carboxydothermus hydrogenoformans Z-2901
MEEKRYVLDLRGEPCPYPVVYSLQVLAELESGALLEILADCPQSFKSVPEEVVKAGYEMVEPPQKIGPTLRFLVRKP

SEQ ID NO: 79201 - DNA, 234 bp, Shewanella sp. MR-4
  CDS (1)..(234): transl_table=11
atgagtcaatatattccagattatcaactcgatatggtgggcgagccttgcccttatcctgccgtggcaacccttgaggccatgccaacgctgaaaccgggggagatattagaagtgatcagtgactgcccacaatcaatcaataacattccactcgatgccaagaatcatggctataaagtgctagaaattgagcaaaacggaccaacgattcgttatctgatccagcgctaa

SEQ ID NO: 79202 - protein, 77 aa, Shewanella sp. MR-4
MSQYIPDYQLDMVGEPCPYPAVATLEAMPTLKPGEILEVISDCPQSINNIPLDAKNHGYKVLEIEQNGPTIRYLIQR

SEQ ID NO: 79203 - DNA, 270 bp, Actinobacillus pleuropneumoniae serovar 1 str. 4074
  CDS (1)..(270): transl_table=11
atggcttttatcgttattgaacaaaaagacaaacatccaagtgaaatcacacctgactacactttagatatgcttggagaaccttgcccgtatccggcaattgccactttagaaacgttaccgactttacaagaaggtgagatcttagaagtactaagtgattgtgcgcaatctatcaataatattccggttgatatgaaaaatcacggctatacgttattaagcgtagaacaagacggtgcgactttacgctatttgattaaaaaatag

SEQ ID NO: 79204 - protein, 89 aa, Actinobacillus pleuropneumoniae serovar 1 str. 4074
MAFIVIEQKDKHPSEITPDYTLDMLGEPCPYPAIATLETLPTLQEGEILEVLSDCAQSINNIPVDMKNHGYTLLSVEQDGATLRYLIKK

SEQ ID NO: 79205 - DNA, 243 bp, delta proteobacterium MLMS-1
  CDS (1)..(243): transl_table=11
atggacgtagacagcattactcccgaccagaccttggacgccaaaggattaagttgccccatgccactgctgaagctcaaaaaggcaatgggccaggtcggcgccggccagatcctggaagtgatgggcaccgatcccggctccaagaacgacatgccggcctggtgtgaacgggaaggccatgagtttctgggcatcaaggacgacgacggcttcttccgggtattcataaagaaggcctga

SEQ ID NO: 79206 - protein, 80 aa, delta proteobacterium MLMS-1
MDVDSITPDQTLDAKGLSCPMPLLKLKKAMGQVGAGQILEVMGTDPGSKNDMPAWCEREGHEFLGIKDDDGFFRVFIKKA

SEQ ID NO: 79207 - DNA, 276 bp, Pasteurella haemolytica
  CDS (1)..(276): transl_table=11
atgactatggcattcaccgttgtacaaaaactagataaagatccaaaagacatcacgcctgattacaccttagataccttaggcgaaccttgcccttaccctgcgattacgatgttagaaacaatgccacagctgcaaaaaggagagatattggaactgttaagcgattgttcccaatcgattaataatattccgattgatactaaaaatcacggctataccctattaagcgtggaacaaaacggcactaaattacgctatttaattcagcgttaa

SEQ ID NO: 79208 - protein, 91 aa, Pasteurella haemolytica
MTMAFTVVQKLDKDPKDITPDYTLDTLGEPCPYPAITMLETMPQLQKGEILELLSDCSQSINNIPIDTKNHGYTLLSVEQNGTKLRYLIQR

SEQ ID NO: 79209 - DNA, 240 bp, Thermotoga maritima
  CDS (1)..(240): transl_table=11
atggcgaagtaccaggtcaccaagactttggatgtgagaggagaggtttgtccagtgcctgatgttgaaaccaaaagggctctgcagaacatgaagccaggagaaatccttgaagtgtggatcgactatccaatgtcgaaagaaagaatcccggaaactgtcaaaaaacttggccacgaagtcctggaaatcgaagaagtgggtccgagcgaatggaagatctacatcaaagtgaaataa

SEQ ID NO: 79210 - protein, 79 aa, Thermotoga maritima
MAKYQVTKTLDVRGEVCPVPDVETKRALQNMKPGEILEVWIDYPMSKERIPETVKKLGHEVLEIEEVGPSEWKIYIKVK

SEQ ID NO: 79211 - DNA, 228 bp, Methanococcus jannaschii
  CDS (1)..(228): transl_table=11
atggtgatagctatgaaaaaacttgatgttactggagacatctgcccagttccagttttaaagacaaaaaaggctttagaagaattgaatgaaggagaagagttagaggttgtaggggactacaaaccagcattagaaaacataaaaagatttgctgaaaataacggctatacagttgttttagctgaagaaacagagagtagatttagaatagtcatcaaaaaatag

SEQ ID NO: 79212 - protein, 75 aa, Methanococcus jannaschii
MVIAMKKLDVTGDICPVPVLKTKKALEELNEGEELEVVGDYKPALENIKRFAENNGYTVVLAEETESRFRIVIKK

SEQ ID NO: 79213 - DNA, 25 bp, Artificial sequence
  primer
atgaaaaatatcgttcctgattacc

SEQ ID NO: 79214 - DNA, 27 bp, Artificial sequence
  primer
ttacttctgaattaaataacgaatggt

SEQ ID NO: 79215 - protein, 88 aa, Artificial sequence
  consensus sequence
  Variant (2)..(7): Xaa in position 2 to 7 is any amino acid
  Variant (8)..(21): Xaa in position 8 to 21 is any or no amino acid
  Variant (24)..(25): Xaa in position 24 to 25 is any amino acid
  Variant (28)..(28): Xaa in position 28 is any amino acid
  Variant (31)..(31): Xaa in position 31 is any amino acid
  Variant (33)..(45): Xaa in position 33 to 45 is any amino acid
  Variant (47)..(48): Xaa in position 47 to 48 is any amino acid
  Variant (52)..(53): Xaa in position 52 to 53 is any amino acid
  Variant (55)..(57): Xaa in position 55 to 57 is any amino acid
  Variant (59)..(61): Xaa in position 59 to 61 is any amino acid
  Variant (64)..(69): Xaa in position 64 to 69 is any amino acid
  Variant (71)..(82): Xaa in position 71 to 82 is any amino acid
  Variant (83)..(84): Xaa in position 83 to 84 is any or no amino acid
  Variant (86)..(87): Xaa in position 86 to 87 is any amino acid
MXXXXXXXXXXXXXXXXXXXXLDXXGEXCPXPXXXXXXXXXXXXXGXXLEVXXDXXXSXXXIPXXXXXXGXXXXXXXXXXXXXXRXXI

SEQ ID NO: 79216 - protein, 57 aa, Artificial sequence
  protein pattern
  Variant (2)..(2): Xaa in position 2 is any amino acid
  Variant (3)..(4): Xaa in position 3 to 4 is any or no amino acid
  Variant (7)..(7): Xaa in position 7 is any amino acid
  Variant (10)..(10): Xaa in position 10 is any amino acid
  Variant (11)..(11): Xaa in position 11 is Asn or Pro
  Variant (12)..(12): Xaa in position 12 is any amino acid
  Variant (13)..(13): Xaa in position 13 is Ile or Val
  Variant (14)..(18): Xaa in position 14 to 18 is any amino acid
  Variant (19)..(19): Xaa in position 19 is Leu or Met
  Variant (20)..(21): Xaa in position 20 to 21 is any amino acid
  Variant (22)..(22): Xaa in position 22 is Leu or Met
  Variant (23)..(24): Xaa in position 23 to 24 is any amino acid
  Variant (26)..(26): Xaa in position 26 is Ala, Glu or Gln
  Variant (27)..(27): Xaa in position 27 is any amino acid
  Variant (30)..(30): Xaa in position 30 is Ile, Leu or Val
  Variant (31)..(32): Xaa in position 31 to 32 is any amino acid
  Variant (34)..(36): Xaa in position 34 to 36 is any amino acid
  Variant (37)..(37): Xaa in position 37 is Ala or Ser
  Variant (38)..(40): Xaa in position 38 to 40 is any amino acid
  Variant (41)..(41): Xaa in position 41 is Ile or Val
  Variant (43)..(48): Xaa in position 43 to 48 is any amino acid
  Variant (50)..(56): Xaa in position 50 to 56 is any amino acid
  Variant (57)..(57): Xaa in position 57 is Glu or Gln
LXXXGEXCPXXXXXXXXXXXXXXXGXXLEXXXDXXXXXXXXPXXXXXXGXXXXXXXX

SEQ ID NO: 79217 - DNA, 1017 bp, Escherichia coli
  CDS (1)..(1017): transl_table=11
atgcggacttggaaatttccgtcagttagggtaatgatgagagtagaaaataataatgtttctgggcaaaaccatgacccggaacagattgatttgattgatttactagtgcagttgtggcgtggcaagatgacaatcatcatttccgtcattgtggctattgccctggctattggatatttggcagtagcgaaggagaaatggacgtcaacagcaattatcactcagcccgacgtggggcaaattgctggctataacaatgccatgaatgttatctatggtcaggctgcaccgaaagtatcggatttgcaggagacgttaattggtcgcttcagttctgccttctctgcattagcagaaacgctggataatcaggaagaacgagaaaaacttaccatcgaaccttctgttaagaaccagcaattaccattgactgtttcttatgttgggcaaactgcagagggcgcacaaatgaagttggcccaatacattcagcaagttgacgataaagtgaatcaagagctagaaaaggatctcaaagacaacattgctctgggacggaaaaacttgcaggactctttaagaacgcaggaagtagtcgcgcaggagcagaaagatctgcgtatccgtcagattcaggaagcgttgcagtatgcgaatcaggcgcaggtgacaaaaccgcagattcaacagactggcgaagatatcacacaagatacgttgttccttttggggagcgaagcgctggagtcgatgattaagcatgaggcgacccgtccgttggtgttctcgccaaactactatcagactcgtcaaaacctgctggatatcgaaagcttaaaagttgatgatcttgatattcatgcttaccgttatgtgatgaaaccgatgttacctattcgtcgtgatagcccgaaaaaggcaattaccttgattctggcggtgctgctgggtggcatggttggcgcggggattgtgctggggcgtaatgctctacgcaattacaacgcgaagtaa

SEQ ID NO: 79218 - protein, 338 aa, Escherichia coli
MRTWKFPSVRVMMRVENNNVSGQNHDPEQIDLIDLLVQLWRGKMTIIISVIVAIALAIGYLAVAKEKWTSTAIITQPDVGQIAGYNNAMNVIYGQAAPKVSDLQETLIGRFSSAFSALAETLDNQEEREKLTIEPSVKNQQLPLTVSYVGQTAEGAQMKLAQYIQQVDDKVNQELEKDLKDNIALGRKNLQDSLRTQEVVAQEQKDLRIRQIQEALQYANQAQVTKPQIQQTGEDITQDTLFLLGSEALESMIKHEATRPLVFSPNYYQTRQNLLDIESLKVDDLDIHAYRYVMKPMLPIRRDSPKKAITLILAVLLGGMVGAGIVLGRNALRNYNAK

SEQ ID NO: 79219 - DNA, 1134 bp, Escherichia coli O157:H7 EDL933
  CDS (1)..(1134): transl_table=11
atgtcatcactgaatattaaacagggaagtgacgctcattttcccgattatcctctggcgtcgcccagtaataatgaaattgatttacttaatctaatctcagttttatggcgggccaaaaaaacggtcatggcggtcgtttttgcgtttgcctgtgcaggcttgctgatctctttcatcctgccgcaaaaatggaccagcgcggcggttgtcacgcctccagaacctgttcagtggcaagagttggagaaaacattcactaagcttcgtgtgctggatctggatatcaaaattgatcgtacagaagcatttaacctgtttatcaagaagtttcagtcggttagcttgctggaagagtacctgcgttcatcaccttatgtgatggaccaattaaaagaggcgaaaatcgacgaactggatttgcatcgcgcaattgtcgcattgagcgaaaaaatgaaagcggttgatgacaatgccagtaagaaaaaagatgaaccgtcactgtatacctcctggacgctaagttttaccgcgccaaccagtgaagaggcgcagaccgttttgagcgggtatatcgattatatctctgcgttggtggtgaaagagtcgatagaaaacgtccgtaataaactggagatcaaaacccagtttgaaaaagaaaaactggctcaggaccgcattaaaatgaaaaatcaacttgatgcaaacattcagcgcctcaattattcactcgacattgccaacgcggcaggaattaaaaagcccgtttacagtaatggtcaggccgttaaagatgaccccgatttctctatttctctcggcgcagacggtattgaacgcaaactggaaattgaaaaagcggtcacggacgttgcggaactgaacggtgaattacgtaatcgtcagtatcttgttgagcagttaacaaaagcaaatatcaacgatgtgaattttacgccgtttaaatatcagttaagcccgtcattgccagtgaaaaaagacggtccgggtaaggcgattattgtgatcctttccgcgctgatcggcgggatggtggcttgtggtagcgtgttattgcgctatgcgatggcatccagaaaacaggatgccatgatggcagaccacttagtttaa

SEQ ID NO: 79220 - protein, 377 aa, Escherichia coli O157:H7 EDL933
MSSLNIKQGSDAHFPDYPLASPSNNEIDLLNLISVLWRAKKTVMAVVFAFACAGLLISFILPQKWTSAAVVTPPEPVQWQELEKTFTKLRVLDLDIKIDRTEAFNLFIKKFQSVSLLEEYLRSSPYVMDQLKEAKIDELDLHRAIVALSEKMKAVDDNASKKKDEPSLYTSWTLSFTAPTSEEAQTVLSGYIDYISALVVKESIENVRNKLEIKTQFEKEKLAQDRIKMKNQLDANIQRLNYSLDIANAAGIKKPVYSNGQAVKDDPDFSISLGADGIERKLEIEKAVTDVAELNGELRNRQYLVEQLTKANINDVNFTPFKYQLSPSLPVKKDGPGKAIIVILSALIGGMVACGSVLLRYAMASRKQDAMMADHLV

SEQ ID NO: 79221 - DNA, 1014 bp, Escherichia coli O157:H7 EDL933
  CDS (1)..(1014): transl_table=11
atgcggacttggaaatttccgtcagttagggtaatgatgagagtagaaaataataatgtttctgggcaaaaccatgacccggaacagattgatttgattgatttactagtgcagttgtggcgtggcaagatgacaatcatcatttccgtcattgtggctattgctctggctattggttatttggcagtagcgaaggagaaatggacgtcaacagcaattatcactcagcccgacgtggggcaaattgctggctataacaatgccatgaatgttatctatggtcaggctgcaccgaaagtatcggatttgcaggagacgttgattggtcgcttcagttctgccttctcagcattagcagaaacgctggataatcaggaagaaccagaaaaacttaccatcgaaccttctgttaagaaccagcaattaccattgactgtttcttatgttgggcaaactgcagagggagcacaaatgaagttggcccaatacattcagcaagttgatgataaagtgaatcaagagctagaaaaggatctcaaagacaacattgctctgggacggaaaaacttgcaggactctttaagaacgcaggaagtagttgcgcaggagcagaaagagctgcgtatccgtcagattcaggaagcgttgcagtatgcgaatcaggcgcaggtggcaaagccacaggttcagcagactgaagatgtgacgcaagatacgttgttccttttggggagcgaagcgctggagtcgatgattaagcatgaggcgacccgtccgttggtgttctcaccaaactactatcagacacgtcaaaacctgttggatattgaaaacttaaaggttgatgatcttgatattcatgcttaccgctatgtaatgaaaccgacgttacctattcgtcgcgatagtccgaaaaaggcaatcaccttgattctggcggtgctgctgggcggcatggttggcgcggggattgtgctggggcgtaacgctctgcgtaattacaacgcgaagtaa

SEQ ID NO: 79222 - protein, 337 aa, Escherichia coli O157:H7 EDL933
MRTWKFPSVRVMMRVENNNVSGQNHDPEQIDLIDLLVQLWRGKMTIIISVIVAIALAIGYLAVAKEKWTSTAIITQPDVGQIAGYNNAMNVIYGQAAPKVSDLQETLIGRFSSAFSALAETLDNQEEPEKLTIEPSVKNQQLPLTVSYVGQTAEGAQMKLAQYIQQVDDKVNQELEKDLKDNIALGRKNLQDSLRTQEVVAQEQKELRIRQIQEALQYANQAQVAKPQVQQTEDVTQDTLFLLGSEALESMIKHEATRPLVFSPNYYQTRQNLLDIENLKVDDLDIHAYRYVMKPTLPIRRDSPKKAITLILAVLLGGMVGAGIVLGRNALRNYNAK

SEQ ID NO: 79223 - DNA, 984 bp, Salmonella enterica subsp. enterica serovar Typhi str. CT18
  CDS (1)..(984): transl_table=11
atgacagtggatagtaatgcgtcttccgggcgtgggaacgatccggaacagattgatttgattgagttattgctacagttatggcgtgggaagatgaccattattgtagccgttattatcgccattttgctggccgtaggctacctgatgatagccaaagaaaaatggacatccacggcgattattacccaacctgatgccgcgcaggttgccacctataccaacgcgctcaacgtcttgtatggcgggaatgcccccaaaatctctgaagtgcaggcgaattttataagccgctttagttctgcgttttccgcattatcggaagcgctggataatcagaaagagcgggaaaagctcaccattgaacagtcggtaaaggggcagacgctgccgctctcggtttcttatgtgagcactaccgctgaaggggcgcagcgtcggctggcggaatatatccaacaggtggatgaagaggtcgctaaggaactggaagttgacctgaaagataacatcacgctgcaaaccaaaacgttgcaggagtcccttgagacgcaggaagttgtggcgcaggagcaaaaagatctgcgtattaagcaaatcgaagaagcgttgcgctatgcggatgaggccaaaatcacgcagccgcagattcagcaaacccaggatgttacccaggacacgatgttcctgttggggagcgatgcgctaaaatcgatgatacagaacgaagcgacgcgtccactggtcttttctccggcctattaccagacgaagcagacactgctggacattaaaaatctgaaagtgactgccgatacggtgcacgtctatcgttatgtgatgaagccgacgctgccggtccgtcgcgatagcccgaaaacagccattaccctcgtgctggctgtgttgctgggcgggatgatcggcgccgggattgtgctggggcgcaatgcgctacgtagctataagccaaaagccttgtaa

SEQ ID NO: 79224 - protein, 327 aa, Salmonella enterica subsp. enterica serovar Typhi str. CT18
MTVDSNASSGRGNDPEQIDLIELLLQLWRGKMTIIVAVIIAILLAVGYLMIAKEKWTSTAIITQPDAAQVATYTNALNVLYGGNAPKISEVQANFISRFSSAFSALSEALDNQKEREKLTIEQSVKGQTLPLSVSYVSTTAEGAQRRLAEYIQQVDEEVAKELEVDLKDNITLQTKTLQESLETQEVVAQEQKDLRIKQIEEALRYADEAKITQPQIQQTQDVTQDTMFLLGSDALKSMIQNEATRPLVFSPAYYQTKQTLLDIKNLKVTADTVHVYRYVMKPTLPVRRDSPKTAITLVLAVLLGGMIGAGIVLGRNALRSYKPKAL

SEQ ID NO: 79225 - DNA, 1137 bp, Salmonella typhimurium LT2
  CDS (1)..(1137): transl_table=11
atgccatctcttaatgtaaaacaagaaaaaaatcagtcatttgcaggttattcactgccgcccgccaacagtcatgaaatcgatttgtttagccttatagaggtgttatggcaggcgaaacgtcgtattcttgctaccgttttcgcctttgcgtgcgtggggttgcttctgtcctttctgctgccgcaaaaatggaccagccaggcgattgtcacaccggcggagtcggtacagtggcaggggctggagagaacgttgaccgcgctgcgcgtgttggatatggaggtaagcgttgatcggggcagcgtatttaatctgtttattaaaaagtttagctcgccctcgctgctggaagaatatcttcgttcttctccgtatgtcatggatcaattaaaaggcgcgcaaatagacgagcaggatcttcaccgggcgattgtcctgctgagcgaaaaaatgaaagcggtggacagtaatgtcggcaagaaaaatgaaacgtcgttattcacgtcgtggacattgagttttaccgcgccgacgcgggaagaagcgcaaaaagtgctggctggctatattcagtacatctccgatatcgtcgtgaaagagacgctggaaaatattcgtaaccagctggaaatcaaaacccgctatgagcaggaaaagctggcgatggatcgggtgcgtctcaaaaatcagcttgatgccaatattcaacgtcttcattattcgctggaaatcgccaacgccgccggtattaagagaccggtttacagcaatggtcaggcggtaaaagatgatccggatttttctatttctctcggcgcggatggtatttcccgcaaactggaaattgaaaaaggggtaacggacgtggccgagatcgacggtgatttgcgtaaccgtcaataccatgttgaacaactggcggcaatgaatgtgagtgacgtgaagtttaccccgtttaaatatcaactgtcgccgtctctgccagtgaaaaaagatggcccgggtaaagccatcattattatcctggcggcgttgattggcggtatgatggcctgcggcggcgtattactgcgtcacgcgatggtctcgcgtaaaatggaaaacgcgctggcgatagatgaacggttagtctga

SEQ ID NO: 79226 - protein, 378 aa, Salmonella typhimurium LT2
MPSLNVKQEKNQSFAGYSLPPANSHEIDLFSLIEVLWQAKRRILATVFAFACVGLLLSFLLPQKWTSQAIVTPAESVQWQGLERTLTALRVLDMEVSVDRGSVFNLFIKKFSSPSLLEEYLRSSPYVMDQLKGAQIDEQDLHRAIVLLSEKMKAVDSNVGKKNETSLFTSWTLSFTAPTREEAQKVLAGYIQYISDIVVKETLENIRNQLEIKTRYEQEKLAMDRVRLKNQLDANIQRLHYSLEIANAAGIKRPVYSNGQAVKDDPDFSISLGADGISRKLEIEKGVTDVAEIDGDLRNRQYHVEQLAAMNVSDVKFTPFKYQLSPSLPVKKDGPGKAIIIILAALIGGMMACGGVLLRHAMVSRKMENALAIDERLV

SEQ ID NO: 79227 - DNA, 1014 bp, Shigella flexneri 2a str. 301
  CDS (1)..(1014): transl_table=11
atgcggacttggaaatttccgtcagttagggtaatgatgagagtagaaaataataatgtttctgggcaaaaccatgacccggaacagattgatttgattgatttactagtgcagttgtggcgtggcaagatgacaattatcatttccgtcattgtggctattgccctggctattggttatttggcagtagcgaaggagaaatggacgtcaacagcaattatcactcagcccgacgtggggcaaattgctggctataacaatgccatgaatgttatctatggtcaggctgcaccgaaagtatcggatttgcaggagacgttaattggtcgcttcagttctgccttctctgcattagcagaaacgctggataatcaggaagagccagaaaaacttaccatcgaaccttctgttaagaaccagcaattaccattgactgtttcttatgttgggcaaactgcagagggcgcacaaatgaagttggcccaatacattcagcaagttgatgataaagtgaatcaagagctagaaaaggatctcaaggacaacattgctctgggacggaaaaacttgcaggactctttaagaacccaggaagtggtcgcgcaggagcagaaagatctgcgtatccgtcagattcaggaagcgttgcagtatgcgaatcaggcgcaggtgacaaagccacaggttcagcagactgaagatgtgacgcaagatacgttgttccttctagggagcgaagcgctggagtcgatgattaagcatgaagcgactcgtccgttggtgttctcaccaaactactatcagacacgtcaaaacctgttggatattgaaaaattaaagtttgatgatcttgatattcatgcttaccgctatgtgatgaaaccgacgttacctattcgtcgcgatagtccgaaaaaggcaatcaccttgattctggcagtgcttctgggcggcatggttggcgcggggattgtgttggggcgtaacgctctgcgtaattacaacgcgaagtaa

SEQ ID NO: 79228 - protein, 337 aa, Shigella flexneri 2a str. 301
MRTWKFPSVRVMMRVENNNVSGQNHDPEQIDLIDLLVQLWRGKMTIIISVIVAIALAIGYLAVAKEKWTSTAIITQPDVGQIAGYNNAMNVIYGQAAPKVSDLQETLIGRFSSAFSALAETLDNQEEPEKLTIEPSVKNQQLPLTVSYVGQTAEGAQMKLAQYIQQVDDKVNQELEKDLKDNIALGRKNLQDSLRTQEVVAQEQKDLRIRQIQEALQYANQAQVTKPQVQQTEDVTQDTLFLLGSEALESMIKHEATRPLVFSPNYYQTRQNLLDIEKLKFDDLDIHAYRYVMKPTLPIRRDSPKKAITLILAVLLGGMVGAGIVLGRNALRNYNAK

SEQ ID NO: 79229 - DNA, 1062 bp, Yersinia pseudotuberculosis IP 32953
  CDS (1)..(1062): transl_table=11
atgtcgactgataaaacagggtctaccaataatgaaccgtctgtggataacgaattagatatccgtggtctgtgtcgtactctatggcgtggcaaggtatggattatcggtatggccattattttcgctgcgattgcactgggagtctcctatctggtgaaacagcagtggagtgcgacagccattactgacaaaccaaccgtcaacaatttgggggggtattattcgcaacagcagtttttacgtaatcttgatatccgtctcaatagcgggcttgtcagtgaacagccaggcatctccgatgaagcttacggtgagttcattactcagttagcggcttacgatacccgtcgtgatttctggctacaaagcgattactacaagcaacggcttgaaggagacgctaaggcggatgcggcattactcgatgagctagtgaataacattgttttcacggcgcgtgatgataaaaaaatcccgaatgacagcattaaattgacggcagaaacggccagtgatgcgaataagctactgcgtggttacattgattttgccagtcaacgtgcgtcaagccacctgaatgatgaaattcaaggcgcttgggcagcgcggactcaatcaatgaaagcgcaggttaaacgtcaggaagcggtagctcaagcagtctttgatcgtgaagtggcggcggttaagcaagcattgaaagtggctgggcaacaaggtattacccgtagccagacagatacgccagccgagcaattggcagattccaagatgttcatgctaggtaagccgatgcttgaagcccgtttagaaacattactggctactggcccaagttttgatattgattatgatcaaaaccgtgccatgctggcaacattgaacgttggtccgacactagatgataaattccagacttaccgctacttacgtacaccagaagacccggttacccgtgatagcccacgtcgtgtgttcctgctgattatgtggggcgctatcggggcattagtcggtgcgggtgtggtattggttcgccgctccaataaggcactgtga

SEQ ID NO: 79230 - protein, 353 aa, Yersinia pseudotuberculosis IP 32953
MSTDKTGSTNNEPSVDNELDIRGLCRTLWRGKVWIIGMAIIFAAIALGVSYLVKQQWSATAITDKPTVNNLGGYYSQQQFLRNLDIRLNSGLVSEQPGISDEAYGEFITQLAAYDTRRDFWLQSDYYKQRLEGDAKADAALLDELVNNIVFTARDDKKIPNDSIKLTAETASDANKLLRGYIDFASQRASSHLNDEIQGAWAARTQSMKAQVKRQEAVAQAVFDREVAAVKQALKVAGQQGITRSQTDTPAEQLADSKMFMLGKPMLEARLETLLATGPSFDIDYDQNRAMLATLNVGPTLDDKFQTYRYLRTPEDPVTRDSPRRVFLLIMWGAIGALVGAGVVLVRRSNKAL

SEQ ID NO: 79231 - DNA, 1191 bp, Mannheimia succiniciproducens MBEL55E
  CDS (1)..(1191): transl_table=11
ttgtttgctcaaagctacaataggcgagtttatataatttctttttttatattaaggttatcgctaatgaataatacagcttctatgtcgcctcaaaataataacgatgagattgatcttattgatttaattaaagttttatggcaaaaaaaattagttgtaattctcacttctttcttttttgctctgatcgctgcaatttatgcatttacggctaaagagcaatggacatctaaagcaactaccatagcacccaaagttgccgatatgggttattatttatcattacgcagtgaatatgccaacatcttaaacattaaagaatttacatcaaaagatgttgtggataacctctttaataacttcagagtcgcgcttttttctaataacatgaaacgtgagttttttgctcaatcaaaatggtttcagaattatgcaaatgaaaacgcaaaagatgaagacgcgaagcaaaaacttctgtcggatattttagataaatccttaattgtaactattccggatattaagaaaaatcctaatgcattggggattaacattagttttgctgccgagacgccaaaagaagcacaggaggtgttaactgaatacattaattttattaatgccacagttttaacagaagataaaattgatttcttagcggatattaaaattgcaattgataaccttgaattacaaaaagataaaattcaacgagatacagaaagtgtgcgtcaagttcagttagaaaacttaacaacagcgttagatattgcgaaatcagccggcattaaagaatattcaaaaacttcgggtaatgtaagcattcctcaattcgctttaggtgatgctcaaattccattcactgattctaaactaagtgatggtagctatttgtttatgttaggtgagaagtatttacaggctcaggtagatactttaactaacaacaaagtggtttaccctgtatctttctatacaattgaaaaacaggtttctttattgaattccttagagcaaaaagcaaatacagatagtaaagtaactagctattattatttgacttcaccggattatccaactactcgcgattggccgaaacgtgttctgttgcttttaatcggagctgtgttaggtggagttttaggttgtctttgggttttaggtaaacaaatttttagtcagaaataa

SEQ ID NO: 79232 - protein, 396 aa, Mannheimia succiniciproducens MBEL55E
MFAQSYNRRVYIISFFILRLSLMNNTASMSPQNNNDEIDLIDLIKVLWQKKLVVILTSFFFALIAAIYAFTAKEQWTSKATTIAPKVADMGYYLSLRSEYANILNIKEFTSKDVVDNLFNNFRVALFSNNMKREFFAQSKWFQNYANENAKDEDAKQKLLSDILDKSLIVTIPDIKKNPNALGINISFAAETPKEAQEVLTEYINFINATVLTEDKIDFLADIKIAIDNLELQKDKIQRDTESVRQVQLENLTTALDIAKSAGIKEYSKTSGNVSIPQFALGDAQIPFTDSKLSDGSYLFMLGEKYLQAQVDTLTNNKVVYPVSFYTIEKQVSLLNSLEQKANTDSKVTSYYYLTSPDYPTTRDWPKRVLLLLIGAVLGGVLGCLWVLGKQIFSQK

SEQ ID NO: 79233 - DNA, 1056 bp, Photobacterium sp. SKA34
  CDS (1)..(1056): transl_table=11
atgagtaatattcaagctgtaaataactcatcaaatgatgaaattgatttagctgagttagtcaaaacactttggcaaggtaaggtgacaattgctttatgttcaattgttttcactgtctgtgcaattgtttatgcactgactgctcagcagtggtggacttcagatgctactgtaaccagagggcagtacaaggatacagctaacattcgtagtcaagtgacgaacctatactctgtaattgatgtttcaaaagtcaataatatttttgaaagtggtcgtctactgaacgaattcataacagaatttaatgcattcgataacaaaaaagcatttttagagcaaaattctatcattgaacaatatgcaaaagatgatggtgttaataaggaagataaaggcaaatttattgctttttgggcgaaaaaaattgacgcctctctgaacgatgaaaaaaaacgaccaaatgtttacaagttgagctttgaagctagaagttctgaagcagcacatgatttactcaaagcatattcctcatttataacagatcaagttcgcgatgaagctttctctgttatcgcatcaaaaattgcacacaataagcaaattttgttagcttcaaaagagtctttagagttgaaagcgaaagaaaaacagaaagcgcttttattgaaaactaattatgctctagatattgctcgttctgcgaaggttaataagccgttggcagacgtaaatttaacgggtgtatttcctatacaacttggtactgaagggttaaaagaacaaagtaacatattaaaatcaatgaaagatcttagtttctttgagccaagtttaacccaaattaagattaagttagggctactatcaaaaatttacttagacaaagatacagcaatgaaaagcgtgcgttatctaaaagatattgattacccaatcagtcgtgataaaccaaagcgttcactcattgctgtactaggtttcttacttggtatgatgcttggtgttgcaattgttttattaaagagcgcgtttaataaaaacgctaaataa

SEQ ID NO: 79234 - protein, 351 aa, Photobacterium sp. SKA34
MSNIQAVNNSSNDEIDLAELVKTLWQGKVTIALCSIVFTVCAIVYALTAQQWWTSDATVTRGQYKDTANIRSQVTNLYSVIDVSKVNNIFESGRLLNEFITEFNAFDNKKAFLEQNSIIEQYAKDDGVNKEDKGKFIAFWAKKIDASLNDEKKRPNVYKLSFEARSSEAAHDLLKAYSSFITDQVRDEAFSVIASKIAHNKQILLASKESLELKAKEKQKALLLKTNYALDIARSAKVNKPLADVNLTGVFPIQLGTEGLKEQSNILKSMKDLSFFEPSLTQIKIKLGLLSKIYLDKDTAMKSVRYLKDIDYPISRDKPKRSLIAVLGFLLGMMLGVAIVLLKSAFNKNAK

SEQ ID NO: 79235 - DNA, 1134 bp, Escherichia coli B
  CDS (1)..(1134): transl_table=11
atgtcatcactgaatattaaacagggaagtgacgctcattttcccgattatcctctggcgtcgcccagtaataatgaaattgatttacttaatctaatctcagttttatggcgggccaaaaaaacggtcatggcggtcgtttttgcgtttgcctgcgcaggcttgctgatctctttcatcctgccgcaaaaatggaccagcgcggcggttgtcacgcccccagaacctgttcagtggcaagagttggagaaatcattcactaagcttcgtgtgctggatctggatatcaaaattgatcgtacagaagcatttaacctgtttatcaagaagtttcagtcggttagcttgctggaagagtacctgcgttcatcaccttatgtgatggaccaattaaaagaggcgaaaatcgacgaactggatttgcatcgcgcaattgtcgcattgagcgaaaaaatgaaagcggttgatgacaatgccagtaagaaaaaagatgaaccgtcactgtatacctcctggatgctaagttttaccgcgccaaccagtgaagaggcgcagaccgttttgagcgggtatatcgattatatctctacgttggtggtgaaagagtcgctagaaaacgtccgtaataaactggagatcaaaacccagtttgaaaaagaaaaactggctcaggatcgcattaaaacgaaaaatcaacttgatgcaaacattcagcgcctcaattattcactcgacattgccaacgcggcaggaattaaaaagcccgtttacagtaatggtcaggccgttaaagatgaccccgatttttctatttctctcggtgcagacggtattgaacgcaaactggaaatagaaaaagcggtcactgacgttgcggaactgaacggtgaattacgtaatcggcagtatcttgtcgagcaattaacaaaagcacatgtcaacgatgtgaattttacgccgtttaaatatcagttaagcccgtcattgccagtgaaaaaagacggtccgggtaaggcgattattgtgatcctttccgcgttgatcggcgggatggtggcttgtggtggcgtgctgttgcgctatgcgatggcatccagaaaacaggatgccatgatggcagaccacttagtttaa

SEQ ID NO: 79236 - protein, 377 aa, Escherichia coli B
MSSLNIKQGSDAHFPDYPLASPSNNEIDLLNLISVLWRAKKTVMAVVFAFACAGLLISFILPQKWTSAAVVTPPEPVQWQELEKSFTKLRVLDLDIKIDRTEAFNLFIKKFQSVSLLEEYLRSSPYVMDQLKEAKIDELDLHRAIVALSEKMKAVDDNASKKKDEPSLYTSWMLSFTAPTSEEAQTVLSGYIDYISTLVVKESLENVRNKLEIKTQFEKEKLAQDRIKTKNQLDANIQRLNYSLDIANAAGIKKPVYSNGQAVKDDPDFSISLGADGIERKLEIEKAVTDVAELNGELRNRQYLVEQLTKAHVNDVNFTPFKYQLSPSLPVKKDGPGKAIIVILSALIGGMVACGGVLLRYAMASRKQDAMMADHLV

SEQ ID NO: 79237 - DNA, 981 bp, Escherichia coli B
  CDS (1)..(981): transl_table=11
atgagagtagaaaataataatgtttctgggcaaaaccatgacccggaacagattgatttgattgatttactggtgcagttgtggcgcggcaagatgactatcatcatttctgtcattgtggctattgccctggctattgggtatttggcggtagcgaaggagaaatggacgtcaacagcaattatcactcagcctgacgtggggcaaattgctggctataacaatgccatgaatgttatctatggtcaggctgcacctaaagtgccggatttacaggaggcgttaattggtcgcttcagttctgccttctctgcattagcagaaacgctggataatcagaaagaaccagaaaaacttaccatcgaaccttctgtaaagaaccagcaattaccattgactgtttcttatgttgggcaaactgcagaggacgcacaaatgaaattggcccaatacattcagcaagttgatgataaagtaaatcaagagctagaaaaggatctcaaggacaaccttgctttgggacggaaaaacttgcaggactctttaagaactcaggaagtggttgcgcaggagcagaaagatctgcgtatccgtcagattcaggaagcgttgcagtatgcgaatcaggcgcaggtgacaaaaccgcagattcaacagactggcgaagatatcacacaagatacgttgttccttttggggagcgaagcgctggagtcgatgattaagcatgaggcaactcgtccgttggtgttttcgccagactactatcagactcgtcaaaacctgctggatatcgaaaacttaaaggttgacgatcttgatattcatgcttaccgttatgtgatgaaaccgacgttacctattcgtcgcgatagcccgaaaaaggcaattaccttgattctggcggtgctgctgggcggcatggttggcgcggggattgtgttggggcgtaatgctctgcgtaattacaactcgaagtaa

SEQ ID NO: 79238 - protein, 326 aa, Escherichia coli B
MRVENNNVSGQNHDPEQIDLIDLLVQLWRGKMTIIISVIVAIALAIGYLAVAKEKWTSTAIITQPDVGQIAGYNNAMNVIYGQAAPKVPDLQEALIGRFSSAFSALAETLDNQKEPEKLTIEPSVKNQQLPLTVSYVGQTAEDAQMKLAQYIQQVDDKVNQELEKDLKDNLALGRKNLQDSLRTQEVVAQEQKDLRIRQIQEALQYANQAQVTKPQIQQTGEDITQDTLFLLGSEALESMIKHEATRPLVFSPDYYQTRQNLLDIENLKVDDLDIHAYRYVMKPTLPIRRDSPKKAITLILAVLLGGMVGAGIVLGRNALRNYNSK

SEQ ID NO: 79239 - DNA, 1035 bp, Escherichia coli
  CDS (1)..(1035): transl_table=11
atgacgattatcgctaaattatggcgacttaaaattatttcgtccgttagggtaatgatgagagtagaaaataataatgtttctgggcaaaaccatgacccggaacagattgatttgattgatttactggtgcagttgtggcgcggcaagatgacaattatcatctctgtcattgtcgctattgccctggctatagggtatctggccgttgccaaagaaaagtggacttccacagctatcgttactcaacctgatgtggggcaaatcgctggttataccaacgcgatgaatgtgatttacggtccggctgtaccgaaagtctccgacattcagacttcacttatcggacgttacagcactgcattctcagcattagcggaaacgttggataatcaggaagaacctgaaaaactgaccattgagcctactgttaaaaatcagtccttacctttagcggtgtcttatgttggtgaaacagctgaaggtgcgcagaaacagctggcgcaatatatccagcaagttgacgaccaggtaaacgaagaactggaaaaagacctgaaagacaacatcgcgctgcgtatgaaaaacttgcaggattcgctgaaaacccaggaagtagtcgcgcaggagcagaaagatctgcgtatccgtcagattcaggaagcgttgcagtatgcgaatcaggcgcaggtgacaaagccacaggttcagcagactgaagatgtgacacaagatacgttgttccttttggggagcgaagcgctggagtcgatgattaagcatgaggcgacccgtccgttggtgttctcatcaaactactatcagactcgtcaaaacctgctggatatcgacaatcttgacgttgataaacttgatattcatgcttaccgctatgtaatgaaaccgacgttacctattcgtcgcgatagcccgaaaaaggcaattaccttgattctggcggtgctgctgggcggcatggttggcgcggggattgtgctggggcgtaacgctctgcgtaattacaacgcgaagtaa

SEQ ID NO: 79240 - protein, 344 aa, Escherichia coli
MTIIAKLWRLKIISSVRVMMRVENNNVSGQNHDPEQIDLIDLLVQLWRGKMTIIISVIVAIALAIGYLAVAKEKWTSTAIVTQPDVGQIAGYTNAMNVIYGPAVPKVSDIQTSLIGRYSTAFSALAETLDNQEEPEKLTIEPTVKNQSLPLAVSYVGETAEGAQKQLAQYIQQVDDQVNEELEKDLKDNIALRMKNLQDSLKTQEVVAQEQKDLRIRQIQEALQYANQAQVTKPQVQQTEDVTQDTLFLLGSEALESMIKHEATRPLVFSSNYYQTRQNLLDIDNLDVDKLDIHAYRYVMKPTLPIRRDSPKKAITLILAVLLGGMVGAGIVLGRNALRNYNAK

SEQ ID NO: 79241 - DNA, 1035 bp, Escherichia coli
  CDS (1)..(1035): transl_table=11
atggcgattatcgctaaactatggcgacttaaaattatttcgtccgttagggtaatgatgagagtagaaaataataatgtttctgggcaaaaccatgacccggaacagattgatttgattgatttactggtgcagttgtggcgtggcaagatgacaattatcatctctgtcattgttgctattgccctggctatagggtatctggtcgttgccaaagaaaagtggacttcaacagctatcgttactcaacctgatgtggggcaaatcgctggttataccaacgcgatgaatgtgatttacggtccggctgtaccgaaagtctccgacattcagacttcacttatcggacgttacagcactgcattctcagcattagcggaaacgttggataatcaggaagaacctgaaaaactgaccattgagcctactgttaaaaatcagtccttacctttagcggtgtcttatgttggtgaaacagctgaaggtgcgcagaaacagctggcgcaatatatccagcaagttgacgaccaggtaaacgaagaactggaaaaagacctgaaagacaacatcgcgctgcgtatgaaaaacttgcaggattcgctgaaaacccaggaagtagtcgcgcaggagcagaaagatctgcgtatccgtcagattcaggaagcgttgcagtatgcgaatcaggcgcaggtgacaaagccacaggttcagcagactgaagatgtgacacaagatacgttgttccttttggggagcgaagcgctggagtcgatgattaagcatgaggcgacccgtccgttggtgttctcaccaaactactatcagactcgtcaaaacctgctggatatcgaaagcttaaaagttgatgatcttgatattcatgcttaccgttatgtaatgaaaccgacgttacctattcgtcgcgatagcccgaaaaaggcaatcaccttgattctggcagtgctgctaggcggtatggtgggcgcggggattgtgttggggcgtaacgctctgcgtaattacaacgcgaagtaa

SEQ ID NO: 79242 - protein, 344 aa, Escherichia coli
MAIIAKLWRLKIISSVRVMMRVENNNVSGQNHDPEQIDLIDLLVQLWRGKMTIIISVIVAIALAIGYLVVAKEKWTSTAIVTQPDVGQIAGYTNAMNVIYGPAVPKVSDIQTSLIGRYSTAFSALAETLDNQEEPEKLTIEPTVKNQSLPLAVSYVGETAEGAQKQLAQYIQQVDDQVNEELEKDLKDNIALRMKNLQDSLKTQEVVAQEQKDLRIRQIQEALQYANQAQVTKPQVQQTEDVTQDTLFLLGSEALESMIKHEATRPLVFSPNYYQTRQNLLDIESLKVDDLDIHAYRYVMKPTLPIRRDSPKKAITLILAVLLGGMVGAGIVLGRNALRNYNAK

SEQ ID NO: 79243 - DNA, 1014 bp, Escherichia coli
  CDS (1)..(1014): transl_table=11
atgcggacttggaaatttccgtcagttagggtaatgatgagagtagaaaataataatgtttctgggcaaaaccatgacccggaacagattgatttgattgatttactagtgcagttgtggcgtggcaagatgacaatcatcatttccgtcattgtggctattgccctggctattggatatttggcagtagcgaaggagaaatggacgtcaacagcaattatcactcagcccgacgtggggcaaattgctggctataacaatgctatgaatgttatctatggtcaggctgcaccgaaagtatcggatttgcaggagacgttaattggtcgcttcagttatgccttctctgcattagcagaaacgctggataatcaggaagagccagagaaacttaccatcgaaccttctgttaagaaccagcaattaccattgactgtttcttatgttgggcaaacagcagagggcgcacaaatgaagttggcccaatacattcagcaagttgatgaaaaagtgaatcaagagctagaaaaggatctcaaagacaacattgctctgggacggaaaaacttgcaggactctttaagaacgcaggaagtagtcgcgcaggagcagaaagatctgcgtatccgtcagattcaggaagcgttgcagtatgcgaatcaggcgcaggtgacaaaaccacaggttcagcagactgaagatgtgacgcaagatacgttgttccttttggggagcgaagctctggagtcgatgattaagcatgaggcgactcgtccgttagtgttctcaccaaactactatcagacacgtcaaaacctgctggatatcgaaaacttaaaggttgatgatcttgatattcatgcttaccgctatgtaatgaaaccgacgttacctattcgtcgcgatagtccgaaaaaggcaattacattgattctggcagtgctgctgggcggcatggttggcgcggggattgtgttgaggcgtaacgctctgcgtaattacaacgcgaagtaa

SEQ ID NO: 79244 - protein, 337 aa, Escherichia coli
MRTWKFPSVRVMMRVENNNVSGQNHDPEQIDLIDLLVQLWRGKMTIIISVIVAIALAIGYLAVAKEKWTSTAIITQPDVGQIAGYNNAMNVIYGQAAPKVSDLQETLIGRFSYAFSALAETLDNQEEPEKLTIEPSVKNQQLPLTVSYVGQTAEGAQMKLAQYIQQVDEKVNQELEKDLKDNIALGRKNLQDSLRTQEVVAQEQKDLRIRQIQEALQYANQAQVTKPQVQQTEDVTQDTLFLLGSEALESMIKHEATRPLVFSPNYYQTRQNLLDIENLKVDDLDIHAYRYVMKPTLPIRRDSPKKAITLILAVLLGGMVGAGIVLRRNALRNYNAK

SEQ ID NO: 79245 - DNA, 1131 bp, Vibrio cholerae
  CDS (1)..(1131): transl_table=11
gtgagttcattatccaatcccccgcacgttcagcctccgcaatatccaaattataccaaccatgatgatgaaattgatttaaaagagctgttttctgccttgtggaaagggaaacggctaatcattataaccacattgcttttcagtgtggccgctataggctatgcattaaccgcccaagagtggtggagtgccaaagcaactgttagccaaccgcaattgcaaggtattgctagctaccagcaggcggtaaagcgttatcaaccgttgtttgatgtgtaccaagaagacggcagcattattgttagtgagaccttagatttattaattgatcctgaggttatttttaaacgctttattcaagagtttaatgctaacggtactaaacgccgctttatgcaagctaaccctacttttttaactctgcaaaagccgatgctggagcaaaacaatgatccggaagttatgcagaaactatacgaagagtggtttgagcgcattaaagcttcagcggtaggtaaaaacaacgacacatttaatttaagtttccagtcggtagataaagccagcagcttaaccttgcttaatgactacattcattttgttaaccaaacccttaaccgacagcttaatgctaatctaattagcaccttagctgctaaatatggtgaactgatacagcaagagaaaaacctacagcaacaagcgcacttacgtttacaagttgagttagagcgtacgcagtatgctttaaatattgctgaagcggctgatattaagcaaccagtacaaaatttaggtgaacaagagattttcgcgattaacattggtagccgagccttaaaagctaaggtagatgccttaaaatcagtcaaagatttgagtgtttttgaaccaagactggccattttacaaagtaagttaagccaatttgatttagaaacgttgagtgctgaagcgaagtggtcggtagacggtttttactatttagaccaaccggaactgccactcacccgagataagcctaagcgtgctttaattgtggcgcttggtgtattacttggtggaatgttaggtgtagtaacagtgctagtaagatttgtgtttagaagcgaagaacaaaaggcttag

SEQ ID NO: 79246 - protein, 376 aa, Vibrio cholerae
MSSLSNPPHVQPPQYPNYTNHDDEIDLKELFSALWKGKRLIIITTLLFSVAAIGYALTAQEWWSAKATVSQPQLQGIASYQQAVKRYQPLFDVYQEDGSIIVSETLDLLIDPEVIFKRFIQEFNANGTKRRFMQANPTFLTLQKPMLEQNNDPEVMQKLYEEWFERIKASAVGKNNDTFNLSFQSVDKASSLTLLNDYIHFVNQTLNRQLNANLISTLAAKYGELIQQEKNLQQQAHLRLQVELERTQYALNIAEAADIKQPVQNLGEQEIFAINIGSRALKAKVDALKSVKDLSVFEPRLAILQSKLSQFDLETLSAEAKWSVDGFYYLDQPELPLTRDKPKRALIVALGVLLGGMLGVVTVLVRFVFRSEEQKA

SEQ ID NO: 79247 - DNA, 1089 bp, Aeromonas hydrophila
  CDS (1)..(1089): transl_table=11
atgaatatgaacaaacaacaaatagacaatttggataataaattgccacaaggttggcaggcaacttcaggtaatgagattgacttgtatgaactgttttcggtgctgtggcgtcagaaaatacaaatcctgatgatcacagtcgtgtttgctattgcgggtatcggttatgccctgctggcgccacaggtttgggttagccagtctcagataaaaccaccgtcattgcaggaagttgaatcactcgagcttagagttaaccagctgattaacgctcagataccagccactattttcgactcgtttaacaaagctgctctttatggcgactttgtgagcaacttcaacagtttcaataacaaacgacagtttctgattgaaaagggttatctggatatggatgcagaggctgccgggataacggatgataaagggaagcgtgctctgctgaggaaaatggtcaatgggatcagcgcggtggctttggatgcaccgagtgacaacattaccctctcttttggggcggccactgcaactgaagctcagcagcggctggaacaatacatagctttcatccagcaacaggagattgtgtcgaagagcaaggaactggagacaatctggcaaaaccggatcaagatcctgctgtcccagtatgacagcatcaaagcagatactcttacccagctgaaggatgatgtttcgcgtacagaatacagcctgcgtatcagccgtgcggcgggtatcgagaccccggtcgagaacctcaatgttcgtgatggatttaatatcgagtggggggctaaagcgcttgctgagaagctcaaggtattaaaagaattgaaaaatcttgagcttctcaatccagccttgagcgatcttcgcttacagctgagtagtctaagggctatcaaacttgagcaacaatcgttccagtctttttcctatttggcttccccaagcgagcctttgagccgcgacaaacccaagcgtcctctggtagtagtgctggccaccttgcttggcggtatgctggggatcggcatcgtactggctcggcatgcttttcgccggccagaacaggtatga

SEQ ID NO: 79248 - protein, 362 aa, Aeromonas hydrophila
MNMNKQQIDNLDNKLPQGWQATSGNEIDLYELFSVLWRQKIQILMITVVFAIAGIGYALLAPQVWVSQSQIKPPSLQEVESLELRVNQLINAQIPATIFDSFNKAALYGDFVSNFNSFNNKRQFLIEKGYLDMDAEAAGITDDKGKRALLRKMVNGISAVALDAPSDNITLSFGAATATEAQQRLEQYIAFIQQQEIVSKSKELETIWQNRIKILLSQYDSIKADTLTQLKDDVSRTEYSLRISRAAGIETPVENLNVRDGFNIEWGAKALAEKLKVLKELKNLELLNPALSDLRLQLSSLRAIKLEQQSFQSFSYLASPSEPLSRDKPKRPLVVVLATLLGGMLGIGIVLARHAFRRPEQV

SEQ ID NO: 79249 - DNA, 1083 bp, Aeromonas hydrophila
  CDS (1)..(1083): transl_table=11
atgaacaaacaacaaatagataatttggataataaattaccacaaggttggcaggcaacttcaggtaatgagattgacttgtatgaactgttttcggtgctgtggcgtcagaaaatacaaatcctgatgatcaccgtcgtgtttgctgttgcgggtatcggttatgccctgctggcgccacaggtttgggttagccagtctcagataaaaccaccgtcattgcaggaagttgaatcactcgagcttagagttaaccagctgattaacgctcagataccagccactattttcgactcgtttaacaaagctgctctttatggcgactttgtgagcaacttcaacagtttcaataacaaacgacagtttctgattgaaaagggttatctggatatggatgcagaggctgccgggataacggatgataaagggaagcgtgctctgctgaggaaaatggtcattgggatcagcgcggtggctttggatgcaccgagtgacaacattaccctctcttttggggcggccactgcaactgaagctcagcagcggctggaacaatacatagctttcatccagcaacaggagattgtgtcgaagagcaaggaactggagacaatctggcaaaaccggatcaagatcctgctgtcccagtatgacagcatcaaagcagatactcttacccagctgaaggatgatgtttcgcgtacagaatacagcctgcgtatcagccgtgcggcaggtatcgagaccccggtcgagaacctcaatgttcgtgatggatttaatatcgagtggggggctaaagcgcttgctgagaagctcaaggtattaaaagaattgaaaaatcttgagcttctcaatccagccttgagcgatcttcgcttacagctgagtagtctaagggctatcaaacttgagcatcaatcgttccagtctttttcctatttggcttccccaaacgagcctttgagccgtgacaaacccaagcgtcctctggtagtcgtgctggccaccttgcttggcggtatgctggggatcggcatcgtactggctcggcatgcttttcgccggccagaacaggtatga

SEQ ID NO: 79250 - protein, 360 aa, Aeromonas hydrophila
MNKQQIDNLDNKLPQGWQATSGNEIDLYELFSVLWRQKIQILMITVVFAVAGIGYALLAPQVWVSQSQIKPPSLQEVESLELRVNQLINAQIPATIFDSFNKAALYGDFVSNFNSFNNKRQFLIEKGYLDMDAEAAGITDDKGKRALLRKMVIGISAVALDAPSDNITLSFGAATATEAQQRLEQYIAFIQQQEIVSKSKELETIWQNRIKILLSQYDSIKADTLTQLKDDVSRTEYSLRISRAAGIETPVENLNVRDGFNIEWGAKALAEKLKVLKELKNLELLNPALSDLRLQLSSLRAIKLEHQSFQSFSYLASPNEPLSRDKPKRPLVVVLATLLGGMLGIGIVLARHAFRRPEQV

SEQ ID NO: 79251 - DNA, 1038 bp, Escherichia coli
  CDS (1)..(1038): transl_table=11
atggcgattatcgctaaactatggcgacttaaaattatttcgtccgttagggtaatgatgagagtagaaaataataatgtttctgggcaaaaccatgactcggaacagattgatttgattgatttactagtgcagttgtggcgtggcaagatgacaatcatcatttccgtcattgtggctattgccctggctattggatatttggcagtagcgaaggagaaatggacgtcaacagcaattatcactcagcccgacgtgggacaaattgctggctataacaatgccgtgaatgttatctatggtcaggctgcaccgaaagtatcggatttacaggagacgttaattggtcgcttcagttctgccttctctgcattagcagaaacgctggataatcaggaagaaccagaaaaacttaccatcgaaccttctgttaagaaccagcaattaccattgactgtttcttatgttgggcaaactgcagagggagcacaaatgaagttggcccaatacattcagcaagttgatgataaagtgaatcaagagctagaaaaggatctcaaagacatcattgctctgggacggaaaaacttgcaggactctttaagaacgcaggaagtggttgcgcaggagcagaaagatctgcgtatccgtcagattcaggaagcgttgcagtatgcgaatcaggcgcaggtgacaaaaccgcaaattcaacagactggcgaagatatcacgcaagatacgttgttccttttggggagcgaagcgctggagtcgatgattaagcatgaggcgacccgtccgttggtgttctcaccaaactactatcagactcgtcaaaacctgctggatatcgaaagcttaaaagttgatgatcttgatattcatgcttaccgttatgtaatgaaaccgacgttacctattcgtcgcgatagcccgaaaaaggcaatcaccttgattctggcggtgctgctgggcggcatggttggcgcggggattgtgttggggcgtaatgctctgcgtaattacaacgcgaagtaa

SEQ ID NO: 79252 - protein, 345 aa, Escherichia coli
MAIIAKLWRLKIISSVRVMMRVENNNVSGQNHDSEQIDLIDLLVQLWRGKMTIIISVIVAIALAIGYLAVAKEKWTSTAIITQPDVGQIAGYNNAVNVIYGQAAPKVSDLQETLIGRFSSAFSALAETLDNQEEPEKLTIEPSVKNQQLPLTVSYVGQTAEGAQMKLAQYIQQVDDKVNQELEKDLKDIIALGRKNLQDSLRTQEVVAQEQKDLRIRQIQEALQYANQAQVTKPQIQQTGEDITQDTLFLLGSEALESMIKHEATRPLVFSPNYYQTRQNLLDIESLKVDDLDIHAYRYVMKPTLPIRRDSPKKAITLILAVLLGGMVGAGIVLGRNALRNYNAK

SEQ ID NO: 79253 - DNA, 1107 bp, Shigella sonnei
  CDS (1)..(1107): transl_table=11
atgtcaaaagcatctgaaccacaacagaccccttatctgatcccgcaaggggtctatccaacttatatgccaaaagcagaggatgaaatcgatcttttcgagcttttaggcaccttgtggaagaaaaaatgggttattttatgtgtcacgttgctgactacggggttagcagcagtgtatgcctttaccgcaaaagagcagtggacggctaaaacctatattcaagcaccacgtattgctgaattaggcagctatcttaaatttcaccaagcgtatgcccgaatattaaatcaaccgttagatacgaatgcgttggctaatggattgttttccgatttgattttgattgctgaatcgccagacaccaaagttaaatttctagagagtactgagtattataaaaaggaaacaaataatttatctactgaacaagataagaaaatttggttagctgagcaagcgaataaaggtcttgtgattacgccaccaaaggaaaagggaaatacaagttactacataatacaagcatcggcagactcagcgcaagaggcatataaactactgcagggatatctaaagaatgttaataatcaagctgtaacattaagtcttgatgagtttggtcaaaatgttaatactcttttggttaatctaaataaagaaattattgacatagatttccagagaaaatcagaaaagcttgatcaaatagctcatattcagcgagatttaacaactgcggaacaagccggaatcattgattatcgctctagcaaaggcggcttcgataatgcgcaaagtagctataagttcttgctcggcgaaaaactgttatcagcagagctaaaagcaactaaagatgcgccaattatttacccatttagatattacgaagtgaaacgtcaaattgatgagttagaaggaatgttacgcgataacattcaggcgcaagcatatcgatatcaaatgaagccatctgagccagttataaaagacaaacccaacaaagcattaattttgattcttggtgcattaccaggggcaatgtttgctatagttggtacattagtttatgcgacattaaaagataaaaccaagttagattaa

SEQ ID NO: 79254 - protein, 368 aa, Shigella sonnei
MSKASEPQQTPYLIPQGVYPTYMPKAEDEIDLFELLGTLWKKKWVILCVTLLTTGLAAVYAFTAKEQWTAKTYIQAPRIAELGSYLKFHQAYARILNQPLDTNALANGLFSDLILIAESPDTKVKFLESTEYYKKETNNLSTEQDKKIWLAEQANKGLVITPPKEKGNTSYYIIQASADSAQEAYKLLQGYLKNVNNQAVTLSLDEFGQNVNTLLVNLNKEIIDIDFQRKSEKLDQIAHIQRDLTTAEQAGIIDYRSSKGGFDNAQSSYKFLLGEKLLSAELKATKDAPIIYPFRYYEVKRQIDELEGMLRDNIQAQAYRYQMKPSEPVIKDKPNKALILILGALPGAMFAIVGTLVYATLKDKTKLD

SEQ ID NO: 79255 - DNA, 1110 bp, Actinobacillus actinomycetemcomitans
  CDS (1)..(1110): transl_table=11
atgacagaaaaagtattagaaaatgatgaaattgatttagttgaactaataaaagtattatggaataagagattatggattattctgttttccctattttttaccacgattgctggaatttatgtttttacagcaaaagaacaatggacctctaaagcggagattatcgcgccgagaataacagagcttggggattattttctcgttaaaaaagaatatgctcgaattctcggtagcgagtttgacgccagtatgacagcaaataacttatttggacaatttaatctactctcagagtcattagatgaaagaaaaaaattctttgagaaatctgatttttataaaaaagaaagtgaagggaagtctgagagagaaaagttgcaaattctttttgatttaatgacaaaaaatattgcgattaagaaaccggatactaaaaaatatcctgacttaattggtaatcaaattagtttttatgcagaaactcctatcgaagcacaaaatgtgttatctaagtttatttccacagtaaatatatcggcatatcaaattgaattggataaatttttgactgattttaatgagataatagctgatttaaattatgaaaaaattaagttcgaacgtgatttaagaattcataaatctgttcaattgaaaaatttagaaagtgccttaaatatcgccaaagaggctggtattaaagaatattcaaaatcatttagcatcgcggatcctcagctagtcttacaggctattgcagtttctgaagctaaagttcctctttctgattccaagctcagcgatagtacatatctttttatgctaggggaaacatatttaaaagcacaaattgatgtattaaaaaataataatataatttatccaccaagatactatcaggtgtcttctcagctttctgaattagagcctttactgattaaagcaaaacaagttaaggcaaatgcatttagttatcaggcctcaccggattatccggtggttagggataaaccgaagaagttattgattcttagcattgggtttatattaggtttgattctaggtagtatatatattttatttagaaaattagtgtctaataaataa

SEQ ID NO: 79256 - protein, 369 aa, Actinobacillus actinomycetemcomitans
MTEKVLENDEIDLVELIKVLWNKRLWIILFSLFFTTIAGIYVFTAKEQWTSKAEIIAPRITELGDYFLVKKEYARILGSEFDASMTANNLFGQFNLLSESLDERKKFFEKSDFYKKESEGKSEREKLQILFDLMTKNIAIKKPDTKKYPDLIGNQISFYAETPIEAQNVLSKFISTVNISAYQIELDKFLTDFNEIIADLNYEKIKFERDLRIHKSVQLKNLESALNIAKEAGIKEYSKSFSIADPQLVLQAIAVSEAKVPLSDSKLSDSTYLFMLGETYLKAQIDVLKNNNIIYPPRYYQVSSQLSELEPLLIKAKQVKANAFSYQASPDYPVVRDKPKKLLILSIGFILGLILGSIYILFRKLVSNK

SEQ ID NO: 79257 - DNA, 1098 bp, Vibrio anguillarum
  CDS (1)..(1098): transl_table=11
gtgccttcttactatcagcaaagcaataatgatgaaattgacctgcgtgagttgtttagtgtgctatggcaagggaaattgaccatagtgctgtgcactgttttgtttgctgtgatggcggtggtatatgcattgacggcgcagcagtggtggagcgctaaagcaaccgttacccagcctgaattaagccaagttgtaaccttcctgcaacaggtgaagcagtatcagccattgtttgatctctaccaagaagatggcaccattattgtgagtaaagagcttgatggcttaattaacccagccactattttccagcgttttgtgcgtgcatttaatactaatgacaataaaaagcgctttatgcaaagtaaccctacttttttagccattgagcagcaacagcttaaagtgaatgaaaataacgaaactgatgatgtggcgcgcttttatcaaagttggtatggcaaaattacggctcaagaagtgggtaagacacaagcgggtgatttttatctcagctttcagtcaattgataaagccagcagtttagtgttgcttaacgcctatatcgactttattaaccaacaactgaaccagcagctaaccaatgaccttaccagtaaattgacggtaaaacataaccaacttagccagcaatacagtagtttgcagcagcaaacccaattgcgcctgcaggtggaattggcgcgagtgcagaatgcattggcaattgcaaaagcggccaatattaatgagcctgtacaaaatctgaatgaagagaagctgtttgccattagtattggtagtaaagcattgcaagccaaagtcgatgcattaaaaagtataacgaatttaagtgtgtttgaaccacgcttagcgctgctgcaagcccaagttcagcaggttgagctattaggtaaagtaaaaccagcgcaagtgcaaggttacgcttacttagagcaaccagaagcgccgattagccgtgatgagcccaaacgagcattgatagcggtgcttggaaccttactgggcggcatgcttggcgttgcgattgtgctggtgaggtttgcgtttagaaaagaagaagaaaaagcttag

SEQ ID NO: 79258 - protein, 365 aa, Vibrio anguillarum
MPSYYQQSNNDEIDLRELFSVLWQGKLTIVLCTVLFAVMAVVYALTAQQWWSAKATVTQPELSQVVTFLQQVKQYQPLFDLYQEDGTIIVSKELDGLINPATIFQRFVRAFNTNDNKKRFMQSNPTFLAIEQQQLKVNENNETDDVARFYQSWYGKITAQEVGKTQAGDFYLSFQSIDKASSLVLLNAYIDFINQQLNQQLTNDLTSKLTVKHNQLSQQYSSLQQQTQLRLQVELARVQNALAIAKAANINEPVQNLNEEKLFAISIGSKALQAKVDALKSITNLSVFEPRLALLQAQVQQVELLGKVKPAQVQGYAYLEQPEAPISRDEPKRALIAVLGTLLGGMLGVAIVLVRFAFRKEEEKA

SEQ ID NO: 79259 - DNA, 1134 bp, Escherichia coli
  CDS (1)..(1134): transl_table=11
atgtcatcactgaatattaaacagggaagtgacgctcattttcccgattatcctctggcgtcgcccagtaataatgaaattgatttacttaatctaatctcagttttatggcgggccaaaaaaacggtcatggcggtcgtttttgcgtttgcctgcgcaggcttgctgatctctttcatcctgccgcaaaaatggaccagcgcggcggttgtcacgcctccagaacctgttcagtggcaagagttggagaaatcattcactaagcttcgtgtgctggatctggatatcaaaattgatcgtacagaagcatttaacctgtttatcaagaagtttcagtcggttagcttgctggaagagtacctgcgttcatcaccttatgtgatggaccaattaaaagaggcgaaaatcgacgaactggatttgcatcgcgcaattgtcgcattgagcgaaaaaatgaaagcggttgatgacaatgccagtaagaaaaaagatgaaccgtcactgtatacctcctggacgctaagttttaccgcgccaaccagtgaagaggcgcagaccgttttgagcgggtatatcgattatatctctacgttggtggtgaaagagtcgctagaaaacgtccgtaataaactggagatcaaaacccagtttgaaaaagaaaaactggctcaggatcgcattaaaacgaaaaatcaacttgatgcaaacattcagcgcctcaattattcactcgacattgccaacgcggcaggaattaaaaagcccgtttacagtaatggtcaggccgttaaagatgaccccgatttttctatttctctcggtgcagacggtattgaacgcaaactggaaatagaaaaagcggtcactgacgttgcggaactgaacggtgaattacgtaatcggcagtatcttgtcgagcaattaacaaaagcacatgtcaacgatgtgaattttacgccgtttaaatatcagttaagcccgtcattgccagtgaaaaaagacggtccgggtaaggcgattattgtgatcctttccgcgttgatcggcgggatggtggcttgtggtggcgtgctgttgcgctatgcgatggcatccagaaaacaggatgccatgatggcagaccacttagtttaa

SEQ ID NO: 79260 - protein, 377 aa, Escherichia coli
MSSLNIKQGSDAHFPDYPLASPSNNEIDLLNLISVLWRAKKTVMAVVFAFACAGLLISFILPQKWTSAAVVTPPEPVQWQELEKSFTKLRVLDLDIKIDRTEAFNLFIKKFQSVSLLEEYLRSSPYVMDQLKEAKIDELDLHRAIVALSEKMKAVDDNASKKKDEPSLYTSWTLSFTAPTSEEAQTVLSGYIDYISTLVVKESLENVRNKLEIKTQFEKEKLAQDRIKTKNQLDANIQRLNYSLDIANAAGIKKPVYSNGQAVKDDPDFSISLGADGIERKLEIEKAVTDVAELNGELRNRQYLVEQLTKAHVNDVNFTPFKYQLSPSLPVKKDGPGKAIIVILSALIGGMVACGGVLLRYAMASRKQDAMMADHLV

SEQ ID NO: 79261 - DNA, 1330 bp, Escherichia coli
  CDS (137)..(1114): transl_table=11
atcagggctatttacgccctgattgtcttttgttacctccgcaataattcattatttttatcacttatcctatagcattcacggggattatcgctaaactatgcggacttggaaatttccgtcagttagggtaatgatgagagtagaaaataataatgtttctgggcaaaaccatgacccggaacagattgatttgattgatttactagtgcagttgtggcgtggcaagatgacaattatcatttccgtcattgtggctattgccctggctattggttatttggcagtagcgaaggagaaatggacgtcaacagcaattatcactcagcccgacgtggggcaaattgctggctataacaatgccatgaatgttatctatggtcaggctgcaccgaaagtatcggatttgcaggagacgttaattggtcgcttcagttctgccttctctgcattagcagaaacgctggataatcaggaagagccagaaaaacttaccatcgaaccttctgttaagaaccagcaattaccattgactgtttcttatgttgggcaaactgcagagggcgcacaaatgaagttggcccaatacattcagcaagttgatgataaagtgaatcaagagctagaaaaggatctcaaggacaacattgctctgggacggaaaaacttgcaggactctttaagaacccaggaagtggtcgcgcaggagcagaaagatctgcgtatccgtcagattcaggaagcgttgcagtatgcgaatcaggcgcaggtgacaaagccgcagattcaacagacacaggacgtaacccaggatactatgtttcttttggggagcgaagcgctggagtcgatgattaagcacgaagcgacccgtccgttggtgttctcatcaaactactatcagactcgtcaaaacctgctggatattgacaatcttgacgttgataaacttgatattcatgcttaccgctatgtaatgaaaccgacgttacctattcgtcgcgatagcccgaagaaagcaattaccttgattctggctgtgctgctgggcggcatggttggcgcggggattgtgcttgggcgtaacgcgctgcgtaattacaacgcgaaataatattattgtgcatttaagagaaacgggcagggtggtgacaccatgcccgttttttttgccggatgcgatgctggcgcatcttatccggcctacgtgtgttgagataatgtgtaggcacgataagcttgcgcatcgggcaatggctccgggtgtgacaacaacatcacacctgctcagcacgcaactcactgatgccgtttacgcaggttctcaatt

SEQ ID NO: 79262 - protein, 325 aa, Escherichia coli
MRVENNNVSGQNHDPEQIDLIDLLVQLWRGKMTIIISVIVAIALAIGYLAVAKEKWTSTAIITQPDVGQIAGYNNAMNVIYGQAAPKVSDLQETLIGRFSSAFSALAETLDNQEEPEKLTIEPSVKNQQLPLTVSYVGQTAEGAQMKLAQYIQQVDDKVNQELEKDLKDNIALGRKNLQDSLRTQEVVAQEQKDLRIRQIQEALQYANQAQVTKPQIQQTQDVTQDTMFLLGSEALESMIKHEATRPLVFSSNYYQTRQNLLDIDNLDVDKLDIHAYRYVMKPTLPIRRDSPKKAITLILAVLLGGMVGAGIVLGRNALRNYNAK

SEQ ID NO: 79263 - DNA, 984 bp, Escherichia coli O111
  CDS (1)..(984): transl_table=11
atgtctataagtgataacaacatgtccggtcgcagtcacgatccggaacagattgatttgattgatttactcatgcagttatggcgtgggaaggtaacgattattatctgcattgttgtggcaatagcgttggcagtaggctatttggcggtggctaaggagaaatggacctcgatagctatcgttacacaacccgatgctggccagcttgccagctacaataatgctatggatgtactgtttggggctaacgcacccgaaatgacagatgttcaggcgggttttatcgggcgttttagttcggcattttctgcactggctgaaacgttggataaccagcaagaaccggaaaaactttcaattgatgctgctgttaaaggtcagactctgccgttaaaggtttcttataccggcaaaacctctgaagaggcacaaaaaacgctggctcagtatattcaacaagttgatgaaggtgttgctaaagagctcaatgctgacttgtcaatgagtatggaaacaagactggctgatttgcaaaaatctcttgcagcgcaggaggcagtggcgaaagagcagaaaaccctgcgtattgcgcagatgactcaagcacttaaggttgcgcaacagtctaatattaagctaccgcaggtacagcaggttgatcaagtatctcaggattctatgtttatgctgggtagtgaggctctttcctcaatggttgagaacgaagctacacgtcctttgacgttttctgaccagtactaccaaacgcgtcagaatctgttggaggtgcaggcattagaagtggcacctgacagcgtgcacgcctaccgttatgtaatgaaaccaacgttaccgattcgtcgtgacagcccgaaaaaagcgattaccctcgtgctggcagttctgatcggtgggatgattggtgccggtgtggtgcttgggcgaaatgctctgcgcggttacaaagccaaagctgagtaa

SEQ ID NO: 79264 - protein, 327 aa, Escherichia coli O111
MSISDNNMSGRSHDPEQIDLIDLLMQLWRGKVTIIICIVVAIALAVGYLAVAKEKWTSIAIVTQPDAGQLASYNNAMDVLFGANAPEMTDVQAGFIGRFSSAFSALAETLDNQQEPEKLSIDAAVKGQTLPLKVSYTGKTSEEAQKTLAQYIQQVDEGVAKELNADLSMSMETRLADLQKSLAAQEAVAKEQKTLRIAQMTQALKVAQQSNIKLPQVQQVDQVSQDSMFMLGSEALSSMVENEATRPLTFSDQYYQTRQNLLEVQALEVAPDSVHAYRYVMKPTLPIRRDSPKKAITLVLAVLIGGMIGAGVVLGRNALRGYKAKAE

SEQ ID NO: 79265 - DNA, 981 bp, Escherichia coli
  CDS (1)..(981): transl_table=11
atgagagtagaaaataataatgtttctgggcaaaaccatgacccggaacagattgatttgattgatttactagtgcagttgtggcgtggcaagatgacaatcatcatttccgtcattgtggctattgccctggctattggatatttggcagtagcgaaggagaaatggacgtcaacagcaattatcactcagcccgacgtggggcaaattgctggctataacaatgccatgaatgttatctatggtcaggctgcaccgaaagtatcggatttgcaggagacgttaattggtcgcttcagttctgccttctctgcattagcagaaacgctggataatcaggaagaacgagaaaaacttaccatcgaaccttctgttaagaaccagcaattaccgttgactgtttcttatgttgggcaaactgcagagggcgcacaaatgaagttggcccaatacattcagcaagttgacgataaagtgaatcaagagctagaaaaggatctcaaagacaacattgctctgggacggaaaaacttgcaggactctttaagaacgcaggaagtagtcgcgcaggagcagaaagatctgcgtatccgtcagattcaggaagcgttgcagtatgcgaatcaggcgcaggtgacaaaaccgcagattcaacagactggcgaagatatcacacaagatacgttgttccttttggggagcgaagcgctggagtcgatgattaagcatgaggcgacccgtccgttggtgttctcgccaaactactatcagactcgtcaaaacctgctggatatcgaaagcttaaaagttgatgatcttgatattcatgcttaccgttatgtgatgaaaccgatgttacctattcgtcgtgatagcccgaaaaaggcaattaccttgattctggcggtgctgctgggtggcatggttggcgcggggattgtgctggggcgtaatgctctacgcaattacaacgcgaagtaa

SEQ ID NO: 79266 - protein, 326 aa, Escherichia coli
MRVENNNVSGQNHDPEQIDLIDLLVQLWRGKMTIIISVIVAIALAIGYLAVAKEKWTSTAIITQPDVGQIAGYNNAMNVIYGQAAPKVSDLQETLIGRFSSAFSALAETLDNQEEREKLTIEPSVKNQQLPLTVSYVGQTAEGAQMKLAQYIQQVDDKVNQELEKDLKDNIALGRKNLQDSLRTQEVVAQEQKDLRIRQIQEALQYANQAQVTKPQIQQTGEDITQDTLFLLGSEALESMIKHEATRPLVFSPNYYQTRQNLLDIESLKVDDLDIHAYRYVMKPMLPIRRDSPKKAITLILAVLLGGMVGAGIVLGRNALRNYNAK

SEQ ID NO: 79267 - DNA, 984 bp, Salmonella typhimurium
  CDS (1)..(984): transl_table=11
atgacagtggatagtaatacgtcttccgggcgtgggaacgatccggaacagattgatttgattgagttattgctacagttatggcgtgggaagatgaccattattgtagccgttattatcgccattttgctggctgtaggctacctgatgatagccaaagaaaaatggacatccacggcgattattacccaacctgatgccgcgcaggttgccacctataccaacgcgctcaacgtcttgtatggtgggaatgcccccaaaatctctgaagtgcaggcgaattttataagccgctttagctctgcgttttccgcattatcggaagtgctggataatcagaaagagcgggaaaagcttaccattgaacagtcggtaaaagggcaggcgctgccactctcggtttcttatgtgagtactaccgctgaaggggcgcagcgtcggctggcggaatatatccaacaggtggatgaagaggtcgctaaggaactggaagttgacctgaaagataacatcacgctgcaaaccaaaacgttgcaggagtcccttgagacgcaggaagttgtggcgcaggagcaaaaagatctgcgtattaagcaaatcgaagaagcgttgcgctatgcggatgaggccaaaatcacgcagccgcagattcagcaaacccaggatgttacccaggacacgatgttcctgttggggagcgatgcgctaaaatcgatgatacagaacgaagcgacgcgtccactggtcttttctccggcctattaccagacgaagcagacactgctggacattaaaaatctgaaagtgactgccgatacggtgcacgtctatcgttatgtgatgaagccgacgctgccggtccgtcgcgatagcccgaaaacagccattacccttgtgctggctgtattgctgggtgggatgatcggtgccgggattgtgctgggacgcaatgcgctacgtagctataagccaaaagccttgtaa

SEQ ID NO: 79268 - protein, 327 aa, Salmonella typhimurium
MTVDSNTSSGRGNDPEQIDLIELLLQLWRGKMTIIVAVIIAILLAVGYLMIAKEKWTSTAIITQPDAAQVATYTNALNVLYGGNAPKISEVQANFISRFSSAFSALSEVLDNQKEREKLTIEQSVKGQALPLSVSYVSTTAEGAQRRLAEYIQQVDEEVAKELEVDLKDNITLQTKTLQESLETQEVVAQEQKDLRIKQIEEALRYADEAKITQPQIQQTQDVTQDTMFLLGSDALKSMIQNEATRPLVFSPAYYQTKQTLLDIKNLKVTADTVHVYRYVMKPTLPVRRDSPKTAITLVLAVLLGGMIGAGIVLGRNALRSYKPKAL

SEQ ID NO: 79269 - DNA, 978 bp, Shigella dysenteriae
  CDS (1)..(978): transl_table=11
atgagagtagaaaataataatgtttctgggcaaaaccatgacccggaacagattgatttgattgatttactggtgcagttgtggcgcggcaagatgactatcatcatttctgtcattgtggctattgccctggctatagggtatctggccgttgccaaagaaaagtggacttccactgctatcgttactcaacctgacgtggggcaaattgctggctataacaatgccatgaatgttatctatggtcaggctacgccgaaagtatcggatttacaggagacgttgattggtcgcttcagttctgccttctctgcattagcagaaacgctggataatcaggaagagccagaaaaacttactatcgaaccttctgttaagaaccagcaattaccattgactgtttcttatgttgggcaaacagcagagggcgcacaaatgaagttggcccaatacattcagcaagttgatgataaagtgaatcaagagctagaaaaggatctcaaagacaacattgctctgggacggaaaaacttgcaggactctttaagaacgcaggaagtagtcgcgcaggagcagaaagatctgcgtatccgtcagattcaggaagcgttgcagtatgcgaatcaggcgcaagtgacaaaaccacaggttcagcagactgaagatgtgacgcaagatacgttgttccttttgggtagcgaagcgctggagtcgatgattaagcatgaggcgacccgtccgttggtgttctcaccaagctactatcagactcgtcaaaacctgttggatattgaaaacttaaaggttgatgatcttgatattcatgcttaccgttatgtgatgaaaccgacgttacctattcgtcgcgatagtccgaaaaaggcaattaccttgattctggcggtgctgctgggcggcatggttggcgcggggattgtgctggggcgtaacgctctgcgtaattataacgcgaagtaa

SEQ ID NO: 79270 - protein, 325 aa, Shigella dysenteriae
MRVENNNVSGQNHDPEQIDLIDLLVQLWRGKMTIIISVIVAIALAIGYLAVAKEKWTSTAIVTQPDVGQIAGYNNAMNVIYGQATPKVSDLQETLIGRFSSAFSALAETLDNQEEPEKLTIEPSVKNQQLPLTVSYVGQTAEGAQMKLAQYIQQVDDKVNQELEKDLKDNIALGRKNLQDSLRTQEVVAQEQKDLRIRQIQEALQYANQAQVTKPQVQQTEDVTQDTLFLLGSEALESMIKHEATRPLVFSPSYYQTRQNLLDIENLKVDDLDIHAYRYVMKPTLPIRRDSPKKAITLILAVLLGGMVGAGIVLGRNALRNYNAK

SEQ ID NO: 79271 - DNA, 978 bp, Shigella flexneri
  CDS (1)..(978): transl_table=11
atgagagtagaaaataataatgtttctgggcaaaaccatgacccggaacagattgatttgattgatttactagtgcagttgtggcgtggcaagatgacaattatcatttccgtcattgtggctattgccctggctattggttatttggcagtagcgaaggagaaatggacgtcaacagcaattatcactcagcccgacgtggggcaaattgctggctataacaatgccatgaatgttatctatggtcaggctgcaccgaaagtatcggatttgcaggagacgttaattggtcgcttcagttctgccttctctgcattagcagaaacgctggataatcaggaagagccagaaaaacttaccatcgaaccttctgttaagaaccagcaattaccattgactgtttcttatgttgggcaaactgcagagggcgcacaaatgaagttggcccaatacattcagcaagttgatgataaagtgaatcaagagctagaaaaggatctcaaggacaacattgctctgggacggaaaaacttgcaggactctttaagaacccaggaagtggtcgcgcaggagcagaaagatctgcgtatccgtcagattcaggaagcgttgcagtatgcgaatcaggcgcaggtgacaaagccacaggttcagcagactgaagatgtgacgcaagatacgttgttccttctagggagcgaagcgctggagtcgatgattaagcatgaagcgactcgtccgttggtgttctcaccaaactactatcagacacgtcaaaacctgttggatattgaaaaattaaagtttgatgatcttgatattcatgcttaccgctatgtgatgaaaccgacgttacctattcgtcgcgatagtccgaaaaaggcaatcaccttgattctggcagtgcttctgggcggcatggttggcgcggggattgtgttggggcgtaacgctctgcgtaattacaacgcgaagtaa

SEQ ID NO: 79272 - protein, 325 aa, Shigella flexneri
MRVENNNVSGQNHDPEQIDLIDLLVQLWRGKMTIIISVIVAIALAIGYLAVAKEKWTSTAIITQPDVGQIAGYNNAMNVIYGQAAPKVSDLQETLIGRFSSAFSALAETLDNQEEPEKLTIEPSVKNQQLPLTVSYVGQTAEGAQMKLAQYIQQVDDKVNQELEKDLKDNIALGRKNLQDSLRTQEVVAQEQKDLRIRQIQEALQYANQAQVTKPQVQQTEDVTQDTLFLLGSEALESMIKHEATRPLVFSPNYYQTRQNLLDIEKLKFDDLDIHAYRYVMKPTLPIRRDSPKKAITLILAVLLGGMVGAGIVLGRNALRNYNAK

SEQ ID NO: 79273 - DNA, 23 bp, Artificial sequence
  primer
atgcggacttggaaatttccgtc

SEQ ID NO: 79274 - DNA, 24 bp, Artificial sequence
  primer
ttacttcgcgttgtaattgcgtag

SEQ ID NO: 79275 - protein, 374 aa, Artificial sequence
  consensus sequence
  Variant (4)..(5): Xaa in position 4 to 5 is any amino acid
  Variant (7)..(9): Xaa in position 7 to 9 is any amino acid
  Variant (12)..(13): Xaa in position 12 to 13 is any amino acid
  Variant (15)..(16): Xaa in position 15 to 16 is any amino acid
  Variant (18)..(30): Xaa in position 18 to 30 is any amino acid
  Variant (32)..(34): Xaa in position 32 to 34 is any amino acid
  Variant (36)..(38): Xaa in position 36 to 38 is any amino acid
  Variant (42)..(42): Xaa in position 42 is any amino acid
  Variant (44)..(47): Xaa in position 44 to 47 is any amino acid
  Variant (49)..(80): Xaa in position 49 to 80 is any amino acid
  Variant (81)..(94): Xaa in position 81 to 94 is any or no amino acid
  Variant (96)..(98): Xaa in position 96 to 98 is any amino acid
  Variant (100)..(130): Xaa in position 100 to 130 is any amino acid
  Variant (131)..(162): Xaa in position 131 to 162 is any or no amino acid
  Variant (164)..(167): Xaa in position 164 to 167 is any amino acid
  Variant (169)..(171): Xaa in position 169 to 171 is any amino acid
  Variant (174)..(175): Xaa in position 174 to 175 is any amino acid
  Variant (177)..(178): Xaa in position 177 to 178 is any amino acid
  Variant (181)..(205): Xaa in position 181 to 205 is any amino acid
  Variant (207)..(231): Xaa in position 207 to 231 is any amino acid
  Variant (233)..(234): Xaa in position 233 to 234 is any amino acid
  Variant (236)..(237): Xaa in position 236 to 237 is any amino acid
  Variant (239)..(242): Xaa in position 239 to 242 is any amino acid
  Variant (244)..(256): Xaa in position 244 to 256 is any amino acid
  Variant (257)..(281): Xaa in position 257 to 281 is any or no amino acid
  Variant (284)..(286): Xaa in position 284 to 286 is any amino acid
  Variant (288)..(329): Xaa in position 288 to 329 is any amino acid
  Variant (330)..(334): Xaa in position 330 to 334 is any or no amino acid
  Variant (336)..(338): Xaa in position 336 to 338 is any amino acid
  Variant (340)..(341): Xaa in position 340 to 341 is any amino acid
  Variant (343)..(344): Xaa in position 343 to 344 is any amino acid
  Variant (347)..(347): Xaa in position 347 is any amino acid
  Variant (349)..(355): Xaa in position 349 to 355 is any amino acid
  Variant (357)..(358): Xaa in position 357 to 358 is any amino acid
  Variant (360)..(360): Xaa in position 360 is any amino acid
  Variant (364)..(364): Xaa in position 364 is any amino acid
  Variant (366)..(368): Xaa in position 366 to 368 is any amino acid
  Variant (371)..(371): Xaa in position 371 is any amino acid
  Variant (373)..(373): Xaa in position 373 is any amino acid
IDLXXLXXXLWXXKXXIXXXXXXXXXXXXXYXXXAXXXWTSXAXXXXPXXXXXXXXXXXXXXXXXXXXXXXXXXXXXXXXXXXXXXXXXXXXXXFXXXFXXXXXXXXXXXXXXXXXXXXXXXXXXXXXXXXXXXXXXXXXXXXXXXXXXXXXXXXXXXXXXXSXXXXTXXXAQXXLXXYIXXXXXXXXXXXXXXXXXXXXXXXXXLXXXXXXXXXXXXXXXXXXXXXXXXXLXXAXXAXXXXPXXXXXXXXXXXXXXXXXXXXXXXXXXXXXXXXXXXXXXLGXXXLXXXXXXXXXXXXXXXXXXXXXXXXXXXXXXXXXXXXXXXXXXXXXXXYXXXPXXPXXRDXPXXXXXXXLXXLXGGMXGXXXVLXRXA

SEQ ID NO: 79276 - protein, 40 aa, Artificial sequence
  protein pattern
  Variant (2)..(6): Xaa in position 2 to 6 is any or no amino acid
  Variant (8)..(8): Xaa in position 8 is Ile, Leu or Val
  Variant (9)..(9): Xaa in position 9 is any amino acid
  Variant (10)..(10): Xaa in position 10 is Lys or Arg
  Variant (12)..(12): Xaa in position 12 is any amino acid
  Variant (14)..(15): Xaa in position 14 to 15 is any amino acid
  Variant (16)..(16): Xaa in position 16 is Ala or Pro
  Variant (17)..(17): Xaa in position 17 is Ile or Leu
  Variant (18)..(18): Xaa in position 18 is any amino acid
  Variant (19)..(19): Xaa in position 19 is Ala, Ile, Leu or Val
  Variant (20)..(20): Xaa in position 20 is Ala, Ile or Val
  Variant (22)..(22): Xaa in position 22 is Ala, Gly or Ser
  Variant (23)..(23): Xaa in position 23 is Ala, Thr or Val
  Variant (25)..(25): Xaa in position 25 is Ile or Leu
  Variant (29)..(29): Xaa in position 29 is Ile, Leu, Met or Val
  Variant (30)..(30): Xaa in position 30 is Ala or Gly
  Variant (31)..(31): Xaa in position 31 is any amino acid
  Variant (32)..(32): Xaa in position 32 is Ala, Gly or Val
  Variant (33)..(33): Xaa in position 33 is any amino acid
  Variant (36)..(36): Xaa in position 36 is any amino acid
  Variant (38)..(38): Xaa in position 38 is any amino acid
  Variant (39)..(39): Xaa in position 39 is Ala or Val
  Variant (40)..(40): Xaa in position 40 is Phe, Leu or Met
LXXXXXPXXXDXPXXXXXXXLXXLXGGMXXXXXVLXRXXX

SEQ ID NO: 79277 - protein, 19 aa, Artificial sequence
  protein pattern
  Variant (2)..(2): Xaa in position 2 is any or no amino acid
  Variant (6)..(6): Xaa in position 6 is any amino acid
  Variant (7)..(7): Xaa in position 7 is Asp or Glu
  Variant (9)..(11): Xaa in position 9 to 11 is any or no amino acid
  Variant (14)..(15): Xaa in position 14 to 15 is any amino acid
  Variant (16)..(16): Xaa in position 16 is Lys or Arg
  Variant (17)..(18): Xaa in position 17 to 18 is any amino acid
  Variant (19)..(19): Xaa in position 19 is Ile or Val
EXIDLXXLXXXLWXXXXXX

SEQ ID NO: 79278 - protein, 22 aa, Artificial sequence
  protein pattern
  Variant (2)..(2): Xaa in position 2 is Phe or Tyr
  Variant (3)..(3): Xaa in position 3 is any amino acid
  Variant (4)..(4): Xaa in position 4 is Ala, Gly or Ser
  Variant (5)..(5): Xaa in position 5 is any amino acid
  Variant (7)..(9): Xaa in position 7 to 9 is any or no amino acid
  Variant (12)..(13): Xaa in position 12 to 13 is any amino acid
  Variant (15)..(15): Xaa in position 15 is Ala, Glu, Ser or Thr
  Variant (16)..(16): Xaa in position 16 is any amino acid
  Variant (17)..(17): Xaa in position 17 is Phe or Tyr
  Variant (19)..(19): Xaa in position 19 is Ala, Asp, Asn, Gln or Ser
  Variant (20)..(20): Xaa in position 20 is any amino acid
  Variant (21)..(21): Xaa in position 21 is Ile or Val
  Variant (22)..(22): Xaa in position 22 is Asp, Asn, Gln or Ser
SXXXXTXXXAQXXLXXXIXXXX

SEQ ID NO: 79279 - DNA, 1260 bp, Escherichia coli
  CDS (1)..(1260): transl_table=11
atgcgctttgatactgtcattatgggcggcggcctcgccggattactctgtggcctgcaactgcaaaaacacggcctgcgctgtgccattgtcactcgtggtcaaagcgcactgcatttctcatccggatcgctggatttgctgagccatctgccagatggtcaaccggtgacagacattcacagtggactggaatctttgcgtcagcaggcaccagcccatccttactcccttctcgagccacaacgcgtgctcgatctcgcttgccaggcgcaggcattaatcgctgaaagcggtgcgcaattgcagggcagcgtagaacttgctcaccagcgggttacgccgctcggcactctgcgctctacctggctaagttcgccagaagtccccgtctggccgctgcccgcgaagaaaatatgtgtagtgggaattagcggcctgatggattttcaggcgcaccttgcggcagcttcgttgcgtgaactcggccttgccgttgaaaccgcagaaatagagctgccggaactggatgtgctgcgcaataacgccaccgaatttcgcgcggtgaatatcgcccgtttccttgataatgaagaaaactggccgctgttacttgatgcgcttattcctgtcgccaatacctgcgaaatgatcctgatgcccgcctgcttcggtctggccgatgacaaactgtggcgttggttgaatgaaaaactaccttgttcactgatgcttttgccaacgctgccgccttccgtgctgggcattcgtctgcaaaaccagttacagcgccagtttgtgcgccagggtggcgtgtggatgccgggcgatgaagtgaaaaaagtgacctgtaaaaatggcgtagtgaacgaaatctggacccgcaatcacgccgatattccgctacgtccacgtttcgcggttctcgccagcggcagtttctttagtggcggactggtagcggaacgtaacggcattcgagagccgattctcggccttgatgtgctacaaaccgccacgcggggtgaatggtataagggagatttttttgcgccgcaaccgtggcagcagttcggtgtaaccactgatgagacgctacgcccgtcacaggcagggcaaaccattgaaaacctgtttgccatcggttcggtgctgggcggatttgatcccatcgcccagggatgcggcggcggtgtttgtgccgtcagtgctttacatgccgctcaacagattgcccaacgcgcaggaggccaacaataa

SEQ ID NO: 79280 - protein, 419 aa, Escherichia coli
MRFDTVIMGGGLAGLLCGLQLQKHGLRCAIVTRGQSALHFSSGSLDLLSHLPDGQPVTDIHSGLESLRQQAPAHPYSLLEPQRVLDLACQAQALIAESGAQLQGSVELAHQRVTPLGTLRSTWLSSPEVPVWPLPAKKICVVGISGLMDFQAHLAAASLRELGLAVETAEIELPELDVLRNNATEFRAVNIARFLDNEENWPLLLDALIPVANTCEMILMPACFGLADDKLWRWLNEKLPCSLMLLPTLPPSVLGIRLQNQLQRQFVRQGGVWMPGDEVKKVTCKNGVVNEIWTRNHADIPLRPRFAVLASGSFFSGGLVAERNGIREPILGLDVLQTATRGEWYKGDFFAPQPWQQFGVTTDETLRPSQAGQTIENLFAIGSVLGGFDPIAQGCGGGVCAVSALHAAQQIAQRAGGQQ

SEQ ID NO: 79281 - DNA, 1338 bp, Proteus mirabilis
  CDS (1)..(1338): transl_table=11
ttgataaaacagcttcagtggaggccgatgatgaaatttgacgttatcattataggaagcggattagcgggactgactgcggggatccgccttgctgaagcgggcaaatcttgcgccattatcagtaatggacaaagtgcgttacatttttcatctggatcactggatttattaacgtatcttcctgatggcacgccagtttctcatccgaaacaagcgttatcaacactggcacaacaagcaccagagcacccatatagtcgtattggtgaagcaaatgtcactcaattgatagagcaagcgcaaacgctgttatcaacaacgagaaatttagactataaaggtaacggtgatgaaaaccattaccgtattaccccggttggacgttctcgcatgagttggatgagcccacagcgcgtgccgacttatagcgttaatcaaccattcccatggaaaaaaatagcggtggtgggaattgagggattcttggattttcaacctcagtttgcaagtagtactttaaatgaacaaggtattgaggccattccttatcacattcatttacctttattggatagactacgtgataatccaagtgaatttagagcaattaatattgcgcgctatttagataagcctgaaaacacgcaagcattagcagaagaattaattaaacacatagataatagtgttgaggcgattgtactacctgcatgtatcgggctagatgaagaagcgccagttaatttattacaagagtgtgtgggtaaaccaatttgtctattaccgacattaccgccttcattattaggtattcgcctacatcaggcactaaaactgcgttttcaacaagcaggtggtttgatcatgccgggtgatcgcgcagaagaagccgatttagtcggtaataaggttgtcggtattcatacccgtaatcatactgatatccctatccgtagcgagcatgtcgtattagccacaggcagttttttcaataatggcttaattgcggaatttgatcgtatttacgagccattaatggaattagatttattagaaagtttaccgcgtaatgagtggacacaagtcaatgtgtttgccaaacagccttatatgcgatttggtgttaatacagatagtcaattaagaccgttaaaatatggtgaagcgttagacaatgtctatgcggtgggggcgcttttaggtggttttgatcctctaaacgaaggctgtggtgcaggtgtctccatgataagtgcactctatgcagctcaacaaatattacagagtgataaatcgcagcacaccacatctgcggctgtggaggcagtactatga

SEQ ID NO: 79282 - protein, 445 aa, Proteus mirabilis
LIKQLQWRPMMKFDVIIIGSGLAGLTAGIRLAEAGKSCAIISNGQSALHFSSGSLDLLTYLPDGTPVSHPKQALSTLAQQAPEHPYSRIGEANVTQLIEQAQTLLSTTRNLDYKGNGDENHYRITPVGRSRMSWMSPQRVPTYSVNQPFPWKKIAVVGIEGFLDFQPQFASSTLNEQGIEAIPYHIHLPLLDRLRDNPSEFRAINIARYLDKPENTQALAEELIKHIDNSVEAIVLPACIGLDEEAPVNLLQECVGKPICLLPTLPPSLLGIRLHQALKLRFQQAGGLIMPGDRAEEADLVGNKVVGIHTRNHTDIPIRSEHVVLATGSFFNNGLIAEFDRIYEPLMELDLLESLPRNEWTQVNVFAKQPYMRFGVNTDSQLRPLKYGEALDNVYAVGALLGGFDPLNEGCGAGVSMISALYAAQQILQSDKSQHTTSAAVEAVL

SEQ ID NO: 79283 - DNA, 1293 bp, Pasteurella multocida subsp. multocida str. Pm70
  CDS (1)..(1293): transl_table=11
atgacaatgaattttgatgtcgtaattattggcggtggtcttgcaggtttaacatgtggcatcgcgttacaaacacaaggcaagcagtgcgtgatcattaacaatggtcaggccgcgattgatttttcctctggatcgctcgatttattggggcagttaccaagtgggcgtcaaatccaacattttgagcaaaactatacagcactttatcaacaagcggcacagcatccttatgccttagtgggtaaggataaagtgattgaaaaagcacgtcagtttgaacaactcgctcaaaccttaaatttaggacttgtgggcacctgtgataaaaatcactttcgggtgacgccattaggggggctacgtccaacttggttatcgcccaacagtgtaccaattgtaacaaatgaagagatgtttccacatcgtaagattgcagtacttgggattgagggatatcacgattttcaaccacaattgttagcagaaaatttagtacaacatgctcagtttgcccattgtgaggtgacaacgggttatttaaatattccagaattagatcatcttcgtcatcaatcacgggagtttcgcagcgtcaatatcgcacagttacttgagcataaattagcatttagtgatttagtgcgcgaaattcgtgaagcggtcaacggggcatctgcggtgtttctgcccgcgtgctttgggttagaaacgcaagaattttttagcgcacttaaacaggctacgcagcttgaactttttgagctcccaaccctaccaccttctttattaggaatgcgtcagcataagcaattaactcagcattttaaacagttaggcggcttgatgatgaacggggataaggtgatcgcagcggatgtacatcatcagcgtgtgacacaggtttatactcagttacaccaagagatccctattcaggcgaaagacgttgtattagccagtggcagtttcttcagtaaaggtcttgtggcggaatttgagaagattcgtgaacctatttttgcgttagatttagtggaaaacgatcgtttcaacttacaagatcgaatgacttggacgcattcgcgtttttctgcccctcagccttaccagcagaccggcgttgtcattgatgagcattgccgcgcaagaaagagcggtcaattttttgaaaatttatatgccattggcaatattgtgggcgggttcaatgggattgagctcggttgtggttctggtgttgcgatagtcacggcacttgtggcggcagaacagattggaggtgagaaatga

SEQ ID NO: 79284 - protein, 430 aa, Pasteurella multocida subsp. multocida str. Pm70
MTMNFDVVIIGGGLAGLTCGIALQTQGKQCVIINNGQAAIDFSSGSLDLLGQLPSGRQIQHFEQNYTALYQQAAQHPYALVGKDKVIEKARQFEQLAQTLNLGLVGTCDKNHFRVTPLGGLRPTWLSPNSVPIVTNEEMFPHRKIAVLGIEGYHDFQPQLLAENLVQHAQFAHCEVTTGYLNIPELDHLRHQSREFRSVNIAQLLEHKLAFSDLVREIREAVNGASAVFLPACFGLETQEFFSALKQATQLELFELPTLPPSLLGMRQHKQLTQHFKQLGGLMMNGDKVIAADVHHQRVTQVYTQLHQEIPIQAKDVVLASGSFFSKGLVAEFEKIREPIFALDLVENDRFNLQDRMTWTHSRFSAPQPYQQTGVVIDEHCRARKSGQFFENLYAIGNIVGGFNGIELGCGSGVAIVTALVAAEQIGGEK

SEQ ID NO: 79285 - DNA, 1293 bp, Yersinia pestis KIM
  CDS (1)..(1293): transl_table=11
atgcgcgggagaaacacgatgaaatttgatgtgatcatcattggcggtggcttggccgggttggcctgtggtattcgtttggccgaacaaggtaaatattgtgcgattgtcagttccggacaaaatgcactgcatttttcctctggttctctggatctcttggcaaaattacccgatgggcaggcggtcagccagccattatcggcactcagtgcattagctgaattagcccctgaacatccttacagtaaaatgcggaatatcacgcaattggatgagttggtacaggaagccgaggctctattacggcggtgcggtctggatatcgttgggagtagcgctgaaaaccacttacgtctgacgccattgggtagctgccgtcccacatggttgagcctggcggacatcccggttgcaccgttaaatggcccgctgccgtggcaacgcgtggccgtgattggtattgaaggctttctcgattttcagccacagatggtcgcgagtgccttacaggatcagggtattgatgcgacggcagattatttacatttaccggcgctggatcggttgcgggataatccgagcgaattcagagcggtaaacatcgctcgaatactggatttaccggaaaatcgacaacccttagcggatgagttatcccgcctgtcatctaccgctgaaatgattctattgcccgcctgtattgggctggataaatctgcgccattagatgccctacgcgccgtggtcggcaaacctattcaactgttgccgacattacctccttcgctgttagggatgcgcttacatcaggcgctgcgccatcgcttccaacaattggggggcttagtgatgccgggtgatgcggttttgcgggcggaattggttgataaccggatcactggcctttatagccgcaaccacggtgatattcctctacgagctgcgcagatggtactggccagtggcagtttcttcagcaatgggctggttgccaccttcgataaaatctatgaaccgatactggatctggatattttatcactgcctcaccgcgcagactggagccacagtaatctgtttgcgccgcagccttatctgcagtttggtgtcaacacggataaccatttacggccgctgcgtggcggtgtcgccctagagaatctacatgccatcggtgccgttctggggggatatgatccgctccagcaaggttgtggcgcgggtgtttcattgaccagtgctgtgtttgtcgccgaacagattatcagcgagatggcggtgacattatga

SEQ ID NO: 79286 - protein, 430 aa, Yersinia pestis KIM
MRGRNTMKFDVIIIGGGLAGLACGIRLAEQGKYCAIVSSGQNALHFSSGSLDLLAKLPDGQAVSQPLSALSALAELAPEHPYSKMRNITQLDELVQEAEALLRRCGLDIVGSSAENHLRLTPLGSCRPTWLSLADIPVAPLNGPLPWQRVAVIGIEGFLDFQPQMVASALQDQGIDATADYLHLPALDRLRDNPSEFRAVNIARILDLPENRQPLADELSRLSSTAEMILLPACIGLDKSAPLDALRAVVGKPIQLLPTLPPSLLGMRLHQALRHRFQQLGGLVMPGDAVLRAELVDNRITGLYSRNHGDIPLRAAQMVLASGSFFSNGLVATFDKIYEPILDLDILSLPHRADWSHSNLFAPQPYLQFGVNTDNHLRPLRGGVALENLHAIGAVLGGYDPLQQGCGAGVSLTSAVFVAEQIISEMAVTL

SEQ ID NO: 79287 - DNA, 1260 bp, Shigella flexneri 2a str. 2457T
  CDS (1)..(1260): transl_table=11
atgcgctttgatactgtcattatgggcggcggcctcgccggattactctgtggcctgcaactgcaaaaacacggcctgcgctgtgccattgtcacgcgtggtcaaagcgcgttgcatttctcatccggttcgctggatttgctgagccatctgccagatggtcaacccgtggcagacattcacagtggactggaatctttgcgtcagcaggcacctgcacatccttactctcttctcgggccacaacgcgtgctcgatctcgcttgccaggcgcaggcattaatcgctgaaagcggtgcgcaattgcagggcagcgtagaactggctcaccagcggattacgccgctcggcactttgcgtgcaacctggttaagttcgccagaagttcccgtctggccgctacccgcgaagaagatatgtgtagtggggataagcgggctgatggatttccaggcgcatcttgcggcggcttcgttgcgcgaactggatctttcggttgaaaccgcagaaatagagctgccggaactggatgtcctgcgcaataacgccaccgaatttcgcgcggtgaatatcgcccgtttccttgataatgaagaaaactggccgctgttacttgatgcgcttattcctgtcgccaatacctgcgaaatgatcctgatgcccgcctgcttcggcctggccgatgacaaactgtggcgttggttgaatgaaaaactaccttgttcactgatgcttttgccaacgctgccgccttccgtgctgggcattcgtctgcaaaaccagttacagcgccagtttgtgcgccaaggtggagtgtggatgccgggcgatgaagtgaaaaaagtgacctgtaaaaatggcgtagtgaatgaaatctggacccgcaatcacgccgatattccgctacgtccacgtttcgcggttctcgccagcggcagtttctttagtggcggactagtagcggaacgtaacggcattcgcgagccgattctcggccttgatgtgctacaaaccgccacgcggggtgaatggtataagggcgatttttttgcgccgcaaccgtggcagcagttcggtgtaaccactgatgagacgctacgcccgtcgcaggcagggcaaaccattgagaacctgtttgccatcggttcggtgctgggcggatttgatcccatcgcccagggatgcggcggcggtgtttgtgccgtcagtgctttacatgccgctcaacagattgcccaacgcgcaggaggccaacaatga

SEQ ID NO: 79288 - protein, 419 aa, Shigella flexneri 2a str. 2457T
MRFDTVIMGGGLAGLLCGLQLQKHGLRCAIVTRGQSALHFSSGSLDLLSHLPDGQPVADIHSGLESLRQQAPAHPYSLLGPQRVLDLACQAQALIAESGAQLQGSVELAHQRITPLGTLRATWLSSPEVPVWPLPAKKICVVGISGLMDFQAHLAAASLRELDLSVETAEIELPELDVLRNNATEFRAVNIARFLDNEENWPLLLDALIPVANTCEMILMPACFGLADDKLWRWLNEKLPCSLMLLPTLPPSVLGIRLQNQLQRQFVRQGGVWMPGDEVKKVTCKNGVVNEIWTRNHADIPLRPRFAVLASGSFFSGGLVAERNGIREPILGLDVLQTATRGEWYKGDFFAPQPWQQFGVTTDETLRPSQAGQTIENLFAIGSVLGGFDPIAQGCGGGVCAVSALHAAQQIAQRAGGQQ

SEQ ID NO: 79289 - DNA, 1284 bp, Desulfovibrio vulgaris subsp. vulgaris str. Hildenborough
  CDS (1)..(1284): transl_table=11
atgagcgacagaacatatgattgcgaccttgtcgtcgccggaacgggcatggcgggcatggctgccgcgcttttcgccgccagacgcgggctttccgtggtgcaggccgggagcaccggcgagatcgtcttcgccagtggcctgttcgatgtccttggggtgcaccccatggccgaggggcgccgcctcgcatccccctgggaggggatggcgcgtcttgcggccgatgaaccgaagcatccctatggtgtcatcgccccgtctcggatgaaggatgccctggccgaattcaccggctggctggaggcccacgggctgccgtaccgtaatggcggggactccaacgtccgtgtgctgtcgcccatgggcaccgtcaagacctcgtgggccgtgccgtcgaccatgtgggcgggcgtcgaggcccttgcggagaagaagccgtgcctgctggtcgacttcgagggcctgcgcgaatacagcgcacgccagattgccgataccgtgggcggggcatggcccggtctgcgtacggtgcgggtcgagtttcccggcacccccatgcgcccgcttctgacaggcatcatggggcaggctctcgagttgcgggtgacacgcgagcaacttgccgaagtcatccgcccacatcttggtgattgcgcgtgcgtcggcttgcccgccatcctcggtatcttccatcccgggacggttctggccgagatggaagccatgcttggcgtaccggtcttcgagattcccacgctgcccgcatcggtaccggggctgcgcctcaagaacgtgttcgaggggcatatcgggacagagggtgtggacctcatgctccagcgcaaggtgcttgatgtccaccggcaggacggggcgctccaggtctccatcgggcaggggagcgtcgaacgtgtcgtccgtgcgcggggcatgatactcgccacggggcgtttcctcgggcatgggctgttcgctgagcgcgaccggatacgcgagaccgtgctcgacctgcctgtgcaccagcccgccggtcggtcgcagtggcatagccttgacctcttcgaccccgcagggcatccggtgagtcgcgccggggtggtgaccgattcctcgttccgtccggtggatgaggaagggcgcgtgcttcatgaagacgtgcgttgtgtgggaacgttgttggcccatcaggactggatgcgccagaagtgcggtgtcggtcttgctgtcgggtcttctgccgtggctgtcgatgccttcgtcgcgcagttttccgcaggctag

SEQ ID NO: 79290 - protein, 427 aa, Desulfovibrio vulgaris subsp. vulgaris str. Hildenborough
MSDRTYDCDLVVAGTGMAGMAAALFAARRGLSVVQAGSTGEIVFASGLFDVLGVHPMAEGRRLASPWEGMARLAADEPKHPYGVIAPSRMKDALAEFTGWLEAHGLPYRNGGDSNVRVLSPMGTVKTSWAVPSTMWAGVEALAEKKPCLLVDFEGLREYSARQIADTVGGAWPGLRTVRVEFPGTPMRPLLTGIMGQALELRVTREQLAEVIRPHLGDCACVGLPAILGIFHPGTVLAEMEAMLGVPVFEIPTLPASVPGLRLKNVFEGHIGTEGVDLMLQRKVLDVHRQDGALQVSIGQGSVERVVRARGMILATGRFLGHGLFAERDRIRETVLDLPVHQPAGRSQWHSLDLFDPAGHPVSRAGVVTDSSFRPVDEEGRVLHEDVRCVGTLLAHQDWMRQKCGVGLAVGSSAVAVDAFVAQFSAG

SEQ ID NO: 79291 - DNA, 1344 bp, Propionibacterium acnes KPA171202
  CDS (1)..(1344): transl_table=11
gtgagcaccgcaaccgttcccactaagtcggttactgccgaccgtttcggcgctcagcacgtcgtcgtcatcggatccggcctcgccggcctaaccaccgccctgcgcctgcgccgcggtggcgcccgggtgaccctcgtcaccaagggcgtcggcggcctgcagttgggtcagggcactatcgacatcctcggctacaccccggatcgcgtcgagaagccctaccaggctgtccaagaattcgcgtcccaacaccctgcgcatccctacgccaagatcggcgttgaagccgtgaaggagggcatcgacttcctgcgcgaggttgtcggtgactcctacctgcttggtgacggggaggccacgatcaacgtgccgaccgccgtcggtgcgattcgtcccacggccctagtcccgccgtcgatgatcaacggcaatcttaaggacggtgacaaggtcgttgtcattgggttagcccagtacaaagacttccacgctggtctcatcgctcagaacatcaaccgcacaacgctgcctggcggtggccatgcctccgcccgcgctgtcgtggtcgactttgagccccgcgagggcgagtacgacgccaccggcttggcgatcgctcgctccctcgacgatgctcgtacccgtcgaatgctggctgaggggcttaggggattcgtcaatcccggtgagattgtcgccttgccggccgtgctcggcatcgataaccacagcgaggtcctcgctgacttcaagaagatcctcggcgccgaggtgttcgagatcgcatccctgccaccctgcgtgcccggcatgcgcctcaacaacaagcttgttgcgaccgctaagaacgagcgtgttgactacgtgcttggttcgaaagtcaccggctgcacggtggccgacggcaaggttgtctccgtgaccgtcggaaccgctggtgccggcaaggagatcaaggctgacgccgtcgtcctcgctggcggtggcttcgagtccggggccctcaagcttgactctcacggccacctgcatgagaccatcctcgacctgccggtcaccatgccggaaggcgtcaaggaggaggatctcatccacggtgattactggggttccccacagccgctcttcctgtgcggtgttgaggtcgatgagaccatgctcgtcacctaccagggtaagcccgtccattccaatgtctacgccgccggcggcgtgatcgccggtgctaccaggtggcaggagaagtcgggtgagggtatcgccctcggctcggccatcaaggctgccgatgccatcctgtcgtcggtcggggcaggcgccgcgaccaaggaaaggaactga

SEQ ID NO: 79292 - protein, 447 aa, Propionibacterium acnes KPA171202
MSTATVPTKSVTADRFGAQHVVVIGSGLAGLTTALRLRRGGARVTLVTKGVGGLQLGQGTIDILGYTPDRVEKPYQAVQEFASQHPAHPYAKIGVEAVKEGIDFLREVVGDSYLLGDGEATINVPTAVGAIRPTALVPPSMINGNLKDGDKVVVIGLAQYKDFHAGLIAQNINRTTLPGGGHASARAVVVDFEPREGEYDATGLAIARSLDDARTRRMLAEGLRGFVNPGEIVALPAVLGIDNHSEVLADFKKILGAEVFEIASLPPCVPGMRLNNKLVATAKNERVDYVLGSKVTGCTVADGKVVSVTVGTAGAGKEIKADAVVLAGGGFESGALKLDSHGHLHETILDLPVTMPEGVKEEDLIHGDYWGSPQPLFLCGVEVDETMLVTYQGKPVHSNVYAAGGVIAGATRWQEKSGEGIALGSAIKAADAILSSVGAGAATKERN

SEQ ID NO: 79293 - DNA, 1200 bp, Symbiobacterium thermophilum IAM 14863
  CDS (1)..(1200): transl_table=11
gtgctggtgatcggcggcgggctggcgggcatggccgccgccctggccgcgcgtcaggccggggccaccgtggcggtggtgtccgagggggccggcgtgctggagctggcgtcgggctgcatcgaccggctggcggtgccggaggggtcgctgcccccggagcacccgtaccggctgatcgggatggcggccgtggacgaggagctggccgccttccagaaggcgatggaggcggcgggttaccccttggccgcggacggccccggcgcgggcgggtcccacgtgatcacggccctgggcagccgccggaggacacatctggtcgcgcccggcatggcggcgccgccccccggcgagccgctctgggtcgtgggcttcagagggctccgggacttccatcccgcggtcgtggccgccggcctgcgccggtccgatcctgcggcggacgtcgcctggggcgaggtcgagctgccgggggcgcccgaggacgtgcaccccgtggccctggcccggcagctcgaagacgaggcctaccgccgtcaggtgatcgagcgggtggcggcggtccggccgcagggccggggcggcgcggcgctgttgcccgcggtgctgggcctctccggggccgcggccgtgcggcgggcgctcgcggaggggctaggcatgcgggtggtcgaggtcctgctgccgccgccctccgtgccggggctccggctggcggacgccctgcggcgggccgtgcagcaggcgggcgtcgacctcgcgatcggcgcccgggccgtggaggcgcggcgggaaggcgggcgcgtgcgccacgtggtcacccgcggccccggcggtcggatcacctatgaggcggaggcctacgtgctggccaccggcggcctgatgggcaacggcctgacggccgagggccgttcggtgcgggaaccgctgttcgacctgccggtttcggcgcctgacggggagtgggccgatccccggttcctgcccgccgaggggcaccccttcgtgcgggtgggggtggcggtggacgggcggctgcgaccgccgggatacacgaacctgtttgtgtgcgggcgcgccctggccggatacgatccgtacgccgagggtagcggcggcggggtggccgtcgcgaccggcggcgcggccggccgggaagcggcgcggctggtggcgggaggtgagccgcggtga

SEQ ID NO: 79294 - protein, 399 aa, Symbiobacterium thermophilum IAM 14863
MLVIGGGLAGMAAALAARQAGATVAVVSEGAGVLELASGCIDRLAVPEGSLPPEHPYRLIGMAAVDEELAAFQKAMEAAGYPLAADGPGAGGSHVITALGSRRRTHLVAPGMAAPPPGEPLWVVGFRGLRDFHPAVVAAGLRRSDPAADVAWGEVELPGAPEDVHPVALARQLEDEAYRRQVIERVAAVRPQGRGGAALLPAVLGLSGAAAVRRALAEGLGMRVVEVLLPPPSVPGLRLADALRRAVQQAGVDLAIGARAVEARREGGRVRHVVTRGPGGRITYEAEAYVLATGGLMGNGLTAEGRSVREPLFDLPVSAPDGEWADPRFLPAEGHPFVRVGVAVDGRLRPPGYTNLFVCGRALAGYDPYAEGSGGGVAVATGGAAGREAARLVAGGEPR

SEQ ID NO: 79295 - DNA, 1299 bp, Haemophilus somnus 129PT
  CDS (1)..(1299): transl_table=11
atgaaatttgatgtagtgattatcggaggcgggcttgcggggttaacttgcggaattatgcttcaacaaaaagggaaatgttgtgcgattattaataatggtcaatcagccatgaatttttcatcaggttcaatggatcttttaagccaattaccaaacggtgaaaagataaattcttttgaacaaggttatgacagccttgaagaacaacttccaaatcatccgtattgtttatttggtaaacaacatgttttacaaaaagccaagcaatttgaacaattaatagaaaaaattaatctcaatgtgacgggaagctataagcaaaatcattttcgtgttacaccgttgggcggattgcaccgcacttggctgtccgctgattgtattccaacaatggatcttcatgatgaacatttcggataccaaaaaattactgtgttgggcattgaaggttatcatgattttcaaccgcacttactggctgaaaatttaatacagcatccgcaatttacacattgttcgataacgaccgcacttttacatcttcccgagttggatcaattgcgtttaacttctcgtgagtttcgcagtgtcaatatttcccaattacttgaacatcgtttggcgtttcgagaattggtacaggaaataaaacaagcctccggagatggggaagcaatttttttaccggcttgttttggtttggataatcaagattttttcaataaattaacgttggaaactggattaaatttatacgaattgcctacattaccgccttcattagtgggattgcgtcaacataaaaaattaaaaacgtattttgaaaaactgggcggttttattttaaatggtgataaagcattgcgtgccgttattgaggatcaacaggttaaacaaatttacactcaattacatcaagaacatggtatttttgcagaacattttgttcttgcttccggcagttttttcagtaatggtttggtgagtgtttttgatcgtttacttgaacctatatttgacgtggacatgattggcaattcaatgattgatatacaaaacagactcacttggactgctcggcgtttttcttcacctcagccttatcagtctgcgggcgttgcaattaacagctgttgccaattaaaaaagagcggtcagattattaaaaatttatatgctgccggaaatgttattggcggatacaatgcattggaactagggtgtggttccggagtggcagttgttactgcactaacagttgccgataacattatcgaagcacaaaatcgagtataa

SEQ ID NO: 79296 - protein, 432 aa, Haemophilus somnus 129PT
MKFDVVIIGGGLAGLTCGIMLQQKGKCCAIINNGQSAMNFSSGSMDLLSQLPNGEKINSFEQGYDSLEEQLPNHPYCLFGKQHVLQKAKQFEQLIEKINLNVTGSYKQNHFRVTPLGGLHRTWLSADCIPTMDLHDEHFGYQKITVLGIEGYHDFQPHLLAENLIQHPQFTHCSITTALLHLPELDQLRLTSREFRSVNISQLLEHRLAFRELVQEIKQASGDGEAIFLPACFGLDNQDFFNKLTLETGLNLYELPTLPPSLVGLRQHKKLKTYFEKLGGFILNGDKALRAVIEDQQVKQIYTQLHQEHGIFAEHFVLASGSFFSNGLVSVFDRLLEPIFDVDMIGNSMIDIQNRLTWTARRFSSPQPYQSAGVAINSCCQLKKSGQIIKNLYAAGNVIGGYNALELGCGSGVAVVTALTVADNIIEAQNRV

SEQ ID NO: 79297 - DNA, 1299 bp, Haemophilus influenzae R2866
  CDS (1)..(1299): transl_table=11
atgaattttgatgtagccattattggcggtggtttggcgggtttaacctgtggcatcgcccttcaacaatgcggtaaacgttgcgtgattatcaacaacggtcaagcagccattgattttgcatctggctctttagatttattaagccgtatgccatcaacgacatatggggaaagtcgcgcggtagaaaatttaaaagaaaatatcaccgcacttcgtaatgaattacctgcccacccttatagtttattgggtgctgagaaagtgcttgctaaagcacaagattttgaacgtttagccaatgaattacatcttgatttaattggttctacggaaaagaaccattggcgtgtaacaggcttaggcagtttacgcggtgcgtggctttcgccaaatagcgtgccaactgtgcaaggtaatgaaccttttccgcataaacgtattgcagtgcttggtattgaaggttatcacgattttcaacctcaacttttagcggcaaatttagtgttaaacccacaatttgaacattgtgaagtaacgagtggtttcttaaatattccacaattagatgaacttcgcaaaaatgctcgtgagttccgtagtgtaaatatctctcaacttctagagcacaaacttgcgttcaatgatcttgttaaagaaatcattgaatcagcacaaggtgcagaagcggtctttttacctgcttgctttggtttagaaaaccaagaatttatgaccgcacttcgtgatgcaactaaacttgcattatttgaattaccaacactgccaccatcattacttggtatgcgccaacgtattcaattacgtcataaatttgaatcccttggtggtttaatgattaatggcgacagtgcattgagcgcaacatttgaaggaaatcaagtacgttgtatcaacactcgcttgctcgaagatgaagaaattactgcagataattttgtattggcgtcaggaagttttttcagcaaagggcttatttccgaatttgataaaatttatgagccagtttttgaatccgatattatcggtgttgaagggtttaacgataaagatcgtttcacttggactgctcatcgctttgctcatccacaaccttatcaatcagcaggcgtagcgattaatgcccagtgccaagtgcaaaagtgcggtcaatttttaacgaatttatatgccgtcggtaatgtgattggtggttttaatgcccttgaacttggttgtggttcgggtgtggctgttgtaactgccttggcagtggcagatgaaatcttagcgaaataa

SEQ ID NO: 79298 - protein, 432 aa, Haemophilus influenzae R2866
MNFDVAIIGGGLAGLTCGIALQQCGKRCVIINNGQAAIDFASGSLDLLSRMPSTTYGESRAVENLKENITALRNELPAHPYSLLGAEKVLAKAQDFERLANELHLDLIGSTEKNHWRVTGLGSLRGAWLSPNSVPTVQGNEPFPHKRIAVLGIEGYHDFQPQLLAANLVLNPQFEHCEVTSGFLNIPQLDELRKNAREFRSVNISQLLEHKLAFNDLVKEIIESAQGAEAVFLPACFGLENQEFMTALRDATKLALFELPTLPPSLLGMRQRIQLRHKFESLGGLMINGDSALSATFEGNQVRCINTRLLEDEEITADNFVLASGSFFSKGLISEFDKIYEPVFESDIIGVEGFNDKDRFTWTAHRFAHPQPYQSAGVAINAQCQVQKCGQFLTNLYAVGNVIGGFNALELGCGSGVAVVTALAVADEILAK

SEQ ID NO: 79299 - DNA, 1341 bp, Candidatus Desulfococcus oleovorans Hxd3
  CDS (1)..(1341): transl_table=11
atgaatttgaataacagcaccgactacgactgcctgatcatcggtggcggcctgtcaggtcttgcctgcggcatcacctgccttgccgaagggctttcctgcgccattctctcctcgggcatgagcgccctgcacttttcatccggctctgtggacctgctgggatattttccggaagccaccgttgtgcccgacccctttgacgccctgccccggtttatcgacatgcattcggaacacccctacgcgcggtgcggcatcgacaccataaaagaggccctggcctttttcaggcaggaaatggccagagccgggctgcccctccatgagaactgttcccgcaaccactttcacgtcacggccctgggcacgctgaagcccaccttcttttcccagcgaagcgttttcaaccaggagatacggtcggtcatcgaccacaccccggccattaccatcatgaacattcagggttttcgggactttcatcccggcctggccgcagccaacctcaaacggcacaagctgttttccgcctgcgacattcagtgcgccgagatgcatctgccggaaaaggagaaaaacccttcaccggtccacgccatgcgctccatcgacatcgcccggatatttgacaccatggacccggatgaaatggcccgtcttatcagaacggcctgcccggacgccgatatcgtggggcttccggcggtgctgggaattgaacgccacaacgcggtgctggaccggctgcgccaaaaaaccgggaaaatcatttacgaagtacccacccttcccccctccatgccgggcatgcggctggacaatgcgctcaagtcccggttcgcggccatgggcggtgtctttatccagcgggaaaccgtggaaaaggggaccatcgccaacggccgtgtaaccgccatccgcacaaaaaaccaaaacgacacccttacagcggggttttatgtgctgtccaccggcagtttcttttcaggaggccttgtcagccggtttgatcaaatcgcggagccggtcttcaacctggccctggcccggtcgcctgaagcccgctgcctgggatcggaaaacttttttgcccctggggggcatgcgtttctttccgccggggtcatcacggatgacacgttccatccgaagaccccggcgggagagaccgtggaaaaccttttctgcacgggtgcggtgctgtccggctacgacccggtcaaccaggggtgcggcggcggcgtggccgttgccaccggctatgtgacgggccggcgcatcgcccggggcatctattcggccacccgccagcgccaggactatccggatttgccatga

SEQ ID NO: 79300 - protein, 446 aa, Candidatus Desulfococcus oleovorans Hxd3
MNLNNSTDYDCLIIGGGLSGLACGITCLAEGLSCAILSSGMSALHFSSGSVDLLGYFPEATVVPDPFDALPRFIDMHSEHPYARCGIDTIKEALAFFRQEMARAGLPLHENCSRNHFHVTALGTLKPTFFSQRSVFNQEIRSVIDHTPAITIMNIQGFRDFHPGLAAANLKRHKLFSACDIQCAEMHLPEKEKNPSPVHAMRSIDIARIFDTMDPDEMARLIRTACPDADIVGLPAVLGIERHNAVLDRLRQKTGKIIYEVPTLPPSMPGMRLDNALKSRFAAMGGVFIQRETVEKGTIANGRVTAIRTKNQNDTLTAGFYVLSTGSFFSGGLVSRFDQIAEPVFNLALARSPEARCLGSENFFAPGGHAFLSAGVITDDTFHPKTPAGETVENLFCTGAVLSGYDPVNQGCGGGVAVATGYVTGRRIARGIYSATRQRQDYPDLP

SEQ ID NO: 79301 - DNA, 1260 bp, Escherichia coli O6
  CDS (1)..(1260): transl_table=11
atgcgctttgatactgtcattatgggcggcggcctcgccggattactctgtggcctgcaactgcaaaaacacggcctgcgctgtgccattgtcactcgtggtcaaagcgcgctgcatttctcatctggatcgctggatttgctgagccatctgccggatggtcaaccggtgacagacattcacagtggactggaatctttgcgtcagcaggcacctgcccatccttacactcttctcgggccacaacgcgtgctcgatctcgcttgccaggcgcaggcattaatcgctgaaagcggtgcgcaattgcagggcagcgtagagctggctcaccagcggattacaccgcttggcactctgcgctcaacctggctaagttcgccagaagtccctgtctggccgctgcccgcgaagaaaatatgcgtggtgggaattagcggcctgatggattttcaggcgcatcttgcggcggcttcgttgcgcgaactcgaccttgccgttgaaaccgcagaaatagaactgccggaactggatgtcctgcgcaataacgccaccgagtttcgcgcggtgaatatcgcccgtttccttgataacgaagaaaactggccgctgataattgatgcgctaatccctgtcgccaatacctgtgaaatgatcctgatgcccgcctgtttcggcctggccgatgacaaactgtggcgttggctgaatgaaaaactaccttgttcactgatgcttctgccaacactaccaccttcagtgctggggatacgtctgcaaaaccagttgcagcgtcagtttgtgcgtcagggcggtgtgtggatgccgggcgatgaagtgaaaaaagtgacctgtaaaaatggcgtggtgaatgaaatctggacgcgcaatcacgccgatatcccgctgcgcccacgatttgtggtgcttgcgagcggcagtttctttagcggcggactggtggcagaacgtgacggcattcgcgagccgattctcggccttgatgtgctacaaaccgctacgcggggtgaatggtataagggcgatttttttgcgccgcagccgtggcagcagttcggtgtaaccactgatgaggcgctacgcccgtcgcaggcggggcaaaccattgagaacctgtttgccatcggttcggtgctgggcggatttgatcccatcgcccagggatgcggcggcggtgtttgtgccgtcagtgctttacatgtcgctcaacagattgcccaacgcgcaggaggccaacaatga

SEQ ID NO: 79302 - protein, 419 aa, Escherichia coli O6
MRFDTVIMGGGLAGLLCGLQLQKHGLRCAIVTRGQSALHFSSGSLDLLSHLPDGQPVTDIHSGLESLRQQAPAHPYTLLGPQRVLDLACQAQALIAESGAQLQGSVELAHQRITPLGTLRSTWLSSPEVPVWPLPAKKICVVGISGLMDFQAHLAAASLRELDLAVETAEIELPELDVLRNNATEFRAVNIARFLDNEENWPLIIDALIPVANTCEMILMPACFGLADDKLWRWLNEKLPCSLMLLPTLPPSVLGIRLQNQLQRQFVRQGGVWMPGDEVKKVTCKNGVVNEIWTRNHADIPLRPRFVVLASGSFFSGGLVAERDGIREPILGLDVLQTATRGEWYKGDFFAPQPWQQFGVTTDEALRPSQAGQTIENLFAIGSVLGGFDPIAQGCGGGVCAVSALHVAQQIAQRAGGQQ

SEQ ID NO: 79303 - DNA, 1263 bp, Erwinia carotovora subsp
  CDS (1)..(1263)
atgcgctatgacgttgtgattatcggcggtgggctggcagggctgacctgtggtatccgcttggcagagcagggaaaacgctgcgcgattgtcagtgctgggcagaatgcgctgcatttttcttccggcgcgctggatttactctctcatctccctgacggacagcccgttagccagccgctcgatgcgctggacgagctggcgcgtcaggcacctcatcacccttattctcgtatgggtgcggcggcggttgccgcactattaccacaggtcgaggcgttgttggaacgcagcaatatctccctgttgggcaatcatcagcagaaccactggcgtatgacgccgttaggtaagtttcgtgcatgctggctaagcccggctgacggtgtcacgcgtggcctggcggattcgcattttggcgacaatccgctcattgccggtattgaaggctttctggattttcagtcccggatcgtggctggcacgcttcagacgcagggtatcgcggcacgtagtgatgaactcaagttgcccgtgctggatcggttgcgtcaaaatcccagcgaattccgtgcggtaaatatcgctcgtctactggatcgacctgaaaaccgctcggcgctggtggaagagctatcgcttctggctaacggtaatgatgccatcatcatgcccgcctgtctgggattggacagccccgagatcgtgagtgaactcgctgatgcgttaggtaaaccggtgctgctgctgccgacattaccgccgtcagtactcgggttacgtttgcatcaggcgctgtcacagcgtttccgccaattgggtggcatggtgatgccgggcgatcgcgcggtgcgcgcatcgttgtcttcgcaggagatcgcagtccatagccatcatcaccgtgatattccgctgcgggcgaagcacgcggtgctggcgagcggtagcttcttcagtaacgggctagtgacacagttcgatcgggtgactgaacccgtctttgggctggatgttcggtttgctgaacagcgcgagggttggagccagcaggacgtgtttgcgccgcagccctatatgcaatttggcgcgattgtcgatgaacacctgcacccgcgtatcgcgggtgagacagtcaacaatctgtacgcgattggcgcggtgctggaaggcttcgacccgattgtgcagggatgtggggctggcgtttccttactcagcgcgctccatgttgccgaacagattctgaaggagggcaacccatga

SEQ ID NO: 79304 - protein, 420 aa, Erwinia carotovora subsp
MRYDVVIIGGGLAGLTCGIRLAEQGKRCAIVSAGQNALHFSSGALDLLSHLPDGQPVSQPLDALDELARQAPHHPYSRMGAAAVAALLPQVEALLERSNISLLGNHQQNHWRMTPLGKFRACWLSPADGVTRGLADSHFGDNPLIAGIEGFLDFQSRIVAGTLQTQGIAARSDELKLPVLDRLRQNPSEFRAVNIARLLDRPENRSALVEELSLLANGNDAIIMPACLGLDSPEIVSELADALGKPVLLLPTLPPSVLGLRLHQALSQRFRQLGGMVMPGDRAVRASLSSQEIAVHSHHHRDIPLRAKHAVLASGSFFSNGLVTQFDRVTEPVFGLDVRFAEQREGWSQQDVFAPQPYMQFGAIVDEHLHPRIAGETVNNLYAIGAVLEGFDPIVQGCGAGVSLLSALHVAEQILKEGNP

SEQ ID NO: 79305 - DNA, 1281 bp, Haemophilus ducreyi
  CDS (1)..(1281): transl_table=11
atgaattttgatgttgtcattataggtggaggactagccggtcttacctgtggtatagcgttacaaaaacaaggcaaacagtgtgcgattattaataatggccaagctgcaatagatttttcatcaggctcaatggatttactttcatgtttaccaagcgggcaaaaagtacacgttttttgtgaggctttttctgagttaagccaacaagcacccgaacatccttattgtttattaggtcaacatcaagttgtagctaaagtgcaacaatttgagcaatttatgcaagaattaggtttggttggcagccataaacaaaaccatttacgtgttacgcccttaggtggtttacgccatacttggttatcgcctaaaagtgtgcctgttatagcagaaaatgaacatttcccttatcgtcagattgctattttaggtatcgaaggttatcacgatttccagccacaaatattagtcgataatttaaagcagaacgcagcattttcgcattgtgatttctcaataggatatttgaatattccagaattagactatttacgtcaaaatgcgcgagaatttcggagtgttaatattgctcaattacttgagcataaactagcgtttgaagatttagtacaagaaataaaacaggcggcggggaatgcacaagcggtatttttactggcttgttttggtttagatgatcaaaggttttttgatagtttaaaacaagcaacggcgttggctttatttgaattacccactttacccccttcattaattggtattcgccagtatcgaacattacgtgatcagtttgaaaaattaggaggattgctattgaatggcgaccgagcagtgagggctgagtttgacggtgatcgtgttgcgcgtattttcacgacattacatcaagaagaatcgattaatgcagctcattttgtattggcttcggggagtttctttagtaatggtttagtcgctgaatttgagcgggtaaaggaacctatttttgacttggatattatcggtaataaagcctttattaattcggagagagtgtcttggactgataaacgttttgctgcagcacaaccttatcaatctgctggggtggcgattaatcatcattgccaagtttataaaaatgggcatcttattccaaatctttatgcaatagggaatgtcattggtggcttttggggcattgaacaaggttgtgcatctggtgtgtcagttgtgaccgcattaacagtagcagaatgggtgggaggtacaaaatga

SEQ ID NO: 79306 - protein, 426 aa, Haemophilus ducreyi
MNFDVVIIGGGLAGLTCGIALQKQGKQCAIINNGQAAIDFSSGSMDLLSCLPSGQKVHVFCEAFSELSQQAPEHPYCLLGQHQVVAKVQQFEQFMQELGLVGSHKQNHLRVTPLGGLRHTWLSPKSVPVIAENEHFPYRQIAILGIEGYHDFQPQILVDNLKQNAAFSHCDFSIGYLNIPELDYLRQNAREFRSVNIAQLLEHKLAFEDLVQEIKQAAGNAQAVFLLACFGLDDQRFFDSLKQATALALFELPTLPPSLIGIRQYRTLRDQFEKLGGLLLNGDRAVRAEFDGDRVARIFTTLHQEESINAAHFVLASGSFFSNGLVAEFERVKEPIFDLDIIGNKAFINSERVSWTDKRFAAAQPYQSAGVAINHHCQVYKNGHLIPNLYAIGNVIGGFWGIEQGCASGVSVVTALTVAEWVGGTK

SEQ ID NO: 79307 - DNA, 1299 bp, Haemophilus influenzae
  CDS (1)..(1299): transl_table=11
atgaattttgatgtagccattattggcggtggtttggcgggtttaacctgtggcatcgcccttcaacaatgcggcaaacgttgcgtgattatcaacaacggtcaagcggccattgattttgcatctggctctttagatttattaagccgtatgccatcaacgacatatggggaaaatcgcgcagtagaaaatttaaaagaaaatattaccgcacttcgcaatgaattacctgcccacccttatagtttattgggtgcagagaaagtgcttgctaaagcacaagattttgaacgtttagccaatgaattaaatcttgatttaattggttctacggaaaaaaatcactggcgtgtaacaggcttaggcagtttacgcggtgcgtggctttcgccaaatagcgtgccaactgtgcaaggtaatgaaccttttccgcataaacgtattgcagtgcttggtattgaaggttatcacgattttcaacctcaacttttagcggcaaatttagtgttaaacccacaatttgaacattgtgaagtaacgagtggtttcttaaatattccacaattagatgaacttcgcaaaaatgctcgtgagttccgtagtgtaaatatctctcaacttctagagcacaaacttgcgttcaatgatcttgttaaagaaatcattgaatcagcacaaggtgcagaagcggtctttttacctgcttgctttggtttagaaaaccaagaatttatgaccgcacttcgtgatgcaactaaacttgcattatttgaattaccaacactgccaccatcattacttggtatgcgccaacgtattcaattacgtcataaatttgaatcccttggtggtttaatgattaatggcgacagtgcattgaatgcaacatttgaaggaaataaagtacgttgtatcaacactcgtttgctagaaaatgaagaaatcactgcagataattttgtactagcttcaggaagtttcttcagcaaagggcttatttccgaatttgataaaatttatgaacctgtttttgaatctgatattatcggtgttgaaggtttcaaccagaaagatcgtttcacttggactgttcatcgctttgcacatccacaaccttatcaatcagcaggcgtagcaattaatgctcaatgccaagtgcaaaagtgcggtcaatttttaacgaatttatatgccgtcggtaatgtgattggtggttttaatgcccttgagcttggttgtggttcgggtgtggctgttgtaactgccttggcagtggcagatgaaatcttagcgaaataa

SEQ ID NO: 79308 - protein, 432 aa, Haemophilus influenzae
MNFDVAIIGGGLAGLTCGIALQQCGKRCVIINNGQAAIDFASGSLDLLSRMPSTTYGENRAVENLKENITALRNELPAHPYSLLGAEKVLAKAQDFERLANELNLDLIGSTEKNHWRVTGLGSLRGAWLSPNSVPTVQGNEPFPHKRIAVLGIEGYHDFQPQLLAANLVLNPQFEHCEVTSGFLNIPQLDELRKNAREFRSVNISQLLEHKLAFNDLVKEIIESAQGAEAVFLPACFGLENQEFMTALRDATKLALFELPTLPPSLLGMRQRIQLRHKFESLGGLMINGDSALNATFEGNKVRCINTRLLENEEITADNFVLASGSFFSKGLISEFDKIYEPVFESDIIGVEGFNQKDRFTWTVHRFAHPQPYQSAGVAINAQCQVQKCGQFLTNLYAVGNVIGGFNALELGCGSGVAVVTALAVADEILAK

SEQ ID NO: 79309 - DNA, 1284 bp, Halobacterium salinarium
  CDS (1)..(1284): transl_table=11
atggcaattgaatccgaggtgctcgtgatcggcggcgggctggccggcatcacgagcgcgctggcggccgccgacgcgggcgcggacacccgactggtgtcgtacaaacagagcacgctccggaacgccagcgggctcgtcgacgtgctcggctacacgcccagcggggacggtcccgtggtcgaccccttcgacgccatcccgtcgctgcccgacgcccacccgtatcggaccgtcggcgtcgacacggtgcgcgacgcgatggcgtttttcgacgcgcacgcgccgcgctaccaggggcaccacaccgacgccaacgcgctggtgccgacccacggcggcaccgtgaagccgaccgcgcgctatcccgccagcgccgccgccgggctggcgagcgacgaccgggacacgctgctggtcggcttcgagacgctgccggatttcaacgcggaccacgcggccgcccacctcgaatcggcgggcgtccccttcgacgtgcgcggtgtgaccgtgccgttcccgggcgacctccgggcgggcgcgaaggtcacccggtacgcggggctgctggacgcgaacccccaggtgtcggtggacggcaccgagcgcccgctccgcctggcgcttgccacacgggtcgccgacgcggccgccgacgccgaccgcgtcggcttcccggcggtgctgggcgacgacgatcccgcgggcgtccgagacgcgctcgcggaccacctgggggctgcggtgttcgaggtgccgatgggaccgccgtcgctgcccgggttgcggctgtccgatcacctgttcggcgcgctggaggcggcgggcgtgcgcatcgaaaccggcaaccccgtggtggacgccgacacgaccgccggcggcgtcgagaccgtgtacgtggagaaaaacggcgcgcgcatcccgaacagcgccgacgagtacgtgctcgcgaccggcgggctcgtggggaaaggcatcgactccgaccgggacgcggtctacgaaccgatcttcgactgccggatcgcgcacagcgacgaccggtacgcgtggttcgacgacgacgcgttcggcgaccacgcgttcgcgcagttcggcgtgcggaccgacgacacactgcggccacgcgacgacgacggtgccgccgcccacgcgaacctgcgggcggcgggcgcagtgcttggcggctacaacttcgcagcggagcactccggcagcggcgtctccatcgcaacggggtacgcggccggaacggcggcagcggaggcgatccacgatgagtga

SEQ ID NO: 79310 - protein, 427 aa, Halobacterium salinarium
MAIESEVLVIGGGLAGITSALAAADAGADTRLVSYKQSTLRNASGLVDVLGYTPSGDGPVVDPFDAIPSLPDAHPYRTVGVDTVRDAMAFFDAHAPRYQGHHTDANALVPTHGGTVKPTARYPASAAAGLASDDRDTLLVGFETLPDFNADHAAAHLESAGVPFDVRGVTVPFPGDLRAGAKVTRYAGLLDANPQVSVDGTERPLRLALATRVADAAADADRVGFPAVLGDDDPAGVRDALADHLGAAVFEVPMGPPSLPGLRLSDHLFGALEAAGVRIETGNPVVDADTTAGGVETVYVEKNGARIPNSADEYVLATGGLVGKGIDSDRDAVYEPIFDCRIAHSDDRYAWFDDDAFGDHAFAQFGVRTDDTLRPRDDDGAAAHANLRAAGAVLGGYNFAAEHSGSGVSIATGYAAGTAAAEAIHDE

SEQ ID NO: 79311 - DNA, 1296 bp, Mannheimia succiniciproducens
  CDS (1)..(1296): transl_table=11
atgaattttgatgtcgtgattatcggtgcgggaatcgccggtttaacctgcggtctcaccctacaagaaaaaggcgttcgttgtgcaatcattaataacggtcaggcggcactggatttttcttccggttctatggatttattaagccgcttaccaaacggaagtacggtggattcttttgcacaatcttatgccgcacttgcgcaacaatcaccaaaccacccttatgttattttaggcaaagatgtggtattagacaaaatacaacaattcgaaacccttgccaaatcactcaatttatctttggtcggttcaagcgacaaaaatcataaaagagtaaccgcacttggcggtctgcgcggtacatggctttcaccgaacagtgtgccgacagtcagccttgagggcaaattcccgcacgataacatcgtattgctgggtattgaaggctatcatgattttcaaccgcaattattagcggataacctcaaacaaaatccgcaatttgctcattgtgaaattacgacgaatttcttgcatattccggaattagatcatttgcgccaaaacagtcgcgaattccgaagtgtaaatatcgctcaagtgcttgaatataaattgtcgttcaataatcttgtggatgaaatcaaacaagcggtcggtaatgccaaagcggcatttttacccgcctgtttcgggcttgacgaccaatcgttctttgaatcgctcaaacaagcgaccggcatcgaactttatgagctaccgacacttccgccttcattattgggtattcgccaacaccgccaattacgtcatcgttttgaaaagctaggcggtgtaatgtttaacggtgaccgcgcattacgttccgaattcgaaggtaataaagtcgcccgtattttcacacaattacatcttgaaaacgccgttacggcaaaatattttgtgttagcttccggcggattctttagtaacggtttagtatccgaatttgaagaaatttatgaaccgttattcagatccgacatcgtaaaaaccgagcggtttaatgcaacggatcgtttctcctggatcagtaaacgctttgccgatccgcaaccttaccaatccgccggcgtagtcattaatgccgaatgtcaggtacaaaaagacggaaacaacgtggaaaatctgtttgccattggtgctgtcatcggcggctataacggtattgaactgggttgcggctcaggagttgccgttacaacggcattgaaagttgcagacaatattatcgctaaagaaagcagcaattag

SEQ ID NO: 79312 - protein, 431 aa, Mannheimia succiniciproducens
MNFDVVIIGAGIAGLTCGLTLQEKGVRCAIINNGQAALDFSSGSMDLLSRLPNGSTVDSFAQSYAALAQQSPNHPYVILGKDVVLDKIQQFETLAKSLNLSLVGSSDKNHKRVTALGGLRGTWLSPNSVPTVSLEGKFPHDNIVLLGIEGYHDFQPQLLADNLKQNPQFAHCEITTNFLHIPELDHLRQNSREFRSVNIAQVLEYKLSFNNLVDEIKQAVGNAKAAFLPACFGLDDQSFFESLKQATGIELYELPTLPPSLLGIRQHRQLRHRFEKLGGVMFNGDRALRSEFEGNKVARIFTQLHLENAVTAKYFVLASGGFFSNGLVSEFEEIYEPLFRSDIVKTERFNATDRFSWISKRFADPQPYQSAGVVINAECQVQKDGNNVENLFAIGAVIGGYNGIELGCGSGVAVTTALKVADNIIAKESSN

SEQ ID NO: 79313 - DNA, 1287 bp, Pasteurella multocida
  CDS (1)..(1287): transl_table=11
atgaattttgatgtcgtaattattggcggtggtcttgcaggtttaacatgtggcatcgcgttacaaacacaaggcaagcagtgcgtgatcattaacaatggtcaggccgcgattgatttttcctctggatcgctcgatttattggggcagttaccaagtgggcgtcaaatccaacattttgagcaaaactatacagcactttatcaacaagcggcacagcatccttatgccttagtgggtaaggataaagtgattgaaaaagcacgtcagtttgaacaactcgctcaaaccttaaatttaggacttgtgggcacctgtgataaaaatcactttcgggtgacgccattaggggggctacgtccaacttggttatcgcccaacagtgtaccaattgtaacaaatgaagagatgtttccacatcgtaagattgcagtacttgggattgagggatatcacgattttcaaccacaattgttagcagaaaatttagtacaacatgctcagtttgcccattgtgaggtgacaacgggttatttaaatattccagaattagatcatcttcgtcatcaatcacgggagtttcgcagcgtcaatatcgcacagttacttgagcataaattagcatttagtgatttagtgcgcgaaattcgtgaagcggtcaacggggcatctgcggtgtttctgcccgcgtgctttgggttagaaacgcaagaattttttagcgcacttaaacaggctacgcagcttgaactttttgagctcccaaccctaccaccttctttattaggaatgcgtcagcataagcaattaactcagcattttaaacagttaggcggcttgatgatgaacggggataaggtgatcgcagcggatgtacatcatcagcgtgtgacacaggtttatactcagttacaccaagagatccctattcaggcgaaagacgttgtattagccagtggcagtttcttcagtaaaggtcttgtggcggaatttgagaagattcgtgaacctatttttgcgttagatttagtggaaaacgatcgtttcaacttacaagatcgaatgacttggacgcattcgcgtttttctgcccctcagccttaccagcagaccggcgttgtcattgatgagcattgccgcgcaagaaagagcggtcaattttttgaaaatttatatgccattggcaatattgtgggcgggttcaatgggattgagctcggttgtggttctggtgttgcgatagtcacggcacttgtggcggcagaacagattggaggtgagaaatga

SEQ ID NO: 79314 - protein, 428 aa, Pasteurella multocida
MNFDVVIIGGGLAGLTCGIALQTQGKQCVIINNGQAAIDFSSGSLDLLGQLPSGRQIQHFEQNYTALYQQAAQHPYALVGKDKVIEKARQFEQLAQTLNLGLVGTCDKNHFRVTPLGGLRPTWLSPNSVPIVTNEEMFPHRKIAVLGIEGYHDFQPQLLAENLVQHAQFAHCEVTTGYLNIPELDHLRHQSREFRSVNIAQLLEHKLAFSDLVREIREAVNGASAVFLPACFGLETQEFFSALKQATQLELFELPTLPPSLLGMRQHKQLTQHFKQLGGLMMNGDKVIAADVHHQRVTQVYTQLHQEIPIQAKDVVLASGSFFSKGLVAEFEKIREPIFALDLVENDRFNLQDRMTWTHSRFSAPQPYQQTGVVIDEHCRARKSGQFFENLYAIGNIVGGFNGIELGCGSGVAIVTALVAAEQIGGEK

SEQ ID NO: 79315 - DNA, 1329 bp, Photobacterium profundum
  CDS (1)..(1329): transl_table=11
atgaaattcgatagcttaattataggtggcggtgtagcaggattaagttgtgcgattcgttgtgcagaagcaggcatgaaaacagcagtgatcgctgctggccaaagtgctcttcacttctcatcaggctctattgatttcttaagccgacttccaaatggacagcccgtttatcacccaatggctgcattcaatgagttacagcagcagagcccagaacatccctactgcaagctgggcaaaagaaaagtacaagaagcattagactggtatcaagaaatgatcaaagcgcgtggtatctatctttcttcacaagaagatgaagcgaaccatctgcgcttaacaccaatgggaacctttcgttcaacgtggttatcgcagcaaactgtgcatcaattcccactgaccaacactgctggcgaattaaatcatatcgcattggtgacagtcgatggcttccgtgatttccagcctaaattagcggctgataacctttcaaaattagcgcaatttaaagatgtaaaaattaccacggcagcagttgaactacctgattttgaagagatgcagcgtaatccttgtgaattccgctctattgatatttcacgtgtattacgtgatgaacgcaagttacacgcttttgctaaatcaatgattcaagctgttggcaaagcagaccttgtggtattgcctgcggtatttggcaacggtgatggcgcagcaacaatcaaattgcttgaaggcttaacgggctttacgatttgcgaactgcctaccatgccaccttcgctgttgggtattcgtttagaagaagccatgaaatctcatttcaaaatgctgggtggaatcatccttgttggtgacgaagtacaacgtggtgatattgaagatggtgaattgaaacgtatttttacccgtaatcatcgcgatatgccattaatcgcggataactatttaatcgcaacaggcagtttcttcagccgtggtatggccgcacaacgtttaagtattgatgaacccattttcaaccttgatactgttgccattccagatagagaccagtggtaccagcctgaattttttgcatcaaaagcgcacccattcttgaaaatgggcgtgatatgcaatgatcaactacaggcctctgctaataatcaaaccattgataatctattctgcgcaggcgcactattggcacactacgatcccgtgttcgaagggtgtggcagcggcgttgcaattagtaccggattccacgttgcagaacaaatgatcagtaaacataccgcacgccaaaatcagaataataaagaaaggactatcgcatga

SEQ ID NO: 79316 - protein, 442 aa, Photobacterium profundum
MKFDSLIIGGGVAGLSCAIRCAEAGMKTAVIAAGQSALHFSSGSIDFLSRLPNGQPVYHPMAAFNELQQQSPEHPYCKLGKRKVQEALDWYQEMIKARGIYLSSQEDEANHLRLTPMGTFRSTWLSQQTVHQFPLTNTAGELNHIALVTVDGFRDFQPKLAADNLSKLAQFKDVKITTAAVELPDFEEMQRNPCEFRSIDISRVLRDERKLHAFAKSMIQAVGKADLVVLPAVFGNGDGAATIKLLEGLTGFTICELPTMPPSLLGIRLEEAMKSHFKMLGGIILVGDEVQRGDIEDGELKRIFTRNHRDMPLIADNYLIATGSFFSRGMAAQRLSIDEPIFNLDTVAIPDRDQWYQPEFFASKAHPFLKMGVICNDQLQASANNQTIDNLFCAGALLAHYDPVFEGCGSGVAISTGFHVAEQMISKHTARQNQNNKERTIA

SEQ ID NO: 79317 - DNA, 1260 bp, Salmonella choleraesuis
  CDS (1)..(1260): transl_table=11
atgaaatttgatacggttattatgggcggcggtctcgccggtttgctatgcggactgcaactccagcagcatggattacgctgcgccatcgtcacccgcggacaaagcgcgctgcatttttcctccggctcgctggatctactcagcgccctgcccgacggccaaccggtgaccgacattaccgccgggcttgatgcgctgtgccgccaggcgcctgaacatccttattcgcgtttgggcgcgcaaaaagtccttacgctggcgcaacaggcgcaaacgctacttaacgccagcggcgcgcagttatacggcgacgtacagcaggcgcaccagcgtgtcacgccgcttggcacattgcgttcaacctggcttagctcgccggaagtaccggtctggccgttatccgcacagcgaatttgcgtcgtcggcgttagcggattactggatttccaggcgcaccttgcggcagcgtcgctgcgccaacgcgacctcaacgtggaaaccgcagaaatcgaccttccggaactggacgtactgcgtgataacccgacggaatttcgcgcggtcaatattgcgcgtctgcttgataacgaagaaaaatggccactgctgtacgacgcgctgtcgccaatagcgacaaactgcgacatgatcatcatgcccgcctgtttcgggctagcgaacgatacgctgtggcgctggcttaacgaacgtctgccctgcgcgctcacgctgctgccgacgctgccgccatcggtgctcggtattcgtctgcacaatcagctccagcgccagtttgtccgtcagggcggcatctggatgccgggcgatgaagtgaagaaagtcacctgccgtcacggtatcgtgagcgaaatatggacccgcaaccatgccgatatcccactgcgcccgcgttttgccgtacttgccagcggtagcttctttagtagcggtctggttgccgagcgcgaagggatccgcgaacctattttagggctcgacgtacagcaaacggccacccgcgccgaatggtatcaacaacatttcttcgacccacagccctggcagcagtttggcgtcgtgacggatgacgccttccgcccctcccttgcgggcaacacggtagaaaatctgtatgcaataggttctgtgctggcgggattcgatcctatagctgagggatgcggcggcggtgtctgcgcagtcagcgccctccaggccgcgcaccatatcgctgagcgtgcaggagaacagcaatga

SEQ ID NO: 79318 - protein, 419 aa, Salmonella choleraesuis
MKFDTVIMGGGLAGLLCGLQLQQHGLRCAIVTRGQSALHFSSGSLDLLSALPDGQPVTDITAGLDALCRQAPEHPYSRLGAQKVLTLAQQAQTLLNASGAQLYGDVQQAHQRVTPLGTLRSTWLSSPEVPVWPLSAQRICVVGVSGLLDFQAHLAAASLRQRDLNVETAEIDLPELDVLRDNPTEFRAVNIARLLDNEEKWPLLYDALSPIATNCDMIIMPACFGLANDTLWRWLNERLPCALTLLPTLPPSVLGIRLHNQLQRQFVRQGGIWMPGDEVKKVTCRHGIVSEIWTRNHADIPLRPRFAVLASGSFFSSGLVAEREGIREPILGLDVQQTATRAEWYQQHFFDPQPWQQFGVVTDDAFRPSLAGNTVENLYAIGSVLAGFDPIAEGCGGGVCAVSALQAAHHIAERAGEQQ

SEQ ID NO: 79319 - DNA, 1260 bp, Salmonella paratyphi
  CDS (1)..(1260): transl_table=11
atgaaatttgatacggttattatgggcggcggtctcgccggtttgctatgcggactgcaactccagcagcatggattacgctgcgccatcgtcacccgcggacaaagcgcgctgcatttttcctccggctcgctggatctactcagcgccctgcccgacggccaaccggtgaccgacattaccgccgggcttgatgcgctgtgccgccaggcgcctgaacatccttattcgcgtttaggcgcgcaaaaagtccttacgctggcgcaacaggcgcaaacgctacttaacgccagcggcgcgcagttatacggtgacgtacagcaggcgcaccagcgtgtcacgccgcttggcacattgcgttcaacctggcttagctcaccggaagtaccggtctggccgttatccgcacagcgaatttgcgtcgtcggcgttagcggattactggatttccaggcgcaccttgcggcagcgtcgctgcgccaacgcgacctcaacgtggaaaccgcagaaatcgaccttccggaactggacgtactgcgtgataacccgacggaatttcgcgcggtcaatattgcgcgtctgcttgataacgaagaaaaatggccgctgctgtacgacgcgctgtcgccaatagcgacaaactgcgacatgatcatcatgcccgcctgtttcgggctggcgaacgatacgctgtggcgctggcttaacgaacgtctgccctgcgcgctcacgctgctgccgacgctgccgccatcggtgctcggtattcgtctgcacaatcagctccagcgccagtttgtccgtcagggcggcatctggatgccgggcgatgaagtgaagaaagtcacctgccgtcgcggtaccgtgagcgaaatatggacccgcaaccatgccgatatcccactgcgcccgcgttttgccgtacttgccagcggtagcttctttagtagcggtctggttgccgagcgcgaagggatccgcgaacctattttagggctcgacgtacagcaaacggccacccgcgccgaatggtatcaacaacatttcttcgacccacagccctggcagcagtttggcgtcgtgacggatgacgccttccgcccctcccttgcgggcaacacggtagaaaatctgtatgcaataggttctgtgctggcgggattcgatcctatagctgagggatgcggcggcggtgtctgcgcagtcagcgccctccaggccgcgcaccatatcgctgagcgtgcaggagaacagcaatga

SEQ ID NO: 79320 - protein, 419 aa, Salmonella paratyphi
MKFDTVIMGGGLAGLLCGLQLQQHGLRCAIVTRGQSALHFSSGSLDLLSALPDGQPVTDITAGLDALCRQAPEHPYSRLGAQKVLTLAQQAQTLLNASGAQLYGDVQQAHQRVTPLGTLRSTWLSSPEVPVWPLSAQRICVVGVSGLLDFQAHLAAASLRQRDLNVETAEIDLPELDVLRDNPTEFRAVNIARLLDNEEKWPLLYDALSPIATNCDMIIMPACFGLANDTLWRWLNERLPCALTLLPTLPPSVLGIRLHNQLQRQFVRQGGIWMPGDEVKKVTCRRGTVSEIWTRNHADIPLRPRFAVLASGSFFSSGLVAEREGIREPILGLDVQQTATRAEWYQQHFFDPQPWQQFGVVTDDAFRPSLAGNTVENLYAIGSVLAGFDPIAEGCGGGVCAVSALQAAHHIAERAGEQQ

SEQ ID NO: 79321 - DNA, 1260 bp, Salmonella typhi
  CDS (1)..(1260): transl_table=11
atgaaatttgatacggttattatgggcggcggtctcgccggtttgctatgcggactgcaactccagcagcatggattacgctgcgccatcgtcacccgcggacaaagcgcgctgcatttttcctccggctcgctggatctacttagcgccctgcccaacggccaaccggtgaccgacattaccgccgggcttgatgcgctgcgccgccaggcgcctgaacatccttattcgcgtttaggcgcgcaaaaagtccttacgctggcgcaacaggcgcaaacgctacttaacgccagcggcgcgcagttatacggcgacgtacagcaggcgcaccagcgtgtcacgccgcttggcacattgcgttctacctggcttagctcgccggaagtaccggtctggccgttatccgcacagcgaatttgcgtcgtcggcgttagcggattactggatttccaggcgcaccttgcggcagcgtcgctgcgccaacgcgacctcaacgttgaaaccgcagaaatcgaccttccggaactggacgtactgcgtgataacccgacggaatttcgcgcggtcaatatcgcgcgtctgcttgataacgaagaaaaatggcagctgctgtacgacgcgctgtcgccaatagcgacaaactgcgacatgatcatcatgcccgcctgtttcgggctggcgaacgatacgctgtggcgctggcttaacgaacgtctgccctgcgcgctcacgctgctgccgacgctgccgccatcggtgctcggtattcgtctgcacaatcaactccagcgccagtttgtccgtcagggcggcatctggatgccgggcgatgaagtgaagaaagtcacctgccgtcgcggtaccgtgagcgaaatatggacccgcaaccatgccgatatcccactgcgcccgcgttttgccgtacttgccagcggtagcttctttagtagcgggctggttgccgagcgcgaagggatccgcgaacctattttagggctcgacgtacagcaaacggccacccgcgccgaatggtatcaacaacatttcttcgacccacagccctggcagcagtttggcgtcgtgacggatgacgctttccgcccctcccttgcgggcaacacggtagaaaatctgtatgcaataggttctgtgctggcgggattcgatcctatagctgagggatgcggcggcggcgtctgcgcagtcagcgccctccaggccgcgcaccatatcgctgagcgtgcaggagaacagcaatga

SEQ ID NO: 79322 - protein, 419 aa, Salmonella typhi
MKFDTVIMGGGLAGLLCGLQLQQHGLRCAIVTRGQSALHFSSGSLDLLSALPNGQPVTDITAGLDALRRQAPEHPYSRLGAQKVLTLAQQAQTLLNASGAQLYGDVQQAHQRVTPLGTLRSTWLSSPEVPVWPLSAQRICVVGVSGLLDFQAHLAAASLRQRDLNVETAEIDLPELDVLRDNPTEFRAVNIARLLDNEEKWQLLYDALSPIATNCDMIIMPACFGLANDTLWRWLNERLPCALTLLPTLPPSVLGIRLHNQLQRQFVRQGGIWMPGDEVKKVTCRRGTVSEIWTRNHADIPLRPRFAVLASGSFFSSGLVAEREGIREPILGLDVQQTATRAEWYQQHFFDPQPWQQFGVVTDDAFRPSLAGNTVENLYAIGSVLAGFDPIAEGCGGGVCAVSALQAAHHIAERAGEQQ

SEQ ID NO: 79323 - DNA, 1260 bp, Shigella flexneri
  CDS (1)..(1260): transl_table=11
atgcgctttgatactgtcattatgggcggcggcctcgccggattactctgtggcctgcaactgcaaaaacacggcctgcgctgtgccattgtcacgcgtggtcaaagcgcgttgcatttctcatccggttcgctggatttgctgagccatctgccagatggtcaacccgtggcagacattcacagtggactggaatctttgcgtcagcaggcacctgcacatccttactctcttctcgggccacaacgcgtgctcgatctcgcttgccaggcgcaggcattaatcgctgaaagcggtgcgcaattgcagggcagcgtagaactggctcaccagcggattacgccgctcggcactttgcgtgcaacctggttaagttcgccagaagttcccgtctggccgctacccgcgaagaagatatgtgtagtggggataagcgggctgatggatttccaggcgcatcttgcggcggcttcgttgcgcgaactggatctttcggttgaaaccgcagaaatagagctgccggaactggatgtcctgcgcaataacgccaccgaatttcgcgcggtgaatatcgcccgtttccttgataatgaagaaaactggccgctgttacttgatgcgcttattcctgtcgccaatacctgcgaaatgatcctgatgcccgcctgcttcggcctggccgatgacaaactgtggcgttggttgaatgaaaaactaccttgttcactgatgcttttgccaacgctgccgccttccgtgctgggcattcgtctgcaaaaccagttacagcgccagtttgtgcgccaaggtggagtgtggatgccgggcgatgaagtgaaaaaagtgacctgtaaaaatggcgtagtgaatgaaatctggacccgcaatcacgccgatattccgctacgtccacgtttcgcggttctcgccagcggcagtttctttagtggcggactagtagcggaacgtaacggcattcgcgagacgattctcggccttgatgtgctacaaaccgccacgcggggtgaatggtataagggcgatttttttgcgccgcaaccgtggcagcagttcggtgtaaccactgatgagacgctacgcccgtcgcaggcagggcaaaccattgagaacctgtttgccatcggttcggtgctgggcggatttgatcccatcgcccagggatgcggcggcggtgtttgtgccgtcagtgctttacatgccgctcaacagattgcccaacgcgcaggaggccaacaatga

SEQ ID NO: 79324 - protein, 419 aa, Shigella flexneri
MRFDTVIMGGGLAGLLCGLQLQKHGLRCAIVTRGQSALHFSSGSLDLLSHLPDGQPVADIHSGLESLRQQAPAHPYSLLGPQRVLDLACQAQALIAESGAQLQGSVELAHQRITPLGTLRATWLSSPEVPVWPLPAKKICVVGISGLMDFQAHLAAASLRELDLSVETAEIELPELDVLRNNATEFRAVNIARFLDNEENWPLLLDALIPVANTCEMILMPACFGLADDKLWRWLNEKLPCSLMLLPTLPPSVLGIRLQNQLQRQFVRQGGVWMPGDEVKKVTCKNGVVNEIWTRNHADIPLRPRFAVLASGSFFSGGLVAERNGIRETILGLDVLQTATRGEWYKGDFFAPQPWQQFGVTTDETLRPSQAGQTIENLFAIGSVLGGFDPIAQGCGGGVCAVSALHAAQQIAQRAGGQQ

SEQ ID NO: 79325 - DNA, 1311 bp, Vibrio cholerae
  CDS (1)..(1311): transl_table=11
atgatgcattatgatgtggccgtcatcggtggcggaattgccggatacagcgccgccctgcgcgcactgcaagccggaaaaaaagtggtgttaatcaaccaagggcaaagtgcgctgcatttttcttccggctcgattgatgtgcttggccgtttgccggatggcagcgtagtgaatcagccgtttgacgcactttcagctttacaacagcaagcaccagagcatccttacagcaaagtcggacgcaaaaacagcgaaaaaggtttgatgtggttcaaacgtactttagacagtgcgcacgtccctttgcatcacgaacccgatggggccaaccactggcgcattaccccacttggcaccctaaaaaatacttggctgtcgcagccttttgtttacccttatcgtggtaatgccgacttttcacgcatcatgattgttgcgattgacggctatcgcgattttcaacctgcgatgctgcgtgataacctcgctcagcgccctgagcttgctaacacgccgatgctcacggtgaatgtttctatccccggctttgaagggttcagacgtaatcctaacgagctgcgctcgattgatattgcgcgtttgctgcgccaagaatcggcgtggaatgcattgtgcgatcagctgatgcgcgttgcgcgtcctgatgatctggtgatcatgcctgccatcatgggcaacggtgatggtttgcatttgatgagcaaactccaacaggtaacccaactgcgctttcatgaagtgccgactatgcccccatcactgctcgggatccgcattgaagaagcactgcatcgtagtttcatccaaggtggcggcgtgcaactcaagggagacaaagtgattggtggcaattttgcaggctctcgcctcactgctattcatactcaaaatctgcgcgatttcccaatcagtgccgaacactatgtgatggcgaccggcagttacttcagccaaggattacaagcctcacaacatgcgattcaagagccgatctttgcgctggacgtccagcaaaaccctgaccgcgctcagtggcgacatgcccaatttatcgccgcacaatcacacccgtttatgactttcggcgtcactaccgatgccaatttgcatccgtcacgccaaggcaaaaccattgacaatctttggtgttgcggcgcaatgctcagtgggtacgaccccgtgtttgaaggctgtggcggaggcgtagcgattgcaaccgcttatcatgccgtagaacagatccttgcgacttatgcgcaaaccaaacaaccggaggtgctgctatga

SEQ ID NO: 79326 - protein, 436 aa, Vibrio cholerae
MMHYDVAVIGGGIAGYSAALRALQAGKKVVLINQGQSALHFSSGSIDVLGRLPDGSVVNQPFDALSALQQQAPEHPYSKVGRKNSEKGLMWFKRTLDSAHVPLHHEPDGANHWRITPLGTLKNTWLSQPFVYPYRGNADFSRIMIVAIDGYRDFQPAMLRDNLAQRPELANTPMLTVNVSIPGFEGFRRNPNELRSIDIARLLRQESAWNALCDQLMRVARPDDLVIMPAIMGNGDGLHLMSKLQQVTQLRFHEVPTMPPSLLGIRIEEALHRSFIQGGGVQLKGDKVIGGNFAGSRLTAIHTQNLRDFPISAEHYVMATGSYFSQGLQASQHAIQEPIFALDVQQNPDRAQWRHAQFIAAQSHPFMTFGVTTDANLHPSRQGKTIDNLWCCGAMLSGYDPVFEGCGGGVAIATAYHAVEQILATYAQTKQPEVLL

SEQ ID NO: 79327 - DNA, 1317 bp, Vibrio vulnificus
  CDS (1)..(1317): transl_table=11
atgttaaattacgatattgctgtcattggcggtggcatcgcgggttactgtgcggcgctaaatgcaatagaggcgggcaagaaaaccgtactcattagccaaggccaaagcgcgttgcatttttcatcaggctcgattgatgtgatggcaaaaacgccgtcgggtgagcgggtcgaggcaccattttctgccatggcttcgctgccacagcagcatcccgaacatccctacagtaaaatgtcgccaaactttgttcgtcaatcgctttactggttagtggatcaactcaaagagcaaggcttaccactgcattgccagcaggatgaatcaaaccatcatcgaattacgccactcggtacactcaaagcgacatggctttctcaaccgtttgtttatcaacaccgtcaaaacgtagcttttaaacggctgttgtttgttgcggtggatggctatcgagatttccagccactgttggccaaagacaatctcaaaaaacaccctgattttcagcactgcgaaattggtgaaattcaggtaacgattccaggttgtgaagccttgcgtcgcaaccccaatgagctgcgctcgattgatattgcgcgtttgctcaagcagcctcaagcattcaacagtttatgtcaccaactgatgaaacacgccactcaagaggatctggtcatcatgcctgcgatcatgggcaacggtgacggactggttctgttgcagcagttgcgtcgtcagaccaatctcactttgcatgaagtgcctaccatgccgccgtctttactgggtattcgcattgaagaggcattgcaaaagcgcttcttaaaacaggggggcgtgttgttaaaaggagaccaagtgctctcgggtgagtgggatgcacaaggtcacttggtgtcgatttccacgcgtaatctcggggacattccactgcacgccaacgcctacattttggcgtcaggcagttacttcagccaagggctcaaagccagtttggacaagattgtggaacctatttttggtttggatatggtggccaagccccatcgccgtcagtggcgaaacgatcaattctttagcgcatcagcgcatccattcatggcgtttggcgtggaaacggatgcgatgtttcgtccttcattaaatgggcaagtatgccaaaacctttactgctgcggctccgtgttgtcgggttatgacccggtatttgaaggctcgggtggaggcgtagcagtatccactgcgctggccgccgttcaaagggcgatgggacttaagcaagcaatgagcgttgaagaggagtgcgtactatga

SEQ ID NO: 79328 - protein, 438 aa, Vibrio vulnificus
MLNYDIAVIGGGIAGYCAALNAIEAGKKTVLISQGQSALHFSSGSIDVMAKTPSGERVEAPFSAMASLPQQHPEHPYSKMSPNFVRQSLYWLVDQLKEQGLPLHCQQDESNHHRITPLGTLKATWLSQPFVYQHRQNVAFKRLLFVAVDGYRDFQPLLAKDNLKKHPDFQHCEIGEIQVTIPGCEALRRNPNELRSIDIARLLKQPQAFNSLCHQLMKHATQEDLVIMPAIMGNGDGLVLLQQLRRQTNLTLHEVPTMPPSLLGIRIEEALQKRFLKQGGVLLKGDQVLSGEWDAQGHLVSISTRNLGDIPLHANAYILASGSYFSQGLKASLDKIVEPIFGLDMVAKPHRRQWRNDQFFSASAHPFMAFGVETDAMFRPSLNGQVCQNLYCCGSVLSGYDPVFEGSGGGVAVSTALAAVQRAMGLKQAMSVEEECVL

SEQ ID NO: 79329 - DNA, 1275 bp, Yersinia pseudotuberculosis
  CDS (1)..(1275): transl_table=11
atgaaatttgatgtgatcatcattggcggtggcttggccgggttggcctgtggtattcgtttggccgaacaaggtaaatattgtgcgattgtcagtgccggacaaaatgcactgcatttttcctctggttctctggatctcttggcaaaattacccgatgggcgggcggtcagccagccattatcggcactcagtgcattagctgaattagcccctgaacatccttacagtaaaatgcggaatatcacgcaattggatgagttggtacaggaagccgaggctctattacggcggtgcggtctggatatcgttgggagtagcgctgaaaaccacttacgtctgacgccattgggtagctgccgtcccacatggttgagcctggcggacatcccggttgcaccgttaaatggcccgctgccgtggcaacgcgtggccgtgattggtattgaaggctttctcgattttcagccacagatggtcgcgagtgccttacaggatcagggtattgatgcgacggcagattatttacatttaccggcgctggatcggttgcgggataatccgagcgaattcagagcggtaaacatcgctcgaatactggatttaccggaaaatcgacaacccttagcggatgagttatcccgcctgtcatctaccgctgaaatgattctattgcccgcctgtattgggctggataaatctgcgccattagatgccctacgcgccgtggtcggcaaacctattcaactgttgccgacattacctccttcgctgttagggatgcgcttacatcaggcgctgcgccatcgcttccaacaattggggggcttagtgatgccgggtgatgcggttttgcgggcggaattggttgataaccggatcactggcctttatagccgcaaccacggtgatattcctctacgagctgcgcagatggtactggccagtggcagtttcttcagcaatgggctggttgctaccttcgataaagtctatgaaccgatactggatctggatattttatcactgcctcaccgcgcagactggagccacagtaatctgtttgcgccgcagccttatctgcagtttggtgtcaacacggataaccatttacggccgctgcgtggcggtgtcgccctagagaatctacatgccatcggtgccgttctggggggatatgatccgctccagcaaggttgtggcgcgggtgtttcattgaccagtgctgtgtttgtcgccgaacagattatcagcgagatggcggtgacattatga

SEQ ID NO: 79330 - protein, 424 aa, Yersinia pseudotuberculosis
MKFDVIIIGGGLAGLACGIRLAEQGKYCAIVSAGQNALHFSSGSLDLLAKLPDGRAVSQPLSALSALAELAPEHPYSKMRNITQLDELVQEAEALLRRCGLDIVGSSAENHLRLTPLGSCRPTWLSLADIPVAPLNGPLPWQRVAVIGIEGFLDFQPQMVASALQDQGIDATADYLHLPALDRLRDNPSEFRAVNIARILDLPENRQPLADELSRLSSTAEMILLPACIGLDKSAPLDALRAVVGKPIQLLPTLPPSLLGMRLHQALRHRFQQLGGLVMPGDAVLRAELVDNRITGLYSRNHGDIPLRAAQMVLASGSFFSNGLVATFDKVYEPILDLDILSLPHRADWSHSNLFAPQPYLQFGVNTDNHLRPLRGGVALENLHAIGAVLGGYDPLQQGCGAGVSLTSAVFVAEQIISEMAVTL

SEQ ID NO: 79331 - DNA, 25 bp, Artificial sequence
  primer
atgcgctttgatactgtcattatgg

SEQ ID NO: 79332 - DNA, 24 bp, Artificial sequence
  primer
ttattgttggcctcctgcgcgttg

SEQ ID NO: 79333 - protein, 434 aa, Artificial sequence
  consensus sequence
  Variant (2)..(5): Xaa in position 2 to 5 is any amino acid
  Variant (13)..(21): Xaa in position 13 to 21 is any amino acid
  Variant (23)..(29): Xaa in position 23 to 29 is any amino acid
  Variant (30)..(30): Xaa in position 30 is any or no amino acid
  Variant (33)..(33): Xaa in position 33 is any amino acid
  Variant (35)..(36): Xaa in position 35 to 36 is any amino acid
  Variant (38)..(38): Xaa in position 38 is any amino acid
  Variant (42)..(42): Xaa in position 42 is any amino acid
  Variant (44)..(44): Xaa in position 44 is any amino acid
  Variant (46)..(48): Xaa in position 46 to 48 is any amino acid
  Variant (50)..(51): Xaa in position 50 to 51 is any amino acid
  Variant (52)..(68): Xaa in position 52 to 68 is any or no amino acid
  Variant (70)..(72): Xaa in position 70 to 72 is any amino acid
  Variant (73)..(73): Xaa in position 73 is any or no amino acid
  Variant (75)..(75): Xaa in position 75 is any amino acid
  Variant (79)..(81): Xaa in position 79 to 81 is any amino acid
  Variant (83)..(85): Xaa in position 83 to 85 is any amino acid
  Variant (86)..(86): Xaa in position 86 is any or no amino acid
  Variant (88)..(110): Xaa in position 88 to 110 is any amino acid
  Variant (111)..(113): Xaa in position 111 to 113 is any or no amino acid
  Variant (115)..(115): Xaa in position 115 is any amino acid
  Variant (117)..(117): Xaa in position 117 is any amino acid
  Variant (119)..(120): Xaa in position 119 to 120 is any amino acid
  Variant (122)..(126): Xaa in position 122 to 126 is any amino acid
  Variant (130)..(146): Xaa in position 130 to 146 is any amino acid
  Variant (147)..(151): Xaa in position 147 to 151 is any or no amino acid
  Variant (153)..(154): Xaa in position 153 to 154 is any amino acid
  Variant (156)..(157): Xaa in position 156 to 157 is any amino acid
  Variant (161)..(164): Xaa in position 161 to 164 is any amino acid
  Variant (166)..(167): Xaa in position 166 to 167 is any amino acid
  Variant (169)..(182): Xaa in position 169 to 182 is any amino acid
  Variant (183)..(186): Xaa in position 183 to 186 is any or no amino acid
  Variant (188)..(189): Xaa in position 188 to 189 is any amino acid
  Variant (190)..(192): Xaa in position 190 to 192 is any or no amino acid
  Variant (194)..(197): Xaa in position 194 to 197 is any amino acid
  Variant (199)..(199): Xaa in position 199 is any amino acid
  Variant (201)..(201): Xaa in position 201 is any amino acid
  Variant (202)..(204): Xaa in position 202 to 204 is any or no amino acid
  Variant (206)..(207): Xaa in position 206 to 207 is any amino acid
  Variant (208)..(208): Xaa in position 208 is any or no amino acid
  Variant (210)..(215): Xaa in position 210 to 215 is any amino acid
  Variant (216)..(217): Xaa in position 216 to 217 is any or no amino acid
  Variant (219)..(234): Xaa in position 219 to 234 is any amino acid
  Variant (235)..(238): Xaa in position 235 to 238 is any or no amino acid
  Variant (241)..(242): Xaa in position 241 to 242 is any amino acid
  Variant (244)..(252): Xaa in position 244 to 252 is any amino acid
  Variant (253)..(253): Xaa in position 253 is any or no amino acid
  Variant (255)..(265): Xaa in position 255 to 265 is any amino acid
  Variant (272)..(273): Xaa in position 272 to 273 is any amino acid
  Variant (275)..(275): Xaa in position 275 is any amino acid
  Variant (277)..(280): Xaa in position 277 to 280 is any amino acid
  Variant (282)..(284): Xaa in position 282 to 284 is any amino acid
  Variant (286)..(288): Xaa in position 286 to 288 is any amino acid
  Variant (291)..(294): Xaa in position 291 to 294 is any amino acid
  Variant (297)..(325): Xaa in position 297 to 325 is any amino acid
  Variant (326)..(327): Xaa in position 326 to 327 is any or no amino acid
  Variant (331)..(331): Xaa in position 331 is any amino acid
  Variant (337)..(337): Xaa in position 337 is any amino acid
  Variant (340)..(347): Xaa in position 340 to 347 is any amino acid
  Variant (348)..(348): Xaa in position 348 is any or no amino acid
  Variant (351)..(353): Xaa in position 351 to 353 is any amino acid
  Variant (356)..(360): Xaa in position 356 to 360 is any amino acid
  Variant (361)..(366): Xaa in position 361 to 366 is any or no amino acid
  Variant (368)..(369): Xaa in position 368 to 369 is any amino acid
  Variant (371)..(379): Xaa in position 371 to 379 is any amino acid
  Variant (380)..(381): Xaa in position 380 to 381 is any or no amino acid
  Variant (383)..(386): Xaa in position 383 to 386 is any amino acid
  Variant (389)..(396): Xaa in position 389 to 396 is any amino acid
  Variant (397)..(401): Xaa in position 397 to 401 is any or no amino acid
  Variant (403)..(406): Xaa in position 403 to 406 is any amino acid
  Variant (409)..(411): Xaa in position 409 to 411 is any amino acid
  Variant (413)..(416): Xaa in position 413 to 416 is any amino acid
  Variant (418)..(423): Xaa in position 418 to 423 is any amino acid
  Variant (427)..(427): Xaa in position 427 is any amino acid
  Variant (430)..(433): Xaa in position 430 to 433 is any amino acid
DXXXXGGGLAGLXXXXXXXXXGXXXXXXXXGQXAXXFXSGSXDXLXXXPXXXXXXXXXXXXXXXXXXXLXXXXPXHPYXXXGXXXXVXXXXXXXXXXXXXXXXXXXXXXXXXXHXRXTXXGXXXXXWLSXXXXXXXXXXXXXXXXXXXXXXGXXGXXDFQXXXXAXXLXXXXXXXXXXXXXXXXXXPXXXXXRXXXXEXRXXXXIXXXLXXXXXXXXLXXXXXXXXXXXXXXXXXXXXPAXXGXXXXXXXXXXLXXXXXXXXXXXPTLPPSXXGXRXXXXLXXXFXXXGGXXXXGDXXXXXXXXXXXXXXXXXXXXXXXXXXXXXXXVLAXGSFFSXGLXXXXXXXXXEPXXXLDXXXXXXXXXXXRXXWXXXXXXXXXXXPXXXXGVXXXXXXXXXXXXXGXXXXNLXXXGXXXXGXXXXXXGCGXGVXXXXA

SEQ ID NO: 79334 - protein, 30 aa, Artificial sequence
  protein pattern
  Variant (2)..(5): Xaa in position 2 to 5 is any amino acid
  Variant (6)..(6): Xaa in position 6 is any or no amino acid
  Variant (8)..(9): Xaa in position 8 to 9 is any amino acid
  Variant (10)..(10): Xaa in position 10 is any or no amino acid
  Variant (13)..(13): Xaa in position 13 is Ala, Asn or Ser
  Variant (15)..(15): Xaa in position 15 is Ile, Leu or Met
  Variant (16)..(16): Xaa in position 16 is any amino acid
  Variant (18)..(18): Xaa in position 18 is Ala or Ser
  Variant (21)..(21): Xaa in position 21 is Ala or Ser
  Variant (22)..(22): Xaa in position 22 is Ile, Leu or Met
  Variant (24)..(24): Xaa in position 24 is Phe, Leu or Val
  Variant (25)..(25): Xaa in position 25 is Leu or Met
  Variant (26)..(26): Xaa in position 26 is Ala, Gly, Ser or Thr
  Variant (27)..(28): Xaa in position 27 to 28 is any amino acid
  Variant (30)..(30): Xaa in position 30 is Asp, Asn or Ser
GXXXXXIXXXGQXAXXFXSGXXDXXXXXPX

SEQ ID NO: 79335 - protein, 29 aa, Artificial sequence
  protein pattern
  Variant (2)..(2): Xaa in position 2 is any amino acid
  Variant (3)..(5): Xaa in position 3 to 5 is any or no amino acid
  Variant (7)..(7): Xaa in position 7 is any or no amino acid
  Variant (9)..(9): Xaa in position 9 is Ser or Thr
  Variant (11)..(12): Xaa in position 11 to 12 is any amino acid
  Variant (13)..(13): Xaa in position 13 is Phe, Leu, Met or Val
  Variant (14)..(14): Xaa in position 14 is Gly or Ser
  Variant (15)..(15): Xaa in position 15 is any amino acid
  Variant (17)..(17): Xaa in position 17 is Ile, Leu or Met
  Variant (18)..(18): Xaa in position 18 is any amino acid
  Variant (19)..(19): Xaa in position 19 is Ala, Ser or Thr
  Variant (20)..(23): Xaa in position 20 to 23 is any amino acid
  Variant (24)..(24): Xaa in position 24 is Ile, Leu or Val
  Variant (25)..(25): Xaa in position 25 is any amino acid
  Variant (27)..(27): Xaa in position 27 is Pro or Thr
  Variant (28)..(28): Xaa in position 28 is Ile, Leu or Val
  Variant (29)..(29): Xaa in position 29 is Phe or Leu
AXXXXLXAXGXXXXXGXXXXXXXXXEXXX

SEQ ID NO: 79336 - protein, 40 aa, Artificial sequence
  protein pattern
  Variant (2)..(5): Xaa in position 2 to 5 is any amino acid
  Variant (7)..(7): Xaa in position 7 is Leu or Val
  Variant (8)..(8): Xaa in position 8 is Phe, His, Trp or Tyr
  Variant (9)..(9): Xaa in position 9 is Ala or Cys
  Variant (10)..(10): Xaa in position 10 is any amino acid
  Variant (12)..(12): Xaa in position 12 is Ala, Asn or Ser
  Variant (13)..(13): Xaa in position 13 is Ile, Leu, Met or Val
  Variant (14)..(14): Xaa in position 14 is Ile, Leu or Val
  Variant (15)..(15): Xaa in position 15 is Ala, Glu, Gly or Ser
  Variant (17)..(17): Xaa in position 17 is Phe or Tyr
  Variant (18)..(18): Xaa in position 18 is any amino acid
  Variant (19)..(19): Xaa in position 19 is Ala, Gly or Pro
  Variant (20)..(20): Xaa in position 20 is Ile, Leu or Val
  Variant (21)..(22): Xaa in position 21 to 22 is any amino acid
  Variant (24)..(24): Xaa in position 24 is Cys or Ser
  Variant (25)..(25): Xaa in position 25 is Ala or Gly
  Variant (26)..(26): Xaa in position 26 is Ala, Gly or Ser
  Variant (29)..(29): Xaa in position 29 is Ala, Cys or Ser
  Variant (30)..(31): Xaa in position 30 to 31 is any amino acid
  Variant (32)..(32): Xaa in position 32 is Ser or Thr
  Variant (33)..(33): Xaa in position 33 is Ala or Gly
  Variant (34)..(35): Xaa in position 34 to 35 is any amino acid
  Variant (36)..(36): Xaa in position 36 is Ala, Thr or Val
  Variant (37)..(37): Xaa in position 37 is Ala, Gly or Val
  Variant (38)..(39): Xaa in position 38 to 39 is any amino acid
  Variant (40)..(40): Xaa in position 40 is Ala, Ile or Val
GXXXXNXXXXGXXXXGXXXXXXGXXXGVXXXXXXXXXXXX

SEQ ID NO: 79337 - protein, 28 aa, Artificial sequence
  protein pattern
  Variant (3)..(3): Xaa in position 3 is Leu or Met
  Variant (7)..(7): Xaa in position 7 is Leu, Met or Val
  Variant (8)..(8): Xaa in position 8 is Ile, Leu, Pro or Val
  Variant (10)..(10): Xaa in position 10 is Ile, Leu or Met
  Variant (12)..(15): Xaa in position 12 to 15 is any amino acid
  Variant (17)..(19): Xaa in position 17 to 19 is any amino acid
  Variant (21)..(23): Xaa in position 21 to 23 is any amino acid
  Variant (26)..(26): Xaa in position 26 is Phe, Ile, Leu, Met or Val
  Variant (27)..(27): Xaa in position 27 is any amino acid
  Variant (28)..(28): Xaa in position 28 is Phe, Ile, Leu or Met
PTXPPSXXGXRXXXXLXXXFXXXGGXXX

SEQ ID NO: 79338 - protein, 18 aa, Artificial sequence
  protein pattern
  Variant (2)..(2): Xaa in position 2 is Ile, Leu, Met or Val
  Variant (4)..(4): Xaa in position 4 is Ala, Gly or Pro
  Variant (5)..(5): Xaa in position 5 is Leu, Met or Val
  Variant (7)..(8): Xaa in position 7 to 8 is any amino acid
  Variant (9)..(9): Xaa in position 9 is His, Lys or Arg
  Variant (10)..(10): Xaa in position 10 is any amino acid
  Variant (11)..(11): Xaa in position 11 is Ala, Cys, Ser or Thr
  Variant (13)..(13): Xaa in position 13 is Leu or Met
  Variant (15)..(17): Xaa in position 15 to 17 is any amino acid
  Variant (18)..(18): Xaa in position 18 is Gly, Ile or Val
RXTXXGXXXXXWXSXXXX

SEQ ID NO: 79339 - protein, 18 aa, Artificial sequence
  protein pattern
  Variant (2)..(3): Xaa in position 2 to 3 is any or no amino acid
  Variant (5)..(5): Xaa in position 5 is any or no amino acid
  Variant (7)..(7): Xaa in position 7 is Gly or Ser
  Variant (9)..(9): Xaa in position 9 is Ile or Leu
  Variant (12)..(13): Xaa in position 12 to 13 is any amino acid
  Variant (14)..(14): Xaa in position 14 is Ala, Cys, Ser or Thr
  Variant (15)..(15): Xaa in position 15 is Ala or Gly
  Variant (16)..(16): Xaa in position 16 is Ile or Leu
  Variant (17)..(17): Xaa in position 17 is any amino acid
  Variant (18)..(18): Xaa in position 18 is Ala or Leu
VXXIXGXGXAGXXXXXXX

SEQ ID NO: 79340 - protein, 21 aa, Artificial sequence
  protein pattern
  Variant (2)..(6): Xaa in position 2 to 6 is any amino acid
  Variant (7)..(7): Xaa in position 7 is any or no amino acid
  Variant (9)..(11): Xaa in position 9 to 11 is any amino acid
  Variant (12)..(12): Xaa in position 12 is any or no amino acid
  Variant (14)..(14): Xaa in position 14 is Phe or Leu
  Variant (16)..(16): Xaa in position 16 is Ala or Ser
  Variant (17)..(17): Xaa in position 17 is Ile or Val
  Variant (18)..(18): Xaa in position 18 is Asp or Asn
  Variant (20)..(20): Xaa in position 20 is Ala or Ser
  Variant (21)..(21): Xaa in position 21 is Gln or Arg
PXXXXXXRXXXXEXRXXXIXX

SEQ ID NO: 79341 - protein, 17 aa, Artificial sequence
  protein pattern
  Variant (2)..(3): Xaa in position 2 to 3 is any amino acid
  Variant (4)..(6): Xaa in position 4 to 6 is any or no amino acid
  Variant (10)..(10): Xaa in position 10 is Ala, Pro or Ser
  Variant (11)..(11): Xaa in position 11 is any amino acid
  Variant (12)..(12): Xaa in position 12 is Phe, Ile, Leu or Met
  Variant (13)..(13): Xaa in position 13 is Ala, Leu or Val
  Variant (14)..(14): Xaa in position 14 is any amino acid
  Variant (15)..(15): Xaa in position 15 is Ala, Asp, Glu, Gly or Ser
  Variant (16)..(16): Xaa in position 16 is Ala, Asn, Ser or Thr
GXXXXXDFQXXXXXXXL

SEQ ID NO: 79342 - DNA, 1329 bp, Escherichia coli
  CDS (1)..(1329)
atggaaaacgctaaaatgaactcgctcatcgcccagtatccgttggtaaaggatctggttgctcttaaagaaaccacctggtttaatcctggcacgacctcattggctgaaggtttaccttatgttggcctgaccgaacaggatgttcaggacgcccatgcgcgcttatcccgttttgcaccctatctggcaaaagcatttcctgaaactgctgccactggggggattattgaatcagaactggttgccattccagctatgcaaaaacggctggaaaaagaatatcagcaaccgatcagcgggcaactgttactgaaaaaagatagccatttgcccatttccggctccataaaagcacgcggcgggatttatgaagtcctggcacacgcagaaaaactggctctggaagcggggttgctgacgcttgatgatgactacagcaaactgctttctccggagtttaaacagttctttagccaatacagcattgctgtgggctcaaccggaaatctggggttatcaatcggcattatgagcgcccgcattggctttaaggtgacagttcatatgtctgctgatgcccgggcatggaaaaaagcgaaactgcgcagccatggcgttacggtcgtggaatatgagcaagattatggtgttgccgtcgaggaaggacgtaaagcagcgcagtctgacccgaactgtttctttattgatgacgaaaattcccgcacgttgttccttgggtattccgtcgctggccagcgtcttaaagcgcaatttgcccagcaaggccgtatcgtcgatgctgataaccctctgtttgtctatctgccgtgtggtgttggcggtggtcctggtggcgtcgcattcgggcttaaactggcgtttggcgatcatgttcactgcttttttgccgaaccaacgcactccccttgtatgttgttaggcgtccatacaggattacacgatcagatttctgttcaggatattggtatcgacaaccttaccgcagcggatggccttgcagttggtcgcgcatcaggctttgtcgggcgggcaatggagcgtctgctggatggcttctatacccttagcgatcaaaccatgtatgacatgcttggctggctggcgcaggaagaaggtattcgtcttgaaccttcggcactggcgggtatggccggacctcagcgcgtgtgtgcatcagtaagttaccaacagatgcacggtttcagcgcagaacaactgcgtaataccactcatctggtgtgggcgacgggaggtggaatggtgccggaagaagagatgaatcaatatctggcaaaaggccgttaa

SEQ ID NO: 79343 - protein, 442 aa, Escherichia coli
MENAKMNSLIAQYPLVKDLVALKETTWFNPGTTSLAEGLPYVGLTEQDVQDAHARLSRFAPYLAKAFPETAATGGIIESELVAIPAMQKRLEKEYQQPISGQLLLKKDSHLPISGSIKARGGIYEVLAHAEKLALEAGLLTLDDDYSKLLSPEFKQFFSQYSIAVGSTGNLGLSIGIMSARIGFKVTVHMSADARAWKKAKLRSHGVTVVEYEQDYGVAVEEGRKAAQSDPNCFFIDDENSRTLFLGYSVAGQRLKAQFAQQGRIVDADNPLFVYLPCGVGGGPGGVAFGLKLAFGDHVHCFFAEPTHSPCMLLGVHTGLHDQISVQDIGIDNLTAADGLAVGRASGFVGRAMERLLDGFYTLSDQTMYDMLGWLAQEEGIRLEPSALAGMAGPQRVCASVSYQQMHGFSAEQLRNTTHLVWATGGGMVPEEEMNQYLAKGR

SEQ ID NO: 79344 - DNA, 1413 bp, Alloiococcus otitis
  CDS (76)..(1413): transl_table=11
aaaagcttgatcttgctttcacttgcggttaaacttattattggaaaaatcatttcgaggaaggatgtttgtcaaatgagtctgcaaaaatggactgatcaaataccagaaatcactaaaatcgggaactaccagcccctcttctgggtaaatgataactatgaaggggtcatagccgccaataaaaagtcctcttattcaatggatgatatcgaagatgcctcggcaagattggaccgttttgctgcttattttgcaaagtattttcctgagacccaagataatgatggaatcattgagtctgaactaactgccattccccatatgaagggctttttagaagactactatgatgttcagatccaaggtgacctttacttaaagcgggatgacacccttcccattgccggtaccatcaaagcaagaggggccatttacgaggttcttaaacatgccgaagacttagccttggaacaagggatcttaaccagttatgaggatgactacaccaagtttggcagtcaatcattcaaaaacttctttgctgattacaaggttatggtaggaactacgggcaacctgggtatcagcgtgggtgttatggctgcagctttaggctttgatgtgaccatccatatgtctgacgaagccaaagaatggaagaaaaaccacttgcgagaaaaaggggtgaccgttgttgaacacaagactaactttaccgaagcggtccaacacggccgggtccaatcccaagcagaccctcaatcttacttcgtagacgatgaacactccgtcgacctctttttgggctacacagttgctgccctccgcttacaaaagcaattagaggaagctggtattcccgttgacgccgaccaccccctctttatctactccccttgtggcattgggggcagtccgggcggagtcaacttcggcctcaagcaagtttttggtgaccatgtccattccttcttcgcccaacccacccatatgccttctatgctagtgggacttttgactaaggaatatgataaggtatcagttgcagactttggcatcgatgccaagaccaatatggacggtctggcagttcctagaacttccggttttgtggcggaactcatgcaccactactttaatggtggcttaacagtttcagaagaagaccaaaaagccctcttaagcaaaatgattgacttggaagacattcacctggaaccggctgccctagctggtctgcctggtccggcctacctcttctctagccaagaaggccaaacctacctagaccaaaacaatttactggataaaatggcccaagctaaccatatcgcctgggcaactgggggtagcatggttccaaaagaagagatgaaggccttctaccagaaaggtttagcctatttataa

SEQ ID NO: 79345 - protein, 445 aa, Alloiococcus otitis
MSLQKWTDQIPEITKIGNYQPLFWVNDNYEGVIAANKKSSYSMDDIEDASARLDRFAAYFAKYFPETQDNDGIIESELTAIPHMKGFLEDYYDVQIQGDLYLKRDDTLPIAGTIKARGAIYEVLKHAEDLALEQGILTSYEDDYTKFGSQSFKNFFADYKVMVGTTGNLGISVGVMAAALGFDVTIHMSDEAKEWKKNHLREKGVTVVEHKTNFTEAVQHGRVQSQADPQSYFVDDEHSVDLFLGYTVAALRLQKQLEEAGIPVDADHPLFIYSPCGIGGSPGGVNFGLKQVFGDHVHSFFAQPTHMPSMLVGLLTKEYDKVSVADFGIDAKTNMDGLAVPRTSGFVAELMHHYFNGGLTVSEEDQKALLSKMIDLEDIHLEPAALAGLPGPAYLFSSQEGQTYLDQNNLLDKMAQANHIAWATGGSMVPKEEMKAFYQKGLAYL

SEQ ID NO: 79346 - DNA, 1362 bp, Burkholderia vietnamiensis G4
  CDS (1)..(1362): transl_table=11
atgaccgattccatctacggcaagccactcgaatcctggcttcgcgactacccgcttctgcgcccattgatggcgctcgagccggtcgagtggttcaaccccgccgtcgcgccgctgaccgaagcgctcgatgacattgcgctggacgcctcgcatatcgccgatgcgagcgcgcgcctgcaacgcttcgcgccgctgctggccgacctgttcgcagatgtgtgcgacacgggcggcatcatcgaatcgccgctcaccgacgtgcctgcgttcgcgcaggcattgagcgaacgttacggcgtggaaacgccgcggcgcctgctgctcaagcaggacagccatctgccgatctccggctcgatcaaggcgcgtggcggcatctatgaagtgctcttctacgccgagcagcttgcgctgcgccacggcttgctcaacgacggcgacgattaccgcgtcctcgccggcgacgcatgtcgcgcgctgtttcgcgagcaccgcatcgcggtcgggtcgaccggcaatctcggcatgtcgatcggcatcgcgagcgcgacgctcggctttgcggcgaccgtgcatatgtccaccgatgcgcgccaatggaagaaggaccgcctgcgcgcgcatggcgtgacggtcgtggagtatgcgggcgattacggcgaagcgatcgagaacggccggcgtcttgcggctaacgatccgatgtgccacttcgtcgacgacgaaaattcgacgacgctgttcctcggctatgcggtcgcgggtgagcgcctgaagcgtcagctcgaagcgtcgaacgtgcgtgtcgatgcgacgcatccgctcttcgtgtatctgccttgcggcgtaggcggcggcccgggcggtgtcgcgttcggcttgaagctcgccttcggcgatgcggtgcactgtgttttcgcggagccgacccattcgccgtgcatgttgatgggcgtgctgaccggcttgcacgagcagcttgcggtgcaggatttcggtatcgacaacgtgacggccgccgacggcctcgcggtcggacgcccttccggattcgtcggtcgtgcgatgcaacggatgatcgatggctatttcaccgtcgaggatcgcgagctatatgcaatgctcgcgctgatggcgcagacgagcgacatccggctggagccgtcggcgctggccggcgcgccgggtttcgcgcgcgtgtcgacggagcggcaaggttaccgtgcccgcatgcagctggacgactccgtgatgcgggacgcgacgcatgtgatctgggcaacgggcggcggtatggtgccgcaagctgagatgaacgcatatctgcaggccgggcggcaggcactggcggggtcttga

SEQ ID NO: 79347 - protein, 453 aa, Burkholderia vietnamiensis G4
MTDSIYGKPLESWLRDYPLLRPLMALEPVEWFNPAVAPLTEALDDIALDASHIADASARLQRFAPLLADLFADVCDTGGIIESPLTDVPAFAQALSERYGVETPRRLLLKQDSHLPISGSIKARGGIYEVLFYAEQLALRHGLLNDGDDYRVLAGDACRALFREHRIAVGSTGNLGMSIGIASATLGFAATVHMSTDARQWKKDRLRAHGVTVVEYAGDYGEAIENGRRLAANDPMCHFVDDENSTTLFLGYAVAGERLKRQLEASNVRVDATHPLFVYLPCGVGGGPGGVAFGLKLAFGDAVHCVFAEPTHSPCMLMGVLTGLHEQLAVQDFGIDNVTAADGLAVGRPSGFVGRAMQRMIDGYFTVEDRELYAMLALMAQTSDIRLEPSALAGAPGFARVSTERQGYRARMQLDDSVMRDATHVIWATGGGMVPQAEMNAYLQAGRQALAGS

SEQ ID NO: 79348 - DNA, 1332 bp, Colwellia psychrerythraea 34H
  CDS (1)..(1332): transl_table=11
atgaacaacgataacattgcacagctaatagctgactttcccctcatagaaaaaatggtcgaactaaaagaggtaagctggtttaaccctaatattacttcgctgcaagaaggccttccttatgtcggacttgataacaataatattcaagatgccagtgaccgattagcacgttttgccccctacatggtaaaggcatttcccgaaacggcgataaccaatggcattattgaatctgacgtagttgaaatttcagcaatgaaatcgcaactagagcagcaatatgaagtagaaattcaaggtaaactgctgctaaaaaaagacagtcacctgcccatttcaggttcaatcaaagcgcgtggtggcatttatgaagtattgacacatgctgaacaactagcaataaaagcagaggtgcttgagctttcagatgattacagtaagctatttaccgaagagtttaagtccttttttagccagtacagcatcgctgttggttcaacgggaaaccttggtatgtctattggtattatgagtgcaaaactgggtttttcagttagcgtgcatatgtctgcagacgcgcgccaatggaaaaaagaaaaactccgtgctcatggtgttaatgttgttgagtacaacgaagactacagtgtggctgtagagcaaggtcgccaggaagctgaaaatgatcccaagtgcttctttatcgatgatgaaaactcccaaacactctttttaggctactccgttgccggtgaaagactgaaacaacagtttgatgctatgcatattgtggtagatgaaaataatccactatttgtctacctgccctgcggcgtcggtggtggtcctggtggcgtagcatttgggctgaagatggcttttggtgacaacgtgcattgtatatttgccgagccaacacattccccttgcatgttacttggaattctcactggattacatgatggcattgccgttcaagatatcggcatcgataatattaccgctgctgatggcctggctgttggaagagcttctggctttgttggccgggcaatggaaagactgttagatggtttttataccatcagcgatcagagaatgtatgatctgcttgggctattaaataaggtagaaggtattcaattagagccatcggcattggctggtatgttaggccctattgttgtaactaataatgatgaatatcttaagcgtataaacatgagcaatgaaaaattggtaaacgcaacacaccttatttgggcaacgggtggcggtatggttccagcgatagaaatggaaaaatatctatcaaaagctggcagttaa

SEQ ID NO: 79349 - protein, 443 aa, Colwellia psychrerythraea 34H
MNNDNIAQLIADFPLIEKMVELKEVSWFNPNITSLQEGLPYVGLDNNNIQDASDRLARFAPYMVKAFPETAITNGIIESDVVEISAMKSQLEQQYEVEIQGKLLLKKDSHLPISGSIKARGGIYEVLTHAEQLAIKAEVLELSDDYSKLFTEEFKSFFSQYSIAVGSTGNLGMSIGIMSAKLGFSVSVHMSADARQWKKEKLRAHGVNVVEYNEDYSVAVEQGRQEAENDPKCFFIDDENSQTLFLGYSVAGERLKQQFDAMHIVVDENNPLFVYLPCGVGGGPGGVAFGLKMAFGDNVHCIFAEPTHSPCMLLGILTGLHDGIAVQDIGIDNITAADGLAVGRASGFVGRAMERLLDGFYTISDQRMYDLLGLLNKVEGIQLEPSALAGMLGPIVVTNNDEYLKRINMSNEKLVNATHLIWATGGGMVPAIEMEKYLSKAGS

SEQ ID NO: 79350 - DNA, 1332 bp, Ralstonia eutropha JMP134
  CDS (1)..(1332): transl_table=11
atggtcaccctgtccctcacgcccgagctattagcaaaacttcaatctagacaaccgctgctttgggtgaatccgaggttgggacaaccgctgccggcttccgccccatccttggaactgatcgcagcggcagaagcgcgtcttgcacgctgcgccccgcttatggcggcgctgtttcccgaactggcgtccagccatgggcaagtggaatcgcaattgatgccagccaccggcctccaatacgcgctcggcgaaggcgccgagggcgcgtggttcatcaagcgtgacgaccaactcccgactgctggttctatcaaggcacgcggcggctttcatgaagtgctggcgattgctgaatccatcgcgatcgaacacggcatgctcgacccggatggtgatcgccgcgtgctcgcaacagaggcggcgcgcaagctgttctcgcaatactcggtgacggtcggcagcaccggcaacctcggcctgagcatcggcgtgatggcggcggcgctcggattcgatgcggtggtgcatatgtccgcggacgccaaggcgtggaagaaggaccgcctgcgcaagcgcggcgtgcgcgtcgtggagcatgaaggcgactacgcgcaagccgtggcagcgggccgcgaacaggcattgggcgcgacacgctgccattttgtcgatgacgagcgctccgccctgcttttcttcggatatgccgccgcggcacgtcatctggcgcgccaactggccgaagccggccgcgtagtggatgccgcgcatccgctcttcgtctatctcccgtgcggggtcggcggcgcgcccggtggcatcacgtatgggctcaaggcactgttaggcgaccacgtgcattgcttctttgccgagcccgtggcctcgccgtgcgtactggtgcagttggcctccggctcggatgatcccgtatccgtctacgacatcggcctcgacaaccggaccgatgctgatggcctcgccgtcggccaggcatcccatctggtcagcccgctgatggcttcccaactcgccggcgtgttcacggtccccgacgatcagctctatgttcagttgctcgcgctcaagacgtcgatgggtgtggaagtcgaaccctcagcggcggccggcatcggcggcccgggctggttgcgcgactcccccgaaggccgagcgtatgtgcgcgatcacgggctcgacatgcgcgacgcgacgcatgtgatctgggctaccggcggctcgctcgttccgcgagaagagcttcaccggtttcaggcttacgcgaccgcactggcccatgtgcctggggcgatgcataaggcagcctga

SEQ ID NO: 79351 - protein, 443 aa, Ralstonia eutropha JMP134
MVTLSLTPELLAKLQSRQPLLWVNPRLGQPLPASAPSLELIAAAEARLARCAPLMAALFPELASSHGQVESQLMPATGLQYALGEGAEGAWFIKRDDQLPTAGSIKARGGFHEVLAIAESIAIEHGMLDPDGDRRVLATEAARKLFSQYSVTVGSTGNLGLSIGVMAAALGFDAVVHMSADAKAWKKDRLRKRGVRVVEHEGDYAQAVAAGREQALGATRCHFVDDERSALLFFGYAAAARHLARQLAEAGRVVDAAHPLFVYLPCGVGGAPGGITYGLKALLGDHVHCFFAEPVASPCVLVQLASGSDDPVSVYDIGLDNRTDADGLAVGQASHLVSPLMASQLAGVFTVPDDQLYVQLLALKTSMGVEVEPSAAAGIGGPGWLRDSPEGRAYVRDHGLDMRDATHVIWATGGSLVPREELHRFQAYATALAHVPGAMHKAA

SEQ ID NO: 79352 - DNA, 1269 bp, Carboxydothermus hydrogenoformans Z-2901
  CDS (1)..(1269): transl_table=11
atgtccgaccttttaacaggtattaagaattaccagcagatgttctggcaaaatcccaataaactttcggctgatgaggctttggccaggattaattttagttttgatgatatcttcgaggctcaaaagagacttcaaagatttgcccctcttataaaaaagcttttccccgagacggaaaacgggattatcgaatcgccgttagcagaaattccccggatgaaacaggaaattgaaaagctttacggcgggaaaattcacggccgtcttttcctaaaatgcgacaactacttaaaagtagccggttctatcaaagcccggggcggtatttatgaagtgttaaagcatgccgaaaccctcttattagaaaatggactcattaccctggaggatgattactccaaaatcgctgaggagcggtttaaaaaatttttcagtaactacaaagtagcggtgggttctaccggaaatctcgggttatctattggaatcatggcagcagctttaggttttaaggtagatgtccacatgtcccatgatgctaaggagtggaagaaaaaaatcctaagagaccgcggcgtaaatgtgatcgaataccgggaggattactctaaagcggtagaagaaggccggaaaaaagcggcggcggagaagaacacctattttatcgatgatgaaaactcccgggatttgtttttgggctattctgttgcggctttacggctaaaagaccagttaacggagcttggcattgaagtaaataaagaaaaccccctttttgtctacctgccttgcggtgtaggtggggccccgggaggtatttcctttgggctaaaaaccatctttaaagacgatgtttactgttattttgtggagcccacccattcaccctgcatgcttttgggcttggttacccagaaattttccgctatccacgtaagggattttggtctcgataacattaccgaagcggacggactggcggtggggtctccttccaagctcgtagcggaaatagccaatattttaattgacgggatttataccatcgaagatgaggaactttttaagttgttagctctattaaaagacagcgaaaacattaaagttgagccatcggcagcagcctcgctaaaagggccgcttttagtcaatagcagggcaaatgcgatccatatttcctgggcaaccggaggaatatttattccggaagagatttaccgggaaatgtatatgaggggtaagagttaccttaaagatgtgtattga

SEQ ID NO: 79353 - protein, 422 aa, Carboxydothermus hydrogenoformans Z-2901
MSDLLTGIKNYQQMFWQNPNKLSADEALARINFSFDDIFEAQKRLQRFAPLIKKLFPETENGIIESPLAEIPRMKQEIEKLYGGKIHGRLFLKCDNYLKVAGSIKARGGIYEVLKHAETLLLENGLITLEDDYSKIAEERFKKFFSNYKVAVGSTGNLGLSIGIMAAALGFKVDVHMSHDAKEWKKKILRDRGVNVIEYREDYSKAVEEGRKKAAAEKNTYFIDDENSRDLFLGYSVAALRLKDQLTELGIEVNKENPLFVYLPCGVGGAPGGISFGLKTIFKDDVYCYFVEPTHSPCMLLGLVTQKFSAIHVRDFGLDNITEADGLAVGSPSKLVAEIANILIDGIYTIEDEELFKLLALLKDSENIKVEPSAAASLKGPLLVNSRANAIHISWATGGIFIPEEIYREMYMRGKSYLKDVY

SEQ ID NO: 79354 - DNA, 1299 bp, Haemophilus somnus 129PT
  CDS (1)..(1299): transl_table=11
atgcaagatcctttcattcaaaaattaatgcgttttgaagaagtgatgtggtttaatcctaaaagtgcgggggtaaaaacaggattgtcttacgttgggttggatgtatccgacactcaacaggcggcggaacgtttgcagcgttttgctccttatttttgtcgtgcttttcctgaaactcaaaaaacgaaaggtattttagaatctgaactggtatctattgataagatgaaatcggccttaatcgatcattatcatatgccgatacaaggacgtttattgctcaaaaaagacagtcatttaccaatttcaggatcaattaaagcaagaggcggaatatatgaagtgttggcttacgcagaaaaattggcattagaacaccatttaattaccgaaaatgatgattatagtcaattgtgcgatgaaaagatcaaagattttttcagccgttatagtattgcagtaggatcaacggggaatttggggctttccatcggtattatgggggctgtactcggcttcaaagttagtgtgcatatgtcagccgatgcaagagaatggaaaaagcaaaagttgcgttcatacggtgtgaatgttgtggaatatacacaagattacggtgtagctgtcgctcaaggacggaaggcagctctttccgatccgaactgcttttttattgatgatgagaattcgacaacactttttttaggttattccgttgcaggtcaacgactaaaacaacaatttttggaacaaggtataaaagtagatgaaaatcatccgctctttgtttatcttccttgtggtgttggcggtggacctggcggtgttgcattcggattgaaattggcatttggcgattatgtacactgcatttttgctgaaccgactcattcaccttgtatgctgctcggtgtttatacagggttacatgataaaattgcggtacaagacttgggtattgataatatcacagctgctgatggtttagcagtagggcgtgcatcaggatttgttggtcgggcaatggaacatttgttagacggtttttatactattgaagatcaaaagttatatgatttactggggctattgcataagacagaaaatattcaacttgagccttctgctttggcaggaatgataggtccgttgcatatcaatcactccgattatttaagaagatatcacatcacacaagaacaattggcaaatgcaacacatatagtgtgggcgactggtggtggaatggtgcctgatgttgagatgcaaaaatatttgtcactcgggcgattttaa

SEQ ID NO: 79355 - protein, 432 aa, Haemophilus somnus 129PT
MQDPFIQKLMRFEEVMWFNPKSAGVKTGLSYVGLDVSDTQQAAERLQRFAPYFCRAFPETQKTKGILESELVSIDKMKSALIDHYHMPIQGRLLLKKDSHLPISGSIKARGGIYEVLAYAEKLALEHHLITENDDYSQLCDEKIKDFFSRYSIAVGSTGNLGLSIGIMGAVLGFKVSVHMSADAREWKKQKLRSYGVNVVEYTQDYGVAVAQGRKAALSDPNCFFIDDENSTTLFLGYSVAGQRLKQQFLEQGIKVDENHPLFVYLPCGVGGGPGGVAFGLKLAFGDYVHCIFAEPTHSPCMLLGVYTGLHDKIAVQDLGIDNITAADGLAVGRASGFVGRAMEHLLDGFYTIEDQKLYDLLGLLHKTENIQLEPSALAGMIGPLHINHSDYLRRYHITQEQLANATHIVWATGGGMVPDVEMQKYLSLGRF

SEQ ID NO: 79356 - DNA, 1299 bp, Pediococcus pentosaceus ATCC 25745
  CDS (1)..(1299): transl_table=11
atgattgatgttgatgctctaagcaaaaaatatccagcgattaagcagatgcaagcttacgaaccaattttttggaagaacctgaattataaaaaggaagctgaattaccggttggagttgaacatatcttcgatgctgaagctcgttttcaacggtttgcaccttattttgaggtagcattcccagaaactttaccaacacatggaattttagaatcccctttgctcaaaatggataagatgaaggctgttttaaatgccgaagctcaaaaccaagttaagggtgatttgtatcttaaggctgataattatctaccaatttcgggctcaattaagtcacgtggtggaatctacgaagtgttgaaatttgccgaaaaagtagcaatgaaacacggtgaaattgtatatggtgataattatgctaaattaaatgaaccacgcttcaaggatttatttggacaatatggaattgtcgtgggctcaacgggaaatcttggactatcgattggtattgtagcttgtaaactaggttttagaactagcgtacatatgtcgagcgatgccgctcaatggaagaaggatatgttacgtgaaaagggcgttaatgttgttgaatataacgacaatttcactcatgctattacagaagcacgtaaatctgctgaagcagatcctatggcttacttcatcgatgatgaagggtcgtacgatttattcttgggatattcggttgctgcagttcgtcttcaagctcaattgaaggctcaaaatatcaaagttgatgcagaacatccattatttgtatatctacctgctggagtaggtggcagtcccagtggtgtagcctttggtctaaagaagattattggcgaaaacgttcatccaatttttgcggaaccaactcatattccatctgtttcactaggaatgatgaccggcttaaatgatcaaatttcagtttatgatgctggaattgatggagtaactaaggctgacggtcttgctgttgggcgtccatctagaattgctggtaagatgatggatacattattatatggaattcaaacttttgatgatcaaaagatgatgaagaatgttgcagaattgcatgactcagaaaatgtggatgttgaaccatcagctgcttctggttttacgattttagatgacgttcaagctcaattggaacaggattatccaatggaaaatgctagccatattgtttgggcgacgggtggtagcatggtgcctaagaatgatatggaccagtatgtggctgaaggacatcaagttaaataa

SEQ ID NO: 79357 - protein, 432 aa, Pediococcus pentosaceus ATCC 25745
MIDVDALSKKYPAIKQMQAYEPIFWKNLNYKKEAELPVGVEHIFDAEARFQRFAPYFEVAFPETLPTHGILESPLLKMDKMKAVLNAEAQNQVKGDLYLKADNYLPISGSIKSRGGIYEVLKFAEKVAMKHGEIVYGDNYAKLNEPRFKDLFGQYGIVVGSTGNLGLSIGIVACKLGFRTSVHMSSDAAQWKKDMLREKGVNVVEYNDNFTHAITEARKSAEADPMAYFIDDEGSYDLFLGYSVAAVRLQAQLKAQNIKVDAEHPLFVYLPAGVGGSPSGVAFGLKKIIGENVHPIFAEPTHIPSVSLGMMTGLNDQISVYDAGIDGVTKADGLAVGRPSRIAGKMMDTLLYGIQTFDDQKMMKNVAELHDSENVDVEPSAASGFTILDDVQAQLEQDYPMENASHIVWATGGSMVPKNDMDQYVAEGHQVK

SEQ ID NO: 79358 - DNA, 1329 bp, Bacillus cereus G9241
  CDS (1)..(1329): transl_table=11
atgaagggaatagagaaattaaaagagcgatatccactcttaaataaattaatcgcaacagaagaagtgttttgggtgaatccgaacatggacaagtatgaaacggcaataaaagattcgccactgaatgaagagaatgtaaaagatgcggaagagaggttaaagcgttttgcaccatatattgcgaaagtttttcctgaaacgaaagagactaacggcataattgaatcacccttactaaaaatcccttcaatgaaacaagctttagagaaacattacgagcaacctattttaggggaattattattaaaatgtgatagtcatcttccgatatcagggtcaattaaagctagaggcggcatttatgaagtgttgaagcacgctgaacaattagctttgcagcatggtatgttaacagaagaagctgattattccattttagatagtgatacatgtagagagttttttgccacttattctatcgcggtaggttctacaggaaacttaggattaagcattgggatcatgagtgcgaagttaggttttaacgtaacggttcatatgtcagcagatgcgaaacaatggaaaaaagatttattaagaagcaaaggtgtaaatgttattgaatatgaagctgattatagtaaagctgtagaagaaggaagaaggcaagcagatgttgatcctagttgttattttgtagatgatgaaaactcacatgatttatttttaggatacgcagtcgcagcctcgcgtttacaaaaacaattagacgagttagagattgtagtagacgaagaacatcctttattcgtttatctaccatgcggagtagggggcggacctggcggagtcgcatttggtttaaagttattgtataaagacaacgtacactgtttctttgcggagcctacgcattctccttgtatgttactcggtttaatgacaggacttcatgataaaattgccgttcaagatatcgggattgataatgtaacagatgcggatggactagcggtaggaagaccttctggatttgtcggtaaaacgatggaaccatttttgagtggaaattacacagtaagtgatgaagagttatatagattattaaaagaactagcagatacggaacatatttatttagagccttctgcgttagccggtatgatagggccggtgaaagtatgtaaagaagatgagtatttacaaaagcaacagttaatagagaagatgaagaaaggtactcatattgtgtggggaacaggcggtagtatggttccgaaagatgtgatgaataggtattataaaacaggtgaggcattacgataa

SEQ ID NO: 79359 - protein, 442 aa, Bacillus cereus G9241
MKGIEKLKERYPLLNKLIATEEVFWVNPNMDKYETAIKDSPLNEENVKDAEERLKRFAPYIAKVFPETKETNGIIESPLLKIPSMKQALEKHYEQPILGELLLKCDSHLPISGSIKARGGIYEVLKHAEQLALQHGMLTEEADYSILDSDTCREFFATYSIAVGSTGNLGLSIGIMSAKLGFNVTVHMSADAKQWKKDLLRSKGVNVIEYEADYSKAVEEGRRQADVDPSCYFVDDENSHDLFLGYAVAASRLQKQLDELEIVVDEEHPLFVYLPCGVGGGPGGVAFGLKLLYKDNVHCFFAEPTHSPCMLLGLMTGLHDKIAVQDIGIDNVTDADGLAVGRPSGFVGKTMEPFLSGNYTVSDEELYRLLKELADTEHIYLEPSALAGMIGPVKVCKEDEYLQKQQLIEKMKKGTHIVWGTGGSMVPKDVMNRYYKTGEALR

SEQ ID NO: 79360 - DNA, 1344 bp, Oceanospirillum sp. MED92
  CDS (1)..(1344): transl_table=11
atgagttttagtgcacaggaaatcaacaagctgataggtgagtttcccttgttagaacagctacagcgaacagagcctctgctttggttgaaccctaagctcacagacttttcaaatgcatcggctcaactgcctctatcacagagtgatgttgctgatgcttcggcgcgattaaagcgctttgctccctatatagcagaagcctttccggaaaccgcagctaataaaggcattattgaatcgccgttgcgcgaggtccctctatttaaaggccagatggagctggaatcagcgcagcgtataccggggcgcctgatgctgaaatgtgacagccatcttcccatttcgggttccattaaagctcgtggcggcatatatgaggtgctgaagtatgccgagactgtcgctttggaggcagagctgataagtacaggggcctgttacactgagctgaacagtgatctgtgtcgaaatgtgtttagccagcatcagatcgtggtgggctcaaccggaaaccttggcttaagtattggcatcatgggggctgcactcggttttttagtgacggtgcatatgtctgctgatgcccggcaatggaaaaaggatctgttgcgtagcaaaggggtccaggtgattgaatatgaggatgactatagtaaggcggtagaagagggccgcaaacaggcattgagtcaggagcgctgtcactttgtggatgatgagaattccagtgacctgtttctgggatatgccgttgccgcagagcgtttagctaagcagctaactgagcagaatattcaggtcgatgccgtgcatcctctgtttgtataccttccttgtggtgtcggtggaggccctggcggggttgcctttggtttgaagttgctctttggtgatcatgttcactgtttctttgctgaaccgacccattcaccctgtatgctggtgggtatgtacacggggcttcatgatcagatcagtgttcaggagttaggtatcgataaccaaacctgtgctgatggtcttgcggttggtcgtgcctccggttttgttggcaaagtgatggatccactgctgagtggcatctataccgttgaggatcagaaactctatgaactcttggctcgaatttatgagactgaaaatattgcgttggagccttcggctttagcgggcgcgcctggtatcgtaaatctactctcgcaaggcgaaagctacctgaatgatcatgggttacaggacaagatggagaatgctactcatatcatttgggcaacggggggtagcatggtgcctgaaaaggaatggcagcaatattaccagcaaggcactaagaaattttag

SEQ ID NO: 79361 - protein, 447 aa, Oceanospirillum sp. MED92
MSFSAQEINKLIGEFPLLEQLQRTEPLLWLNPKLTDFSNASAQLPLSQSDVADASARLKRFAPYIAEAFPETAANKGIIESPLREVPLFKGQMELESAQRIPGRLMLKCDSHLPISGSIKARGGIYEVLKYAETVALEAELISTGACYTELNSDLCRNVFSQHQIVVGSTGNLGLSIGIMGAALGFLVTVHMSADARQWKKDLLRSKGVQVIEYEDDYSKAVEEGRKQALSQERCHFVDDENSSDLFLGYAVAAERLAKQLTEQNIQVDAVHPLFVYLPCGVGGGPGGVAFGLKLLFGDHVHCFFAEPTHSPCMLVGMYTGLHDQISVQELGIDNQTCADGLAVGRASGFVGKVMDPLLSGIYTVEDQKLYELLARIYETENIALEPSALAGAPGIVNLLSQGESYLNDHGLQDKMENATHIIWATGGSMVPEKEWQQYYQQGTKKF

SEQ ID NO: 79362 - DNA, 1335 bp, Desulfitobacterium hafniense DCB-2
  CDS (1)..(1335): transl_table=11
atgacagggaaaagccctgaggttataccccatacccccgtggtgcaggatttgagagcagcccgggaaattttctggattaatcctcattatcgggcaactaaggaattcaaggaggcccaattcggaatcagtctctccgatattcacgatgcagaagaacgattgcggcgttttgctccttacctggctaaagccttcccggagacacaaccggctcaaggtctcatcgagtcccctattgtccctataaaaaggatgcagagctatttggaatcccgttatggcgttcagatacccggagatatctggctgaaatgcgatcatcagctgccgatttccggctctatcaaggcgcggggtgggatttatgaagttctcaaacatgccgaagaaactcttattaaacagggcctattgaccagggaagacgattatgccaggttaaaggattcttcgttcagagatgttttgtctcattataaaattgctgtgggttccacaggaaatctcgggttgagcatcggcgtgatgggagctgaattgggctttaaagtcactgtccatatgtctgccgatgccaaagggtggaaaaaagcacttttgcgctccaagggagtggaggtgattgaatacacctccgactatagtaaggctgtggaagaaggccgcaggcaggctgaaggtgattcccgctgtcactttattgacgatgaaaattcccgggatctgtttttaggctatgctgtagcaggactgaggcttaaggagcaattagaaaaattgaaccgcaaggttgatgccgaccaccctctttttgtttacctgccctgtggggtgggagggggaccggggggagtgacctttggcttaaagcaggtgttccaggagcatgttcattgtttctttgccgagccgactcattctccctgtatggtgttgggattagcgacagggcttcatgatggcatcgctgttcaggatattgggctggataacaagaccgaagccgatgggttggccgtaggcagagcttcccgcttcgtaggcaagatcatggcaggcttgctgagcggggccttcaccgtggaggatgcagaacttttccgcttgctgcaggctcttgatcatgcagaggggatacaatgcgagccttcggctttggcaggaatggccggtccggcccggctcctgctgtgtaaggaaggccttcaatatatcagggagcaccggcttgaagagggattgaaaaagggaacccatctgatttgggcgaccggcggcagtctcgtccctgaggaagtgatgaaggactatctgtcacgaggaaaatag

SEQ ID NO: 79363 - protein, 444 aa, Desulfitobacterium hafniense DCB-2
MTGKSPEVIPHTPVVQDLRAAREIFWINPHYRATKEFKEAQFGISLSDIHDAEERLRRFAPYLAKAFPETQPAQGLIESPIVPIKRMQSYLESRYGVQIPGDIWLKCDHQLPISGSIKARGGIYEVLKHAEETLIKQGLLTREDDYARLKDSSFRDVLSHYKIAVGSTGNLGLSIGVMGAELGFKVTVHMSADAKGWKKALLRSKGVEVIEYTSDYSKAVEEGRRQAEGDSRCHFIDDENSRDLFLGYAVAGLRLKEQLEKLNRKVDADHPLFVYLPCGVGGGPGGVTFGLKQVFQEHVHCFFAEPTHSPCMVLGLATGLHDGIAVQDIGLDNKTEADGLAVGRASRFVGKIMAGLLSGAFTVEDAELFRLLQALDHAEGIQCEPSALAGMAGPARLLLCKEGLQYIREHRLEEGLKKGTHLIWATGGSLVPEEVMKDYLSRGK

SEQ ID NO: 79364 - DNA, 1332 bp, Vibrio sp. Ex25
  CDS (1)..(1332): transl_table=11
atgaccaaggcgaatattgaagcgctgatcaagcagttcccactcttggcgccacttatcgatcttaaggaggtttgctggtttaacccaaacataacctctttagcagaaggtttgccctatgtggggctagatgagaaagatattcaagctgcgagtgaacggctagcacgatttgcgccttatttgatgaaagcgtttcccgaaacggaagcttcgcatggcatcattgagtcttctgtggtggatgttcccaagatgaaagtgcgtttggagcaccaatacgacacgccaatattgggtcgtttaatgctcaaaaaagacagtcatctgccaatttctggttctatcaaagcgagaggtggcatttatgaagtgctcacccatgccgaaaagttggcgtttgaagctggcttactctgcgaaaccgatgattacagcaaattgttcagcaatgagtttcggcagttttttaagcagtacagtattgctgttgggtcaacgggtaacctcggtatgtccattggcatcatgagtgcaaagcttggtttttcagtctcggttcacatgtcttctgatgcgcgggagtggaagaaaaataagctccgatcacatggcgtcaaagtggtggagtaccagcaagactatggtgttgccgttgagcaaggtcgtaaagaagcagagcaagatcctaactgcttctttattgatgatgaaaactcgcagacgttgtttctaggttactctgttgcgggtgagcgtcttaagcagcagtttgatgacttgggaatcgtggttgatgagcatcatccgctctttgtttatctaccctgtggtgttggcggtgggcctggtggcgtggcatttggtttgaaagtcgcgtttggtgatcatgttcattgtattttcgcagagccaacgcactctccgtgcatgttgttgggcgtgcataccggcttgcatgacgagattgcggtacaagatttgggtatcgacaacatgaccgctgctgatggattagcagtagggcgtgcgtcgggatttgtcggtagagcgatggaaaggctaattgatggtttttacaccattgatgatgctcatatgtatcaccacttgggtgagttaagtgaactagaaggcattaacctagagccttctgcattagccggtatggttggggtagtgcacgtctcgaataatcatgcttatcagtctcgaatgcaatttgacgaagaaaaactcagaaacgcaacgcatcttgtttgggcaacaggtggagggatggttccggaagatgaaatggcggcttatctcaaaaaatcaggtcggtaa

SEQ ID NO: 79365 - protein, 443 aa, Vibrio sp. Ex25
MTKANIEALIKQFPLLAPLIDLKEVCWFNPNITSLAEGLPYVGLDEKDIQAASERLARFAPYLMKAFPETEASHGIIESSVVDVPKMKVRLEHQYDTPILGRLMLKKDSHLPISGSIKARGGIYEVLTHAEKLAFEAGLLCETDDYSKLFSNEFRQFFKQYSIAVGSTGNLGMSIGIMSAKLGFSVSVHMSSDAREWKKNKLRSHGVKVVEYQQDYGVAVEQGRKEAEQDPNCFFIDDENSQTLFLGYSVAGERLKQQFDDLGIVVDEHHPLFVYLPCGVGGGPGGVAFGLKVAFGDHVHCIFAEPTHSPCMLLGVHTGLHDEIAVQDLGIDNMTAADGLAVGRASGFVGRAMERLIDGFYTIDDAHMYHHLGELSELEGINLEPSALAGMVGVVHVSNNHAYQSRMQFDEEKLRNATHLVWATGGGMVPEDEMAAYLKKSGR

SEQ ID NO: 79366 - DNA, 1338 bp, Pseudomonas putida GB-1
  CDS (1)..(1338): transl_table=11
atgattcacggaaaaaccctggaagcctggcaacaaagccacccgatcatcgccgacctggtcgccctgaaagaaacaagctggttcaacccgggtatcgcccaggcatccgaagccctacgcgacgtgggcctcacggctgcagacgtgcaggcggcgagcgcacggctgcagcggtttgcgccgtacctggcaacagtcttccccgaaacagcgccagccggtggcatcatcgagtcgcacatcgccccattgccgctgcttcgccaacggctgatcgaggaaggcgcattgcgcaacgccggcagcctgtggctcaaggcagacagcgacttgcctgtttccggctcgatcaaggcccggggtggtattcatgaagtactcaagcatgccgaagacctggccctggcggccggcctgatcacgccaacggatgactacacccggctggcaagcgagcaggcgcgcgccttcttcggccagtacaagatcgccgtgggctcgaccggtaacctgggtttgtcgattggcatcatgagcgcgaagctgggcttccaggtgagcgtgcacatgtcgtccgacgccaggcagtggaaaaaggacaagctgcgtgccaacggcgtgaccgtggtcgagcacgcctccgactacagcgttgcggtcgagcaagggcgccaacaggcggcagccgaccccagctgctacttcgttgacgacgagaactcgcctcagctgtttctgggctatgccgtcgccgctgaacggctggccctccagttcgaccaggctggcatccaggtggacgcagatcacccgctgttcgtctacctgccttgcggcgtagggggcggccctggcggcgtagcgttcgggttgaagctggtattcggcgatgcggtgcactgtatctttgccgaacccacccactccccttgcatgttgctgggcgtgtacaccggcctgcacgatgaaaccagcgtgcaggacttcggcatcgacaacatcaccgccgccgacggtctggcggtcgggcggccatccgggttcgtcggcaaagccatgcagcggctgatcgatggttactacaccgtgaccgacgaagcactgtaccgcttgatggtcatcgcccatgagcaggacaaggtcaaactggaaccttctgccttggccggcgtacccggtatgctacgggtattgcaggcagacgagtacctggctcgtcaaggcttcaccccaacccagctgcagcaggcaacccacctcgtctggggaaccggtggcagcatggtgccggaagatgagttcaacgcctacctggcgaaagggcgcagcgtgtaa

SEQ ID NO: 79367 - protein, 445 aa, Pseudomonas putida GB-1
MIHGKTLEAWQQSHPIIADLVALKETSWFNPGIAQASEALRDVGLTAADVQAASARLQRFAPYLATVFPETAPAGGIIESHIAPLPLLRQRLIEEGALRNAGSLWLKADSDLPVSGSIKARGGIHEVLKHAEDLALAAGLITPTDDYTRLASEQARAFFGQYKIAVGSTGNLGLSIGIMSAKLGFQVSVHMSSDARQWKKDKLRANGVTVVEHASDYSVAVEQGRQQAAADPSCYFVDDENSPQLFLGYAVAAERLALQFDQAGIQVDADHPLFVYLPCGVGGGPGGVAFGLKLVFGDAVHCIFAEPTHSPCMLLGVYTGLHDETSVQDFGIDNITAADGLAVGRPSGFVGKAMQRLIDGYYTVTDEALYRLMVIAHEQDKVKLEPSALAGVPGMLRVLQADEYLARQGFTPTQLQQATHLVWGTGGSMVPEDEFNAYLAKGRSV

SEQ ID NO: 79368 - DNA, 1341 bp, Bacillus anthracis
  CDS (1)..(1341): transl_table=11
atgaaggaaatagagaaattaaaagaggaatatccactattaaataaattgattgaaatagaagaagtgttttgggtgaatccgaacatggaaaagtatgaaacggcaataaaagattcgccactcagtgaagagaatgtaaaagatgcggaggagaggttaaagcgttttgcatcatacattgcgaaagtttttcctgaaacgaaagacacaggcggtattatagaatcacctttagtgaagataccttctatgaaacagtctttagagaaaaattacgagcaacctatattaggagaattattattaaaatgtgatagtcatctcccgatatcaggatcaattaaagctagaggcggcatttatgaagtgttgaaacatgctgaacaattagctttgcagcaaggtatgttaacagaagaagatgattattccattttagatagtgatacatgtagagagttttttgccacttattccatcgcggtaggttcgacagggaatttaggattaagtattgggattatgagtgcgaagttaggttttaacgtaacggttcatatgtcagcagacgcgaaacaatggaaaaaagatttattaagaagtaaaggtgtaaatgttattgaatatgaagctgattatagtaaagctgtagaagaaggaagaaggcaagcagatgctgatcctagctgttattttgtagatgatgaaaactcacatgatttatttttaggatacgcagtagcggcatcgcgtttacaaaaacaattagaagagttagagattatagtggatgaagagcatcctttattcgtttatctgccatgcggagtaggtggcggacctggcggagtcgcatttggtttaaagttattgtataaagacaacgtacactgtttctttgcagagccaacacattctccatgtatgttaatcgggttaatgacaggacttcatgataaaatcgccgttcaagatatcggaattgataatgtaacagacgcagacggacttgcggtaggaaggccatctggatttgttggtaaaacgatggaaccatttttgagcgggaattacacagtaagtgatgaagaattgtataggttgttaaaagagctagctgatacggaaaatatttatttagagccttctgcattagcaggtatgataggaccagtaaaagtatgtaaagaagatgcgtatttacaagagcaacagttaatggagaagatgaaaaaaggtactcatattgtatggggaacgggcggtagtatggttccagaagatgtgatgaatgggtattataaaacaggtgaggcattaacaatattagaaaaatga

SEQ ID NO: 79369 - protein, 446 aa, Bacillus anthracis
MKEIEKLKEEYPLLNKLIEIEEVFWVNPNMEKYETAIKDSPLSEENVKDAEERLKRFASYIAKVFPETKDTGGIIESPLVKIPSMKQSLEKNYEQPILGELLLKCDSHLPISGSIKARGGIYEVLKHAEQLALQQGMLTEEDDYSILDSDTCREFFATYSIAVGSTGNLGLSIGIMSAKLGFNVTVHMSADAKQWKKDLLRSKGVNVIEYEADYSKAVEEGRRQADADPSCYFVDDENSHDLFLGYAVAASRLQKQLEELEIIVDEEHPLFVYLPCGVGGGPGGVAFGLKLLYKDNVHCFFAEPTHSPCMLIGLMTGLHDKIAVQDIGIDNVTDADGLAVGRPSGFVGKTMEPFLSGNYTVSDEELYRLLKELADTENIYLEPSALAGMIGPVKVCKEDAYLQEQQLMEKMKKGTHIVWGTGGSMVPEDVMNGYYKTGEALTILEK

SEQ ID NO: 79370 - DNA, 1332 bp, Bacillus cereus
  CDS (1)..(1332): transl_table=11
atgaaggaaatagagaaattaaaagaggaatatccactcttaaataaattaatcgcaacagaagaagtgttttgggtgaatccgaacatggaaaagtatgaaacggcaataaaagattcgccactgaatgaagagaatgtaaaagatgcggaagagaggttaaagcgttttgcaccatatattgcgaaagtttttcctgaaacgaaagagactaacggcataattgaatcacctttagtgaaaatcccttcaatgaaacaagctttagagaaaaattatgagcaacctattttaggagaattattattaaaatgtgatagtcatcttccgatatcagggtcaattaaagctaggggcggcatttatgaagtgttgaagcatgctgagcaattagcgttgcagtatggtatgttaacagaagaagatgattattccattttagatagtgatacatgtagagagttttttgccacgtattctatcgcagtcggttcaacaggaaatttagggctaagcattgggattatgagtgcgaaactaggttttaacgtaacggttcatatgtcagcagatgcgaaacaatggaaaaaagatttattaagaagtaaaggtgtaaatgttattgaatatgaagctgattacagtaaagctgtagaagaaggaagaaggcaagcagatgcagatcctagctgttattttgtagatgatgaaaactcacatgatttatttttaggatacgcagtagcagcctcgcgtttacaaaaacaattagaagagttagagattgtagtggatgaagaacatcctttattcgtttatctaccatgcggagtagggggcggacctggcggagtcgcatttggtttaaagttattgtataaagacaacgtacactgtttctttgccgagcctacgcattctccatgcatgttactcggtttaatgacaggacttcatgataaaattgccgttcaagatatcgggattgataatgtaacagacgcggacggactagcggtaggaagaccgtctggatttgtcggtaaaacgatagaaccatttttgagtggaaattacacagtaagtgatgaagagttatatagattattaaaagaactagctgatacggaaaagatttatttagagccttctgcattagccggtatgataggaccagtgaaagtatgtgcagaagatgagtatttacaaaaacaacagttaacagagaagatgaagaaaggtactcatattgtgtggggaactggcggtagtatggttccagaagatgtgatgaatgggtattataagaaaggtttagaattaatactgtaa

SEQ ID NO: 79371 - protein, 443 aa, Bacillus cereus
MKEIEKLKEEYPLLNKLIATEEVFWVNPNMEKYETAIKDSPLNEENVKDAEERLKRFAPYIAKVFPETKETNGIIESPLVKIPSMKQALEKNYEQPILGELLLKCDSHLPISGSIKARGGIYEVLKHAEQLALQYGMLTEEDDYSILDSDTCREFFATYSIAVGSTGNLGLSIGIMSAKLGFNVTVHMSADAKQWKKDLLRSKGVNVIEYEADYSKAVEEGRRQADADPSCYFVDDENSHDLFLGYAVAASRLQKQLEELEIVVDEEHPLFVYLPCGVGGGPGGVAFGLKLLYKDNVHCFFAEPTHSPCMLLGLMTGLHDKIAVQDIGIDNVTDADGLAVGRPSGFVGKTIEPFLSGNYTVSDEELYRLLKELADTEKIYLEPSALAGMIGPVKVCAEDEYLQKQQLTEKMKKGTHIVWGTGGSMVPEDVMNGYYKKGLELIL

SEQ ID NO: 79372 - DNA, 1380 bp, Bacillus stearothermophilus
  CDS (1)..(1380): transl_table=11
atgatgaccaaaaacgaaatccaaaagtgggtaaaggaattcccgctgcttaaaacgatcatggcggccgaagaggtgttttggcgcaatccaaaatatcacgcgttcgcgcaagccattcgaacgattcctttacgcgaacgcgatgtcaaggaggcggaagaacgattgcgccgctttgccccctacatcgcgaaggcatttcccgagacgcgaacggcccacggcatcatcgaatcccctttagtccggatttcgaacatgaaacagcgtttagaaaagatgtttcagaccaacattgagggggagctgttgctaaaatgcgacagccatctcccgatttccgggtcgatcaaggcgcgtgggggcatttacgaagtgttgaaacacgcggaagatcttgcgctcgccaacgggatgatcaccataggagacgactatgcggtcatggacagcgagaaattcaggcaattcttttcccgctattcgcttgtcgtcggttcgacagggaacttgggcttgagcatcggcatcatcggggcaaagcttggattccgcgtcaccgttcatatgtcagccgatgcgaaacaatggaaaaaagacttgttgcgaagcaaaggggtcaccgtcatcgaacatctcaccgattacaacaaagtggtggaagaggcgcgaagacagtccgccgaggatccaacgtcgtattttatcgatgatgaaaactcgatccatctgtttttaggctatgcggtggcggcgtttcggctgaaaaagcaattagaggacatgaacatcacggttgatgaaaaccacccgctctttgtgtatcttccttgcggcgtcggcggcggtccgggcggggtgacgtttgggctgaagctcgtgtacggcgatcatgtgcattgctttttcgctgagccgacgcattcgccttgcatgctgcttgggttgatgacaggagagcacgaccgcgtgtcggtgcaagattttggcctcgacaataagaccgaagcggacgggctagcggtgggccggccgtcgcggctggtggggaacatgcttgagaacgtcatcagcggcgtctatacggtggacgattcgacgctttaccgcttgctcgcggcgatggtggaaacggaggaaatctatttagagccgtccgccttggcgggggtggcggggcctgttcggctgtttcgtgatttggcggggcaaacgtacgtagaggcaaacggtttgaaagaaaagatgaaaaacgccacccatattggctgggcgacgggtggaagcatggtgccaaaggatgtgatggaggcctattatcgggaaggcgtgcggattgaaacgatgacagggaacggtttttctgaaggacgataa

SEQ ID NO: 79373 - protein, 459 aa, Bacillus stearothermophilus
MMTKNEIQKWVKEFPLLKTIMAAEEVFWRNPKYHAFAQAIRTIPLRERDVKEAEERLRRFAPYIAKAFPETRTAHGIIESPLVRISNMKQRLEKMFQTNIEGELLLKCDSHLPISGSIKARGGIYEVLKHAEDLALANGMITIGDDYAVMDSEKFRQFFSRYSLVVGSTGNLGLSIGIIGAKLGFRVTVHMSADAKQWKKDLLRSKGVTVIEHLTDYNKVVEEARRQSAEDPTSYFIDDENSIHLFLGYAVAAFRLKKQLEDMNITVDENHPLFVYLPCGVGGGPGGVTFGLKLVYGDHVHCFFAEPTHSPCMLLGLMTGEHDRVSVQDFGLDNKTEADGLAVGRPSRLVGNMLENVISGVYTVDDSTLYRLLAAMVETEEIYLEPSALAGVAGPVRLFRDLAGQTYVEANGLKEKMKNATHIGWATGGSMVPKDVMEAYYREGVRIETMTGNGFSEGR

SEQ ID NO: 79374 - DNA, 1347 bp, Bacillus subtilis
  CDS (1)..(1347): transl_table=11
atgtcagttcattcagaagtccttcatgctctgcttaaagatccgtttattcagaaactgattgatgcagagcctgtattctgggcaaattcaggcaagaaagaggggccattaccccgtgcagatgagtgggcaaccgagatagcggaagcggaaaaaagaatgcagcggtttgcaccttacattgccgaggtgtttcctgagacgaaaggcgctaaaggaatcatcgagtctccgctttttgaggtgcagcatatgaagggaaagctggaagcggcatatcagcagccatttcccggaagatggcttttaaagtgcgaccatgagcttccgatttcaggatcgattaaagcgaggggcgggatttatgaagtgttaaagtatgctgaaaatctcgcgcttcaagaaggaatgcttcaggaaaccgatgattaccgcatcttacaggaagagcggtttaccgggtttttctcccgctattcgattgctgtcggttcgacaggaaatctaggtttaagcatcggcatcatcggcgcggcactcgggtttcgcgtgacagtgcatatgtccgccgatgctaagcagtggaaaaaggatctcctccgccaaaagggagtcactgttatggagtacgaaacagattacagtgaagcggtgaacgaagggagacggcaggcggaacaagatccattctgttattttattgatgatgaacattctcgtcagctgttcttaggatatgctgttgctgcaagccgattaaaaacacagcttgactgtatgaatataaagccaagtcttgagacgcccttgtttgtgtatctgccgtgcggagtcggcggaggaccgggcggtgtagcatttgggctgaagcttttatacggagatgatgttcatgtgtttttcgcagaaccaactcattcaccttgtatgctgttagggctttattcaggacttcacgagaagatctccgtccaggatatcggcctggataatcagacggctgctgacggacttgccgtagggaggccgtcaggatttgtcggcaagctgattgaaccgcttctgagcggctgttatacggtagaggacaatacgctttatactttgcttcatatgctggctgtatctgaagataaatatttagagccctctgctcttgctggcatgttcgggccggttcagcttttttcgacagaagagggaaggcgctatgctcagaaatataagatggaacatgccgtacatgtcgtctggggaacgggaggaagcatggttccaaaagatgaaatggctgcgtataaccgaatcggtgctgatttgctaaaaaaacgaaatggaaaataa

SEQ ID NO: 79375 - protein, 448 aa, Bacillus subtilis
MSVHSEVLHALLKDPFIQKLIDAEPVFWANSGKKEGPLPRADEWATEIAEAEKRMQRFAPYIAEVFPETKGAKGIIESPLFEVQHMKGKLEAAYQQPFPGRWLLKCDHELPISGSIKARGGIYEVLKYAENLALQEGMLQETDDYRILQEERFTGFFSRYSIAVGSTGNLGLSIGIIGAALGFRVTVHMSADAKQWKKDLLRQKGVTVMEYETDYSEAVNEGRRQAEQDPFCYFIDDEHSRQLFLGYAVAASRLKTQLDCMNIKPSLETPLFVYLPCGVGGGPGGVAFGLKLLYGDDVHVFFAEPTHSPCMLLGLYSGLHEKISVQDIGLDNQTAADGLAVGRPSGFVGKLIEPLLSGCYTVEDNTLYTLLHMLAVSEDKYLEPSALAGMFGPVQLFSTEEGRRYAQKYKMEHAVHVVWGTGGSMVPKDEMAAYNRIGADLLKKRNGK

SEQ ID NO: 79376 - DNA, 1347 bp, Chromobacterium violaceum
  CDS (1)..(1347): transl_table=11
atgattcatggaaaaacgctggctgaatggcagcagtcccatcccgagattcgcgaattgaccggcctgcgcgagtgcgcctggttcaatcccgccgccgcccccgccgccgaggcattgcccgatgtcggacttggcgcggcagacatcgccgacgcatccgcccgcctgcggcgtttcgcgccatacatatcccgcgcattccccgaaaccgccgccagcggcgggatcatagaatcgccgctgctgcccgtacccgccttccagcaagcgctggcccgccgccgcggacgcgagttgccgggacgcctttggctgaaggcggacagccacttgcccatctcgggctcgatcaaagcacgcggcggcatctacgaggtgctgaagcatgcggaagacctggcgctggccaacggcctgctccagcccggcgacgactacgccaggctggcctccccggaagcccgctcgctgttcagccgccatggcatcgccgtcggctccaccggcaatctgggcctgtcgataggcatcatggcggccaagctgggcttccaggccgccgtccacatgtcggccgacgccaggcaatggaaaaaggacaagttgcgcgcgcacggcgtaaccgtggtcgaataccagaccgactacagcgcggcggtggcgcggggacgggaacaggcggcgcgcgacccggattgccatttcgtcgacgacgaaaattccatccacctgttcttgggctacgccgtggcggcggaacggctgaaggctcaattggcggaagccggcgtgcgcgtggacgccgatcatccgctgttcgtctatctgccctgcggcgtgggaggcgggcccggcggcgtggccttcgggctcaagcaggccttcggcgacgcggtccattgcctgttcgcggaacccacccgctcgccctgcatgctgctgggcgtgctcaccggcctgcatgacaaggtctcggtgcaggacttcggcatcgacaaccgcaccgtcgcggacggtctggccgtcggccggccgtcgggattcgtcggccgcgcgatgcagaggctgatagacggctattacacggtggacgacgatgagctgttccgcctgctggcgatgctggaacagacggaaggcctgcggctggagccgtcggcgctggcaggcgcgccgggcatcgcccgcgtgctggaggaaaaccagggctaccgccagcgcatggggctggacgcggatcgcctcgcctgcgccacccatctgatctgggcgaccggcggcagcatggtgccggaagcggagatggacggctacctgcggcgcggccgcgcgctgctgggctga

SEQ ID NO: 79377 - protein, 448 aa, Chromobacterium violaceum
MIHGKTLAEWQQSHPEIRELTGLRECAWFNPAAAPAAEALPDVGLGAADIADASARLRRFAPYISRAFPETAASGGIIESPLLPVPAFQQALARRRGRELPGRLWLKADSHLPISGSIKARGGIYEVLKHAEDLALANGLLQPGDDYARLASPEARSLFSRHGIAVGSTGNLGLSIGIMAAKLGFQAAVHMSADARQWKKDKLRAHGVTVVEYQTDYSAAVARGREQAARDPDCHFVDDENSIHLFLGYAVAAERLKAQLAEAGVRVDADHPLFVYLPCGVGGGPGGVAFGLKQAFGDAVHCLFAEPTRSPCMLLGVLTGLHDKVSVQDFGIDNRTVADGLAVGRPSGFVGRAMQRLIDGYYTVDDDELFRLLAMLEQTEGLRLEPSALAGAPGIARVLEENQGYRQRMGLDADRLACATHLIWATGGSMVPEAEMDGYLRRGRALLG

SEQ ID NO: 79378 - DNA, 1311 bp, Lactobacillus plantarum
  CDS (1)..(1311): transl_table=11
atggatacaacggtaatgattgaagaacacccacagattaaggaattgatagcaaaacgaccaattgtttggcagaacccagattatgggaagcgggcggacctgccgttaacgcgggccgatatttttgacgcggtcgcacgttgggaacgtttcgcaccatttttggccgttgcttttccagaaacggcagctatgaatgggattattgagtcaccattgttaccacttgagcagatgaaaccagcatgggaggctctcaaccaccagtcattggcggggcagctttatttaaaagctgatagtcagttgccgatttcgggttcgatcaagtcacgtggtgggatttacgaagtgctcaagtttgctgaacaggtagccatggcccatacggatttaacgtatatggatgattacagtgtcttggcaacggctaagtatcacgagttatttgcacaatacggcgtcatcgttgcatcgacgggaaacttggcactcagtgtgggcatcatggccgcaacgtttggatttaagacgaccgtttatatgtctcacgatgctcgtcagtggaagaaggataaactgcgggcaaatggcgtcaccgttgaggaactaaataccgacttttcaagtgtgattccggtggcccgtgccgccgcggccaaggatgaccatacgcactttgttgatgatgaaggttcacgtgacttattcctcgggtacgctgttgctggggtacggttacaacatcaattaaaagtacaaggtatcaagatggatgctgcacacccggttgtcgtttatttaccggccggggtcggtggcagtcctagtggcgttgcttttggcctcaagatgattatgggagctaatatttatcccgtcttttgtgaaccgacccacgtgccgtccgtgaccttagggatgatgaccaagctgaatgaaaaaattgctgttcaagacattggtttagatggcctgactgccgctgatgggttagccgttagccggccatcacgattggcgggcaaggtgatgcgaacgctattactcggaacagcaacatttgaagatgatgatttataccgttatttgacgaagctcgtcgataccgaagatgtaatagtcgaaccatccgctgcagccggctttaccgcgatcgcccccatcatggcccaatttcccacgcttgctggcaaagacgtcacccacattgtctgggcaactggcggcgacatgatgccggaatcggagcgtcagttggattatgagctaggacaaaaattgctgaccaagattaacaatcgttaa

SEQ ID NO: 79379 - protein, 436 aa, Lactobacillus plantarum
MDTTVMIEEHPQIKELIAKRPIVWQNPDYGKRADLPLTRADIFDAVARWERFAPFLAVAFPETAAMNGIIESPLLPLEQMKPAWEALNHQSLAGQLYLKADSQLPISGSIKSRGGIYEVLKFAEQVAMAHTDLTYMDDYSVLATAKYHELFAQYGVIVASTGNLALSVGIMAATFGFKTTVYMSHDARQWKKDKLRANGVTVEELNTDFSSVIPVARAAAAKDDHTHFVDDEGSRDLFLGYAVAGVRLQHQLKVQGIKMDAAHPVVVYLPAGVGGSPSGVAFGLKMIMGANIYPVFCEPTHVPSVTLGMMTKLNEKIAVQDIGLDGLTAADGLAVSRPSRLAGKVMRTLLLGTATFEDDDLYRYLTKLVDTEDVIVEPSAAAGFTAIAPIMAQFPTLAGKDVTHIVWATGGDMMPESERQLDYELGQKLLTKINNR

SEQ ID NO: 79380 - DNA, 1332 bp, Photobacterium profundum
  CDS (1)..(1332): transl_table=11
atgagcacattaaatattcaacaattagttactgaatttcctctggttgaaaaactaatcgccttagacgatgtaagttggtttaacccaaatattacaactctggctgaaggcctgccttatgtagggcttgataaaacagatataaaagatgcaagtgaccgactaaaaagatttgctccttatttggcgaaggcatttcctgaaacagccaaaacaaatggcattatagaatctgatgttgttgctattccagccatgaaaacggttcttgaacagcagtaccacatagcgattcaaggaaccttactactgaaaaaagatagtcatctgccgatttctggttcaatcaaagcgcgtggtggtatctatgaagtgctaactcatgctgaaaagttagcaatccaagctggcttgttgtctgagtctgatgattacagcaaattgtttacggatgaatttagagctttctttaagcagtttagtatcgcggtaggttctaccggtaatctaggcatgtctatcggtattatgagcgcaaaaattggcttttctgtatcggttcatatgtcggcagatgcccgtcaatggaaaaaagacaaacttcgctctcatggtgtaatcgttgttgaatacaaagaagactacggtgtagcggttgcacagggacgtaaagaagcagaaaaagatccaacgtgcttctttattgatgatgaaaattcgccaacacttttcttaggctattctgttgcaggagagcgactaaagagccagttcgaagccatgaatattctggtagatgagctgcatccactgtttgtctatttaccttgtggtgttggtggcggccctggcggtgtggcgtttggtttaaaaatggcatttggtgataatgttcattgtatctttgcggaacctacccactcaccttgcatgttattgggtattcatactggcctgcatgatgaaatttcagttcaggatattggtatcgataatataacagctgctgacggcctagctgttggtcgtggttctggatttgtgggaagagcaatggaaagattacttgatggtttttataccataagtgatgaaaggatgtatcaccaccttggagagatgagcaagtatgaagatattcagctagagccttcagctttagccggaatgctaggccctgttgtagtttctgacaatgaagaatatcttcagcgaatccaaatggatgagcaaaaactgaaaaacgcgacccacttagtttgggctacgggtggtggtatggttccaagtgaagagatggcatcgtacctcgctaagtctggaatttaa

SEQ ID NO: 79381 - protein, 443 aa, Photobacterium profundum
MSTLNIQQLVTEFPLVEKLIALDDVSWFNPNITTLAEGLPYVGLDKTDIKDASDRLKRFAPYLAKAFPETAKTNGIIESDVVAIPAMKTVLEQQYHIAIQGTLLLKKDSHLPISGSIKARGGIYEVLTHAEKLAIQAGLLSESDDYSKLFTDEFRAFFKQFSIAVGSTGNLGMSIGIMSAKIGFSVSVHMSADARQWKKDKLRSHGVIVVEYKEDYGVAVAQGRKEAEKDPTCFFIDDENSPTLFLGYSVAGERLKSQFEAMNILVDELHPLFVYLPCGVGGGPGGVAFGLKMAFGDNVHCIFAEPTHSPCMLLGIHTGLHDEISVQDIGIDNITAADGLAVGRGSGFVGRAMERLLDGFYTISDERMYHHLGEMSKYEDIQLEPSALAGMLGPVVVSDNEEYLQRIQMDEQKLKNATHLVWATGGGMVPSEEMASYLAKSGI

SEQ ID NO: 79382 - DNA, 1323 bp, Salmonella typhimurium
  CDS (1)..(1323): transl_table=11
atggaaaacatacaaaagctcatcgcccggtatcctttggtcgaggatctggtcgccctcaaagaaaccacctggtttaacccgggcgccacctctcttgcacaaggtctaccgtatgtcggcctgacggagcaggacgtaaacgccgcccatgaccgtctggcgcgctttgcgccgtatctggcgaaagcgtttccgcaaaccgccgccgctggcggcatgatcgaatctgacgtggtcgctattccggccatgcaaaaacggctggaaaaagagtatgggcaaacgatcaacggtgaaatgctgttaaaaaaagacagtcacctggcaatctctggttccattaaagcgcgcggcggcatctacgaggtgctaacgcacgcggaaaaactggcgctggaggcgggtctgttaaccaccgacgatgactatagcgtgttgctttcgccggaatttaaacaattcttcagccagtacagtatcgccgtcggttcaaccggcaatctggggctatcgatcggtatcatgagcgcctgcatcggttttaaagtgacggtacatatgtctgccgacgcccgcgcctggaaaaaagcgaagctgcgtagccacggcgtgacggtcgtagaatacgaagatgattacggcgtggcggttgagcagggccgtaaagcagcgcaatccgatccaaactgtttctttatcgacgacgaaaactctcgcacgctatttctgggctatgcggtagcgggccagcgcctgaaagcgcaattcgcgcaacagggacgcgtcgttgacgccagtcacccactgtttgtttatctgccgtgcggcgttggcggcggccctggcggcgtcgcctttggcctgaaactggcgtttggcgacaacgtccactgtttctttgccgaaccgacccattccccctgcatgttactcggcgtttataccggtctgcacgatgccatctcagttcaagatatcggtattgataacctgacggcggctgacggcctggcggtaggtcgcgcttcgggttttgttggtcgggcaatggagcgtctgcttgacggcctctataccttagacgatcaaacaatgtatgacatgctgggctggctggcgcaggaggaaggaattcgactggagccatcagctctggcggggatggccgggccacagcgcatttgcgcctccgtcgcgtatcagcaaaggcatggattcagtcagacgcagctcggcaacgcgacgcatctggtatgggcaaccgggggcggcatggtgccggaagatgaaatggaacaatacctggcaaaaggacgctaa

SEQ ID NO: 79383 - protein, 440 aa, Salmonella typhimurium
MENIQKLIARYPLVEDLVALKETTWFNPGATSLAQGLPYVGLTEQDVNAAHDRLARFAPYLAKAFPQTAAAGGMIESDVVAIPAMQKRLEKEYGQTINGEMLLKKDSHLAISGSIKARGGIYEVLTHAEKLALEAGLLTTDDDYSVLLSPEFKQFFSQYSIAVGSTGNLGLSIGIMSACIGFKVTVHMSADARAWKKAKLRSHGVTVVEYEDDYGVAVEQGRKAAQSDPNCFFIDDENSRTLFLGYAVAGQRLKAQFAQQGRVVDASHPLFVYLPCGVGGGPGGVAFGLKLAFGDNVHCFFAEPTHSPCMLLGVYTGLHDAISVQDIGIDNLTAADGLAVGRASGFVGRAMERLLDGLYTLDDQTMYDMLGWLAQEEGIRLEPSALAGMAGPQRICASVAYQQRHGFSQTQLGNATHLVWATGGGMVPEDEMEQYLAKGR

SEQ ID NO: 79384 - DNA, 1329 bp, Shigella flexneri
  CDS (1)..(1329): transl_table=11
atggaaaacgctaaaatgaactcgctcatcgcccagtatccgttggtaaaggatctggttgctcttaaagaaaccacctggtttaatcctagcacgacctcattggctgaaggtttaccttatgttggcctgaccgaacaggatgttcaggacgcccatgcgcgcttatcccgttttgcaccctatctggcaaaagcatttgctgaaacagctgccactggggggattattgaatcagaactggttgccattccggctatgcaaaaacggctggaaaaggaatatcaacaaccgatcagcgggcaactcctactgaaaaaagatagccatttgcccatttccggctctataaaagcacgcggcgggatttatgaagtcctggcacatgcagaaaaactggctctggaagcggggttgctgacgcttgatgatgactacagcaaactgctttctccggagtttaaacagttctttagccaatacagcattgctgtgggctcaaccggaaatctggggttatcaatcggcattatgagcgcccgcattggctttaaggtgacagttcatatgtctgctgatgcccgggcatggaaaaaagcgaaactgcgcagccatggcgttacggtcgtggaatatgagcaagattatggtgttgccgtcgaggaaggacgtaaagcagcgcagtctgacccgaactgtttctttattgatgacgaaaattcccgcacgttgttccttgggtattccgttgctggccagcgtcttaaagcgcaatttgcccagcaaggccgtatcgtcgatgctgataaccctctgtttgtctatctgccgtgtggtgttggcggtggtcctggtggcgtcgcattcgggcttaaactggcgtttggcgatcatgttcactgcttttttgccgaaccaacgcactccccttgtatgttgttaggcgtccatacaggattacacgatcagatttctgttcaggatattggtatcgacaaccttaccgcagcggatggccttgcagttggtcgcgcatcatgctttgtcgggcgggcaatggagcgtctgctggatggcttctatacccttagcgatcaaaccatgtatgacatgcttggctggctggcgcaggaagaaggtattcgtcttgaaccttcagcactggcgggtatggccggacctcagcgcgtgtgtgcatcagtaagttaccaacagatgcacggtttcagcgcagaacaattgcgtaatgccactcatctggtgtgggcgacgggaggtggaatggtgccggaagaagagatgaatcaatatctggcaaaaggccgttaa

SEQ ID NO: 79385 - protein, 442 aa, Shigella flexneri
MENAKMNSLIAQYPLVKDLVALKETTWFNPSTTSLAEGLPYVGLTEQDVQDAHARLSRFAPYLAKAFAETAATGGIIESELVAIPAMQKRLEKEYQQPISGQLLLKKDSHLPISGSIKARGGIYEVLAHAEKLALEAGLLTLDDDYSKLLSPEFKQFFSQYSIAVGSTGNLGLSIGIMSARIGFKVTVHMSADARAWKKAKLRSHGVTVVEYEQDYGVAVEEGRKAAQSDPNCFFIDDENSRTLFLGYSVAGQRLKAQFAQQGRIVDADNPLFVYLPCGVGGGPGGVAFGLKLAFGDHVHCFFAEPTHSPCMLLGVHTGLHDQISVQDIGIDNLTAADGLAVGRASCFVGRAMERLLDGFYTLSDQTMYDMLGWLAQEEGIRLEPSALAGMAGPQRVCASVSYQQMHGFSAEQLRNATHLVWATGGGMVPEEEMNQYLAKGR

SEQ ID NO: 79386 - DNA, 1332 bp, Vibrio parahaemolyticus
  CDS (1)..(1332): transl_table=11
atgaacaagctgaatgtggaagtgcttaaaaaacaattcccacttgtagagcaactgatcaacctagatgaagtttgctggtttaatcccaacgtgacctcgcttgaagaaggtttgccacacgtcggattgaacgcagaagatattcatgtcgcgagcgcaaggctcaagcgctttgctccttatcttatgaaagcttttcctgaaaccaaagccgcttctggtctcattgagtcgcctgtagtggacattccaaagatgaaagcggctttggaaactcagtacaacgtcccaatattcggccgccttatgctcaagcttgatagtcacctaccaatatccggctcgataaaagcccgtggtggcatttatgaagtgttagttcatgcagaaaaactggcgattgccacagggttgttaagtgagagtgatgattacagcaagctgctgagtggtgagttccgacaatttttccaacaatacagcatcgcggttggttcaacgggaaatctaggcatgtcgataggcatgatgagtgccaagcttggtttttcagtatcggttcatatgtctgccgatgcgagagagtggaagaaaaacaaacttcgatcgcacggtgtcaacgtggttgagtacgagcaagattatggtgttgcggttgagcaaggtcgaaaacaggcagagagcgatcccaactgcttttttatcgatgatgaaaactcacaaaccttgttcctaggttactcggttgcaggtgaacgcttaaaacaacaatttgatgatttaggtattgtggttgatgaacgtcatccactgtttgtgtatttaccatgcggtgttggtggtgggccaggtggtgttgcttttgggctaaaggtggcctttggtgaccacgtgcattgcatcttcgctgagccaacacattctccttgcatgttgttgggagtacatacgggtttgcatgatgagatagcggtgcaagatatcggtatagataatctcaccgcagcagatggcttggccgttggtcgtccttctggttttgttgggcgagctatggagcggttaattgatggttactacaccgtgacggatgaacgtatgtatcagcttttaggagagttgagcgaacgagaaggcatcaatttggagccctctgcattagccggaatgatgggcgcggtgcatgtatcgggttctctacactaccagactcgtttacagcttacggatgaacgtttgaaaaatgccacacacttagtttgggcgaccgggggagggatggtgccagaagccgaaatgtcagctgacttggcgaagtctggtcgttag

SEQ ID NO: 79387 - protein, 443 aa, Vibrio parahaemolyticus
MNKLNVEVLKKQFPLVEQLINLDEVCWFNPNVTSLEEGLPHVGLNAEDIHVASARLKRFAPYLMKAFPETKAASGLIESPVVDIPKMKAALETQYNVPIFGRLMLKLDSHLPISGSIKARGGIYEVLVHAEKLAIATGLLSESDDYSKLLSGEFRQFFQQYSIAVGSTGNLGMSIGMMSAKLGFSVSVHMSADAREWKKNKLRSHGVNVVEYEQDYGVAVEQGRKQAESDPNCFFIDDENSQTLFLGYSVAGERLKQQFDDLGIVVDERHPLFVYLPCGVGGGPGGVAFGLKVAFGDHVHCIFAEPTHSPCMLLGVHTGLHDEIAVQDIGIDNLTAADGLAVGRPSGFVGRAMERLIDGYYTVTDERMYQLLGELSEREGINLEPSALAGMMGAVHVSGSLHYQTRLQLTDERLKNATHLVWATGGGMVPEAEMSADLAKSGR

SEQ ID NO: 79388 - DNA, 25 bp, Artificial sequence
  primer
atggaaaacgctaaaatgaactcgc

SEQ ID NO: 79389 - DNA, 24 bp, Artificial sequence
  primer
ttaacggccttttgccagatattg

SEQ ID NO: 79390 - protein, 421 aa, Artificial sequence
  consensus sequence
  Variant (2)..(13): Xaa in position 2 to 13 is any amino acid
  Variant (15)..(15): Xaa in position 15 is any amino acid
  Variant (18)..(34): Xaa in position 18 to 34 is any amino acid
  Variant (35)..(39): Xaa in position 35 to 39 is any or no amino acid
  Variant (41)..(42): Xaa in position 41 to 42 is any amino acid
  Variant (45)..(45): Xaa in position 45 is any amino acid
  Variant (51)..(54): Xaa in position 51 to 54 is any amino acid
  Variant (59)..(60): Xaa in position 59 to 60 is any amino acid
  Variant (61)..(62): Xaa in position 61 to 62 is any or no amino acid
  Variant (68)..(78): Xaa in position 68 to 78 is any amino acid
  Variant (80)..(84): Xaa in position 80 to 84 is any amino acid
  Variant (85)..(88): Xaa in position 85 to 88 is any or no amino acid
  Variant (90)..(90): Xaa in position 90 is any amino acid
  Variant (92)..(92): Xaa in position 92 is any amino acid
  Variant (95)..(95): Xaa in position 95 is any amino acid
  Variant (97)..(98): Xaa in position 97 to 98 is any amino acid
  Variant (116)..(117): Xaa in position 116 to 117 is any amino acid
  Variant (120)..(121): Xaa in position 120 to 121 is any amino acid
  Variant (123)..(125): Xaa in position 123 to 125 is any amino acid
  Variant (127)..(131): Xaa in position 127 to 131 is any amino acid
  Variant (132)..(132): Xaa in position 132 is any or no amino acid
  Variant (136)..(137): Xaa in position 136 to 137 is any amino acid
  Variant (139)..(146): Xaa in position 139 to 146 is any amino acid
  Variant (148)..(149): Xaa in position 148 to 149 is any amino acid
  Variant (151)..(153): Xaa in position 151 to 153 is any amino acid
  Variant (162)..(162): Xaa in position 162 is any amino acid
  Variant (168)..(168): Xaa in position 168 is any amino acid
  Variant (170)..(171): Xaa in position 170 to 171 is any amino acid
  Variant (174)..(176): Xaa in position 174 to 176 is any amino acid
  Variant (181)..(181): Xaa in position 181 is any amino acid
  Variant (184)..(185): Xaa in position 184 to 185 is any amino acid
  Variant (189)..(190): Xaa in position 189 to 190 is any amino acid
  Variant (193)..(194): Xaa in position 193 to 194 is any amino acid
  Variant (197)..(197): Xaa in position 197 is any amino acid
  Variant (199)..(199): Xaa in position 199 is any amino acid
  Variant (201)..(203): Xaa in position 201 to 203 is any amino acid
  Variant (206)..(207): Xaa in position 206 to 207 is any amino acid
  Variant (210)..(211): Xaa in position 210 to 211 is any amino acid
  Variant (214)..(215): Xaa in position 214 to 215 is any amino acid
  Variant (217)..(218): Xaa in position 217 to 218 is any amino acid
  Variant (220)..(223): Xaa in position 220 to 223 is any amino acid
  Variant (225)..(225): Xaa in position 225 is any amino acid
  Variant (229)..(229): Xaa in position 229 is any amino acid
  Variant (231)..(232): Xaa in position 231 to 232 is any amino acid
  Variant (238)..(238): Xaa in position 238 is any amino acid
  Variant (241)..(242): Xaa in position 241 to 242 is any amino acid
  Variant (245)..(246): Xaa in position 245 to 246 is any amino acid
  Variant (248)..(254): Xaa in position 248 to 254 is any amino acid
  Variant (257)..(259): Xaa in position 257 to 259 is any amino acid
  Variant (272)..(272): Xaa in position 272 is any amino acid
  Variant (277)..(277): Xaa in position 277 is any amino acid
  Variant (282)..(285): Xaa in position 282 to 285 is any amino acid
  Variant (287)..(287): Xaa in position 287 is any amino acid
  Variant (291)..(291): Xaa in position 291 is any amino acid
  Variant (303)..(303): Xaa in position 303 is any amino acid
  Variant (305)..(306): Xaa in position 305 to 306 is any amino acid
  Variant (310)..(310): Xaa in position 310 is any amino acid
  Variant (312)..(314): Xaa in position 312 to 314 is any amino acid
  Variant (318)..(318): Xaa in position 318 is any amino acid
  Variant (320)..(320): Xaa in position 320 is any amino acid
  Variant (323)..(323): Xaa in position 323 is any amino acid
  Variant (325)..(325): Xaa in position 325 is any amino acid
  Variant (334)..(334): Xaa in position 334 is any amino acid
  Variant (336)..(337): Xaa in position 336 to 337 is any amino acid
  Variant (340)..(341): Xaa in position 340 to 341 is any amino acid
  Variant (343)..(347): Xaa in position 343 to 347 is any amino acid
  Variant (349)..(350): Xaa in position 349 to 350 is any amino acid
  Variant (352)..(353): Xaa in position 352 to 353 is any amino acid
  Variant (355)..(360): Xaa in position 355 to 360 is any amino acid
  Variant (362)..(367): Xaa in position 362 to 367 is any amino acid
  Variant (369)..(372): Xaa in position 369 to 372 is any amino acid
  Variant (380)..(381): Xaa in position 380 to 381 is any amino acid
  Variant (383)..(392): Xaa in position 383 to 392 is any amino acid
  Variant (393)..(408): Xaa in position 393 to 408 is any or no amino acid
  Variant (411)..(412): Xaa in position 411 to 412 is any amino acid
  Variant (414)..(414): Xaa in position 414 is any amino acid
  Variant (418)..(418): Xaa in position 418 is any amino acid
PXXXXXXXXXXXXWXNPXXXXXXXXXXXXXXXXXXXXXXAXXRLXRFAPYXXXXFPETXXXXGIIESXXXXXXXXXXXLXXXXXXXXXGXLXLKXDXXLPISGSIKARGGIYEVLXXAEXXAXXXGXXXXXXDDYXXLXXXXXXXXFXXYXXXVGSTGNLGXSIGIMXAXXGFXXXVHMSXDAXXWKKXXLRXXGVXVXEXXXDYXXAVXXGRXXAXXDXXXXFXDDEXSXXLFLGYXVAXXRLXXQXXXXXXXVDXXXPLFVYLPCGVGGXPGGVXFGLKXXXXDXVHCXFAEPTHSPCMLXGXXTGLXDXXXVQDXGXDNXTXADGLAVGRXSXXVGXXMXXXXXGXXTXXDXXXXXXLXXXXXXEXXXXEPSALAGXXGXXXXXXXXXXXXXXXXXXXXXXXXXXTHXXWXTGGXMVP

SEQ ID NO: 79391 - protein, 58 aa, Artificial sequence
  protein pattern
  Variant (12)..(12): Xaa in position 12 is Ala or Gly
  Variant (16)..(16): Xaa in position 16 is Ile or Val
  Variant (17)..(17): Xaa in position 17 is Ala, Ser or Thr
  Variant (22)..(22): Xaa in position 22 is any amino acid
  Variant (23)..(23): Xaa in position 23 is Ala, Ile, Leu or Val
  Variant (24)..(24): Xaa in position 24 is Phe or Tyr
  Variant (25)..(25): Xaa in position 25 is any amino acid
  Variant (26)..(26): Xaa in position 26 is Asp or Glu
  Variant (27)..(27): Xaa in position 27 is any amino acid
  Variant (29)..(29): Xaa in position 29 is His or Tyr
  Variant (30)..(30): Xaa in position 30 is Cys or Val
  Variant (31)..(31): Xaa in position 31 is any amino acid
  Variant (33)..(33): Xaa in position 33 is Ala or Val
  Variant (37)..(37): Xaa in position 37 is His or Arg
  Variant (42)..(42): Xaa in position 42 is Leu or Val
  Variant (43)..(43): Xaa in position 43 is Ile, Leu, Met or Val
  Variant (45)..(45): Xaa in position 45 is Ile, Leu, Met or Val
  Variant (46)..(46): Xaa in position 46 is any amino acid
  Variant (47)..(47): Xaa in position 47 is Ser or Thr
  Variant (48)..(48): Xaa in position 48 is Gly or Gln
  Variant (49)..(49): Xaa in position 49 is any amino acid
  Variant (50)..(50): Xaa in position 50 is Phe or His
  Variant (51)..(51): Xaa in position 51 is Asp, Glu or Ser
  Variant (52)..(54): Xaa in position 52 to 54 is any amino acid
  Variant (56)..(56): Xaa in position 56 is Gln or Arg
  Variant (57)..(57): Xaa in position 57 is Asp or Glu
  Variant (58)..(58): Xaa in position 58 is Phe, Ile or Leu
LFVYLPCGVGGXPGGXXFGLKXXXXXXVXXXFXEPTXSPCMXXGXXXXXXXXXXVXXX

SEQ ID NO: 79392 - protein, 61 aa, Artificial sequence
  protein pattern
  Variant (2)..(3): Xaa in position 2 to 3 is any amino acid
  Variant (4)..(4): Xaa in position 4 is Phe, His or Tyr
  Variant (5)..(5): Xaa in position 5 is any amino acid
  Variant (6)..(6): Xaa in position 6 is Ile, Leu or Val
  Variant (7)..(7): Xaa in position 7 is Ala, Thr or Val
  Variant (16)..(16): Xaa in position 16 is Leu or Met
  Variant (20)..(20): Xaa in position 20 is Ile, Met or Val
  Variant (21)..(21): Xaa in position 21 is any amino acid
  Variant (22)..(22): Xaa in position 22 is Ala, Gly or Ser
  Variant (24)..(24): Xaa in position 24 is any amino acid
  Variant (25)..(25): Xaa in position 25 is Ile or Leu
  Variant (28)..(28): Xaa in position 28 is any amino acid
  Variant (29)..(30): Xaa in position 29 to 30 is any or no amino acid
  Variant (32)..(33): Xaa in position 32 to 33 is any or no amino acid
  Variant (37)..(37): Xaa in position 37 is any amino acid
  Variant (40)..(40): Xaa in position 40 is Lys or Arg
  Variant (41)..(41): Xaa in position 41 is Ala, Glu or Gln
  Variant (45)..(46): Xaa in position 45 to 46 is any amino acid
  Variant (49)..(50): Xaa in position 49 to 50 is any amino acid
  Variant (53)..(53): Xaa in position 53 is any amino acid
  Variant (55)..(55): Xaa in position 55 is Ile, Met or Val
  Variant (57)..(57): Xaa in position 57 is His or Tyr
  Variant (58)..(58): Xaa in position 58 is any amino acid
  Variant (59)..(59): Xaa in position 59 is Ala, Asp, Glu, Gly, Gln, Ser or Thr
FXXXXXXVGSTGNLGXSIGXXXAXXGFXXXVXXHMSXDAXXWKKXXLRXXGVXVXEXXXDY

SEQ ID NO: 79393 - protein, 41 aa, Artificial sequence
  protein pattern
  Variant (2)..(2): Xaa in position 2 is any amino acid
  Variant (4)..(5): Xaa in position 4 to 5 is any amino acid
  Variant (7)..(7): Xaa in position 7 is Ala or Pro
  Variant (14)..(14): Xaa in position 14 is Ala or Ser
  Variant (23)..(23): Xaa in position 23 is any amino acid
  Variant (24)..(24): Xaa in position 24 is Phe, His or Tyr
  Variant (27)..(28): Xaa in position 27 to 28 is any amino acid
  Variant (29)..(29): Xaa in position 29 is Ala or Leu
  Variant (30)..(30): Xaa in position 30 is Phe, Ile, Leu or Met
  Variant (31)..(34): Xaa in position 31 to 34 is any amino acid
  Variant (35)..(35): Xaa in position 35 is Ile or Leu
  Variant (36)..(38): Xaa in position 36 to 38 is any amino acid
  Variant (39)..(39): Xaa in position 39 is Ala or Asp
  Variant (40)..(40): Xaa in position 40 is Cys, Asp or Asn
KXDXXLXISGSIKXRGGIYEVLXXAEXXXXXXXXXXXXXXY

SEQ ID NO: 79394 - protein, 61 aa, Artificial sequence
  protein pattern
  Variant (2)..(2): Xaa in position 2 is any amino acid
  Variant (5)..(5): Xaa in position 5 is any amino acid
  Variant (7)..(7): Xaa in position 7 is any or no amino acid
  Variant (9)..(9): Xaa in position 9 is any or no amino acid
  Variant (16)..(16): Xaa in position 16 is Gln, Arg or Ser
  Variant (17)..(17): Xaa in position 17 is Ala, Gly or Pro
  Variant (19)..(19): Xaa in position 19 is any amino acid
  Variant (20)..(20): Xaa in position 20 is Phe or Leu
  Variant (22)..(22): Xaa in position 22 is Ala, Gly or Ser
  Variant (23)..(25): Xaa in position 23 to 25 is any amino acid
  Variant (26)..(26): Xaa in position 26 is Ala, Asp, Glu, Asn or Gln
  Variant (27)..(28): Xaa in position 27 to 28 is any amino acid
  Variant (29)..(29): Xaa in position 29 is Ile or Leu
  Variant (30)..(30): Xaa in position 30 is Ala, Asp or Ser
  Variant (32)..(32): Xaa in position 32 is any amino acid
  Variant (33)..(33): Xaa in position 33 is Phe or Tyr
  Variant (35)..(35): Xaa in position 35 is Ile, Leu or Val
  Variant (36)..(36): Xaa in position 36 is Asp, Glu, Pro, Ser or Thr
  Variant (38)..(39): Xaa in position 38 to 39 is any amino acid
  Variant (40)..(40): Xaa in position 40 is Leu or Met
  Variant (41)..(41): Xaa in position 41 is Phe or Tyr
  Variant (42)..(43): Xaa in position 42 to 43 is any amino acid
  Variant (45)..(46): Xaa in position 45 to 46 is any amino acid
  Variant (47)..(47): Xaa in position 47 is Ile, Leu or Met
  Variant (48)..(55): Xaa in position 48 to 55 is any amino acid
  Variant (60)..(60): Xaa in position 60 is Ala or Leu
GXDNXTXAXDGLAVGXXSXXVXXXXXXXXXGXXTXXDXXXXXXLXXXXXXXXXXXEPSAXA

SEQ ID NO: 79395 - protein, 41 aa, Artificial sequence
  protein pattern
  Variant (3)..(3): Xaa in position 3 is Ala, Glu, Asn or Gln
  Variant (4)..(4): Xaa in position 4 is any amino acid
  Variant (7)..(8): Xaa in position 7 to 8 is any amino acid
  Variant (9)..(9): Xaa in position 9 is Ala or Ser
  Variant (10)..(11): Xaa in position 10 to 11 is any amino acid
  Variant (12)..(12): Xaa in position 12 is Ala, Asp, Glu or Gln
  Variant (13)..(14): Xaa in position 13 to 14 is any amino acid
  Variant (15)..(15): Xaa in position 15 is Cys, Ser or Thr
  Variant (16)..(16): Xaa in position 16 is Phe, His or Tyr
  Variant (18)..(18): Xaa in position 18 is Ile or Val
  Variant (22)..(22): Xaa in position 22 is any amino acid
  Variant (24)..(25): Xaa in position 24 to 25 is any amino acid
  Variant (28)..(28): Xaa in position 28 is Phe or Leu
  Variant (31)..(31): Xaa in position 31 is Ala, Ser or Thr
  Variant (32)..(32): Xaa in position 32 is Ala or Val
  Variant (34)..(34): Xaa in position 34 is Ala or Gly
  Variant (35)..(35): Xaa in position 35 is any amino acid
  Variant (36)..(36): Xaa in position 36 is His or Arg
  Variant (38)..(39): Xaa in position 38 to 39 is any amino acid
  Variant (41)..(41): Xaa in position 41 is Phe or Leu
AVXXGRXXXXXXXXXXFXDDEXSXXLFXGYXXAXXXLXXQX

SEQ ID NO: 79396 - protein, 23 aa, Artificial sequence
  protein pattern
  Variant (2)..(4): Xaa in position 2 to 4 is any or no amino acid
  Variant (6)..(7): Xaa in position 6 to 7 is any amino acid
  Variant (10)..(10): Xaa in position 10 is any amino acid
  Variant (14)..(14): Xaa in position 14 is Ala, Pro or Ser
  Variant (15)..(15): Xaa in position 15 is any amino acid
  Variant (16)..(16): Xaa in position 16 is Phe, Ile, Leu or Met
  Variant (17)..(19): Xaa in position 17 to 19 is any amino acid
  Variant (21)..(21): Xaa in position 21 is Ala or Pro
  Variant (22)..(22): Xaa in position 22 is Asp, Glu or Gln
  Variant (23)..(23): Xaa in position 23 is Thr or Val
DXXXAXXRLXRFAXXXXXXFXXX

SEQ ID NO: 79397 - protein, 24 aa, Artificial sequence
  protein pattern
  Variant (3)..(3): Xaa in position 3 is Ile, Leu or Val
  Variant (4)..(4): Xaa in position 4 is Gly, Ile or Val
  Variant (6)..(6): Xaa in position 6 is Ala or Gly
  Variant (10)..(10): Xaa in position 10 is Asp, Gly or Ser
  Variant (11)..(11): Xaa in position 11 is Leu or Met
  Variant (12)..(12): Xaa in position 12 is Met or Val
  Variant (14)..(23): Xaa in position 14 to 23 is any amino acid
  Variant (24)..(24): Xaa in position 24 is Ala, Gly or Ser
THXXWXTGGXXXPXXXXXXXXXXX

SEQ ID NO: 79398 - DNA, 1425 bp, Escherichia coli
  CDS (1)..(1425): transl_table=11
atggccaaagagatcagcagtgaacttctgaacaccattcttacccgtgtcggcggaccgggaaatatcgccagttgtggtaactgtatgacgcgcctgcgtctgggtgtacatgacagttcactggttgatcccaatatcaaaacgctggaaggcgtgaagggcgtcattttgaccagcgaccaggtgcaggtcgtttttgggcctggtaaagcgcatcgtgccgcaaaagcgatgagcgagctgctgggagaagcaccggtacaggatgccgcagaaatcgccgcccagaacaaacgtcagttaaaagccaaacaaacctccggcgtgcaacaatttctcgccaaattcgccaccatcttcacgccgctgatccccggttttattgccgccggtctgctgctggggatagcgacgttaattgccacggtgatgcacgttccggcagatgctcagggaacactacccgatgcgctgaattttatgaaggtgttcagcaaaggtttgttcactttcctggtgattctggtgggctataacgccgcccaggcatttggcggcacgggcgtaaatggcgcaattatcgccgcgctctttttgctcggttataaccccgcagcgaccaccggttactacgccggttttcacgatttctttggtctgcccatcgatccgcgcggcaatattatcggcgtgctgattgccgcgtgggcctgcgcccgcattgaaggcatggtgcgccgctttatgccggacgatctcgacatgctgctgacctcgttaatcaccctgctgatcaccgctacgcttgcgtacctgatcattatgccgctgggtggctggttattcgaaggtatgtcatggctgtttatgcacctgaacagtaatccgttcggttgtgcggttttagccgggctgttcctgatcgccgtggtatttggcgtgcatcagggctttattcctgtttacctcgcgttaatggacagccagggattcaacagcttatttcccatcctttcaatggcaggcgcgggccaggtgggcgcggcgctggcactctactggcgggcgcaaccgcacagtgcgctacgcagtcaggtacgcggggcgattattcccggcctgctgggcgttggtgaaccgctgatttacggtgtcaccctgccccgcatgaagccgtttgttaccgcctgtttaggcggcgcggcgggcggtttgtttatcggcctgatagcctggtggggtctgccgatgggcttaaacagcgcctttgggccgtctggtctggtagcgctgccgctgatgacttccgcacaaggcatccttccggccatggcggtttatgctggcgggattctggtggcatgggtttgcgggtttattttcaccacgctctttggctgccgtaacgtcaatctggactaa

SEQ ID NO: 79399 - protein, 474 aa, Escherichia coli
MAKEISSELLNTILTRVGGPGNIASCGNCMTRLRLGVHDSSLVDPNIKTLEGVKGVILTSDQVQVVFGPGKAHRAAKAMSELLGEAPVQDAAEIAAQNKRQLKAKQTSGVQQFLAKFATIFTPLIPGFIAAGLLLGIATLIATVMHVPADAQGTLPDALNFMKVFSKGLFTFLVILVGYNAAQAFGGTGVNGAIIAALFLLGYNPAATTGYYAGFHDFFGLPIDPRGNIIGVLIAAWACARIEGMVRRFMPDDLDMLLTSLITLLITATLAYLIIMPLGGWLFEGMSWLFMHLNSNPFGCAVLAGLFLIAVVFGVHQGFIPVYLALMDSQGFNSLFPILSMAGAGQVGAALALYWRAQPHSALRSQVRGAIIPGLLGVGEPLIYGVTLPRMKPFVTACLGGAAGGLFIGLIAWWGLPMGLNSAFGPSGLVALPLMTSAQGILPAMAVYAGGILVAWVCGFIFTTLFGCRNVNLD

SEQ ID NO: 79400 - DNA, 1449 bp, Vibrio cholerae
  CDS (1)..(1449): transl_table=11
atgatggccaaaataacccaaaccatgatggcacaagtgctgtctctggtgggcggcagtggtaacgtcgccaaatgtggcaactgcatgactcgcttgcgtttaacgctgaataattctgcgctcgccgatcatgcggcattgaaaaaaatttctggagtgatgggcgtggttgaaagtgacgcacaactgcagatcatcctcggtcccggtaaagcacaaacggccgcggatatgatgaatgccttgattgaatcgggcgacaacgtggcacctgcagtgagcgaggcggatctctccaccattgccgcgcagcagaaaaagcagatgaagagcaagcaaaccagtgcggtacaacgctttttgagcaagtttgccaccatttttaccccgctgatccccggatttattgccgcaggcttgctgctgggcattgcgactctgcttgagcaaatctatgtggttggccaaaccccgagcgagtttatgctcgatctggtggcttatctcaaagtgtttggcaaagggctgtttgcgtttctcagcatcttgattggctataacgcgcagcaggcatttggcggctctggcgtgaacggggcgattctggcttcgctgtttgtactcggttatgacccagaagcaaccaaaggcatttactcggggatgagtgagttcttcggctttgcaattgacccgcgcggcaacatcatcggggtattactggcggcaattttaggcgcgcaagtggaacgtaaagtgcgtgaatacatgccggatgatttggatatgatcctgacttcggtggtgactttgctgatcatgggcgcggtgactttcctcatcatcatgcctatcggcggtgagctgtttaaaggcatgtcatggctgtttttaaacctcaatgataacccactcggtgctgccatcttggccggtttattcttaatctcggtggtgtttggtattcaccaaggttttgtgccggtttatttcgcgctgatggaagcgcaaggctttaactcactgttcccgatccttgctatggcaggcgctgggcaagtcggtgcctcactggcgctatacgcgagagccaaaaaagagaccaccattcgcactcaaattaaaggggcgatcatcccgggcattctcggcattggtgagccactgatttatggcgtgacgctaccgcgagtgaaaccttttgtcactgcctgtattggcggtgcggcgggtggcttctttatcggcctcatctcttatttgggtttgccggttggcctcaatacggtgtttggcccatccggtgtggtggcgattcccctgatgacttcagccgacggtatttttgcgggtatggcggtatttgtcggtggtttgctcatctcttataccgttggctttgctgctacctacttcttcggttgtaaagacgtcgatctgagctaa

SEQ ID NO: 79401 - protein, 482 aa, Vibrio cholerae
MMAKITQTMMAQVLSLVGGSGNVAKCGNCMTRLRLTLNNSALADHAALKKISGVMGVVESDAQLQIILGPGKAQTAADMMNALIESGDNVAPAVSEADLSTIAAQQKKQMKSKQTSAVQRFLSKFATIFTPLIPGFIAAGLLLGIATLLEQIYVVGQTPSEFMLDLVAYLKVFGKGLFAFLSILIGYNAQQAFGGSGVNGAILASLFVLGYDPEATKGIYSGMSEFFGFAIDPRGNIIGVLLAAILGAQVERKVREYMPDDLDMILTSVVTLLIMGAVTFLIIMPIGGELFKGMSWLFLNLNDNPLGAAILAGLFLISVVFGIHQGFVPVYFALMEAQGFNSLFPILAMAGAGQVGASLALYARAKKETTIRTQIKGAIIPGILGIGEPLIYGVTLPRVKPFVTACIGGAAGGFFIGLISYLGLPVGLNTVFGPSGVVAIPLMTSADGIFAGMAVFVGGLLISYTVGFAATYFFGCKDVDLS

SEQ ID NO: 79402 - DNA, 1362 bp, Bacillus halodurans C-125
  CDS (1)..(1362): transl_table=11
atgaaaaaagaagaaaggctggccaaagagatattagaacacgtaggcggcgcggaaaacattaaacgattagctcattgtatgacgcgaattcgtttagatcttcacgaggataagctggtagacatagcgcaattgaaaaacattgatggtgtgatgggcgttgtggaggatgacacgctacaaattgttgtcggtccaggaacggtcaatagagtagcagccaagatgtgtgagcaaacagggttatctttaaatgaagtagacgaccccgaccatgtcgcagaggatacgaagcaagcgattaaaaagaaaaacaatacgccgattaaaaactttttgaagcgaatagggagtatctttattccgcttattccagcgctcgttgcttcaggattaattaatggcggagcgaactttgctcaaaatgcaggcgtctcccctgacacgacatggctacaaatattgctcgtcattggtagtggaattttcaccttcctagcgattctcgtcggctggaatacggcgaaagagtttggcggcacaccagcccttggcgcgatagctggtattttaatcattaaccctgcgttggaaaacgtgaccctttttggtgagcagctcgtcccaggtcgaggtgggatctttgccgtcttgttagccggttggcttatggccgtcgttgaaaagcaaatacgaaaaggtgtcccttccgctgttgatatcattttgaccccatttttaacggttcttatcgtcggtgtaagtacaatcgtcgttcttcagcctgttggtggctggattgcagaaggagtgacagcaggaattaatggagtcctcgacattgggggggcagtggcaggagcgattttagcaggaacgttcctacctcttgtcatggtcgggatgcatcacgggctaaccccgattcacctcgagtttattaatagtcaaggggtgaccccgcttttaacgattttagcgatggcaggggcaggtcaagtaggcgccgcgattgccgtcttcgtcaaaacaaaaaatcagcgtttgaaaaatactgtaaaaggggcattgcctgttggtttccttggcattggagaaccgctactttacggggtaacactcccactcgggcgtccatttattacagcatgttgtggtgcggcagtcggtggagccttccaagcggtcatgtcaacagcggcagtcggtattggtgtatccggcctctccttaattccactcattgctgaaaataaatatttcatatatttcttaggattggtcgtttcgtacacgttcggatttttgtttacgtatttgtttggatacaaagaagaaatggcagaaaatatcggttaa

SEQ ID NO: 79403 - protein, 453 aa, Bacillus halodurans C-125
MKKEERLAKEILEHVGGAENIKRLAHCMTRIRLDLHEDKLVDIAQLKNIDGVMGVVEDDTLQIVVGPGTVNRVAAKMCEQTGLSLNEVDDPDHVAEDTKQAIKKKNNTPIKNFLKRIGSIFIPLIPALVASGLINGGANFAQNAGVSPDTTWLQILLVIGSGIFTFLAILVGWNTAKEFGGTPALGAIAGILIINPALENVTLFGEQLVPGRGGIFAVLLAGWLMAVVEKQIRKGVPSAVDIILTPFLTVLIVGVSTIVVLQPVGGWIAEGVTAGINGVLDIGGAVAGAILAGTFLPLVMVGMHHGLTPIHLEFINSQGVTPLLTILAMAGAGQVGAAIAVFVKTKNQRLKNTVKGALPVGFLGIGEPLLYGVTLPLGRPFITACCGAAVGGAFQAVMSTAAVGIGVSGLSLIPLIAENKYFIYFLGLVVSYTFGFLFTYLFGYKEEMAENIG

SEQ ID NO: 79404 - DNA, 1365 bp, Lactococcus lactis subsp. lactis Il1403
  CDS (1)..(1365): transl_table=11
atggcagaagaaaaaatagctcgtattgcacgtgagatttatgaaaatgttggtggaacacaaaatgtaaaaaaattgattctttgcatgactcgtgttcggatgaccattattgatgattcaaaagttaacttagctggtttaaaggcaattgatggagtgatgggtgtcgttgaagatgaaacactacaagttgtcatcggacctggaactgtaaataaagttgctcaagcaatggttgagacagttggggtaaggttaggagaaactttcccaagtgctgaaggtcaatcaattgatgatttaatggcaaaaacaaaatcggaagctaaagaaaagtataataagccttcaaaatttaaagcggttcttaatacgatttctaaaatattcgttccattgattcctgcttttgttggtgccggtttgattggtgggctggcctctgttttaggaaacttagtcactgctggtaccttagatgccgcaacatggacccagtttattaccgtcttaaaaattattcaatccggaatattttcttacttagccatctatgtcggaattaattcagctcaagaatttggagcgacaccttcgcttggtggtgttatcggtgcggtttccttgctcacaggaatgaacccagaagcaccattgaaaaatatctttaatggaagtgcactttcggcaggacaaggtggaattattggcgtaattttcgctgtttggttactatcgattttagaaaaacaactacgtaaatttattcctgactcaattgatattattgtgacaccaaccattggtttattggtcattggttttgcggaaatttttgccattatgccggtagcgggagttatttcttcaagtttagtcggggcaattaactttattcttcaagttggtggtggtttctctggctttgttttgggtgtacttttcttaccaatggttatgtttggtttacaccaaatcttaacccctattcatttagaaatgattgctaaaacgtgctcaacacaattattgccaatccttgcaatggctggagctggtcaagttggtgctgcgattgcgctttggcttcgtttgagaaaagataaagaatttgtcgaacttgttaaaggtgctcttccagtaggaattttaggaattggagaacctttaatttatgggattaccctacctcttggtcgtccattcatcacggcctgtatcggtggggggattggtggtgcaatcatcggttcattaggtcaagctggagccattgctattggcccttcaggccttgctctccttccacttattgctaatggcaaatggtgggtttatcttcttggactattgggtgcttaa

SEQ ID NO: 79405 - protein, 454 aa, Lactococcus lactis subsp. lactis Il1403
MAEEKIARIAREIYENVGGTQNVKKLILCMTRVRMTIIDDSKVNLAGLKAIDGVMGVVEDETLQVVIGPGTVNKVAQAMVETVGVRLGETFPSAEGQSIDDLMAKTKSEAKEKYNKPSKFKAVLNTISKIFVPLIPAFVGAGLIGGLASVLGNLVTAGTLDAATWTQFITVLKIIQSGIFSYLAIYVGINSAQEFGATPSLGGVIGAVSLLTGMNPEAPLKNIFNGSALSAGQGGIIGVIFAVWLLSILEKQLRKFIPDSIDIIVTPTIGLLVIGFAEIFAIMPVAGVISSSLVGAINFILQVGGGFSGFVLGVLFLPMVMFGLHQILTPIHLEMIAKTCSTQLLPILAMAGAGQVGAAIALWLRLRKDKEFVELVKGALPVGILGIGEPLIYGITLPLGRPFITACIGGGIGGAIIGSLGQAGAIAIGPSGLALLPLIANGKWWVYLLGLLGA

SEQ ID NO: 79406 - DNA, 1368 bp, Bacillus subtilis subsp. subtilis str. 168
  CDS (1)..(1368): transl_table=11
atgagcaaagaaaataactaccatcatctcgcacagaaaatccttgagctatgcggaggaaaatccaatatttcttcatatacgcattgcatgacacgcctgcgcattacgccttacgatgaaagcaaagcggatgctcaggctttaagaaagcttgacggcgtattgggggtcgttgaagctgaaaccttacaaattatcctcggcacaggagttgtcaatcatgttacagctgctttctcaaagctcgtgtcagcagaagaaggtgccgatgtcaaagaagcagcggccaaaaagaaagccgatatcaatcggaaaaatgccactccttttaaacttttcttacgtaaaattgccagcatttttatccctcttattcccgctctagtcgcttccggtttaattactgggattaccaaagcaattattcaagcaggctggctctctgcagactcacaaattgcgattatcctgacagtcatcggatcagggctgttcacttatctcggcattctcgtcggtattaacgcttcgaaagaatttggcgggacacccgcacttggggctttggccgggatcttgattatcaatccggagatcgcaaaaatcagtttatttggagaagagcttctcccgggcaggggaggtctgatcggcgtccttttcgcagccatattcattgcttacaccgaacaatttattcgccgttttattcctcaatcacttgatatcattgtcacacccaccgtttcactgttaatcaccggaatcgtaacgtatgtcgtatttatgcctttaggcggattcatttctgatgctattgcatccggcctactgtccatcctggacatcggcggcatcgctgcgggctttattctgggcgcaaccttccttcctctcgtcgtaaccggactgcatcaaggcttgacgcctatgcacatggaactgatcaattcaattggcaatgatcctctgctccctattttggctatgggaggtgcaggacaggtaggcgcggcctttgccgttttcgtgaagacgaaaaaaacaacactgaggaaagcaatcgccggcgggcttccatcgggactgctcggcattggtgaaccgcttattttcggagtcacgctgccgcttggccgtccgtttttaacagcatgtttaggagctggaatcggcggcgcctttcaagcttattttcaagtagccaccattgcgattggtgtctccggactgccgctatcttttctagtcctgccttcgcaaatcatcctgtatatcgttgggctctttatttcctacgcggccggttttttattgacctatgcattcggatataaagatgaaatggcttctcagttcgattaa

SEQ ID NO: 79407 - protein, 455 aa, Bacillus subtilis subsp. subtilis str. 168
MSKENNYHHLAQKILELCGGKSNISSYTHCMTRLRITPYDESKADAQALRKLDGVLGVVEAETLQIILGTGVVNHVTAAFSKLVSAEEGADVKEAAAKKKADINRKNATPFKLFLRKIASIFIPLIPALVASGLITGITKAIIQAGWLSADSQIAIILTVIGSGLFTYLGILVGINASKEFGGTPALGALAGILIINPEIAKISLFGEELLPGRGGLIGVLFAAIFIAYTEQFIRRFIPQSLDIIVTPTVSLLITGIVTYVVFMPLGGFISDAIASGLLSILDIGGIAAGFILGATFLPLVVTGLHQGLTPMHMELINSIGNDPLLPILAMGGAGQVGAAFAVFVKTKKTTLRKAIAGGLPSGLLGIGEPLIFGVTLPLGRPFLTACLGAGIGGAFQAYFQVATIAIGVSGLPLSFLVLPSQIILYIVGLFISYAAGFLLTYAFGYKDEMASQFD

SEQ ID NO: 79408 - DNA, 1452 bp, Yersinia pestis KIM
  CDS (1)..(1452): transl_table=11
atgcgcgcacgtaacctttacggaaaggacgataaaatgggcaaagtaaaacagcaggatatcgatcaactgatcgttctggtgggaggcagagaaaatattgccaccgtcagtcactgcattactcgattacgttttgtattaaaagatccgtcgatagcatcaccaaaagagattgaaaatctctcaatggtcaaaggctgttttactaatgcaggccaatttcaagtggtcatcgggccagaagtcgatgattactataaagcattgattgctaagattggccaaagtgaagtggacaaagaacagaccaagctcgcggcacggcagaacatgacttggtttgagcgcggtatttctcactttgctgagatcttcttcccgttgctaccggcgctgatcagcggagggttaatcctcggcttccgtaatgtcatcggtgacatcccaatgtctgaggggaaaacgctggcgcagatgtaccccgcgtggcaaaccatttatgacttcctctggttacttggcgaagccatcttcttctacttgcctgtcgcgatctgctggtcaacagtgaagaaaatgggcgggaccccggtattggggattgtactggggatcacactggtctctccgcaattgatgaactcctacttactggggcaacaactgcctgacgtctggaacttcggttggtttaccattgaaaaagtgggttatcaggcacaggtgatcccctctattttggcgggtctggcgctggggtggattgaaaccaacttgaagagaatcatccccgcctatctctacctggtggtcgtccctgtggtctccctgctgctagccgtgttcctggcccatacactgattgggccgtttggccgcatgattggtgacggtgtggcatggggcgtgaaggcggtgatgaccggcagtttcgcaccggtcggtgcggcactatttggtttcctgtatgcaccgctggtgattactggggtacatcagaccacgctggctattgatatgcagatggttcagagcatgggcggcacaccggtctggccattgattgcgttgtccaacatcgcacaagcttcggcggtactgggtatcatcatcatcagccgtaaaatcaatgaacgtgagatttcagtacccgcagcgatctccgcctatctgggcgtgaccgaaccagcaatgtacggtatcaatctgaaataccgtttcccgatgttatgcgccatgatcggttccgcactggctggcctgatttgtgggttgacgggagtcatggcgaacggcatcggtgtgggtgggttgcccggtattttatctatccaaccgcagttctggggaatttatgccgtggcgatgttagtggccatcgtggtgccattagcactgaccattctggtgtataagcgtaaagagcgtcgtggcgaattgccagtctga

SEQ ID NO: 79409 - protein, 483 aa, Yersinia pestis KIM
MRARNLYGKDDKMGKVKQQDIDQLIVLVGGRENIATVSHCITRLRFVLKDPSIASPKEIENLSMVKGCFTNAGQFQVVIGPEVDDYYKALIAKIGQSEVDKEQTKLAARQNMTWFERGISHFAEIFFPLLPALISGGLILGFRNVIGDIPMSEGKTLAQMYPAWQTIYDFLWLLGEAIFFYLPVAICWSTVKKMGGTPVLGIVLGITLVSPQLMNSYLLGQQLPDVWNFGWFTIEKVGYQAQVIPSILAGLALGWIETNLKRIIPAYLYLVVVPVVSLLLAVFLAHTLIGPFGRMIGDGVAWGVKAVMTGSFAPVGAALFGFLYAPLVITGVHQTTLAIDMQMVQSMGGTPVWPLIALSNIAQASAVLGIIIISRKINEREISVPAAISAYLGVTEPAMYGINLKYRFPMLCAMIGSALAGLICGLTGVMANGIGVGGLPGILSIQPQFWGIYAVAMLVAIVVPLALTILVYKRKERRGELPV

SEQ ID NO: 79410 - DNA, 1368 bp, Oceanobacillus iheyensis HTE831
  CDS (1)..(1368): transl_table=11
atgaagaaggaagagaggattgcaagagagatattagaacatatcggtggaaaagataatattcgttctttcacacattgcatgactagagtgcgtatagatataaaagaggatgagaaagtggataagtctgctctgagagaaattgaaggggtaatgggtgtcattgaagatgacgtgttacaaatagtagttgggccaggtactgtaaacaaagtagctgcttacataacagacatcactgggattaaaattggtgatagttctgaatcatttggtgaagatgttgctaaagaaacaaaagaaggtataaagcaaaaaaataatactccaatgaaaaatcttctacgtaaaattggaagtattttcattcctttaatcccaggtattgtaggttccgggattattaatggtgcagcaggattcttgaagaatactggtgttgatccaacattaacatggatgcaactgttaactgtattaggcggaagcatttttggttatttagccattgtggtaggttggaatacagctaaagaatttggtggaactccagtattaggggctattgcaggtattatcacaatgaatccagcgttagctgatatttcattgtttggaaacaatctcactcctgggtatggaggattaattggtgccatgtttgctgcgtggctgatggttttctttgagaagcaattccgaaagatgatcccaagtgtggtggatataattttcacaccaacactcactatccttacagttggaatgttgacgttagtagtagtacaaccaatcgccggtatccttactgaaggaattacagtgggaataaattgggtgttagatgttggaggagcatttgctggtgcagtattagccggtttcttcttaccattggtcatgtttggtttgcatcatggattaactcctattcatatggaattaattaatgcatatgatgcgactgcactattacctatactagcaatggcaggtgcgagccaagtaggtgctgcaattgcaatttatgttaaaacaaaaaatcaacgtttgaaaaatgttatcaaaggtggtctgccaactggcttcctcggaataggagaaccgcttatttatggggttaccttacctttgggacgtccatttattactgcttgtatcggagctgcagtggggggagcattccaagcaacgatgaagacggcttcatctagtataggtgtttctggcttacctttgataccgttaattgttgataataaatttttattctactttattgggttgttaatcacatacacggcaggatttttagtaacatatttcttcggatttaaagaatcgatggcagataatctaaaataa

SEQ ID NO: 79411 - protein, 455 aa, Oceanobacillus iheyensis HTE831
MKKEERIAREILEHIGGKDNIRSFTHCMTRVRIDIKEDEKVDKSALREIEGVMGVIEDDVLQIVVGPGTVNKVAAYITDITGIKIGDSSESFGEDVAKETKEGIKQKNNTPMKNLLRKIGSIFIPLIPGIVGSGIINGAAGFLKNTGVDPTLTWMQLLTVLGGSIFGYLAIVVGWNTAKEFGGTPVLGAIAGIITMNPALADISLFGNNLTPGYGGLIGAMFAAWLMVFFEKQFRKMIPSVVDIIFTPTLTILTVGMLTLVVVQPIAGILTEGITVGINWVLDVGGAFAGAVLAGFFLPLVMFGLHHGLTPIHMELINAYDATALLPILAMAGASQVGAAIAIYVKTKNQRLKNVIKGGLPTGFLGIGEPLIYGVTLPLGRPFITACIGAAVGGAFQATMKTASSSIGVSGLPLIPLIVDNKFLFYFIGLLITYTAGFLVTYFFGFKESMADNLK

SEQ ID NO: 79412 - DNA, 1440 bp, Vibrio vulnificus CMCP6
  CDS (1)..(1440): transl_table=11
atgatctcgcagctgctggctgcggtgggtggcagcagtaatgtcagcaaatgtggcaactgcatgacccgacttcgcttgacgctggccaacaatggcgtagcggatcaagccgtgattaagcaaatccccggcgtcatgggcgtggtggaaagcgatgagcaatttcaaatcatccttggccccggcaaagcgcagcaagcggcggaactgatgaacaagctgattgaaagcgtcatcaatggcgatgtgcaagaacaggctattgccagcgacacgaacgatctctccagcgtcgccgctgagcagaaaaagcaaatgaagagcaaacagaccagcgcggtgcaacgctttttgagcaagtttgccaccattttcaccccgctgatccccggttttattgccgctggtttgctgcttggttttgctacgctgcttgagcaaatgttcgtgctggaacaaaccccaagccaatttatgctcgatctgatcgcttacatgaaagtgtttggcaaagggctgtttgccttcctgagcatcttgattggttacaacgcgcagcaagcctttggtggctctggcgtgaacggcgcgattctcgcgtcactctttgtgctgggctacaaccctgatgcgacctctggcatctactcgggcatgagtgagttctttggctacaccattgacccgcgaggcaacattatcggcgtgctgctggcggcgatcattggtgcgcaagtggaacgcaaagttcgtgaatacatgcccgatgatctcgacatgattcttacctcagtggtcacactgctgatcatgggtgtgatcacgtttgtggtgatcatgcctatcggtggcgagctgttcaaaggcatgtcttggctgttcttgaacctcaacgacaacccgctgggcgcagcgattcttgctggtctgtttttgatttcggtggtgtttggtatccaccaaggctttgtgcctgtctattttgcgctgatggaagcacaaggttttaactctctgttcccaattctggcgatggcgggtggcggccaagtgggggcttcactggcactgtatttcaaagcgaagaaagacgcggtactgcgcacgcaagtgaaaggggcaatcattccgggcattctcggcatcggtgagccactgatttacggcgtcaccctaccacgcgtcaaaccgtttgtgacggcctgtattggtggcgcggcgggcggcttcttcatcggcttggtttcctaccttggcttacctgtcggtttgaataccgtgtttggcccttctggtatcgtggcgatcccactgatgacatcgcacagcggcatcttcgcaggcatggcggtcttcgtggttggcctgctcatctcctacgtggtcggcttcctcgccacttacttctttggcagcaaagacgtcgatttaagctga

SEQ ID NO: 79413 - protein, 479 aa, Vibrio vulnificus CMCP6
MISQLLAAVGGSSNVSKCGNCMTRLRLTLANNGVADQAVIKQIPGVMGVVESDEQFQIILGPGKAQQAAELMNKLIESVINGDVQEQAIASDTNDLSSVAAEQKKQMKSKQTSAVQRFLSKFATIFTPLIPGFIAAGLLLGFATLLEQMFVLEQTPSQFMLDLIAYMKVFGKGLFAFLSILIGYNAQQAFGGSGVNGAILASLFVLGYNPDATSGIYSGMSEFFGYTIDPRGNIIGVLLAAIIGAQVERKVREYMPDDLDMILTSVVTLLIMGVITFVVIMPIGGELFKGMSWLFLNLNDNPLGAAILAGLFLISVVFGIHQGFVPVYFALMEAQGFNSLFPILAMAGGGQVGASLALYFKAKKDAVLRTQVKGAIIPGILGIGEPLIYGVTLPRVKPFVTACIGGAAGGFFIGLVSYLGLPVGLNTVFGPSGIVAIPLMTSHSGIFAGMAVFVVGLLISYVVGFLATYFFGSKDVDLS

SEQ ID NO: 79414 - DNA, 1497 bp, Lactobacillus plantarum WCFS1
  CDS (1)..(1497): transl_table=11
atggctgaagataagtatactcggattgcaaatgctatctatgcgcatgtaggtgggccacagaatattgagaagttgattcattgcatgacacgtgttcggatgacaattcgcgattactcattagttgatatggatggattaaaggctattgatggcgtgatgggagttgtccaagaagatactttacaggttattgttggccctggaactgttgataaggttgcagacgtaatggttaagcaagttggggttggacttggggagccatttcctgatcctagcacgtttactagtgatgcaatggctactaagtctgaacatcaacgtgacaaggaaatggttgaagcgaaggctaaggaagttcacgctgcccaaaaagctaaaatcaaacaaacgccagttcgcaaagtgttaagtgccatttctagtatttttattccattaattccggtgtttgttggtgctgggttaatatctgggattgcttcaattctttctaacatgatgttagcgggagacattagtaagagctggacagattttataacagtgttaaaagtaattaatagtggactgttctcatacttagttatttatgttggtattaatagtgcaacggtttttggggctaccgctggattaggtggcgtgattggggccgttacgttgttaacaggtgtgacgccgcaagcaccaatccacaacatcttcaatggacaagcgttgtctgctggtcaaggtgggattattggggttatctttgctgtttgggtattggcgattgttgaaaaatggctacacaaggttattccagattcaattgatatcattattacaccaactattgcgttattggttgttggggtctttacaatcttcttagttatgccgattgctggtgttatttcgaatagcttagtcggtgcgattgaatggatcctgaatgttggcggcgctatttcggggtttgtcctaggtttactcttcttaccaatggttatgtttggattacatcaaattttgacaccaattcatattgaaatgattaataaattaggaatgacaccacttctaccaattttagcaatggctggagccggtcaagttggcgcagcactggctttatggattcggtgtcgcaataacaagcaactatcaaatatgattaaaggtgctttaccggttggtgtgttaggtgttggtgaaccattaatctatggagtaaccttgccgcttggccgaccattcattactgcatgtattggtggtggtattggaggtgccgttattggcggtctaggaaatattggtgcaactgcaatcggtccttctggcgtggctttgataccattgattgctaacggtcattggttaggttacgtgattggattattagcagcctatgctggtgggtttgttgcgacctacttctttggaatcccaagtagtgctaaaattgctaaagataaggaaggccatgttatcgaggcatag

SEQ ID NO: 79415 - protein, 498 aa, Lactobacillus plantarum WCFS1
MAEDKYTRIANAIYAHVGGPQNIEKLIHCMTRVRMTIRDYSLVDMDGLKAIDGVMGVVQEDTLQVIVGPGTVDKVADVMVKQVGVGLGEPFPDPSTFTSDAMATKSEHQRDKEMVEAKAKEVHAAQKAKIKQTPVRKVLSAISSIFIPLIPVFVGAGLISGIASILSNMMLAGDISKSWTDFITVLKVINSGLFSYLVIYVGINSATVFGATAGLGGVIGAVTLLTGVTPQAPIHNIFNGQALSAGQGGIIGVIFAVWVLAIVEKWLHKVIPDSIDIIITPTIALLVVGVFTIFLVMPIAGVISNSLVGAIEWILNVGGAISGFVLGLLFLPMVMFGLHQILTPIHIEMINKLGMTPLLPILAMAGAGQVGAALALWIRCRNNKQLSNMIKGALPVGVLGVGEPLIYGVTLPLGRPFITACIGGGIGGAVIGGLGNIGATAIGPSGVALIPLIANGHWLGYVIGLLAAYAGGFVATYFFGIPSSAKIAKDKEGHVIEA

SEQ ID NO: 79416 - DNA, 1362 bp, Salmonella enterica subsp. enterica serovar Typhi Ty2
  CDS (1)..(1362): transl_table=11
atggataagacggcagcgctcgccagcgacattttacgtggtatcggcggagagcaaaatattctgcgcctggaaaactgtatgacgcgagtcagagtggaggtacaggacgacagccaactggatattccgcgcttaaaagcgttgcctggcgtcagtggatacgtaaagcaaggggagcaacatcagctgatcgttgggccggggaaggctgcacaggtggttgatgcgatgcgcgtgcagattgccgcaggtggtgtaaagccggacgatgctatggcgcgtaccaaatccgaggcgaaagcgaagtataaagcgccgatgagcgatgcgttgcgtaagctggcgaatgtttttattccgcttattcccgcctttatcgcatccggcttgattaccggcattatcaatattcttaaacgcccggatatcgtcggcgatgttgccgtccactatcctaacctgctgggcctgatggggatatttggtagcgcggtgttcgctatcatgaacattctggttggcgtcaataccgcgaaagtctttggcggatcgcaggcgttaggcggcgtgatggcggggatcctttccagcccgcaactggcgcagattacgctctttggcgaggcgcttcagccgggacggggcggcgttatcgccgtcctgctggtggtggcgttaatgtgctggattgagcgccagttccgtaagctgctgccggggtcgctggagttaattcttaaccctttattgacgactgttatcaccggcgcggtagcgattgtcgctctgcaaccgcttggcggctggatttcagacgctatcgctcacggcgcgtcctgggctatcgatcgcggcggttttctggtgggcgcggtgttagccggaaccttcctgccgttggtactgatcgggctgcatcaggggctggtgcctattcatgtggagctggtgcaagcgcacggctataacgcgctgtttcccatcctggcgatggcgggggttggtcagataggcgcggccattgccgtactgatgaaaacccgcaatgcgcggctcaaaaaggtgattaaaggcgcgcttccggtcggactgctggggattggcgagccgctgatttttggcgtcacgctgccattgggtaagccatttattggcgcttgcctcggcggcgcggtaggcggggcgttgatcagctactggaaagtggcgacggtaattacctttggtatttccggtttgccgctggcattaacaattgttgccggaaaagtcctgttctatctgttaggctatttaatagcggtaattgccgggtttatttttacctggctgctggggttcaatgatccagaggagtaa

SEQ ID NO: 79417 - protein, 453 aa, Salmonella enterica subsp. enterica serovar Typhi Ty2
MDKTAALASDILRGIGGEQNILRLENCMTRVRVEVQDDSQLDIPRLKALPGVSGYVKQGEQHQLIVGPGKAAQVVDAMRVQIAAGGVKPDDAMARTKSEAKAKYKAPMSDALRKLANVFIPLIPAFIASGLITGIINILKRPDIVGDVAVHYPNLLGLMGIFGSAVFAIMNILVGVNTAKVFGGSQALGGVMAGILSSPQLAQITLFGEALQPGRGGVIAVLLVVALMCWIERQFRKLLPGSLELILNPLLTTVITGAVAIVALQPLGGWISDAIAHGASWAIDRGGFLVGAVLAGTFLPLVLIGLHQGLVPIHVELVQAHGYNALFPILAMAGVGQIGAAIAVLMKTRNARLKKVIKGALPVGLLGIGEPLIFGVTLPLGKPFIGACLGGAVGGALISYWKVATVITFGISGLPLALTIVAGKVLFYLLGYLIAVIAGFIFTWLLGFNDPEE

SEQ ID NO: 79418 - DNA, 1455 bp, Enterococcus faecalis V583
  CDS (1)..(1455): transl_table=11
atggcagaagaaagaattaaacgcattgctgatgggatttataaagaagttggtggtcaagaaaacgtggacaaagtcattcattgtatgactcgtgttcgtatggatatccgcgattatgacaaagtggatattgaaggattgaaaaaaattgatggcgttatgggcgtcgtagaagatgatacgttacaagtagttgttggtccagggactgttaacaaggttgcacaagaaatggtagatcaagcaggtgtcaaattgggagaaccatttaatcatggcaccacaactgatgcttcagcaggcaaatctggaaaagatttagtagaagaaaaagccgctcaaatgaaagcacaacaaaaagcgaaacaaaataacacttcaccatttaaaaaagtgttaaaagccatttctagtatctttgttccgatgattcctgcctttgttggggctggtattattggcgggattgcagctgttatgtctaacttagttgttgctggtgatatttcagcttcatggcaacaatatattgatgtcttaaatatcattaaaaatgggatttttgcttatttagctctttacactgggattaacagtgccagcgtttttggtgcaacgccagcgttgggtggtgttattggggcagtcacaatgttaacaggaatgaatccggatgctccaatcagtaatattttcactgggggaacattatctgcaggacaaggcggaattatcggtgttatttttgccgtatggttattatcattgttagaaaaacaattgcataaaattgtcccagaatcaattgatattatcgtaacgccaaccatttcacttttagtgattggcttagcaactattttcttaatcatgcctgtagccggagctatttctaatggcttagttggtattatcaatgttgtcttagaaaaaggtggcatggttgctggctttactcttggtttaaccttcttgccaatggtaatgtttggtttacatcaaattttgacgccaatccacattgaaatgattaatcaaacagggatgactttgttattaccaattctggccatggctggtgcgggacaagtcggtgcagctttagcattatggattcgttgtaaatcagataaaaaattagttgaaatgattaaaggtgccttgccagttgggattttaggtattggtgaaccattaatctacggagttactttaccattaggacgtccattcattactgcttgtatcggcggtggtattggtggtgcggtgattggggccttcggtaatgttggtgcgattgctattggaccaagtggggtggctttaattccattaattgccaacaaccaatggcttgcatatgtattaggtttattggctgcttacgcaggtggttttgtagcaacgttattctttgggattcctaaagatatgcaaacaactaaataa

SEQ ID NO: 79419 - protein, 484 aa, Enterococcus faecalis V583
MAEERIKRIADGIYKEVGGQENVDKVIHCMTRVRMDIRDYDKVDIEGLKKIDGVMGVVEDDTLQVVVGPGTVNKVAQEMVDQAGVKLGEPFNHGTTTDASAGKSGKDLVEEKAAQMKAQQKAKQNNTSPFKKVLKAISSIFVPMIPAFVGAGIIGGIAAVMSNLVVAGDISASWQQYIDVLNIIKNGIFAYLALYTGINSASVFGATPALGGVIGAVTMLTGMNPDAPISNIFTGGTLSAGQGGIIGVIFAVWLLSLLEKQLHKIVPESIDIIVTPTISLLVIGLATIFLIMPVAGAISNGLVGIINVVLEKGGMVAGFTLGLTFLPMVMFGLHQILTPIHIEMINQTGMTLLLPILAMAGAGQVGAALALWIRCKSDKKLVEMIKGALPVGILGIGEPLIYGVTLPLGRPFITACIGGGIGGAVIGAFGNVGAIAIGPSGVALIPLIANNQWLAYVLGLLAAYAGGFVATLFFGIPKDMQTTK

SEQ ID NO: 79420 - DNA, 1638 bp, Streptomyces avermitilis MA-4680
  CDS (1)..(1638): transl_table=11
gtgcgtaccactcctcactcagccacggccgccgcgatcctccccctggtcggcggcgccgcgaacgtcacctccgtcgcccactgcatgacccgcctgcgcctgggcctggccgaccgctccctggtggacgaggaatccctcagggcgctgccggccgtgctgggggtggtggacgacgacacgtaccagatcgtcctcggcccgggaacggtcgcgaaggtgaccccggaattcgagaaactgctggcatcggaaaccaccgaggcaccggcgaacgcgctgccggtgaccgccggggccccgacgcccgcagcaccgacggccgccgagggaccggcgacctccgagactccggtagccgccgagccccccgctcgcggtagcgctcccggtaccgaggccgcccggctcgcggcgcgcggcgccgccttgaaggcggctcagcggcagcgtcacgcgacccccgtacgccttctcctgcgccggatcgccaacatcttcgtcccgctgatcccggccctgatcggctgcggcgtcatcgcgggcgtgaacggcctgctcctgaacctggggtggctgccctccctcacccccgccctcgccgccgtcgcctccggcttcatggccctgatcgcggtcttcgtcggtcaccacacggcgaaggagttcggcggcaccccgatcctcggcggcgcggtggcggcggtgatcgtgtacgcgggggtggcgaaggtgacggtgttcggtacgacgctgtccccgggccagggcggtgtcctcggcgcgctggcggccgcgctcctgggaacgtacgtcgagaagtggtgccgcacctgggtcccggacaccctggacgtcctcgtcacccccacgctcacggtcctgctgaccggcctggtgaccctgtacggcctgatgtacgcggccggagcggccacgtcggccatcggcacggcggcgacctggctcctgtccacgacgggcgtcttcgccggcctgatcctgggcggcctgttcctccccctggtgatgctgggcctgcaccaggccctcatccccctccacaccaccctcatcgaacagcagggctacacggtcctcctccccgtgctggcgatggcgggcgcgggccaggtcggcgcggccctcgcggtgtacgtccggctgcgccacgaccactccctgcgtacgacgatccggtcggcgctcccggcgggcctgctcggcgtgggcgaacccctgatctacggcgtctcgctccccctcggccgcccgttcctcacggcctgcgcgggcggcgcggcgggcggcgccttcgtgggcctcttctcgatgctgggcgaccggatcggctcgacggcgatcggcccgtcgggctgggccctgtttccgctgctggcggggagcgggggcctgctccccagcgccgcgatctacgccggcggcctgctgacggggtacgcggtggggttcggggcgacgtacttcttcggctcgttcggcgttgtcggtggcgtgtgcgaggctgaacgcactgatatcgccgcaccgaccggcaccgccgcaccggccatgaccaccaccccgaccgacaccgccgccccgcacgacccggaagggaaccgcaccctgtga

SEQ ID NO: 79421 - protein, 545 aa, Streptomyces avermitilis MA-4680
MRTTPHSATAAAILPLVGGAANVTSVAHCMTRLRLGLADRSLVDEESLRALPAVLGVVDDDTYQIVLGPGTVAKVTPEFEKLLASETTEAPANALPVTAGAPTPAAPTAAEGPATSETPVAAEPPARGSAPGTEAARLAARGAALKAAQRQRHATPVRLLLRRIANIFVPLIPALIGCGVIAGVNGLLLNLGWLPSLTPALAAVASGFMALIAVFVGHHTAKEFGGTPILGGAVAAVIVYAGVAKVTVFGTTLSPGQGGVLGALAAALLGTYVEKWCRTWVPDTLDVLVTPTLTVLLTGLVTLYGLMYAAGAATSAIGTAATWLLSTTGVFAGLILGGLFLPLVMLGLHQALIPLHTTLIEQQGYTVLLPVLAMAGAGQVGAALAVYVRLRHDHSLRTTIRSALPAGLLGVGEPLIYGVSLPLGRPFLTACAGGAAGGAFVGLFSMLGDRIGSTAIGPSGWALFPLLAGSGGLLPSAAIYAGGLLTGYAVGFGATYFFGSFGVVGGVCEAERTDIAAPTGTAAPAMTTTPTDTAAPHDPEGNRTL

SEQ ID NO: 79422 - DNA, 1347 bp, Bacillus cereus ATCC 14579
  CDS (1)..(1347): transl_table=11
atggccaaggaaatttcggagcaacttggtggaataaaaaatattcgtagtattgctcattgtatgacgagactacgtttaacgcttcatgatgaaagtaaagtaaatatgaatcttttgaaaaaagttgaaggcgttatgggtgttatagaagatgagacgcttcaagttgtcgttggtccaggaacagtaaataaagtagcagctgaaatggaaggtttgacaggactacgaattggtgaggtagcagatcatcaccttgaagatattgggcaagagatgaaatcagagattaagaagaaaaataatacaccggtgaaaaactttttacgaaaaataggaagtattttcatcccattaattccggggcttgttgcgtcaggaattataaacggggttgctaactttgcgaaaaatgctggtgctgatccaaatgcaacgtggttacaaatgttactactcattggcggcggtatctttacattcttaggaattttagtcggctggaatacagcgaaagaatttggcgggacaccggttcttggggcaattgctggtattttaattttcaacccggcgatggcaaacgtaaaattgtttggtgaagcattagtgcccggacggggcggattgtttgcagttatttttgcagcatggcttatggttgtagtggaaagacaagttcgaaaagcagtgccaaacgcagttgatattatcgtgacaccactcattactgtattagttgtaagtatcgtaacgatgttagccattcagccattagcaggtttcttatcagatggtattacgagcggaattaatgctattttaaatattggcggagcatttgctggcgcagtacttgcgggaacatttttacctctcgttatggtcggattgcatcacggtttaacaccaattcatatggaatttattaatcaaacacacgtaacacctttattaccagtgctcgcaatggctggtgctggccaagtgggcgcagcaattgcgatttatgtgaaaacaaaaaacaaacgacttcgaaatgtaattaaaggtggattgccagttggctttttaggaattggtgagccgttattatacggggtgacattaccacttgggaaaccgtttattactgcttgtttaggagcggctgtcggtggtgcattccaagcagttatgcaaacagcttctcttggaattggtgtatcagggctatctttaattccgttaattgctgacaataaatatttactctatttcttaggtttagtaattgcatatgctttcggatttatctttacgtatttcttcggatttaaagaagaaatggcagaaaacatatag

SEQ ID NO: 79423 - protein, 448 aa, Bacillus cereus ATCC 14579
MAKEISEQLGGIKNIRSIAHCMTRLRLTLHDESKVNMNLLKKVEGVMGVIEDETLQVVVGPGTVNKVAAEMEGLTGLRIGEVADHHLEDIGQEMKSEIKKKNNTPVKNFLRKIGSIFIPLIPGLVASGIINGVANFAKNAGADPNATWLQMLLLIGGGIFTFLGILVGWNTAKEFGGTPVLGAIAGILIFNPAMANVKLFGEALVPGRGGLFAVIFAAWLMVVVERQVRKAVPNAVDIIVTPLITVLVVSIVTMLAIQPLAGFLSDGITSGINAILNIGGAFAGAVLAGTFLPLVMVGLHHGLTPIHMEFINQTHVTPLLPVLAMAGAGQVGAAIAIYVKTKNKRLRNVIKGGLPVGFLGIGEPLLYGVTLPLGKPFITACLGAAVGGAFQAVMQTASLGIGVSGLSLIPLIADNKYLLYFLGLVIAYAFGFIFTYFFGFKEEMAENI

SEQ ID NO: 79424 - DNA, 1365 bp, Bacillus anthracis str. Ames
  CDS (1)..(1365): transl_table=11
atgaagaaagaagagagaatggcgaaagaaatttcagagcaacttgggggagtaaaaaatattcgtggcattgctcattgtatgacgagattacgattaacgcttcatgatgaaagtaaagtaaacatggaccttttgaaaaaggtagaaggggttatgggcgttattgaagatgagacgcttcaagttgttgttggtccaggaacggtaaataaagtagcagctgagatggaaggtttaacgggactccgaattggtgaggtggcagattatcaccttgaagatcttgggcaagagatgaagtcagagattaagaagaaaaataatacaccagtgaaaaactttttaagaaaaataggaagtatctttattccattaattccgggtcttgttgcatcaggtattataaacggggttgctaactttgcgaaaaacgcaggtgctgatccgaatgcaacttggctacaaatgttactacttattggtggcggtatctttacattcttaggcattttagtcggctggaatacagcgaaagagtttggcgggacgccagttcttggggcaattgctggtattttaattttcaacccggcaatggcgaatgtaaaattatttggtgaagcgctcgtacccggacggggcggattatttgcagttatttttgcagcatggcttatggttgtagtggaaagacaagttcgaaaagctgtaccaaatgcagttgatattattataacgccgcttattactgtgttagtcgtaagtatcgtaacgatgttagcaattcagccggtagcaggtttcttatctgaaggaattacaaacggaattaatggcattttaaatattggcggagcgtttgcgggagcagtacttgcaggaacatttttaccgctcgttatggtcggattacatcacggtttaacaccgattcatatggagtttattaatcaaacgcacgtaacgcctttattaccagtactcgcaatggctggagctggtcaagtaggtgcagcgattgctatttttgtaaaaacaaaaaacaaacgacttcgtaacgtaattaaaggggcattaccagttggatttttagggattggtgaaccgttattatacggggttacattaccactgggaaaaccgtttcttacagcttgtttaggagcagcagttggcggtgcgttccaagcagttatgaaaacagctgcactcggaatcggtgtatctggattatcattaattccgttaattgctgataataaatatttattatatttccttggattagtagtggcatatacgttcggattcatctttacgtacttcttcggatttaaagaagaaatggcagaaaacatatag

SEQ ID NO: 79425 - protein, 454 aa, Bacillus anthracis str. Ames
MKKEERMAKEISEQLGGVKNIRGIAHCMTRLRLTLHDESKVNMDLLKKVEGVMGVIEDETLQVVVGPGTVNKVAAEMEGLTGLRIGEVADYHLEDLGQEMKSEIKKKNNTPVKNFLRKIGSIFIPLIPGLVASGIINGVANFAKNAGADPNATWLQMLLLIGGGIFTFLGILVGWNTAKEFGGTPVLGAIAGILIFNPAMANVKLFGEALVPGRGGLFAVIFAAWLMVVVERQVRKAVPNAVDIIITPLITVLVVSIVTMLAIQPVAGFLSEGITNGINGILNIGGAFAGAVLAGTFLPLVMVGLHHGLTPIHMEFINQTHVTPLLPVLAMAGAGQVGAAIAIFVKTKNKRLRNVIKGALPVGFLGIGEPLLYGVTLPLGKPFLTACLGAAVGGAFQAVMKTAALGIGVSGLSLIPLIADNKYLLYFLGLVVAYTFGFIFTYFFGFKEEMAENI

SEQ ID NO: 79426 - DNA, 1455 bp, Chromobacterium violaceum ATCC 12472
  CDS (1)..(1455): transl_table=11
atgagtcacgactatcaggcgatcgccgcgcggatactggaaaatatcggcggcgctggcaatatccgccaagctgcgcactgcctcacccggctgcgcatctctttgaacgacgaatccaaggtgaatggggacgcgctgcgccaggtggcgctggtgaagggccacttcatcaatgccggggtatttcagatcgtcatcggctccggcgatgtggaccgcgtctacgccgagatggtgaagcagggcggcgtggcgcgcgccaccatcgccgacgtcaaggccagcggcgacgccaagcagaaccgcttgcagcagctggtcaaggtgttctccgacgtgttcatgccgatattgccggccatcgtcatcgccggcctgctgatgggcgccaacaatctcttgggcgccaagggcatgttcatcgcggacaagagcctgctggacgcctatccgggcctgtcgggcttgtggggcctgatcaatatgatggccaacacctccttcgtgttcctgccggcgctggtgggctggtcggcggccaaacgcttcggcggcagcgagattctcggcatcgtgctgggcctgctgctggtgcatccggacttgctcaacgcctggaactacggcaaggcggcggccgggctggacggcgcctcggtgccttactttgatctctttggcctgcatatcgagaaggtgggctatcagggccagatcctgcccatcctggccgcggcctgggtgatgtgccgcgttgagctgtggctgaagcccagggtgcccaacgcggtgcagctcttggtggtgcccatcgtcaccatcgcggtcagcggcttcctggcgctggcggtgatcggtccgctggcccgccacctgggcattgctgtcaccgacgcgctggtttacgtgttcaacctggcgccgtggctgggcgcggccttgttcggcgcgctgtacgcgccgctggtgctgaccggcatgcaccatatgttcatcgcggtggacttgcagctgatctccagccagggcggcaccttcatctggccgatgatcgcgctgtccaatatcgcccagggcagcgccgcgctggcgatgttctggctggccaggaacgccaacgacaagaacatggcgtccacctcggcggtgtcggccttcttcggcatcaccgagccggcgatgttcggcgtcaatctgcgctacaagctgccgttctacgcggcgctggccggctccgcctgcgcggcggtgttgatcagcctgggccacgtcaaggcgtcggcgatcggcgtcggcggcctgccggcctttatctccatcattccgcagcacatcccgctgttcctggcgggcaccctggtggccttggccctgcccttcggcctgacctggctgctggcgcgccgccagctggccgctgccgctcaagaggaggccgcgcaaaatgtctaa

SEQ ID NO: 79427 - protein, 484 aa, Chromobacterium violaceum ATCC 12472
MSHDYQAIAARILENIGGAGNIRQAAHCLTRLRISLNDESKVNGDALRQVALVKGHFINAGVFQIVIGSGDVDRVYAEMVKQGGVARATIADVKASGDAKQNRLQQLVKVFSDVFMPILPAIVIAGLLMGANNLLGAKGMFIADKSLLDAYPGLSGLWGLINMMANTSFVFLPALVGWSAAKRFGGSEILGIVLGLLLVHPDLLNAWNYGKAAAGLDGASVPYFDLFGLHIEKVGYQGQILPILAAAWVMCRVELWLKPRVPNAVQLLVVPIVTIAVSGFLALAVIGPLARHLGIAVTDALVYVFNLAPWLGAALFGALYAPLVLTGMHHMFIAVDLQLISSQGGTFIWPMIALSNIAQGSAALAMFWLARNANDKNMASTSAVSAFFGITEPAMFGVNLRYKLPFYAALAGSACAAVLISLGHVKASAIGVGGLPAFISIIPQHIPLFLAGTLVALALPFGLTWLLARRQLAAAAQEEAAQNV

SEQ ID NO: 79428 - DNA, 2193 bp, Lactobacillus johnsonii NCC 533
  CDS (1)..(2193): transl_table=11
atgaataacagttataaagaagtagcggaaaaaattttggttgcagttggtggagcagaaaatattaatgaagtattcaactgtatttcaaggctaaggttctatttaaaagattcaaagaaagtaaactatccaaaactaaagttgattccagcaatttcagaaagtgagtttgaagatggacagttacaaatccttttaggtcaagatgtagagctttattatgatgcattggttcacttattaaagcagaaaaatataagtggaggagaaaagaaaatgtctaaagtagatgaaaaagataaaaaactagctgaagaaatagtcaagctagttggtggtaaagataatgtaattagtttagttcattgtgcgactagactacgttttaaattaaaagatgaaagcaaagctgatgataatgcaattaagcaattaaaaggagtaatgggcgttgctcatgcaggtggtcaatatcaagttattattggaaacaacgtagcagatgtttatgatcaagtaattccacttttaggattgagtcaggatcataaagaaaatacaaataaagataaaaatatagttaatcgctttataaaattattaacaactatttttacaccatttttaggagtcttagcagctgcaggtgtattaaaaggatttttaacgctcttggttgttttacatgtattaaatacaaagagtggcacatatttaattctttatgctgcaggggatgcattattttactttttacccgtgatgataggcttttcaactgctagaacatttaaaataaatgaatatgttggagcaattataggggcagcactctgctatccatctttagtccaggcatatcagatgaagcaaagcattcaattctttaatattcctgttattttgatgaattatacccaaacgctaattccagcaattattgcggtatggctagcatcaattctgtataagtttttaaacaactatctaccttcatcattaaagcttatcttcacgcctttaataactttaatgattgctgttcctttaactttcttagtcgtaggaccagcaacttcttgggctagtgaagaattgacatatagtattctttggatttatgctcatgcaagagttgtagctgggtttattttagctggtatttggcaagcagtagtgttactaggactacattgggcctttatacctatttttttaaacaatatagcaactcgtggttttgatcctattgatgcgatgttatattgtacagtttttggacaaactggggctgcattggctttagttctaaaggctaaagattctaaatttaaggaaattggttggccagccgttatttctggttttttgggagtaacagaaccaataatttacggagttacattaccacataaaaaatcctttattcttggatcaatcggatcagcatttggtggagcaatcgctgctttttcaaatgcaaaaatgtttggaggctttgctagtggtggtatttttggaattccaatgtttattgatcaaaaagctggaattaatggtagctttatgggattttgtctatctttacttgtcgcttttggaattgcttttatcagtactctaatttggggcgataaaattgtctctactacttcaaagaaagattttaaagttaaaagagttgaattcaaagatcaaggaattgcatccccagttcagggtactgcacttgaattaaaaaatgtcgatgacccagttttttcggctggtactattggtaaaggaattgctgttcaaccaaataatgatgaaattcatgcgccatttgatggtgaagtagtttctgtttttccaactaaacatgctattggattaaagtcagacaatggagttgaattgttgattcatttaggtattaatacggtaaatttgaaaggaaaatatttcgaggtaaaagttgaagtaggtcaaaaagttaaacaaggtgacttacttgagacattcgatgtagataaaattaaggcagctggatatgacacagtagttccaattattgtaacgaatgctaataattttgatgatattattattgaaaagaaaaatggagattcagtaagatttgaagatcaaattttaatggcaaccgttgatcaagaagtagaaattccagataatgctactcaagcataa

SEQ ID NO: 79429 - protein, 730 aa, Lactobacillus johnsonii NCC 533
MNNSYKEVAEKILVAVGGAENINEVFNCISRLRFYLKDSKKVNYPKLKLIPAISESEFEDGQLQILLGQDVELYYDALVHLLKQKNISGGEKKMSKVDEKDKKLAEEIVKLVGGKDNVISLVHCATRLRFKLKDESKADDNAIKQLKGVMGVAHAGGQYQVIIGNNVADVYDQVIPLLGLSQDHKENTNKDKNIVNRFIKLLTTIFTPFLGVLAAAGVLKGFLTLLVVLHVLNTKSGTYLILYAAGDALFYFLPVMIGFSTARTFKINEYVGAIIGAALCYPSLVQAYQMKQSIQFFNIPVILMNYTQTLIPAIIAVWLASILYKFLNNYLPSSLKLIFTPLITLMIAVPLTFLVVGPATSWASEELTYSILWIYAHARVVAGFILAGIWQAVVLLGLHWAFIPIFLNNIATRGFDPIDAMLYCTVFGQTGAALALVLKAKDSKFKEIGWPAVISGFLGVTEPIIYGVTLPHKKSFILGSIGSAFGGAIAAFSNAKMFGGFASGGIFGIPMFIDQKAGINGSFMGFCLSLLVAFGIAFISTLIWGDKIVSTTSKKDFKVKRVEFKDQGIASPVQGTALELKNVDDPVFSAGTIGKGIAVQPNNDEIHAPFDGEVVSVFPTKHAIGLKSDNGVELLIHLGINTVNLKGKYFEVKVEVGQKVKQGDLLETFDVDKIKAAGYDTVVPIIVTNANNFDDIIIEKKNGDSVRFEDQILMATVDQEVEIPDNATQA

SEQ ID NO: 79430 - DNA, 2004 bp, Lactobacillus johnsonii NCC 533
  CDS (1)..(2004): transl_table=11
atgtcaaaggataagtatcaaattctaagcgatgaaatctaccaagaaattggtggtataaataatgttgaatcattgatccattgtatgacaagactcagaattaaaatcagagatatgtctaaagtaaatatggagaaattgaaaaagataaatggtgtattaggagtagttgaagctgatacactggaaattgttttaggaccaggcgttaatactaaggttgccacgataatgaataatgaggctggcgtaaaggaaggagaaacttttcctgaaacaaattcatatcaatctaataaaagtgaagttgaaaagaaagcagctgaagtgcatgcagctcacaaagcttctttaaaaaagacctggtggcggtcagctcttcaacatatttcggcaatttttgtaccattaatacctgcatttgtaggtgccggactaatttccggtgttgcgggaattctgagaaacttgttaactgctaaagtattgccgatgtcctggaatcttggcgtaacagtattagcaatgatttctagtgctttatttgcatatttgaatatttatgtaggtattaatacagcaaaagaatttggggctactccaggcttgggtggtatcattggtggtattgtttacttacctgggattgttgctccagtaagcattcctaatatttttgatggaaaacctctagctgctggtcagggtggtattatcggtgtcctattaggcgtttggctattatcttatgttgaaaaatttttccataagcatattgctgactctgtagatattatttttacaccatttttaacaatactaataatgggattatttacaatttttgtaattatgcccttggcaggatggttttctaattctcttgtaggtggaattaattgggtgttaaaagttggtggaccaatctcaggatttattttaggattattcttccttcctatggtaatgctaggtttacatcaaattttaacccctatccatctagaaatgattcaaaaacttggatttactcctcttctccctatcttagctatggccggaggtggtcaagtaggagctgcaattgctttatgggtaaagtgtcgtaaaaataaacaattagtaaatatgattaaaggtgccttaccagttggtatcttaggcgtcggagagccattaatctatggtgttacattaccattaggacgtccatttattactgcttgtgttggtggtggtattggtggtgctgtagttgctgcttttggtcaagttggctcaatagctatcgggccttcaggtgtagccttgattccattaattgctcataacatgtggtgggcttatatattaggtttgttagcttcttatgttggtggttttattgctacttacttctggggtgttccgaaagaggctatgcttcctgcagatgaggctgatgctgaagttaaagaacgaagagaagctgaggagcaagcatataatttgaatatgtctacttcaggtgaaaatgaggtaaaagataacgctaaattaacaacacaagaaattgttgctccagtagatggacaaattgaagagttagatgaagttgaagaccaagtattttcacaaaaaatgcttggagaaggatttgctattattccaaaagatgggaaaattgttgctcctgttgatggaaaagtagttagtgtaatgtctacaaaacatgccttaactttaaaatcaactaaaggaaatttggagatcttattgcatatgggtttggatactgtagaactaaagggccgtccttttgatatcaaagtaaaagaaaatgacatagtaaaagccggacaacctgttgcacaaatggatattggaaaaataaaagaagctggaaaggatccaatcgtaattatgactattactaacatagatgatgtttctaattttaagctaattgctacaggtaccgttaaggccgatatgcccgtattaaagataactagtaagtga

SEQ ID NO: 79431 - protein, 667 aa, Lactobacillus johnsonii NCC 533
MSKDKYQILSDEIYQEIGGINNVESLIHCMTRLRIKIRDMSKVNMEKLKKINGVLGVVEADTLEIVLGPGVNTKVATIMNNEAGVKEGETFPETNSYQSNKSEVEKKAAEVHAAHKASLKKTWWRSALQHISAIFVPLIPAFVGAGLISGVAGILRNLLTAKVLPMSWNLGVTVLAMISSALFAYLNIYVGINTAKEFGATPGLGGIIGGIVYLPGIVAPVSIPNIFDGKPLAAGQGGIIGVLLGVWLLSYVEKFFHKHIADSVDIIFTPFLTILIMGLFTIFVIMPLAGWFSNSLVGGINWVLKVGGPISGFILGLFFLPMVMLGLHQILTPIHLEMIQKLGFTPLLPILAMAGGGQVGAAIALWVKCRKNKQLVNMIKGALPVGILGVGEPLIYGVTLPLGRPFITACVGGGIGGAVVAAFGQVGSIAIGPSGVALIPLIAHNMWWAYILGLLASYVGGFIATYFWGVPKEAMLPADEADAEVKERREAEEQAYNLNMSTSGENEVKDNAKLTTQEIVAPVDGQIEELDEVEDQVFSQKMLGEGFAIIPKDGKIVAPVDGKVVSVMSTKHALTLKSTKGNLEILLHMGLDTVELKGRPFDIKVKENDIVKAGQPVAQMDIGKIKEAGKDPIVIMTITNIDDVSNFKLIATGTVKADMPVLKITSK

SEQ ID NO: 79432 - DNA, 1365 bp, Bacillus cereus ATCC 10987
  CDS (1)..(1365): transl_table=11
atgaagaaagaagagagaatggccagagaaatttcagagcaacttgggggagtaaagaatattcgtggcattgctcattgtatgacgagactacggttaacgcttcatgatgaaagtaaagtgaacatggaccttttgaaaaaagttgaaggggttatgggcgttattgaagatgagacgcttcaagttgttgttggtccgggaacagtaaataaagtagcagctgagatggaaggtttaacaggactccgaattggtgaagtggcagatcatcaccttgaagatcttgggcaagagatgaagtcagagattaagaagaaaaataatacaccggtgaaaaactttttaagaaaaataggaagtattttcattccattaattccgggtcttgttgcatcaggtattataaacggggtcgctaactttgcgaaaaatgcaggtgctgatccgaatgcaacgtggctacaaatgttgctactcattggcggcggtatctttacattcttaggcattttagtcggctggaatacagcgaaagaatttggcgggacaccggttcttggagcaattgctggtattttaattttcaacccggcgatggcgactgtaaaattatttggtgaagcgctcgtacccggacggggcggattgtttgccgttatttttgcagcgtggcttatggttgtagtagaaagacaagttcgaaaagctgtgccaaatgcagttgatattatcgtgacaccgcttattactgtgttagtcgtaagtatcgtaacgatgttagccattcagccggtagcaggtttcttatctgaaggaattacaagcggcattaatggtattttaaatattggcggcgcgtttgcgggagcagtacttgcaggaacatttttaccgctcgttatggtcggattacatcacggtttaacaccgattcatatggagtttattaatcaaacgcacgtaacacctttattaccagtactcgcaatggctggagctggtcaagtaggtgcagcaattgcgatttttgtaaaaacaaaaaataaacgacttcgtaacgtaattaaaggggcattaccagttggatttttaggaattggcgaaccgttattatacggggttacattaccacttggaaaaccgtttcttacagcttgtttaggggcagctgtcggtggtgcattccaagcagttatgaaaacagctgcactcggaattggtgtatcaggattatcattaattccgttaattgctgataataaatatttactatatttccttggattagtagtggcatatactttcggattcatctttacgtacttcttcggatttaaagaagaaatggcagaaaacatatag

SEQ ID NO: 79433 - protein, 454 aa, Bacillus cereus ATCC 10987
MKKEERMAREISEQLGGVKNIRGIAHCMTRLRLTLHDESKVNMDLLKKVEGVMGVIEDETLQVVVGPGTVNKVAAEMEGLTGLRIGEVADHHLEDLGQEMKSEIKKKNNTPVKNFLRKIGSIFIPLIPGLVASGIINGVANFAKNAGADPNATWLQMLLLIGGGIFTFLGILVGWNTAKEFGGTPVLGAIAGILIFNPAMATVKLFGEALVPGRGGLFAVIFAAWLMVVVERQVRKAVPNAVDIIVTPLITVLVVSIVTMLAIQPVAGFLSEGITSGINGILNIGGAFAGAVLAGTFLPLVMVGLHHGLTPIHMEFINQTHVTPLLPVLAMAGAGQVGAAIAIFVKTKNKRLRNVIKGALPVGFLGIGEPLLYGVTLPLGKPFLTACLGAAVGGAFQAVMKTAALGIGVSGLSLIPLIADNKYLLYFLGLVVAYTFGFIFTYFFGFKEEMAENI

SEQ ID NO: 79434 - DNA, 1449 bp, Listeria monocytogenes str. 4b F2365
  CDS (1)..(1449): transl_table=11
atgacaaaagaagcagaaattggaaaacaaatatttattcatgtcggtggaatggaaaacgtttcaagaattgcacattgtatgacacgagttcgattggggatagttgatagtgaccttgttgatgtagctggattaaaaaaagttccgggtgttatcggtgttgtagaagatgatactttacagattattgttggaccaggagttgtgaacaaagtggccggcgcaatggcagaaatggctggtgttaaaattggcgaaacgattcaagaaaatttggatagcggcacaaaaactggtaaggaattagtcgaagaaaaagcatccaaaacaaaagctgaattaaaagcaaaacaaaataattcatctggttttaaaagattactaaaatcaatctctaatatttttgttccactaattccgggttttgttggagcgggattaattgctggtattgcagcaattatttctaataatataacagctggaaatttagatgctgctgtttggactcaatatattgatattttaggagttattaataaaggaatatttgccttcttagctatttatgtagggattaataccgcgaatgaatttggtggaacacctgtactcggtggtggaatcgctgggataacattgctttccggattagcagaaggacatacaattacaaacattttcacgggggatcctatcgtagccggacagggtggcattatcggcgtattattagcagtttggttaatgtgcgtacttgaaaaaaacttgcgcaaaatcattccgaatgcgatagatattatttttacgccaacgcttgtattacttattattggtttagtaactattttcttaattatgccttttgcaggacttgtatcagatggtttagttaacggtattaattgggtaatcgaagttggaggagtattcgcaggttttgtgctagggacgttattcttaccaatggttatgtttgggttacatcaagttttaacacccatccatgtagaaatgattgctcaaaatggttatactatcttacttcctattctagctatggcaggtggcggacaagttggtgcagcaatcgcgctttggattcgttgtcgtaaaaataaaccactagtaaatatgattaaagggggtctaccggttggaattttaggtatcggtgaaccattaatttatggggtaacaataccacttgggaaaccttttcttacagcttgtctcggaggcggtatcggtggggcagtaatcggctactttggtaacgtcggagcaattgcaatcggcccatcaggagttgcacttatcccactaatcgcgaataatgaatggctttcttacgtcatcggattaattgcagcatatttaggtggattcattttaacttatttctttggtacaccaaaagacgcaatgaatagcgtagaattgtaa

SEQ ID NO: 79435 - protein, 482 aa, Listeria monocytogenes str. 4b F2365
MTKEAEIGKQIFIHVGGMENVSRIAHCMTRVRLGIVDSDLVDVAGLKKVPGVIGVVEDDTLQIIVGPGVVNKVAGAMAEMAGVKIGETIQENLDSGTKTGKELVEEKASKTKAELKAKQNNSSGFKRLLKSISNIFVPLIPGFVGAGLIAGIAAIISNNITAGNLDAAVWTQYIDILGVINKGIFAFLAIYVGINTANEFGGTPVLGGGIAGITLLSGLAEGHTITNIFTGDPIVAGQGGIIGVLLAVWLMCVLEKNLRKIIPNAIDIIFTPTLVLLIIGLVTIFLIMPFAGLVSDGLVNGINWVIEVGGVFAGFVLGTLFLPMVMFGLHQVLTPIHVEMIAQNGYTILLPILAMAGGGQVGAAIALWIRCRKNKPLVNMIKGGLPVGILGIGEPLIYGVTIPLGKPFLTACLGGGIGGAVIGYFGNVGAIAIGPSGVALIPLIANNEWLSYVIGLIAAYLGGFILTYFFGTPKDAMNSVEL

SEQ ID NO: 79436 - DNA, 1602 bp, Mycoplasma mobile 163K
  CDS (1)..(1602): transl_table=4
atgaaacaatcagaattcaaaaattcagccgaactaattattgaagcagttggtggcaaagaaaatatttcaattttttaccactgtgcaacaagattgcgtttcaaattaactgatcaatcaaagattaatgttaataaaattaaagcaattaaacttgcaaaaggttataaccttgaaggtgaagaaaatcaaattatttttggagcaggaactgttaataaagttcatgatgaactacaaaatttaacccaaaaaagtactaatcaaactagttcgccaaaacaaaaacatatttgatgaaataaaaatatttctttttgaagcaatttatttttgaatttaaggtgatttgtaagaagttttgcagaaatttttattcctttgattcctatttttattgcaggaggactttcattagctttaactaatttagttaaagcagtagctgatgtcaatataaatcaaacagcaaaaagtgcggtttttttctttgaattaattggagcaggaatcttaggttcacttccagcttttgttggatatacttctatgaaaaaatatggtggaacacctttaattggtttagcaattggaattattcttgttgcacctaatttattgaatgcttatttggtgactggaactttaacttcatttccagtaggtcaaataggaataactcctggaactcaaactaatggtggaacaattgctgtttttgctttatttccagctttgcctgaatttttccaatttagattaatcggatatcaagctgagatttttccggtgcttgcaattgttgctttagctttttttgtagaaaaattcttaaaaagatatacaccagaagctttagcgattattgttgtgcctttaattacaatagtatttacactttttcttggtttttgaattattgggccaatttttaaattcatctcaattggactaactttagcttttagtgggattttccaatttacaaactttgcttgatttggtttaggaggagcaattttaggatttgcatatccatttttagttgtaacaggtttacatcaaggatttttaccaattgaagcccaattgatcgccagagatggttttacttggattacttctattgcaactatatctaatatttcacaaggagttgttggattaactttagctattgtttttttcttgaaaaaagaaaaaaagaatgcttcattagcaatttcaggtggagtaagtgctaatttaggaattacagaaccaattctattcggaattaatattcctttaaaatttgcaatggtagctgctgcttgtggtgctgctgttggaggatattgagttggaatgactcaaacaatggcaagttctattggtagtgcttcatgaattggttttattcaatttgatataacagcaacaagacttcaagcttttattggtaatagaagtgctgctttaactaatttagcaccaatttacaatattgctattgcttcaattttatctgtattttcttcaattggatttacactaatattcttaaaaacaaaatggggcaaaaatagttacaataaatttttgtctattcaaaattaa

SEQ ID NO: 79437 - protein, 533 aa, Mycoplasma mobile 163K
MKQSEFKNSAELIIEAVGGKENISIFYHCATRLRFKLTDQSKINVNKIKAIKLAKGYNLEGEENQIIFGAGTVNKVHDELQNLTQKSTNQTSSPKQKHIWWNKNISFWSNLFLNLRWFVRSFAEIFIPLIPIFIAGGLSLALTNLVKAVADVNINQTAKSAVFFFELIGAGILGSLPAFVGYTSMKKYGGTPLIGLAIGIILVAPNLLNAYLVTGTLTSFPVGQIGITPGTQTNGGTIAVFALFPALPEFFQFRLIGYQAEIFPVLAIVALAFFVEKFLKRYTPEALAIIVVPLITIVFTLFLGFWIIGPIFKFISIGLTLAFSGIFQFTNFAWFGLGGAILGFAYPFLVVTGLHQGFLPIEAQLIARDGFTWITSIATISNISQGVVGLTLAIVFFLKKEKKNASLAISGGVSANLGITEPILFGINIPLKFAMVAAACGAAVGGYWVGMTQTMASSIGSASWIGFIQFDITATRLQAFIGNRSAALTNLAPIYNIAIASILSVFSSIGFTLIFLKTKWGKNSYNKFLSIQN

SEQ ID NO: 79438 - DNA, 1365 bp, Bacillus thuringiensis serovar konkukian str. 97-27
  CDS (1)..(1365): transl_table=11
atgaagaaagaagagagaatggcgaaagaaatttcggagcaacttgggggagtaaaaaatattcgtggcatcgctcattgtatgacgagactacgattaacgcttcatgatgaaagtaaagtgaacatggaccttttaaaaaaggttgaaggggttatgggcgttattgaagatgagacgcttcaagttgtcgttggtccgggaatggtaaataaagtagcagcagagatggaaggtttaacgggactgcgaattggtgaggtggcagatcatcaccttgaagatcttgggcaagagatgaagtcagagattaagaagaaaaataatacaccggtgaaaaactttttaagaaaaataggaagtattttcattccgttaattccgggtcttgttgcgtcaggtattataaacggggttgctaactttgcgaaaaatgcaggtgctgatccgaatgcaacatggctacaaatgttactacttattggcggcggtatctttacattcttaggcattttagtcggctggaatacagcgaaagagtttggtgggacgccagttcttggggcaattgctggtattttaattttcaatccggcgatggcgaacgtaaagttatttggtgaagcgctcgtacctggacggggcggattgtttgcagttatttttgcagcgtggcttatggttgtagtggaaagacaagttcgaaaagctgtaccaaatgcagttgatattattataacgccgcttattactgtgttagtcgtaagtatcgtaacgatgttagcaattcagccggtagcaggtttcttatctgaaggaattacaaacggaattaatggcattttaaatattggcggagcgtttgcgggagcagtacttgctggaacatttttaccgctcgttatggtcggattacatcacggtttaacaccgattcacatggagtttattaatcaaacgcacgtaacacctttattaccggtacttgcaatggctggcgctgggcaagtaggagcagcgattgctatctatgtgaaaacaaaaaacaaacgacttcgtaacgtaattaaaggggcattaccagttggatttttaggaattggtgaaccgttattatacggggttacattaccactggggaaaccgtttcttacagcttgtttaggggcagcagttgggggtgcgttccaagcagttatgaaaacagctgcactcggaattggtgtatcaggattatcattaattccgttaattgctgataataaatatttattatatttccttgggttagtagtggcatatactttcggattcatctttacgtacttcttcggatttaaagaagaaatggcagaaaacatatag

SEQ ID NO: 79439 - protein, 454 aa, Bacillus thuringiensis serovar konkukian str. 97-27
MKKEERMAKEISEQLGGVKNIRGIAHCMTRLRLTLHDESKVNMDLLKKVEGVMGVIEDETLQVVVGPGMVNKVAAEMEGLTGLRIGEVADHHLEDLGQEMKSEIKKKNNTPVKNFLRKIGSIFIPLIPGLVASGIINGVANFAKNAGADPNATWLQMLLLIGGGIFTFLGILVGWNTAKEFGGTPVLGAIAGILIFNPAMANVKLFGEALVPGRGGLFAVIFAAWLMVVVERQVRKAVPNAVDIIITPLITVLVVSIVTMLAIQPVAGFLSEGITNGINGILNIGGAFAGAVLAGTFLPLVMVGLHHGLTPIHMEFINQTHVTPLLPVLAMAGAGQVGAAIAIYVKTKNKRLRNVIKGALPVGFLGIGEPLLYGVTLPLGKPFLTACLGAAVGGAFQAVMKTAALGIGVSGLSLIPLIADNKYLLYFLGLVVAYTFGFIFTYFFGFKEEMAENI

SEQ ID NO: 79440 - DNA, 1371 bp, Erwinia carotovora subsp. atroseptica SCRI1043
  CDS (1)..(1371): transl_table=11
atggatatcaatgctactgccgccgcgctaatcccccttctcggtgggaaagaaaacatcgccagcgcggcccactgtgcgacccgtctacgtctggtattgaatgacgacagcctggccgacaagaaagcgatcgagaacgttgacggcgtgaaaggatgcttccagaacgccggacaaatgcagattattttcggcaccggactggttaacaaagtgtatgccgagttcattaaagccgcaggtatcagcgaatcaagcaaatctgaagccgcctctatcgcggcgagaaagctgaatccgctgcaacgtctggcgcgtctgctatcgaacatcttcgtccctataatgccagcgattatcgcttccggcctgttgatggggctgctcggcatgatcaagacctacggctgggtagatgccaacagcgcgatctttgtgatgctggatatgttcagctccgctgcctttattatcctgcctgttctgatcggttttaccgctgcacgggaattcggcggcaacccctatctgggtgcaacgctgggcggcattctgacccatcctgcgctgaccaacgcttggggcgtggcggggggcttccagaccatgcatttcttcggcatggacattgccatgattggctatcagggtaccgtattcccagtactgctggccgtctggttcatgagtcttgtggaaaaacgcctgcgtaaagtcgtaccggacgcactggacatcatcgttacgcctttcctgacggtcatcatctccggcttcgtcgcgatgctgctcatcggcccagcaggacgcgcgcttggcgatggtatttctctcgtcctcagcacgttgattgctcatgctggctggttcgcgggtttactgttcggtggcctctactccgtcatcgtgatcaccggcgttcaccacagcttccatgcgattgaagccggactactcggcaacccgaatatcggcgtcaacttcctgctgccaatttgggcaatggcgaacgtggcgcagggcggcgcgtgtctggcggtctactttaaaacgcgtgacgccaaaaccagagcgattgccgttccggcggggctttcctgtctgctgggtatcaccgaagcagcgatctttggtatcaacctgcgtttcattaagccgttcctcgcagcactggcgggtggtgcgctcggtggcgcatgggtcgtcttcaatcacgtcaatatgacggcggtcgggctgaccggttttccggggctagccattgtgcaaggtggctcgatgcttaactacctgattgggatgttgattgcattcggtgccgcctttgtcatttccttattgctgaaatacaaaacggatagcgaataa

SEQ ID NO: 79441 - protein, 456 aa, Erwinia carotovora subsp. atroseptica SCRI1043
MDINATAAALIPLLGGKENIASAAHCATRLRLVLNDDSLADKKAIENVDGVKGCFQNAGQMQIIFGTGLVNKVYAEFIKAAGISESSKSEAASIAARKLNPLQRLARLLSNIFVPIMPAIIASGLLMGLLGMIKTYGWVDANSAIFVMLDMFSSAAFIILPVLIGFTAAREFGGNPYLGATLGGILTHPALTNAWGVAGGFQTMHFFGMDIAMIGYQGTVFPVLLAVWFMSLVEKRLRKVVPDALDIIVTPFLTVIISGFVAMLLIGPAGRALGDGISLVLSTLIAHAGWFAGLLFGGLYSVIVITGVHHSFHAIEAGLLGNPNIGVNFLLPIWAMANVAQGGACLAVYFKTRDAKTRAIAVPAGLSCLLGITEAAIFGINLRFIKPFLAALAGGALGGAWVVFNHVNMTAVGLTGFPGLAIVQGGSMLNYLIGMLIAFGAAFVISLLLKYKTDSE

SEQ ID NO: 79442 - DNA, 1560 bp, Propionibacterium acnes KPA171202
  CDS (1)..(1560): transl_table=11
atgagaaccaccttcgcctgtgaatcttccagggaggaagtcatggactatcacttgcttgcacgagaaatactcgatcttgttggagggcccgacaatatcgagtcttttaccaattgcatgacgcggctgcgtctcaacctcatccggccccagactgctgatgctgaggccatcaatgggctggctggggtccttggagtcgtcgagggtaagcagctgcaagtcgtcgtcgggcctggtcacgcggaaagattacggtcagcattcggtgaggtcatggggtcggcggattctgcttctgccaccgacacagacgcgacgactcaagtcacgccgcctggcaccgcaaagcgaggtgtggactctgcagtggtcgagacagagccgagtccagtcctggaaggtgatacagatatagccgttcggaccaagaagatggtccgaggcacgcaaacatctagggtgcaagcgatgttccgtcacgtcgggaacattttcgtcccgatcattccagggttcatcgcctgtgggctagtgaccgcaatctgcgggatttggaagacaattgaccccacggttgccaatgacgggtggttcctggttttagttggtctgggagggatcgttattgcctcgctcaacttcatcgtcggccacaacacagctcaagaatgtggtggcagcccggtgctaggcctcatcgcgggcggggttccatatatgcccgctctggcgggtacggcagcaaccgacaagacggcagctatcccgctgacgatcccaatattcggggagcttcaacccggactgggaggtgtcatcggcgtcatgatcaccgcctggctgttcaccgtcatcgaaaggcggttgagaaaggttatcccggcggctatggaactttttcttgtgccggttgtaactttgctcctcggcgccgcagcgtcaatctttgtgatcatgccgttgtcatccttgctgatgaagggcctcacatggctgctcgttgacttcgcccttgctaaaggtggaatcatcggcggatttatcctcgcaaccttcttcttgcctatggtgatgttgggcattcatcagggactgaccccaattcatgctcaactcatcgccaatcatggttttaccgaactattacccattcttgcgatggctggtgcggctcaggtgggaatggccattgccgttcttatgaaaaccaggaatccgaaactgcggtctgtgattaagagcgcgctaccaattggcatccttggtgtgggcgaacccctcatttacggggtctcgttaccgttgctataccccttcctcaccgcgtgtcttggtggtggcttcggaggtgcctttatagcgtgggggatgcagaactccggaacgtttggctcccaggcctttggcctgtcgggcttactcatggcaccggtgatttcggccggcaagtggggctggtatctcggtggctggcttatttcagtaatcatgggagctgtgctcacttacctgttcggtttcaaggattccatggccgaacgcattatggactga

SEQ ID NO: 79443 - protein, 519 aa, Propionibacterium acnes KPA171202
MRTTFACESSREEVMDYHLLAREILDLVGGPDNIESFTNCMTRLRLNLIRPQTADAEAINGLAGVLGVVEGKQLQVVVGPGHAERLRSAFGEVMGSADSASATDTDATTQVTPPGTAKRGVDSAVVETEPSPVLEGDTDIAVRTKKMVRGTQTSRVQAMFRHVGNIFVPIIPGFIACGLVTAICGIWKTIDPTVANDGWFLVLVGLGGIVIASLNFIVGHNTAQECGGSPVLGLIAGGVPYMPALAGTAATDKTAAIPLTIPIFGELQPGLGGVIGVMITAWLFTVIERRLRKVIPAAMELFLVPVVTLLLGAAASIFVIMPLSSLLMKGLTWLLVDFALAKGGIIGGFILATFFLPMVMLGIHQGLTPIHAQLIANHGFTELLPILAMAGAAQVGMAIAVLMKTRNPKLRSVIKSALPIGILGVGEPLIYGVSLPLLYPFLTACLGGGFGGAFIAWGMQNSGTFGSQAFGLSGLLMAPVISAGKWGWYLGGWLISVIMGAVLTYLFGFKDSMAERIMD

SEQ ID NO: 79444 - DNA, 1368 bp, Bacillus licheniformis ATCC 14580
  CDS (1)..(1368): transl_table=11
atgagcgatgagaaaaaatatgccgggctggcaagactgattttacaacacatcggcggcccgtctaacgtcgcagatcatacccactgtatgacgcgcctgcgcatcacgcctgtcaacagtcaaaaaaccgacatcgactcgatcaaagcgcttgaaggcgtgatcggcgtagttgaggaggaaacgcttcagattatcctcggcacaggcgttgtacagcacgtatcagacgagttcgggaagctgcttaaatccgcagaacacgttgacttaaaagaatccgcagccaaacataaagcggagatttccaagaaaaacgcgacgcctttcaagctgtttctccggcgaatcgcaagcatttttataccgctgatccccgctttggtcgcctcaggcttgattaccggaatcaccaaagccgttatccaggctggctggctcgcggaaacctcacaaaccgcgattattttaacggtaataggctcaggtctatttacgtatttgggtatcctggtggggatcaatacggcgaaagaattcggcggctcccccgcactcggcggattagccggtattttaatcattaaccccgccgttggtgaaatttcacttttcggtgaagcgcttttgccgggacgcggcggtttaatcggcattttattcgcagctgcatttatcgcttttctcgaaaaacgggtcaggcgccttgtacctcactcactcgacatcatcatcacacctacagtctcccttcttatcacaggaatcgtcacctacgttgtcttcatgcctgtcggcggcttgatttccgacgccattacgtcaggtcttctcgccatcttagatcttgggggcattatcgccggctttgtactgggcgccaccttccttccgctcgtcgtaaccggacttcatcaaggactgacacccgttcatatggaattaatcaattcaatcggcgatgacccgctgctgccgattttggccatggggggcgcaggacaagtaggcgccgcttttgcgatctatttcaaaacgaaaaaagcaaagctaaaaagagccattgccggcggactgccgtcaggcctgctcggcatcggcgaaccgctcatattcggtgtaacccttccgctcggacgtccgtttttaaccgcgtgcctcggggccggagtaggcggagcatttcaagcgtatttcaaaattgcgaccgtatcgataggcgtatcagggctccctttgtcgtttttggttcatacccaccaagttcttttgtatattctcggtttgtttatttcctatgctgccggctttgtcttaacatactcctttggtttcaaggacgatatggcagttgaatttgattaa

SEQ ID NO: 79445 - protein, 455 aa, Bacillus licheniformis ATCC 14580
MSDEKKYAGLARLILQHIGGPSNVADHTHCMTRLRITPVNSQKTDIDSIKALEGVIGVVEEETLQIILGTGVVQHVSDEFGKLLKSAEHVDLKESAAKHKAEISKKNATPFKLFLRRIASIFIPLIPALVASGLITGITKAVIQAGWLAETSQTAIILTVIGSGLFTYLGILVGINTAKEFGGSPALGGLAGILIINPAVGEISLFGEALLPGRGGLIGILFAAAFIAFLEKRVRRLVPHSLDIIITPTVSLLITGIVTYVVFMPVGGLISDAITSGLLAILDLGGIIAGFVLGATFLPLVVTGLHQGLTPVHMELINSIGDDPLLPILAMGGAGQVGAAFAIYFKTKKAKLKRAIAGGLPSGLLGIGEPLIFGVTLPLGRPFLTACLGAGVGGAFQAYFKIATVSIGVSGLPLSFLVHTHQVLLYILGLFISYAAGFVLTYSFGFKDDMAVEFD

SEQ ID NO: 79446 - DNA, 1479 bp, Mannheimia succiniciproducens MBEL55E
  CDS (1)..(1479): transl_table=11
ttgctcgttttagctagaattggcgaaaatttttgcttaatttataaacgaggagtcgctatgaactaccctaaaattgcccaacaggttatcgaaaaacttggcggaaaagaaaatatcgctaatcttgcgcattgtgcaacgcgtttgcgcttgacaatgaatgacgaaagtaaaatcgacaaacaggccattgaagatatcgagggcgtaaaagggcagttttcaacctccggtcaataccaaattattttcggttcaggtacggtgaataaagtttacgccgaaatgaataccattatgaacggttcgccgtcggcggattccaccggggaaagtcaacaggcgaaagggccgcagcaaggtttgattcaacgattaattaaaggtctggctgatattttcgttcccattattccggctattgtcgccggcggtttgttaatggggattaataatgtctttaccgcaaaagatttattcgaagaagggaggacattactcgacctttatccgcaatacaaagatttagcggatttaattaatacctttgctaacgcgccttttgtgtttctgcccgtattgttaggtttctcggcaaccagaaaattcggtggcaatccgttcttaggagcgacattaggtatgttgctcgttcaccccgctttaaccaatgcttacggttatgcggaagcgttagccggcggcaatcttcaattatggaatattttcgggctagagattgaaaaagtcggttatcaaggtacggttattcccgttttaattgccgcctgggtattggcgactttagaaaaattcttagtgaaagtagtgccttccgtattaaataatttagtcacgccgttattttcattatttatcaccggttttttggctttcaccgtaatcggacctttcggtcgtgaagcgggggaatttttaagtcagggtttaacctggttatatgatactttaggttttatcggcggcggcgtgttcggcgcattatacgcacctatcgtgattaccggtatgcaccaaacctttatcgccattgaaacgcaattgctggcaagcactgcggcaacttttatcttcccgattgccgccatgtcgaatattgcgcagggtgccgcttgtttagccgttgccgtgttaaataaagatgccaaaacccgaggtctggcgttgccttccggtatttccgcattattagggattaccgaacctgccatgttcggggtgaatttgcgcttccgttatccgttctatgcggctatgttaggtgccggttccgccgcggcgtttatcgcgttcttcaatgttaaagccactgcgcttggcgcggcgggcttaatcggtatcgcatcaattcgtgccggcgactggggaatgtattccgtggggatggtaatttcgttttgtgtggctttcgctgcggcattagtgctgggcgcaagagctaacgcaaaagaatag

SEQ ID NO: 79447 - protein, 492 aa, Mannheimia succiniciproducens MBEL55E
MLVLARIGENFCLIYKRGVAMNYPKIAQQVIEKLGGKENIANLAHCATRLRLTMNDESKIDKQAIEDIEGVKGQFSTSGQYQIIFGSGTVNKVYAEMNTIMNGSPSADSTGESQQAKGPQQGLIQRLIKGLADIFVPIIPAIVAGGLLMGINNVFTAKDLFEEGRTLLDLYPQYKDLADLINTFANAPFVFLPVLLGFSATRKFGGNPFLGATLGMLLVHPALTNAYGYAEALAGGNLQLWNIFGLEIEKVGYQGTVIPVLIAAWVLATLEKFLVKVVPSVLNNLVTPLFSLFITGFLAFTVIGPFGREAGEFLSQGLTWLYDTLGFIGGGVFGALYAPIVITGMHQTFIAIETQLLASTAATFIFPIAAMSNIAQGAACLAVAVLNKDAKTRGLALPSGISALLGITEPAMFGVNLRFRYPFYAAMLGAGSAAAFIAFFNVKATALGAAGLIGIASIRAGDWGMYSVGMVISFCVAFAAALVLGARANAKE

SEQ ID NO: 79448 - DNA, 1353 bp, Bacillus clausii KSM-K16
  CDS (1)..(1353): transl_table=11
gtgaacaaagaacaacgcatggcctcagaaattcttgaacatattggcgggaaaggaaatgtcgagtcccttacccattgtatgacgcgtgtccgtgttgctgtaaaagacgatgctctagtcaatcaagatgcattaaagaaaatggaaggagttatgggagtcgttgaagacgatacatggcaaattgttgttggtccaggtactgtcaatgtcgttacggaagaaatgaaaaagctcgctcgtacagggcaaacgtcttttgaagaacaggctgccaacgcccagcaagaacggaaaaagaaaaacaaaacaccatttaagcaatttttgcgaagcttagggaatatttttatcccgttgattccaggccttgttgcctcaggtatcattaatggcgtggccaacttcttaattaactcaggcatgcaaaaagaagaacatacgtggcttttgttaatgaccattttaggaggcggcctatttacgtatttggcgattgttgttggatggaataccgctaaagaatttggcggcacgccggttctaggagcgatcgcggggatgttcattttcaacccggcccttgccgaggtgaccgtatttggcgaagcccttgtgccagggcgtggcggattgttcggcgtcatttttgcggcatggttaatgacgttctttgaacgccacatccgcaaagttataccgaaatcggtcgatatcattttcacatcactgtttactgtcgtcattgtgggcttcttatcgatttatgcgattatgcccgttgctggcattgtatcggatgggatcacatccggcatccactcgattttaaacatgggtgggccgattgctggggcgctcatggcaggctttttccttccgcttgtcatggttggattgcaccatggcttaacgccaattcatgcggagcttatcaatgtattcggttttacaacgctgttgccaattttagcaatggcaggagcaggccaggttggcgcagcaatcgctatttttgttaaaacgcggaatcctcgtctacgtaatattattaaaggcggcttgcctgttggcttccttggcatcggggaaccgttgctttacggggtaacgctcccgcttgggcgcccgtttgtgacagccagtttaggtgcggctgttggtggggccatgcaagcaatatttgccacaggctctacaggaatcggcgtttccggcttgtccctaacaccgttaattgcggaaggcaaatacctctactatttaggtggtattgcgctcgcctatttgttcggttttctgttcacctacatgttcggttttaaagaagaaatggcaaaagacatttaa

SEQ ID NO: 79449 - protein, 450 aa, Bacillus clausii KSM-K16
MNKEQRMASEILEHIGGKGNVESLTHCMTRVRVAVKDDALVNQDALKKMEGVMGVVEDDTWQIVVGPGTVNVVTEEMKKLARTGQTSFEEQAANAQQERKKKNKTPFKQFLRSLGNIFIPLIPGLVASGIINGVANFLINSGMQKEEHTWLLLMTILGGGLFTYLAIVVGWNTAKEFGGTPVLGAIAGMFIFNPALAEVTVFGEALVPGRGGLFGVIFAAWLMTFFERHIRKVIPKSVDIIFTSLFTVVIVGFLSIYAIMPVAGIVSDGITSGIHSILNMGGPIAGALMAGFFLPLVMVGLHHGLTPIHAELINVFGFTTLLPILAMAGAGQVGAAIAIFVKTRNPRLRNIIKGGLPVGFLGIGEPLLYGVTLPLGRPFVTASLGAAVGGAMQAIFATGSTGIGVSGLSLTPLIAEGKYLYYLGGIALAYLFGFLFTYMFGFKEEMAKDI

SEQ ID NO: 79450 - DNA, 1542 bp, Burkholderia sp. 383
  CDS (1)..(1542): transl_table=11
atgacttcggatgagagcgcgcgattcgacgcgctggctcgcgcaatactcggggcgatcggcggggcgtcgaacgtccgccgtcattttcattgcatgacacgcctgcgcctggtgctcgtcgatcccgaccgggccgacgttgccgcgctgaaggcattgccggcggtgctgggcgtcgtgcccggcgagcccctgcagatcgtgatcggcccgggggcggtcgcgcaggcgtcagccgcctttgccgccgtgctggccgagcacctggcgcaagccgaggccgtatcggccgatgtcggccgcccggccgccgtgaccgccgcggccgcgccggccaccggcacgcgcgagccggccgctcgccccgcccgcaggaacacggctgcgcaccggttcctgcggcgcatcgcgagcatcttcacgccactcatccctgcgctgatcggcgcgggcctgctcaacgcgatcgccgggctgttgaaggtctgggtggcgcaggcgcctgccggaggagccggcacgctgacgttcgccgcgacggtcgcatcgatcgtcggttcggcgtttttcgcgttcctcgtcatccaggtcggcatgaacgcggccgccgagtttggcggcacgccatgcctcggcggtgcgaccgcgggcatcctgatcctgcccgcgatcgcgaagctgcccgcattcgcgctgccgatcatcggcgaaatcgcgctgaagcccgggcagggcggattgatgggcgcgctgctggccggcgccttgacggccggcatcgagcgcagcgtgcgtgcgcgtatcgcatcggccgcccagacattgctcgcgccgaccgtcgcgctggggctcgcgggcatcgcaacgctgttcatcatcatgccggtcgcggagttgctgacgcaggcggtcggcagcctgaccgcgaccttgctgcgcgcgggcggcatgccggccgcgttcgtgctggctgcgtcgttcgtgggcctgttgatgttcggcctgcatcaggcgctgattccgatccacgcgcaactgatcgcgcagtacggctacaccgcgctgttcccgattctcgcgatgtccggatgcgggcaggcgggcgccgcgttcgcgctgtatttccgcacgcgggacccgcgcctgaagcagacgatccggaatacgttgccgacctgcatgctcggcgtgagcgagccgctgctgtacggcgttacgctgccgctcggccgcccgctgatcacggcatcgctgggcggcgggatgggtgcgctcgtgctcggctattgcgccgcgcacgggcacgacgtgggcgcgacgacgatcggcccggccaacctgatgttgatcccgctcgtcacggggccgatggggctcgtggcgagcgtcgcgacctactgcgcggcggtagcggtcgcatattcgagcggcttcgtgctgacctggttcttcggcctgagcgacgcgcagcggcgcgccgacggcacgagcggcgtggacggcacggagcgccagcccgcggtcgcagccgcgctgtaa

SEQ ID NO: 79451 - protein, 513 aa, Burkholderia sp. 383
MTSDESARFDALARAILGAIGGASNVRRHFHCMTRLRLVLVDPDRADVAALKALPAVLGVVPGEPLQIVIGPGAVAQASAAFAAVLAEHLAQAEAVSADVGRPAAVTAAAAPATGTREPAARPARRNTAAHRFLRRIASIFTPLIPALIGAGLLNAIAGLLKVWVAQAPAGGAGTLTFAATVASIVGSAFFAFLVIQVGMNAAAEFGGTPCLGGATAGILILPAIAKLPAFALPIIGEIALKPGQGGLMGALLAGALTAGIERSVRARIASAAQTLLAPTVALGLAGIATLFIIMPVAELLTQAVGSLTATLLRAGGMPAAFVLAASFVGLLMFGLHQALIPIHAQLIAQYGYTALFPILAMSGCGQAGAAFALYFRTRDPRLKQTIRNTLPTCMLGVSEPLLYGVTLPLGRPLITASLGGGMGALVLGYCAAHGHDVGATTIGPANLMLIPLVTGPMGLVASVATYCAAVAVAYSSGFVLTWFFGLSDAQRRADGTSGVDGTERQPAVAAAL

SEQ ID NO: 79452 - DNA, 1980 bp, Pediococcus pentosaceus ATCC 25745
  CDS (1)..(1980): transl_table=11
atgtcagaaacatctgaagaaaaaattaaaagaattgcacgtgaaatttacggcgcagttggtggtatcgaaaatgttgaaaaattaattcattgtatgactcgtgtccgaatgaccattagaaatgatgacaaagtagatatcgaaaaactgaaaaatattaatggggtattaggagtcgttgaagaagacaccctccaagtaattgtcggaccaggaactgtaaataaagtagctgatgaaatggtgaaagaagctggcgttaaattgggtgaaccatttcctaatatagaaatagatacaaccggtatgactgataaagaaatcgttgaggctaaggctgctaaagtaaaagctgcacaaaaagctaagcaaaaacaaactccaattaagcaaattttaaaatccatttcgaatatttttataccgttaattccagcgtttgtcggagctggattaattggtggcgtagctgcggtaatgtctaatttaattgttgctggagatataagtaaaagctatactgattttgtcgcaattttgaaattcattcaaaatggtgtattttcatatttagcaatttatgtcggaattaacgcggcaactgaatttggtgcaacagctggattaggcggtgtcataggtgcggtaacgttattacctggaatggatattaatgcacctttgcataatatttttaatggtcaaccaatgagcgctggtcaaggaggaattatcggtgtaatatttgccgtttggttactttctttaattgaaaaaaagttacataaatgggttccggatgcaattgacattatagtaactccagcactctctttacttataattggagtatttacaatttttattattatgcctatagctggtgttatttcaagttcgttagttggagctattaattggattctaaatgtcggcggagcattttctggattcgttttaggagcactattcttgccgatggttatgtttgggcttcatcaaatcttaacgccgattcatattgaaatgattaataaaactggttcgaccccattattaccaattttagctatggcaggtgctggacaagttggagctgcgattgcactttggctcagatgtcgtaaaaataaacagcttacaaatatgattaaaggtgctcttccagttggtattttaggtatcggagaaccattaatatatggtgttactttaccattaggtcgtccgtttatcacagcttgtattggtggcggaattgggggagctgtcgttggtggattaggccatgttggtgccattgccataggcccatcaggattagcgttagttcctttgattacgaatggacatatgatgtcttatgtgctggggttattagcaggatacgttggtggatttgtagcaacatatttctttggaattccaaaggatgcaattcttggagaagcaacaactgttgagacagatgctttatcccaaaatggaaataagaaggtaattgatccaaatgttgcaatgactacgataacggctcctgttattggtaagaaagttgcaatcgatacagtaagtgatccaatgatggcccaggaagtaatgggaaaaacagtagctataatacctgatattaattctaaaatctatgccccggtagatgggaaagttactatgatagcagacacaaaacatgcaatcggttttatggataaaattggtgaagaagtcctagttcatatgggggtcgatactgttaagttaaatggcaagtattttaatttaaatattcaagtgggcgatactgttaaacatggagatgtattgggtacagttgattggcaaaaaattattgacgctgattttgatccagttacaatgacgattgttactaacacatccgattttaagattgacgaaattgaatcaaatatacagactaaagataataccgtattaatggatagtaggataaaataa

SEQ ID NO: 79453 - protein, 659 aa, Pediococcus pentosaceus ATCC 25745
MSETSEEKIKRIAREIYGAVGGIENVEKLIHCMTRVRMTIRNDDKVDIEKLKNINGVLGVVEEDTLQVIVGPGTVNKVADEMVKEAGVKLGEPFPNIEIDTTGMTDKEIVEAKAAKVKAAQKAKQKQTPIKQILKSISNIFIPLIPAFVGAGLIGGVAAVMSNLIVAGDISKSYTDFVAILKFIQNGVFSYLAIYVGINAATEFGATAGLGGVIGAVTLLPGMDINAPLHNIFNGQPMSAGQGGIIGVIFAVWLLSLIEKKLHKWVPDAIDIIVTPALSLLIIGVFTIFIIMPIAGVISSSLVGAINWILNVGGAFSGFVLGALFLPMVMFGLHQILTPIHIEMINKTGSTPLLPILAMAGAGQVGAAIALWLRCRKNKQLTNMIKGALPVGILGIGEPLIYGVTLPLGRPFITACIGGGIGGAVVGGLGHVGAIAIGPSGLALVPLITNGHMMSYVLGLLAGYVGGFVATYFFGIPKDAILGEATTVETDALSQNGNKKVIDPNVAMTTITAPVIGKKVAIDTVSDPMMAQEVMGKTVAIIPDINSKIYAPVDGKVTMIADTKHAIGFMDKIGEEVLVHMGVDTVKLNGKYFNLNIQVGDTVKHGDVLGTVDWQKIIDADFDPVTMTIVTNTSDFKIDEIESNIQTKDNTVLMDSRIK

SEQ ID NO: 79454 - DNA, 1422 bp, Actinobacillus pleuropneumoniae serovar 1 str. 4074
  CDS (1)..(1422): transl_table=11
atgaactttccgaaaattgcggagcaaacgatcgagaaactcggtggcaaaagcaacatcacaacgctggcgcactgcgcaacacgcttacgtttaacccttgcagatgagtcaaaagtagataaacaagcgattgagaatatcgaaggcgttaaaggtcaattctcaaccagcggtcaataccaaattattttcggttccggtacggtaaacaaagtacacgctgagatgcaaaaacaaatgggcatcggcgatatgagcacttccgaagtggcggcggcaggtgcggctaatcaaccgttgttacaacgcttagtaaaagggttagcggatattttcgtaccgatcattcctgcaatcgtggcaggcggtttgctgatgggtatccattcaatgctgacttcggtcggtttcttctgggaaggcgagtcggttgcaagtaaatatccgcaatttgcggatctgattgattttatcaatacgattgcaaacgcaccgtttgtcttcttaccggtgttactcggtttctccgcaacgcgtaaattcggtggtaacccgttcttaggtgcggcactcggtatgttattagttcaccctgcattagcagacggttggaattatgctaaaaccttaatggaaggtaacatcaaatactggaacgtacttggttttgaaattgaaaaagtcggttatcaaggtacggtaatcccaaccatcgtttctgcgtgggtgttagcaacccttgaaaaaggtttccgtaaatttgtaccttcttatttagataaccttgtgacaccgatgatgtctttatttatcgcaggtgtgttagctttcacggtaatcggtccgttcggccgtgaagcgggttccgctatttcagcaggtttaacttggttatatgacagcttaggttttatcggcggcgcaatcttcggtacattctatgcaccaatcgtcatcaccggtatgcaccaaacctttattgcggtagaaacgcaattattagcggaaatggcgaataccggcggtacatttatcttcccaattgcagcaatgtctaacatcgcacaaggtgcggcgtgtttaggggtagcgttcgcaatgaaagatgcgaaagtacgcggtttagccgtgccgtccggtatctctgcattattaggtattacggaaccggcaatgttcggtgtgaacttacgttaccgtcaagcgttcgttgcggcaatggttggttcaggtttagcgtctgcgtttatcgcattctttaacgtgaaagcgattgcattaggtgcggcgggtttcttaggtgtgccgtcaatcaaaccggacagccttgcaatgtactctgtaggtatggcaatttcatttatcgttgcgttctcaatctcagcggtatgggtgaaaaaagcacaagctaaaaaataa

SEQ ID NO: 79455 - protein, 473 aa, Actinobacillus pleuropneumoniae serovar 1 str. 4074
MNFPKIAEQTIEKLGGKSNITTLAHCATRLRLTLADESKVDKQAIENIEGVKGQFSTSGQYQIIFGSGTVNKVHAEMQKQMGIGDMSTSEVAAAGAANQPLLQRLVKGLADIFVPIIPAIVAGGLLMGIHSMLTSVGFFWEGESVASKYPQFADLIDFINTIANAPFVFLPVLLGFSATRKFGGNPFLGAALGMLLVHPALADGWNYAKTLMEGNIKYWNVLGFEIEKVGYQGTVIPTIVSAWVLATLEKGFRKFVPSYLDNLVTPMMSLFIAGVLAFTVIGPFGREAGSAISAGLTWLYDSLGFIGGAIFGTFYAPIVITGMHQTFIAVETQLLAEMANTGGTFIFPIAAMSNIAQGAACLGVAFAMKDAKVRGLAVPSGISALLGITEPAMFGVNLRYRQAFVAAMVGSGLASAFIAFFNVKAIALGAAGFLGVPSIKPDSLAMYSVGMAISFIVAFSISAVWVKKAQAKK

SEQ ID NO: 79456 - DNA, 1365 bp, Bacillus cereus G9241
  CDS (1)..(1365): transl_table=11
atgaagaaagaagagagaatggccaaagaaatttcagagcaacttgggggagtaaaaaatattcgtggcattgctcattgtatgacgagactacgattaacgcttcatgatgaaagtaaagtaaacatggaccttttgaaaaaggttgaaggggttatgggcattattgaagatgagacgcttcaagttgtcgttggtccgggaacggtaaataaagtagcagcagagatggaaggtttaacgggactgcgaattggtgaggtggcagatcatcaccttgaagatcttgggcaagagatgaagtcagagatgaagaagaaaaataatacaccggtgaaaaactttttaagaaaaataggaagtattttcattccgttaattccgggtcttgttgcgtcaggtattataaacggggttgctaactttgcgaaaaacgcaggtgctgatccgaatgcaacatggctacaaatgttactacttattggcggcggtatctttacattcttaggaattttagtcggttggaatacagcgaaagagtttggtgggacaccagttcttggggcaattgctggtattttaattttcaatccggcgatggcgaacgtaaagttatttggtgaagcgctcgtacccggacggggcggattgtttgcagttatttttgcagcgtggcttatggttgtagtggaaagacaagttcgaaaagctgtaccaaatgcagttgatattatcgtgacaccactcattactgtgttagtcgtaagtatcgtaacgatgttagcaattcagccagtagcaggcttcttatctgaaggaattacgagcggaattaatggtattttaagtattggtggcgcgtttgcgggagcagtacttgcaggaacatttttaccgctcgttatggtcggattacatcacggtttaacaccgattcatatggagtttattaatcaaacgcacgtaacacctttattaccagtactcgcaatggctggagctggtcaagtaggtgcagccattgcgatttttgtgaaaacaaaaaataaacgacttcgtaacgtaattaaaggggcattaccagttggatttttaggaattggcgaaccgttattatacggggttacattaccacttgggaaaccgtttcttaccgcttgtttaggggcagctgtcggcggtgcattccaagcagttatgaaaacagctgcactcggaatcggtgtatccggattatcattaattccgttaattgctgataataaatatttattatatttccttggattagtagtggcatatacgttcggattcatctttacgtacttcttcggatttaaagaagaaatggcagaaaacatatag

SEQ ID NO: 79457 - protein, 454 aa, Bacillus cereus G9241
MKKEERMAKEISEQLGGVKNIRGIAHCMTRLRLTLHDESKVNMDLLKKVEGVMGIIEDETLQVVVGPGTVNKVAAEMEGLTGLRIGEVADHHLEDLGQEMKSEMKKKNNTPVKNFLRKIGSIFIPLIPGLVASGIINGVANFAKNAGADPNATWLQMLLLIGGGIFTFLGILVGWNTAKEFGGTPVLGAIAGILIFNPAMANVKLFGEALVPGRGGLFAVIFAAWLMVVVERQVRKAVPNAVDIIVTPLITVLVVSIVTMLAIQPVAGFLSEGITSGINGILSIGGAFAGAVLAGTFLPLVMVGLHHGLTPIHMEFINQTHVTPLLPVLAMAGAGQVGAAIAIFVKTKNKRLRNVIKGALPVGFLGIGEPLLYGVTLPLGKPFLTACLGAAVGGAFQAVMKTAALGIGVSGLSLIPLIADNKYLLYFLGLVVAYTFGFIFTYFFGFKEEMAENI

SEQ ID NO: 79458 - DNA, 1374 bp, Exiguobacterium sibiricum 255-15
  CDS (1)..(1374): transl_table=11
atgaagaaggaagaagtgttggcggaagggatattggaacatgtcggcggaaaagacaatctccgccagctggcccactgtatgacacgcgtccggttggcgctgaaggatccgacgaaagcggacatccaggcactcaaacaactggacggcgtcatgggcgtcatcgatgacgagaccctgcaaatcgtcgtcggaccgggaacggtcaaccgggtggctgatcatttaagccggaaaacggggcttgccatcggggaagagtcggtcgatgagaacctgacgtttgaggaacgggccgccatcgaacggcaaaaagtgaaggacaaacaaaaatcaccgttcaaacgctttttacggcgcttaggaaatatcttcatcccgctcattccgggactggtcgcgtcgggaatcattaacggagcagcgaactttgcgaaaaacgccggagtcgatgcgacggaaacgtggatgcagattttattactgatcggcagcaccgtctttgcctacttagcgattctcgtcggttggaatacggcgaaggaattcggcggcacgccggtcctcggggcgattgccggggggattttatttaatccgttacttgtcgatataattatttacggcgaaccgcttgtcgtcggtcggggagggttgtttggggttatcttcgctgcctggttgatgacgtatctcgaaaaacacatccgccggttcatgccggtctcaattgatatcatctttacgccactctttaccgttttgattgtcggctttacagcactttatgccatcatgccggtcgccggtgtcctgtctgacgggatcatgaaagcaatcaacgtgattctcgaagtcggcggaccactcgccggggccgtcctcgccggattttttctgccgctcgtcatggtcggactgcatcacggattgacaccgattcatctggaactgctgaacacggtcggcaatacagcactgttgccaatccttgcgatggcaggagccggacaagtcggggccgcactggcgattttcgtcaagacacgcaatcaacgtttgcgcaacatcatcaagggcgcgattccggtcggtttcctcggaatcggcgaaccgttgttgtacggggtcacgttaccgctcggccgtccattcctgacagcgtgtatgggagccgcagtcggcggtgccttccaggcgacgatgaaaaaggcggcgcttggggtcggtgtgtccggtttgtcattgacaccgttgatcgataacgggatgtacctgacgtatatcggcggtcttgtcatctcgtacgtcttcggtttcctgtttaccttctggtttggattcaaggaagaaatggcggacggaatttaa

SEQ ID NO: 79459 - protein, 457 aa, Exiguobacterium sibiricum 255-15
MKKEEVLAEGILEHVGGKDNLRQLAHCMTRVRLALKDPTKADIQALKQLDGVMGVIDDETLQIVVGPGTVNRVADHLSRKTGLAIGEESVDENLTFEERAAIERQKVKDKQKSPFKRFLRRLGNIFIPLIPGLVASGIINGAANFAKNAGVDATETWMQILLLIGSTVFAYLAILVGWNTAKEFGGTPVLGAIAGGILFNPLLVDIIIYGEPLVVGRGGLFGVIFAAWLMTYLEKHIRRFMPVSIDIIFTPLFTVLIVGFTALYAIMPVAGVLSDGIMKAINVILEVGGPLAGAVLAGFFLPLVMVGLHHGLTPIHLELLNTVGNTALLPILAMAGAGQVGAALAIFVKTRNQRLRNIIKGAIPVGFLGIGEPLLYGVTLPLGRPFLTACMGAAVGGAFQATMKKAALGVGVSGLSLTPLIDNGMYLTYIGGLVISYVFGFLFTFWFGFKEEMADGI

SEQ ID NO: 79460 - DNA, 1413 bp, Exiguobacterium sibiricum 255-15
  CDS (1)..(1413): transl_table=11
atggattacaaacaaactgcagcccgtgtccttgaactcgtcggaggtcgggaaaacatcattaccgccgcccattgcgcgacacgccttcgtcttgtcttacacgatgaatcgaaagtcgatcaagctgcactcgaagatttagacggtgtcagcggtgcattttcaagttccggtcaataccaaatcatcttcggaacaggcacagtcaacaaagtcttcgctgaattcgccccgcttgccggtgtgaaactggacggtgaagaaccgcttgatgtcaaaaaagccgcttcgcaaaaattaaatccgtttgcccgtctcgcccgctcgttatccaacgtcttcgtaccgttgattccggccatcgtcgctgccggtctgttaatgggactgctcggcatgattaaagccttcggttgggtcagtggtgactcggccatcgttcagttgctcgatatgttctcgtcctctgccttcatcatcttaccgattctgattggtttctcggcggcccgtgaattcggagcgaatccgtatctcggtgccgtcatcggcggcatcatgacccatccgtcgttgttgaatccgtggacactcggaaacagcgaaccggaagtgatgcatttcctcggcatgaacattgaattgatcggctatcaaggaacagttttcccggtccttctgacagtttgggtcatggctaaaatcgaacagcaggtccgtaaacggacaccggaaacactcgatcttctcgtcacaccgttcgtaacgatcctcgtaacgggattcctcgccctgatcgtcatcggcccgatcggaacgttgctcggaaaagggatctcgtttgttctcgtcttcttctatgagcaattctcggtcgtcgccggccttctgttcggcggtctgtactcgacgatcgtcattacagggatgcaccacagtttccatgcgattgaagcaggactccttgccgacaagagtatcggcaaaaacttcctgctcccgatctggtcgatggcgaacgtcgctcaaggcggagctggccttgcggtttacttcatgacgaaaaacgttaaactcaaagcactcgctcttccgtccgctttttcggcgtttctcggaatcacggaaccggtcatctacggggtcaacctccgactcggtaaaccgtttatcggtggcgcaatcggcggtgcaatcggcggtggatacgtcgtcttaacgcaagtcgcagcgaatgcttacggattgacgggtatcccgatgatcgccatcgtcgcaccgcttggcgcttcgaatttaatcaactacctcgttggttttgcgattgctgtcgcaacagccttcgtttctaccgtcatcttgatgcgtctcgatgtacgcaaacaaaaacagacggatttggctgcttaa

SEQ ID NO: 79461 - protein, 470 aa, Exiguobacterium sibiricum 255-15
MDYKQTAARVLELVGGRENIITAAHCATRLRLVLHDESKVDQAALEDLDGVSGAFSSSGQYQIIFGTGTVNKVFAEFAPLAGVKLDGEEPLDVKKAASQKLNPFARLARSLSNVFVPLIPAIVAAGLLMGLLGMIKAFGWVSGDSAIVQLLDMFSSSAFIILPILIGFSAAREFGANPYLGAVIGGIMTHPSLLNPWTLGNSEPEVMHFLGMNIELIGYQGTVFPVLLTVWVMAKIEQQVRKRTPETLDLLVTPFVTILVTGFLALIVIGPIGTLLGKGISFVLVFFYEQFSVVAGLLFGGLYSTIVITGMHHSFHAIEAGLLADKSIGKNFLLPIWSMANVAQGGAGLAVYFMTKNVKLKALALPSAFSAFLGITEPVIYGVNLRLGKPFIGGAIGGAIGGGYVVLTQVAANAYGLTGIPMIAIVAPLGASNLINYLVGFAIAVATAFVSTVILMRLDVRKQKQTDLAA

SEQ ID NO: 79462 - DNA, 1455 bp, Photobacterium sp. SKA34
  CDS (1)..(1455): transl_table=11
atggccaaaataactgcttcaatgatgcaagagatactcactgcaataggcggcaacaaaaacgttataaaatgcggtaattgcatgacgcgattacgccttactttaaaagatgacagtttagcggatcgagattcaattaagcacattgtaggggtgatggggttagttgaaagtgacaatcaatttcagattgtgttagggccaggcaaggcacagaccgcagctgaaatgatgaatagtatgcttgagaacgggcaaagtgaggagaaaacttctccaaaaacacattccgacctaaaagatgtggcttctgcacataagcagcaattaaagaaaaaacaaacaagtgcagcacaacgttttttgagcaagtttgcaaccatatttacgcctttaattcccggtttcattgccgcaggtttattactaggtatagcgaccttgctggaacaactttttgttatagggcaggcctcgcctaatgcgcatttacttgatttaattgcgtatatgaaagttttcagtaaaggtttatttagcttcttaagtatccttattggctacaatgcgcagcaagcgtttggtggttcaggagtaaacggtgcgattttagcgtcactgttcgtacttggttataacccagatgcaacatctggtgttttctcaggaatgaacgactttttcgacaatggtatagatccacgaggcaatattattggggtactgattgcagccattattggtgcttgggttgagaaaaaagtccgccaatttataccagataatttagatatgattttaacttctatgatcactttattgatcatgggtgctgttacctttgttatcatcatgccaattggtggtgagctatttaagggtatgtcatggttatttatcaacttaaatggtaatccatttggcagtgcgatcttagcgggtttattcttaatctcagtgatgtttggtatccaccaaggttttgttccggtttactttgcactgatggacgttcaaggctttaactcacttttcccaattttagccatggcaggggcggggcaagtgggtgctgcgttggctttatatgctaaagcgaaaaaagaatctttgttacgtgtgcaggtaaaaggggcgatcattccgggattattaggtataggcgagccgcttatctatggtgtgacattaccgcgtgttaaaccttttattactgcatgtgtggggggctctgctggtggtttctttattgggttagtatcgtatctgggattacctattggtttaaatacagtatttggaccatctggtattgttgctttacctttaatgacctctagttctggtatctttgctggtatggcaatattcaccattggtttgctgatcgcttatatcgtaggtttttttgctacatggttctttggtacgaaaaatgtcgatttaagttaa

SEQ ID NO: 79463 - protein, 484 aa, Photobacterium sp. SKA34
MAKITASMMQEILTAIGGNKNVIKCGNCMTRLRLTLKDDSLADRDSIKHIVGVMGLVESDNQFQIVLGPGKAQTAAEMMNSMLENGQSEEKTSPKTHSDLKDVASAHKQQLKKKQTSAAQRFLSKFATIFTPLIPGFIAAGLLLGIATLLEQLFVIGQASPNAHLLDLIAYMKVFSKGLFSFLSILIGYNAQQAFGGSGVNGAILASLFVLGYNPDATSGVFSGMNDFFDNGIDPRGNIIGVLIAAIIGAWVEKKVRQFIPDNLDMILTSMITLLIMGAVTFVIIMPIGGELFKGMSWLFINLNGNPFGSAILAGLFLISVMFGIHQGFVPVYFALMDVQGFNSLFPILAMAGAGQVGAALALYAKAKKESLLRVQVKGAIIPGLLGIGEPLIYGVTLPRVKPFITACVGGSAGGFFIGLVSYLGLPIGLNTVFGPSGIVALPLMTSSSGIFAGMAIFTIGLLIAYIVGFFATWFFGTKNVDLS

SEQ ID NO: 79464 - DNA, 1452 bp, Vibrio sp. Ex25
  CDS (1)..(1452): transl_table=11
atggggtatgaaatgaattatccggcagtagcaaaagagttgttaactctattaggtggtaaaagcaacatcaccgcacttgcacattgtgcgacacgcttacgccttgccgttgcagatgagcaaaaaatagatgaacaagcgattgataaccttgaaggggtaaaagggcagttcaaagttgcgggtcagtaccaaatcatttttggatcaggcatcgtaaaccaagtttatgcagaaatggcgaagttgacggggatgagtgaaatgtccaccaacgacgttgcgtctgctggcgcagagaaacaaaacatcgttcagcgcgcggtgaaagggctgtctgatattttcgtcccaatcattccagcaatcgtcgctggcggtttgttgatgggtatttacaacctactgactgcccaaggcttgtttattgatggtaaatccttgattgaggccaatccaggactgacagacttggcgaacatgatcaacacgtttgcaaacgcgccgtttgtttacctgcctattctgctggcattttcagccagcaagaagtttggcggcaacccatatttaggggcagcgctaggtatgttgatggttcaccctgacttgctgaatggttggggattcggcggcgcatctgtgtctggcaacattccggtttggaatattcttggttttgaaatccaaaaagtgggttaccaaggttcagtgttaccggttttggtatcggcattcattcttgcgaaggttgagctaggcttacgtaaagtcataccttctgttttagacaaccttttaacgccattactggcgattttcatagcgggtttgctgacgtttactgtcgtcggtccgttcacgcgtgatatcggtttcctattgggtgatggtctgaactggctatacaacacagctggctttgttggtggtgcggtatttggtcttatctatgctccgtttgttattaccggtatgcatcacagcttcattgcgattgaaacgcaacttcttgcggatattgcgacgacaggtggcacctttatctttcctattgcggcgatgtctaacgtttctcaaggtgctgcagcgttggcggtgggcataatgagtaaagataagaagatgaaaggtattgcgattccatcgggtgtcacgggtttgctgggtattacagaaccagccatgtttggtgttaacttaaaactacgttacccatttatcgcggcagtttgcgctgcggcgttatcaagtgcgttcattacaatgtttaatgtgaaagctcaggcattaggggcagctggtcttccaggcatcatttccatcacgccagataagattggttactacatcgcgggtatggtgatcgcgttcttgaccgcatttgttctcaccattgttcttggtatgcgtgaccgcgctaaagtcggtaaaaaagcagcggcttaa

SEQ ID NO: 79465 - protein, 483 aa, Vibrio sp. Ex25
MGYEMNYPAVAKELLTLLGGKSNITALAHCATRLRLAVADEQKIDEQAIDNLEGVKGQFKVAGQYQIIFGSGIVNQVYAEMAKLTGMSEMSTNDVASAGAEKQNIVQRAVKGLSDIFVPIIPAIVAGGLLMGIYNLLTAQGLFIDGKSLIEANPGLTDLANMINTFANAPFVYLPILLAFSASKKFGGNPYLGAALGMLMVHPDLLNGWGFGGASVSGNIPVWNILGFEIQKVGYQGSVLPVLVSAFILAKVELGLRKVIPSVLDNLLTPLLAIFIAGLLTFTVVGPFTRDIGFLLGDGLNWLYNTAGFVGGAVFGLIYAPFVITGMHHSFIAIETQLLADIATTGGTFIFPIAAMSNVSQGAAALAVGIMSKDKKMKGIAIPSGVTGLLGITEPAMFGVNLKLRYPFIAAVCAAALSSAFITMFNVKAQALGAAGLPGIISITPDKIGYYIAGMVIAFLTAFVLTIVLGMRDRAKVGKKAAA

SEQ ID NO: 79466 - DNA, 1455 bp, Vibrio sp. Ex25
  CDS (1)..(1455): transl_table=11
atggcaaaaataacttcaaacacagtatcgcagttgctgtccgcagtgggtggcagcagcaacgtaagcaaatgtggtaactgtatgacgcgtttgcgtttatcgctcgccaacaatggcttggctgaccagtctgttatcaagcaaattcccggcgtaatgggtgtggtggaaagcgatgagcagtttcagatcattctcggtcccggaaaagctcaacaagcggctgagatgatgaatcaattgatcgacagcttaacctctggtgacagtgaagaaccagatatgccgcaacaagatctttctgccgtcgcggccgagcagaaaaaacagatgaagagcaaacaaaccagtgcagttcagcgttttttaagcaagtttgccaccatctttacgccgttgatccctggctttattgccgctggtttgttgctaggttttgcgacgttattggaacagatgtttgttctcgaccagacaccaagccagtttatgttggatttgatcgcctacatgaaagtctttggtaagggtctgtttgctttcctaagtattctgattggttacaacgcgcagcaagcgtttggcggctctggtgttaatggtgccattctcgcctctttgtttgtgctgggttacaacccagaggcgacatccggcatttactctggcatgaacgagtttttcggctttgcgattgatccgcgcggcaacattatcggcgtacttttggcggcgatcatcggtgcgcaagtcgagcgtaaggttcgtcaatacatgccagatgatctggacatgatcttaacgtccgttatcactctattgatcatgggtgcggtaaccttcttgatcatcatgccgatcggcggcgagctgtttaaagggatgtcttggttgttcctcaacttgaacgataacccattaggcgctgcaatcttggcaggtttgttcttaatttctgtggtatttggcatccaccaaggtttcgttccagtgtacttcgcattgatggaagcacagggctttaactcgctattccctatcctggcgatggctggtggcggtcaggttggcgcgtcaatggcgctgtatttcaaagcccaaaaagacgctctactgcgcactcaagttaaaggcgctattattccgggccttctaggcattggcgaaccattgatttacggcgtgacattaccacgcgtaaaaccattcgttaccgcttgtattggtggcgctgcgggcggcttctttatcggcttagtttcttaccttggcttgccagttggtcttaatacggtgtttggcccgtccggtatcgtggcgattcctctcatgacatctgaaaatggcatcttcccgggcatgatggtgtttgttgccggcctgcttatctcttacatcgtcggcttcctcgcgacttacttctttggctgcaaagacgtcgatttaagctaa

SEQ ID NO: 79467 - protein, 484 aa, Vibrio sp. Ex25
MAKITSNTVSQLLSAVGGSSNVSKCGNCMTRLRLSLANNGLADQSVIKQIPGVMGVVESDEQFQIILGPGKAQQAAEMMNQLIDSLTSGDSEEPDMPQQDLSAVAAEQKKQMKSKQTSAVQRFLSKFATIFTPLIPGFIAAGLLLGFATLLEQMFVLDQTPSQFMLDLIAYMKVFGKGLFAFLSILIGYNAQQAFGGSGVNGAILASLFVLGYNPEATSGIYSGMNEFFGFAIDPRGNIIGVLLAAIIGAQVERKVRQYMPDDLDMILTSVITLLIMGAVTFLIIMPIGGELFKGMSWLFLNLNDNPLGAAILAGLFLISVVFGIHQGFVPVYFALMEAQGFNSLFPILAMAGGGQVGASMALYFKAQKDALLRTQVKGAIIPGLLGIGEPLIYGVTLPRVKPFVTACIGGAAGGFFIGLVSYLGLPVGLNTVFGPSGIVAIPLMTSENGIFPGMMVFVAGLLISYIVGFLATYFFGCKDVDLS

SEQ ID NO: 79468 - DNA, 1416 bp, Bacillus stearothermophilus
  CDS (1)..(1416): transl_table=11
atgggagcttatgatcaatcagttgcacaaattgtcgaagcaattggaggaaaggacaatatcgtcgcagcgacacattgtgtgacacgtttgcgatttgcattaaaagatgaggggaaagtgaataaggaagcattagaaaacattgacattgtgaaaggctcgttttctgctaacggtcaattccaagtcgttatcggtcaaggacttgtcgataaagtatataatgaaatgattgaaatgactggtattagccgagcgacgaaacaggaaatcaaggatgcagcggaagcgaacttaaatccattacaacgcgccattaaaacattagcggatattttcattccaattttaccggcaattgtcacagctggtttgttaatggggattaacaatattttaacagggcctgatattttttatgacgggaaatcatttgttgaagtccataaagaatgggcagaccttgcaaacatgattaatttaattgctaatacggcgtttgtctttttaccgggactcatcggttggtcggcagtcacgaaatttggcggtagcccattattaggtattgtgcttggacttatgcttgtacaccctgacctgttaaatgcgtggggatggggggctgcgaaggagaaaggagatattcctgtttggaatttatttggccttgaagtacaaaaagtcggttatcaaggtcaagtattaccggtattagtagcgtcttatgtattagccaaaattgagcaattctttcgtaagcgcattcctgatgcatttcaattgttgcttgttgcaccgctttccttattaattactgggtttttagcgtttatcgccatcggacctgtcacgtttgcgattggtaatgcgattactagtgtatttgttgctattttccataacgtcccagcgattggcggatttttatacggtgctttatatgcgccgctcgttgtcaccggaatgcatcatacgttcttgccagtggatttacagcttatttcaagcacaggcggaacattcttatggccaattctcgtcatgtcgaacattgctcaaggttcggcggcattggcaataatgtttttagcaaaagatgagaaagtaaaaggactttcttttacatcggcggtttctgcttatctcggtattacggaaccagcgatgttcggtgtgaacttgcgcttccgttacccgttcatttcggcgatgaccggtgcggcaattgcgggaatgtttattacgattaataaagtattagcgccatcgattggtgtcggtgggttgccaggatttttatccatcgttccgcaaaaatggacgccattctttatcggtatggcgattgcgattgtcgttccgttcgcattgacatttgtgttcggtaagttacgaagagaaaagcaataa

SEQ ID NO: 79469 - protein, 471 aa, Bacillus stearothermophilus
MGAYDQSVAQIVEAIGGKDNIVAATHCVTRLRFALKDEGKVNKEALENIDIVKGSFSANGQFQVVIGQGLVDKVYNEMIEMTGISRATKQEIKDAAEANLNPLQRAIKTLADIFIPILPAIVTAGLLMGINNILTGPDIFYDGKSFVEVHKEWADLANMINLIANTAFVFLPGLIGWSAVTKFGGSPLLGIVLGLMLVHPDLLNAWGWGAAKEKGDIPVWNLFGLEVQKVGYQGQVLPVLVASYVLAKIEQFFRKRIPDAFQLLLVAPLSLLITGFLAFIAIGPVTFAIGNAITSVFVAIFHNVPAIGGFLYGALYAPLVVTGMHHTFLPVDLQLISSTGGTFLWPILVMSNIAQGSAALAIMFLAKDEKVKGLSFTSAVSAYLGITEPAMFGVNLRFRYPFISAMTGAAIAGMFITINKVLAPSIGVGGLPGFLSIVPQKWTPFFIGMAIAIVVPFALTFVFGKLRREKQ

SEQ ID NO: 79470 - DNA, 1443 bp, Pseudomonas fluorescens
  CDS (1)..(1443): transl_table=11
atgagccacgactattccaacattgcccgcgagatcctcgaacatctcgggggcagcgacaaccttgagcaagcggcccactgcgtgacgcgtctgcgcctggcgctcaaggacccaagcctggtcaacgccagtgcattgaaccaggtcgatctggtcaaaggctcgttcttcaccggcggcctgttccaggtcgtcatcggccctggcgaagtagaaaaggtctacgccgccctgcgcgaacagaccggccttgccgccgccaccatcgccgatgtgaagaagaagggcgccgacaagaccaacgccctgcagcgcctggttcgcgtgttctccgacgtgttcatgccgatcctgccggcgctgatcattgccggcctgctgatgggcatcaacaacctgatgggcgccaaaggcatgttcatcgagggccagactttgctggaggcctatccgaacctggatggcctgtggagcctgatcaacctgatggccaacacctcgttcgtgttcctgccggcgctggtgggctggtcggcggccaagcgttttggcggcagtgaaatcctcggcatcgtactcggcctgatgctggtgcacccggacctgctcaacgcctggaactacggcaaggcggtggccggcctcgacggccagagcctgccgtacttcgatatttttggctggttccagatcgagaaagtggggtatcagggccagatcctgccgatcctgatggccgcctatgtcatgagcgtgattgagaagtggctgcgggcgcgcgtgcccaatgccatccaattgctcgtggtgccgatcaccaccatcgtcgtcaccggcgtgctggccctggcgattatcggcccggtcacccgtcacctcggcatcctgatcaccgaaggcgtcgtcacgttattcgacctggcgccgatggtcggcggggcgattttcggcctgctgtatgcgccgctggtgatcaccggcatgcaccacatgttcctcgccgtggacctgcaactgatctcgacccagggcggcacatttatctggccgatgatcgtcatgtccaacctggcccagggcagtgccgcgctcggagtgttctacatgagccgcaatgcacgggacaaaagcatggcctcgacctcggcgatttctgcctacttcggcatcactgaaccggcgatgtttggggtgaacctgcgcttcaagttcccgttctatgccgcgttgctcggctcggcgctgggcagcattttcctctcactgaacaaggtccaggcctcggccatcggcgtcggtggtttgcctgggtttatctcgatcatcccgcagtacatcccaagcttcgtcatcggcatggttatcgcgattgtggtgccgtttgttttgacctgtgggttgagcatgaagatcgtgcggccgggttatcgcgtcgcctga

SEQ ID NO: 79471 - protein, 480 aa, Pseudomonas fluorescens
MSHDYSNIAREILEHLGGSDNLEQAAHCVTRLRLALKDPSLVNASALNQVDLVKGSFFTGGLFQVVIGPGEVEKVYAALREQTGLAAATIADVKKKGADKTNALQRLVRVFSDVFMPILPALIIAGLLMGINNLMGAKGMFIEGQTLLEAYPNLDGLWSLINLMANTSFVFLPALVGWSAAKRFGGSEILGIVLGLMLVHPDLLNAWNYGKAVAGLDGQSLPYFDIFGWFQIEKVGYQGQILPILMAAYVMSVIEKWLRARVPNAIQLLVVPITTIVVTGVLALAIIGPVTRHLGILITEGVVTLFDLAPMVGGAIFGLLYAPLVITGMHHMFLAVDLQLISTQGGTFIWPMIVMSNLAQGSAALGVFYMSRNARDKSMASTSAISAYFGITEPAMFGVNLRFKFPFYAALLGSALGSIFLSLNKVQASAIGVGGLPGFISIIPQYIPSFVIGMVIAIVVPFVLTCGLSMKIVRPGYRVA

SEQ ID NO: 79472 - DNA, 1734 bp, Lactobacillus plantarum
  CDS (1)..(1734): transl_table=11
atggattattcagaattagcacaatcaattcttaccaatatcggtggaaaagataatattagcaaagcatggcactgtgcgaccagactacgtttcaacttaaagtcaacggacaaagcgaacactgaggcgattgaaaacttagatggtgtcattacggttgttcaaagcgctggccagtatcaagttgttattggtaatgctgtggcgcaggtctttgccgctctagcagacttagcaggattagcaaatcctgatacggcggctgatgcagctactacaacggaagatacgggtgaaaagcaaaacatcattaatcggtttattgcttttatctccggaatctttacgccgtttttaggtgctttggctggtgctggtattttgaaagggttgctagctttagcggttgcttttaattggatgtcaacgactagtggggcttataagatttggtattctgctggtgatgctattttttactttttacctgtttttctagcatttactgctgctaagcagttgaaggttaaccaatttgtagcggtgtcacttggtgcagctctgctatacccaactttagtaactgttatgacgaattcaacaacactacatttctttggtattccggtggttccaacaacatacacgtcaacggttatcccaattctgctggcagtttgggtattgtcgtatttagagccagtactggacaagctatttccagcggcaattcggaatattttcacgcccctcttttcattaattatcatggtgccattgacgctgttagttgacggcccaattgggggactcattggtaatggattagcaagtggtgttatggcaatttataacttcatgccaattggtgctggtgttatcatgggtgccttctggcaagtctttgttatctttggtgtacattggacgttcgtaccattgatgatgaataatattgctaagatgggttatgacccgttgttaccaattcttagtgcggccgtattatcacaggctggtgctgcgttagctgtttttttgaagtcacgagatcaaaaaatgaaagcattagcagggtcttcttttgtcacggcattgtttggaattaccgaaccgacgatttacggggtaacgcttaagttaaaacgaccattctattgtgccgttgtgggtggtgcccttggtggtgcaattattggcgccgctggtacgcacgctagctcatttacactccctagcttattagcggtaccaacttttctagggcatgggtttatgggtgaagtcattggattgattgtagcattcttaggtggtgcgatcttaacgtacttctttggattcgctcgtcaacagcaggctgattactcagtagtaagtgatcaaagtgataacacagtaatggctccggttgaagggacaattattccattgactagcgttcatgacgaagtatttgcgtctgaagcaatgggcaaaggattagccattgttccaaataaagggacggtcacagcgcccgttgatgggacaattacggcagtatatcccactggtcatgcgattggaattacggccaatagtggtgctgaaattctgattcacattggtattaatacggttcaattaaatggtcaatacttcgaaacaatggttaagcaaaaccaagtagtcaaacgtggtgatttattaactaaatttgatgtggataagatcaaaacggctggttag

SEQ ID NO: 79473 - protein, 577 aa, Lactobacillus plantarum
MDYSELAQSILTNIGGKDNISKAWHCATRLRFNLKSTDKANTEAIENLDGVITVVQSAGQYQVVIGNAVAQVFAALADLAGLANPDTAADAATTTEDTGEKQNIINRFIAFISGIFTPFLGALAGAGILKGLLALAVAFNWMSTTSGAYKIWYSAGDAIFYFLPVFLAFTAAKQLKVNQFVAVSLGAALLYPTLVTVMTNSTTLHFFGIPVVPTTYTSTVIPILLAVWVLSYLEPVLDKLFPAAIRNIFTPLFSLIIMVPLTLLVDGPIGGLIGNGLASGVMAIYNFMPIGAGVIMGAFWQVFVIFGVHWTFVPLMMNNIAKMGYDPLLPILSAAVLSQAGAALAVFLKSRDQKMKALAGSSFVTALFGITEPTIYGVTLKLKRPFYCAVVGGALGGAIIGAAGTHASSFTLPSLLAVPTFLGHGFMGEVIGLIVAFLGGAILTYFFGFARQQQADYSVVSDQSDNTVMAPVEGTIIPLTSVHDEVFASEAMGKGLAIVPNKGTVTAPVDGTITAVYPTGHAIGITANSGAEILIHIGINTVQLNGQYFETMVKQNQVVKRGDLLTKFDVDKIKTAG

SEQ ID NO: 79474 - DNA, 1371 bp, Klebsiella pneumoniae
  CDS (1)..(1371): transl_table=11
atggattttgaacagatttcccgctcactgcttcccctgctgggcggcaaggaaaatatcgccagcgccgcgcactgcgccacccgcctgcggctggtgctggtcgacgacgcgctcgccgatcagcaggcgattggcaaaatcgacggggtgaaaggctgctttcgcaatgccggacagatgcagatcatcttcggcaccggggtggtcaataaagtctatgccgcctttatccaggccgcaggcatcagcgaatcgagcaaatccgaagccgccgacctggcggcgaaaaagctgaacccgttccagcgcatcgcccgcctgctgtccaacatcttcgtgccgattattccggccatcgtcgcctccggcctgctgatgggcctgctggggatggtgaaaacctacggttgggtcgacccgagcaacgctctctatatcatgctggatatgtgcagttcggcggcgtttatcattctgccgatcctgatcggctttaccgccgcccgcgaatttggcggtaacccctatctgggcgcgaccctcggcgggatcctcacccacccggcgctgaccaacgcctggggcgtcgccgccggcttccacaccatgaatttcttcggcatcgaagtggcgatgatcggctaccagggcaccgtcttcccggtgctgctggcggtgtggtttatgagcatggtcgagaagcggctgcgccgcgtgatccctgacgcgctggacctgatcctcactccgttcctgacggtgattatctccggctttatcgccctgctgctgatcggcccggccggtcgcgcgctcggcgacggcatttcgtttatcctcagcacgcttatcagccatgccggctggctggcgggcctgctgttcggcggcctctattcggtgatcgtcattaccggtatccatcacagcttccatgccatcgaggccggactgctgggcaacccatcgattggcgtcaacttcctgctgccgatctgggcgatggccaacgtcgcccagggcggcgcctgctttgcggtgtggtttaaaaccaaagatgccaaaataaaagccatcaccctgccgtcggcgttttcggcgatgctggggatcaccgaggcggcaatcttcgggattaacctgcgctttgtgaaaccgtttatcgccgcgctggtgggcggtgccgccggcggcgcctgggtggtgtcgatgcacgtctacatgaccgcggtgggcctgacggcgatcccgggaatggctatcgtgcaggccagctcgctgctgaactacattatcggaatggcgatcgccttcgccgtggccttcgcgctctctctgacgctgaaatacaaaacggacgctgaataa

SEQ ID NO: 79475 - protein, 456 aa, Klebsiella pneumoniae
MDFEQISRSLLPLLGGKENIASAAHCATRLRLVLVDDALADQQAIGKIDGVKGCFRNAGQMQIIFGTGVVNKVYAAFIQAAGISESSKSEAADLAAKKLNPFQRIARLLSNIFVPIIPAIVASGLLMGLLGMVKTYGWVDPSNALYIMLDMCSSAAFIILPILIGFTAAREFGGNPYLGATLGGILTHPALTNAWGVAAGFHTMNFFGIEVAMIGYQGTVFPVLLAVWFMSMVEKRLRRVIPDALDLILTPFLTVIISGFIALLLIGPAGRALGDGISFILSTLISHAGWLAGLLFGGLYSVIVITGIHHSFHAIEAGLLGNPSIGVNFLLPIWAMANVAQGGACFAVWFKTKDAKIKAITLPSAFSAMLGITEAAIFGINLRFVKPFIAALVGGAAGGAWVVSMHVYMTAVGLTAIPGMAIVQASSLLNYIIGMAIAFAVAFALSLTLKYKTDAE

SEQ ID NO: 79476 - DNA, 1425 bp, Pasteurella multocida
  CDS (1)..(1425): transl_table=11
atgaacttctcgcaaatcgcccaacaagtgattgacaaactcggtggtaaagacaatatctctgctgcggcacattgtgctacccgcttgagaatcgttgtaaaaaatgaaaacttgattgataaaaaaggcattgagaatattgaaggtgtcaaaggtcaatttgccgtagcaggacaataccaaattatttttggttctggcacagtcaataaagtctatgcagcgttaagcaagttgttaggtatcggtgatatgacgacttctgaagtcgctgccgctggtacagaaaaacaagggttattacaacgcttagtgaaaggtctagctgatattttcgtcccaattattcctgccatcgttgccggtggtttgttaatgggtattcacagtatgttgacagcaaaaggtttcttcgttgaagaaaaaaatgttgtcgatctgtatcccgcaatagctgatttagtggattttattaataccattgcaaatgcaccttttgtcttcttacctgtattacttggtttttccgccactcgaaaatttggcggtaatccattcttaggagcggcacttggcatgctattagtgcacccagcactttctgatggctggaattatgcactgacactcgctaaaggcaatattcaatattggcatatctttggtttagaaattgaacgtgtcggctaccaaggtacagttatccccgttcttgtcgcctcttgggtcttagcaaccttggagaaaaacctacgtaaagtcgttccgtcatttcttgataacttaattaccccactttttgcattatttataacgggcttactcgcttttaccgtaataggtcctatcgggcgtgaagcggggtctttaattagtacgggcttgacctggttgtatgacacattaggattcgtggggggtgccattttcggtacactttacgcacccattgttatcacaggtatgcaccaaacatttatcgctgtcgaaacacaattgcttgctgaggtggctcgcactggaggtacctttatcttcccaatcgccgcgatgtcaaatattgctcaaggtgcagcttgtttgggcgccgcttatgtgatgaaagatgccaaagtaagagggatcgccgtaccttctggcatctcagccttgttagggattactgagcccgccatgttcggtgtcaacttacgctatcgctatcctttcatatctgccatgatcggtgctggcatttccagtgcggtcattgccttgtttaatgttaaagccattgctttaggcgctgcgggcttgccgggtatcccctcaattaagccggatagtttagcaatgtattgtgtcggtatgcttatttccgcatcgattgcatttactctcaccgtcattttaggtaaaagagcacaactaaaagcagaataa

SEQ ID NO: 79477 - protein, 474 aa, Pasteurella multocida
MNFSQIAQQVIDKLGGKDNISAAAHCATRLRIVVKNENLIDKKGIENIEGVKGQFAVAGQYQIIFGSGTVNKVYAALSKLLGIGDMTTSEVAAAGTEKQGLLQRLVKGLADIFVPIIPAIVAGGLLMGIHSMLTAKGFFVEEKNVVDLYPAIADLVDFINTIANAPFVFLPVLLGFSATRKFGGNPFLGAALGMLLVHPALSDGWNYALTLAKGNIQYWHIFGLEIERVGYQGTVIPVLVASWVLATLEKNLRKVVPSFLDNLITPLFALFITGLLAFTVIGPIGREAGSLISTGLTWLYDTLGFVGGAIFGTLYAPIVITGMHQTFIAVETQLLAEVARTGGTFIFPIAAMSNIAQGAACLGAAYVMKDAKVRGIAVPSGISALLGITEPAMFGVNLRYRYPFISAMIGAGISSAVIALFNVKAIALGAAGLPGIPSIKPDSLAMYCVGMLISASIAFTLTVILGKRAQLKAE

SEQ ID NO: 79478 - DNA, 1371 bp, Salmonella typhimurium
  CDS (1)..(1371): transl_table=11
atggattttgaacagatttcctgctcgctgcttccgcttcttggaggcaaagaaaatatcgccagcgccgcgcactgcgccacgcgcctgcgcctggtgctggtcgatgattcgctggccgaccagcaggccatcggcaaagttgaaggggtgaagggctgttttcgtaatgccggacagatgcagattattttcggcaccggggtggtaaataaggtctacgctgcctttactcaggcggcgggtattagcgaatccagcaaatcggaagccgccgacatcgcggcaaaaaagctcaatccgttccagcgcatcgcccgcctgctatcaaacatcttcgtgccgataatccctgccatcgtcgcctctggtctgctgatgggcctgctgggaatggtcaaaacatacggctgggttgacccgggcaacgccatctacatcatgctggatatgtgcagctcggcggcatttatcattctgccgattctgattggctttaccgccgcccgcgaattcggcggtaatccttatctcggcgcgacgcttggcggcattctgactcatccagcgctgactaacgcctggggcgtggccgcgggtttccacaccatgaactttttcggcttcgaaattgccatgatcggctatcagggtacggtgttcccggtactgctggcagtatggtttatgagcatcgttgagaagcagttgcgtcgcgcaatccccgatgccctggatttgatcctgacgccgttcctgacggtgattatatccggttttatcgccctgttgattatcggcccggccggtcgcgcactgggcgacggtatctcgtttgtcctcagcaccctgattagccacgccggctggctcgccgggttactgtttggcggtctctattcagttatcgtcattaccggtattcatcacagcttccatgcggttgaagccgggttgctgggcaatccctccatcggcgtcaacttcctgctgccgatttgggcgatggccaacgtcgctcagggcggagcctgtctggcggtgtggttcaaaaccaaagatgcaaaaattaaagccattactctgccctcggcgttttccgccatgctgggcatcaccgaggcggcgatttttggtattaacctgcgctttgtgaagccatttattgcggcgctgattggtggtgcggcgggcggcgcatgggtggtatctgtacacgtctacatgaccgcggtcggcttgacagcgatccccggcatggccatcgtgcaggccagttcgctgttgaactacattatcgggatggttatcgcctttggcgtcgcctttacggtctccctggttttgaaatacaaaacggacgctgaataa

SEQ ID NO: 79479 - protein, 456 aa, Salmonella typhimurium
MDFEQISCSLLPLLGGKENIASAAHCATRLRLVLVDDSLADQQAIGKVEGVKGCFRNAGQMQIIFGTGVVNKVYAAFTQAAGISESSKSEAADIAAKKLNPFQRIARLLSNIFVPIIPAIVASGLLMGLLGMVKTYGWVDPGNAIYIMLDMCSSAAFIILPILIGFTAAREFGGNPYLGATLGGILTHPALTNAWGVAAGFHTMNFFGFEIAMIGYQGTVFPVLLAVWFMSIVEKQLRRAIPDALDLILTPFLTVIISGFIALLIIGPAGRALGDGISFVLSTLISHAGWLAGLLFGGLYSVIVITGIHHSFHAVEAGLLGNPSIGVNFLLPIWAMANVAQGGACLAVWFKTKDAKIKAITLPSAFSAMLGITEAAIFGINLRFVKPFIAALIGGAAGGAWVVSVHVYMTAVGLTAIPGMAIVQASSLLNYIIGMVIAFGVAFTVSLVLKYKTDAE

SEQ ID NO: 79480 - DNA, 1440 bp, Vibrio alginolyticus
  CDS (1)..(1440): transl_table=11
atgaattatccggcagtagcaaaagagttgttaactctattaggtggtaaaagcaacatcaccgcacttgcacattgtgcgacacgcttacgccttgccgttgcagatgagcaaaaaatagatgaacaagcgattgataaccttgaaggggtaaaagggcagttcaaagttgcgggtcagtaccaaatcatttttggatcaggcatcgtaaaccaagtttatgcagaaatggcgaagttgacgggtatgagtgaaatgtccaccaacgacgttgcgtctgctggcgcagagaaacaaaacatcgttcagcccgcagtgaaggggctgtctgatattttcgtcccaatcattccagcaatcgtcgctggcggtttgttgatgggtatatacaacctactgactgcccaaggcttgtttattgatggtaaatccttgattgaggccaatccaggactgacagacttggcgaacatgatcaacacgtttgcaaacgcgccgtttgtttacctgcctattctgctggcattttcagccagcaagaagtttggcggcaacccatatttaggggcagcgctaggtatgttgatggttcaccctgacttgctgaatggttggggattcggcggcgcatctgtgtctggcaacattccggtttggaatattcttggttttgaaatccaaaaagtgggttaccaaggttcagtgttaccggttttggtatcggcattcattcttgcgaaggttgagctaggcttacgtaaagtcataccttctgttttagacaaccttttaacgccattactggcgattttcatagcgggtttgttgacgtttactgtcgtcggtccgttcacgcgtgatatcggtttcctattgggtgatggtctgaactggctgtacaacacagctggctttgttggtggtgcggtatttggtcttatttatgctccgtttgttattactggtatgcatcacagcttcattgcgattgaaactcaacttcttgcggatattgcaacgacgggcggcacctttatctttcctattgcggcgatgtctaacgtttctcaaggagcggcagcgttggcggtgggcgtgatgagcaaagataagaagatgaaaggtattgcgattccatctggtgttacgggtttgctgggtattacagaaccagccatgtttggtgttaacttaaaactacgttacccatttattgcggcagtttgcgctgcggcgttatcaagtgcgttcatcacaatgtttaatgtgaaagctcaggcattgggtgcagctggtcttccaggcatcatttccatcacgccagataagattgggtactacatcgcgggtatggtgatcgcgttcttgaccgcatttgttctcaccattgttcttggtatcggtgaccgcgctaaagtcggtaaaaaagcagcggcttaa

SEQ ID NO: 79481 - protein, 479 aa, Vibrio alginolyticus
MNYPAVAKELLTLLGGKSNITALAHCATRLRLAVADEQKIDEQAIDNLEGVKGQFKVAGQYQIIFGSGIVNQVYAEMAKLTGMSEMSTNDVASAGAEKQNIVQPAVKGLSDIFVPIIPAIVAGGLLMGIYNLLTAQGLFIDGKSLIEANPGLTDLANMINTFANAPFVYLPILLAFSASKKFGGNPYLGAALGMLMVHPDLLNGWGFGGASVSGNIPVWNILGFEIQKVGYQGSVLPVLVSAFILAKVELGLRKVIPSVLDNLLTPLLAIFIAGLLTFTVVGPFTRDIGFLLGDGLNWLYNTAGFVGGAVFGLIYAPFVITGMHHSFIAIETQLLADIATTGGTFIFPIAAMSNVSQGAAALAVGVMSKDKKMKGIAIPSGVTGLLGITEPAMFGVNLKLRYPFIAAVCAAALSSAFITMFNVKAQALGAAGLPGIISITPDKIGYYIAGMVIAFLTAFVLTIVLGIGDRAKVGKKAAA

SEQ ID NO: 79482 - DNA, 1455 bp, Staphylococcus aureus
  CDS (1)..(1455): transl_table=11
atgaccaaagaacaacaacttgcagaacgaattattgctgcagtaggtggtatggataatatagatagtgtcatgaactgtatgacacgtgtgcgtattaaagtattagatgaaaataaagtagatgaccaagaactaaggcacattgatggtgtcatgggtgttatacacgatgaacgcattcaagttgtagttggacctggtacagtcaataaagtggctaatcatatggctgagttaagtggtgttaaactaggtgacccaataccacacaatcacaatgatagtgaaaaaatggactataaatcatatgcagctgataaagcaaaggcaaataaagaagcacataaagcaaaacaaaagaatggtaagttgaataaagtattgaaatcaattgccaatatctttataccgttgattcctgcatttattggagctggattaattggtggtattgcagcagtactgagtaacttaatggtggcaggctatatttcaggtgcttggattacgcaacttataacagtatttaatgtcattaaagacggtatgttagcatacttagctattttcactggtattaatgcggctaaagaatttggtgcgacaccaggacttggtggcgtgattggtggtacaacgttattaacgggtattgctggtaaaaatattttaatgaatgttttcactggagaaccattgcaacctggacaaggtggaattattggtgttatttttgccgtttggattttaagtattgtcgaaaagagattgcataaaattgtgccaaatgcgattgatattattgtaacgccgactattgcattgttgattgtaggactattaactatctttatctttatgccattagcaggttttgtttcagacagtttagtttcagtagttaacggaattattagtattggtggcgtatttagtggatttatcattggtgcaagcttcctaccgttagttatgttagggcttcatcatatttttacgccaattcatatagaaatgattaaccaatctggtgctacttacttattgccaattgcagcgatggctggtgctggacaagtaggtgccgcattagcactttgggtaagatgtaaacgcaacacaacattacgtaatactttaaaaggtgcattgccagttggtttcctaggtattggagaaccattaatctatggtgtgactttgccattaggtcgacctttcttaactgcttgtattggcggtggtattggtggcgctgtaataggtggaattggacatattggtgccaaagcaataggcccaagtggtgtgtcactattaccattaatctcagataatatgtatttaggttatattgcaggattacttgctgcgtatgctggtggattcgtttgtacatatttatttggaacgacaaaggcgatgcgacagacagatttgttgggtgattaa

SEQ ID NO: 79483 - protein, 484 aa, Staphylococcus aureus
MTKEQQLAERIIAAVGGMDNIDSVMNCMTRVRIKVLDENKVDDQELRHIDGVMGVIHDERIQVVVGPGTVNKVANHMAELSGVKLGDPIPHNHNDSEKMDYKSYAADKAKANKEAHKAKQKNGKLNKVLKSIANIFIPLIPAFIGAGLIGGIAAVLSNLMVAGYISGAWITQLITVFNVIKDGMLAYLAIFTGINAAKEFGATPGLGGVIGGTTLLTGIAGKNILMNVFTGEPLQPGQGGIIGVIFAVWILSIVEKRLHKIVPNAIDIIVTPTIALLIVGLLTIFIFMPLAGFVSDSLVSVVNGIISIGGVFSGFIIGASFLPLVMLGLHHIFTPIHIEMINQSGATYLLPIAAMAGAGQVGAALALWVRCKRNTTLRNTLKGALPVGFLGIGEPLIYGVTLPLGRPFLTACIGGGIGGAVIGGIGHIGAKAIGPSGVSLLPLISDNMYLGYIAGLLAAYAGGFVCTYLFGTTKAMRQTDLLGD

SEQ ID NO: 79484 - DNA, 1425 bp, Staphylococcus epidermidis
  CDS (1)..(1425): transl_table=11
atgagtaaagaagaacgtcttgccaaagacattacccacgcattaggcggttctcaaaacataagcaatatcatccattgtatgactcgagttcgtattaaagtacacaatgatgcaaaagttaattatgatgaattaaaatcaatcaatggcgtattaggcgttgttgaagatgaaagaattcaagttgttgttggaccggggattgttaataaagttgctaaacttatggctgaccagtcaggagcaactctagctgaagagacgactgaaaatcaaagttataaatcacaggcagaaaaacgtgcgtatgaacataaaaaacaattccaaagtcaacgaaaacaaagtaaatggaataaagtgttaaaatctattgctaatatctttatacctttaataccagcatttataggtgcaggattaatcggtgggattgcagcaatacttagtaacttgcttacagcaggttccatttcaggtcaatggattcaacaaattgttactgtcttaaatgttattaaagatggtatgttattttacttagctattttcactggtattaactcagcgaaagtattcggtgctacaccaggtttaggtggagtaatcggtggtactacattactaaccggtatcacggatgaaaatccaattaaaaatattttcactggagaacatctagctgctggacaaggtggtattattggtgttatcttcgcagtttggttattaagcatggttgagaaacgactacataaaataatacctaactctattgatatcatcgtaacgcccacaataaccttactacttattggtttgttaactatatttataatcatgccactagctggctttgtctccgatggtcttgtttatgtaattaactggattattggagtaggaggcattttcagtggattcattataggagcattctttttacctttagtcatgctaggattacatcatatcttcaccccaatccatatcgaattaatcaatcaaactggctccacttacttgttacctattgccgctatggctggtgctggacaagtcggtgcggcgattgcattgtgggtgagatgcggtaaaaataaagaattacgtaatacgctcaaaggtgcccttcctgtagggttcttaggtataggtgaacctttaatttatggtgtaacacttccattaggtcgccctttcttcactgcgtgtataggtggcggtgttggtggtgctgtcattggtggtatcggtcatattggggcgacagctgtaggaccaagtggtatttcattattaccattgattgctaataatatgtatctcggttacatcgtaggtttactagctgcttatgcgggtggctttatctttacttatttcttcggcacaactaaagaaatgagaaatcctgaataa

SEQ ID NO: 79485 - protein, 474 aa, Staphylococcus epidermidis
MSKEERLAKDITHALGGSQNISNIIHCMTRVRIKVHNDAKVNYDELKSINGVLGVVEDERIQVVVGPGIVNKVAKLMADQSGATLAEETTENQSYKSQAEKRAYEHKKQFQSQRKQSKWNKVLKSIANIFIPLIPAFIGAGLIGGIAAILSNLLTAGSISGQWIQQIVTVLNVIKDGMLFYLAIFTGINSAKVFGATPGLGGVIGGTTLLTGITDENPIKNIFTGEHLAAGQGGIIGVIFAVWLLSMVEKRLHKIIPNSIDIIVTPTITLLLIGLLTIFIIMPLAGFVSDGLVYVINWIIGVGGIFSGFIIGAFFLPLVMLGLHHIFTPIHIELINQTGSTYLLPIAAMAGAGQVGAAIALWVRCGKNKELRNTLKGALPVGFLGIGEPLIYGVTLPLGRPFFTACIGGGVGGAVIGGIGHIGATAVGPSGISLLPLIANNMYLGYIVGLLAAYAGGFIFTYFFGTTKEMRNPE

SEQ ID NO: 79486 - DNA, 1425 bp, Escherichia coli O6
  CDS (1)..(1425): transl_table=11
atggctaaagagatcagcagtgaacttctgaacaccattcttacccgggtcggcggaccgggaaatatcgccagttgtggtaactgtatgacgcgcctgcgtctgggtgtacatgacagttcattggttgatcccgatatcaaaacgctggaaggcgtgaagggcgtcattttgaccagcgatcaggtgcaggtggtttttgggccaggcaaagcgcatcgtgccgcaaaagccatgagcgagctgctgggcgaggcaccggtacaggatgccgcagaaatcgccgcccagaataaacgccagttaaaagccagacaaacttccggcgtgcaacaatttctcgccaaattcgccaccatcttcacgccgctgatccccggttttattgccgccggtctgctgctggggatagcgacgttaattgccacggtgatgcacgttacggcagatgctcagggcacgctacccgatgcgctgaattttatgaaggtgttcagcaaaggcctgttcaccttcctggtcattctggtgggctataacgcggcccaggcatttggtggcacgggcgtaaatggcgcaattatcgctgcgctctttttgcttggttataacccaactgcaaccacgggttactacgccggatttcacgatttctttggtctgcccatcgatccgcgcggcaatattatcggcgtgttgatcgccgcgtgggcctgcgcccgcatcgaatgcatggtgcgccgctttatgccggacgacctcgacatgctgttgacctcattaatcaccctgctgatcaccgctacgcttgcgtacctgatcattatgccgctgggcggctggctgtttgaaggcatgtcgtggctgtttatgcacctgaacagtaatccgctcggttgtgcggttttagccgggctgttcctgatcgccgtggtatttggcgtgcatcagggctttattcctgtttatctggcgttaatggacagccagggattcaacagcttatttcccatcctttcaatggcaggcgcaggccaggtgggcgcggcgctggcgctctactggcgggcgcaaccgcacagtgcattacgcagtcaggtccgcggggcgattattcccggtctgcttggcgttggcgaaccgctgatttacggtgtcaccctgccccgcatgaaaccgtttgttaccgcctgtttaggcggcgcggcgggcggtttgtttatcggcctgatagcctggtggggtctgccgatgggcttaaacagcgccttcgggccgtctggtctggtggcgctgccgctgatgacttccgcgcaaggcatccttccggcaatggcggtttacgctggcggtattctggtggcatgggttagtgggtttattttcaccacactctttggctgccgtaacgtcaatctggactga

SEQ ID NO: 79487 - protein, 474 aa, Escherichia coli O6
MAKEISSELLNTILTRVGGPGNIASCGNCMTRLRLGVHDSSLVDPDIKTLEGVKGVILTSDQVQVVFGPGKAHRAAKAMSELLGEAPVQDAAEIAAQNKRQLKARQTSGVQQFLAKFATIFTPLIPGFIAAGLLLGIATLIATVMHVTADAQGTLPDALNFMKVFSKGLFTFLVILVGYNAAQAFGGTGVNGAIIAALFLLGYNPTATTGYYAGFHDFFGLPIDPRGNIIGVLIAAWACARIECMVRRFMPDDLDMLLTSLITLLITATLAYLIIMPLGGWLFEGMSWLFMHLNSNPLGCAVLAGLFLIAVVFGVHQGFIPVYLALMDSQGFNSLFPILSMAGAGQVGAALALYWRAQPHSALRSQVRGAIIPGLLGVGEPLIYGVTLPRMKPFVTACLGGAAGGLFIGLIAWWGLPMGLNSAFGPSGLVALPLMTSAQGILPAMAVYAGGILVAWVSGFIFTTLFGCRNVNLD

SEQ ID NO: 79488 - DNA, 1431 bp, Pasteurella multocida
  CDS (1)..(1431): transl_table=11
atggcaacaattgataatgcgatgatccactcgctcatccagcacctaggtggaaaaagcaacatccaaagtgtcactaattgtatgacacgtttgcgtgtcaccttgcacgattcgtccgttgttgataaagacgagttaaaaaaaatccaaggtgtgctaggtgttgtcgaagcggatgagcaactccaactgattcttggtccgggtaaagcaacaaaagccgcggaaatgatgaaagccagcttaggggataacatgagttcgccttctctccaagagattgcacgcacccaaaaacaacaaattaagtctgctcaaacgagtagtatccatcaattctttgcgaagtttgctactatttttaccccgctcattccgggttttattggcgcaggcttactcctaggcttagcaaccgtattgcaacaagcctttgtggctggggtagaaaatccaaatgcgtttttagtggatttgattgcgtacatgaaagtgttcagtaaaggcttatttagctttttaagtattctgattggttataatgcagcaaaagcctttgggggttcgggtgtcaacggcgcaatccttgcctctttatttatcttgggctataacccagaagcgaccaaagggatttattctggattaagcaatttctttggcttaactattgacccacgcggtaacatcatcggggttttaatcgcagcaattgttggggcaaaagtcgaacgttgggtcagaaagttcattcctgatagcttagatatggcattaacttccacggttacgctattaattatgggctgttttaccttcttatttatcatgccaattggggtgtatctctttaatggaatgtcttggttattctctaacttaaatggcaatccattgggtaccgcagttctagcaggcttattccttatctccgttatgctcggtattcaccaaggttttgtcccggtctattttgccttagtggaaacacaaggctttaacgcgctcttcccagtgcttgctatggcaggcgcaggacaagtgggtgccgcgttagcgctttacttcaaagcaaacaaaggcgccgtcttgcgtgatcaaatcaaaggggcaattattccgggctttttaggtatcggcgaaccgctgatttacggggtaaccttaccgcgagtaaaaccgtttattacagcctgtatcggtggtgctgcgggcggctttactattgggttaatcgcctacttaggtttcccaatggggttaaatacagtctttggtccatctggattactcgcgatcccattaatgacctcgccgaatggtgtattaccggctatcgctacctatttattaggtaccgttgtcgcttacgcaacaggttttatcacaacctatttctttgcgacgaaagatgtcgatttaagctaa

SEQ ID NO: 79489 - protein, 476 aa, Pasteurella multocida
MATIDNAMIHSLIQHLGGKSNIQSVTNCMTRLRVTLHDSSVVDKDELKKIQGVLGVVEADEQLQLILGPGKATKAAEMMKASLGDNMSSPSLQEIARTQKQQIKSAQTSSIHQFFAKFATIFTPLIPGFIGAGLLLGLATVLQQAFVAGVENPNAFLVDLIAYMKVFSKGLFSFLSILIGYNAAKAFGGSGVNGAILASLFILGYNPEATKGIYSGLSNFFGLTIDPRGNIIGVLIAAIVGAKVERWVRKFIPDSLDMALTSTVTLLIMGCFTFLFIMPIGVYLFNGMSWLFSNLNGNPLGTAVLAGLFLISVMLGIHQGFVPVYFALVETQGFNALFPVLAMAGAGQVGAALALYFKANKGAVLRDQIKGAIIPGFLGIGEPLIYGVTLPRVKPFITACIGGAAGGFTIGLIAYLGFPMGLNTVFGPSGLLAIPLMTSPNGVLPAIATYLLGTVVAYATGFITTYFFATKDVDLS

SEQ ID NO: 79490 - DNA, 1425 bp, Shigella flexneri
  CDS (1)..(1425): transl_table=11
atggccaaagagatcagcagtgaacttctgaacaccattcttacccgtgtcggcggaccgggaaatatcgccagttgtggtaactgtatgacgcgcctgcgtctgggtgtacatgacagttcactggttgatcccaatatcaaaacgctggaaggcgtgaagggcgtcattttgaccagcgaccaggtgcaggtcgtttttgggcctggtaaagcgcatcgtgccgcaaaagcgatgagcgagctgctgggcgatgcaccggtacaggatgccgcagaaatcgccgcccagaacaaacgtcagttaaaagccaaacaaacctccggcgtgcaacaatttctcgccaaattcgccaccatcttcacgccgctgatccccggttttattgccgccggtctgctgctggggatagcgacgttaattgccacggtgatgcacgttccggcagatgctcagggcacgctacccgacgcgctgaattttatgaaggtgttcagcaaaggtttgttcaccttcctagtgattctggtgggctataacgccgcccaggcatttggcggcacgggcgtcaatggcgcaattattgccgcactctttttgctcggttataaccccgctgcaaccaccggttactacgccggttttcacgatttctttggtctgcccatcgatccgcgcggcaatattatcggcgtgctgattgccgcgtgggcctgcgcccgcattgaaggcatggtgcgccgctttatgccggacgatctcgacatgctgctgacctcgttaatcaccctgctgatcaccgctacgcttgcgtacctgatcattatgccgctgggtggctggttattcgaaggtatgtcatggctgtttatgcacctgaacagtaatccgttcggttgtgcggttttagccgggctgttcctgatcgccgtggtatttggcgtgcatcagggctttattcctgtttacctcgcgttaatggacagccagggattcaacagcttatttcccatcctttcaatggcaggcgcgggccaggtgggcgcggcgctggcactctactggcgggcgcaaccgcacagtgcgctacgcagtcaggtacgcggggcgattattcccggcctgctgggcgttggtgaaccgctgatttacggtgtcaccctgccccgcatgaagccgtttgttaccgcctgtttaggcggcgcggcgggcggtttgtttatcggattgatagcctggtggggtctgccgatgggcttaaacagcgcctttgggccgtctggtctggtggcgctgccgctgatgacttccgcacaaggcatccttccggcaatggcggtttatgctggcgggattctggtggcatgggtttgcgggtttattttcaccacgctctttggctgccgtaacgtcaatctggactga

SEQ ID NO: 79491 - protein, 474 aa, Shigella flexneri
MAKEISSELLNTILTRVGGPGNIASCGNCMTRLRLGVHDSSLVDPNIKTLEGVKGVILTSDQVQVVFGPGKAHRAAKAMSELLGDAPVQDAAEIAAQNKRQLKAKQTSGVQQFLAKFATIFTPLIPGFIAAGLLLGIATLIATVMHVPADAQGTLPDALNFMKVFSKGLFTFLVILVGYNAAQAFGGTGVNGAIIAALFLLGYNPAATTGYYAGFHDFFGLPIDPRGNIIGVLIAAWACARIEGMVRRFMPDDLDMLLTSLITLLITATLAYLIIMPLGGWLFEGMSWLFMHLNSNPFGCAVLAGLFLIAVVFGVHQGFIPVYLALMDSQGFNSLFPILSMAGAGQVGAALALYWRAQPHSALRSQVRGAIIPGLLGVGEPLIYGVTLPRMKPFVTACLGGAAGGLFIGLIAWWGLPMGLNSAFGPSGLVALPLMTSAQGILPAMAVYAGGILVAWVCGFIFTTLFGCRNVNLD

SEQ ID NO: 79492 - DNA, 1446 bp, Vibrio cholerae
  CDS (1)..(1446): transl_table=11
atggccaaaataacccaaaccatgatggcacaagtgctgtctctggtgggcggcagtggtaacgtcgccaaatgtggcaactgcatgactcgcttgcgtttaacgctgaataattctgcgctcgccgatcatgcggcattgaaaaaaatttctggagtgatgggcgtggttgaaagtgacgcacaactgcagatcatcctcggtcccggtaaagcacaaacggccgcggatatgatgaatgccttgattgaatcgggcgacaacgtggcacctgcagtgagcgaggcggatctctccaccattgccgcgcagcagaaaaagcagatgaagagcaagcaaaccagtgcggtacaacgctttttgagcaagtttgccaccatttttaccccgctgatccccggatttattgccgcaggcttgctgctgggcattgcgactctgcttgagcaaatctatgtggttggccaaaccccgagcgagtttatgctcgatctggtggcttatctcaaagtgtttggcaaagggctgtttgcgtttctcagcatcttgattggctataacgcgcagcaggcatttggcggctctggcgtgaacggggcgattctggcttcgctgtttgtactcggttatgacccagaagcaaccaaaggcatttactcggggatgagtgagttcttcggctttgcaattgacccgcgcggcaacatcatcggggtattactggcggcaattttaggcgcgcaagtggaacgtaaagtgcgtgaatacatgccggatgatttggatatgatcctgacttcggtggtgactttgctgatcatgggcgcggtgactttcctcatcatcatgcctatcggcggtgagctgtttaaaggcatgtcatggctgtttttaaacctcaatgataacccactcggtgctgccatcttggccggtttattcttaatctcggtggtgtttggtattcaccaaggttttgtgccggtttatttcgcgctgatggaagcgcaaggctttaactcactgttcccgatccttgctatggcaggcgctgggcaagtcggtgcctcactggcgctatacgcgagagccaaaaaagagaccaccattcgcactcaaattaaaggggcgatcatcccgggcattctcggcattggtgagccactgatttatggcgtgacgctaccgcgagtgaaaccttttgtcactgcctgtattggcggtgcggcgggtggcttctttatcggcctcatctcttatttgggtttgccggttggcctcaatacggtgtttggcccatccggtgtggtggcgattcccctgatgacttcagccgacggtatttttgcgggtatggcggtatttgtcggtggtttgctcatctcttataccgttggctttgctgctacctacttcttcggttgtaaagacgtcgatctgagctaa

SEQ ID NO: 79493 - protein, 481 aa, Vibrio cholerae
MAKITQTMMAQVLSLVGGSGNVAKCGNCMTRLRLTLNNSALADHAALKKISGVMGVVESDAQLQIILGPGKAQTAADMMNALIESGDNVAPAVSEADLSTIAAQQKKQMKSKQTSAVQRFLSKFATIFTPLIPGFIAAGLLLGIATLLEQIYVVGQTPSEFMLDLVAYLKVFGKGLFAFLSILIGYNAQQAFGGSGVNGAILASLFVLGYDPEATKGIYSGMSEFFGFAIDPRGNIIGVLLAAILGAQVERKVREYMPDDLDMILTSVVTLLIMGAVTFLIIMPIGGELFKGMSWLFLNLNDNPLGAAILAGLFLISVVFGIHQGFVPVYFALMEAQGFNSLFPILAMAGAGQVGASLALYARAKKETTIRTQIKGAIIPGILGIGEPLIYGVTLPRVKPFVTACIGGAAGGFFIGLISYLGLPVGLNTVFGPSGVVAIPLMTSADGIFAGMAVFVGGLLISYTVGFAATYFFGCKDVDLS

SEQ ID NO: 79494 - DNA, 1455 bp, Vibrio parahaemolyticus
  CDS (1)..(1455): transl_table=11
atggcaaaaataacttcaaacacagtatcgcagttgctgtccgcagtgggtggcagcagcaacgtaagcaaatgtggtaactgtatgacgcgtttgcgtttatcgctcgccaacaatggcttggctgaccagtctgttatcaagaaaattcccggcgtaatgggtgtggtggaaagcgatgagcagtttcagatcattctcggtcccggaaaagctcaacaagcggctgagatgatgaatcaattgatcgacagcttaacctctggtgacagtgaagaaccagatatgccgcaacaagatctttctgccgtcgcggccgagcaaaaaaagcagatgaagagcaaacaaaccagtgcggttcagcgttttttaagcaagtttgctaccatctttacgccgttgatccctggttttattgccgctggtttgttgctaggttttgcgacgttattggaacagatgtttgttctcgaccagacaccaagccagtttatgctggatttgatcgcctacatgaaagtctttggtaagggtctgtttgctttcctaagtattctgattggttacaacgcgcagcaagcgtttggcggctctggtgttaatggtgccattctcgcctctttgtttgtgctgggttacaacccagaggctacatccggcatttattctggcatgaacgagtttttcggctttgcgattgatccgcgcggcaacattatcggcgtacttttggcggcgatcatcggtgcgcaagtcgagcgtaaggttcgtcaatacatgccagatgatctggacatgatcttaacgtccgttatcactctgttgatcatgggcgcggtaaccttcttgatcatcatgccaatcggcggcgagctgtttaaagggatgtcttggttgttcctcaacttgaacgataacccattaggcgctgcaatcttggcaggtttgttcttaatttctgtggtatttggcatccaccagggttttgttccagtgtactttgcattgatggaagcacagggctttaactcgctattccctatcctggcgatggctggtggcggtcaggttggcgcgtcaatggcgctgtatttcaaagccaaaaaagacgctctactgcgcactcaagttaaaggcgctattattccgggccttctaggcattggcgaaccattgatttacggcgtgacattaccacgcgtaaaaccattcgttaccgcttgtattggcggcgctgcgggcggcttctttatcggtttagtttcttaccttggcttaccagttggtcttaatacggtgtttggcccgtccggtatcgtggcgattcctctcatgacatcagaaaatggcatcttcccgggcatgatggtgtttgttgctggcctgcttatctcttacatcgttggcttcctcgcgacttacttctttggctgcaaagacgtcgatttaagctaa

SEQ ID NO: 79495 - protein, 484 aa, Vibrio parahaemolyticus
MAKITSNTVSQLLSAVGGSSNVSKCGNCMTRLRLSLANNGLADQSVIKKIPGVMGVVESDEQFQIILGPGKAQQAAEMMNQLIDSLTSGDSEEPDMPQQDLSAVAAEQKKQMKSKQTSAVQRFLSKFATIFTPLIPGFIAAGLLLGFATLLEQMFVLDQTPSQFMLDLIAYMKVFGKGLFAFLSILIGYNAQQAFGGSGVNGAILASLFVLGYNPEATSGIYSGMNEFFGFAIDPRGNIIGVLLAAIIGAQVERKVRQYMPDDLDMILTSVITLLIMGAVTFLIIMPIGGELFKGMSWLFLNLNDNPLGAAILAGLFLISVVFGIHQGFVPVYFALMEAQGFNSLFPILAMAGGGQVGASMALYFKAKKDALLRTQVKGAIIPGLLGIGEPLIYGVTLPRVKPFVTACIGGAAGGFFIGLVSYLGLPVGLNTVFGPSGIVAIPLMTSENGIFPGMMVFVAGLLISYIVGFLATYFFGCKDVDLS

SEQ ID NO: 79496 - DNA, 1461 bp, Vibrio vulnificus
  CDS (1)..(1461): transl_table=11
atggcaaagataacccaaacaatgatctcgcagctgctggctgcggtgggtggcagcagtaatgtcagcaaatgtggcaactgcatgacccgacttcgcttgacgctggccaacaatggcgtagcggatcaagccgtgattaagcaaatccccggcgtcatgggcgtggtggaaagcgatgagcaatttcaaatcatccttggccccggcaaagcgcagcaagcggcggaactgatgaacaagctgattgaaagcgtcatcaatggcgatgtgcaagaacaggctattgccagcgacacgaacgatctctccagcgtcgccgctgagcagaaaaagcaaatgaagagcaaacagaccagcgcggtgcaacgctttttgagcaagtttgccaccattttcaccccgctgatccccggttttattgccgctggtttgctgcttggttttgctacgctgcttgagcaaatgttcgtgctggaacaaaccccaagccaatttatgctcgatctgatcgcttacatgaaagtgtttggcaaagggctgtttgccttcctgagcatcttgattggttacaacgcgcagcaagcctttggtggctctggcgtgaacggcgcgattctcgcgtcactctttgtgctgggctacaaccctgatgcgacctctggcatctactcgggcatgagtgagttctttggctacaccattgacccgcgaggcaacattatcggcgtgctgctggcggcgatcattggtgcgcaagtggaacgcaaagttcgtgaatacatgcccgatgatctcgacatgattcttacctcagtggtcacactgctgatcatgggtgtgatcacgtttgtggtgatcatgcctatcggtggcgagctgttcaaaggcatgtcttggctgttcttgaacctcaacgacaacccgctgggcgcagcgattcttgctggtctgtttttgatttcggtggtgtttggtatccaccaaggctttgtgcctgtctattttgcgctgatggaagcacaaggttttaactctctgttcccaattctggcgatggcgggtggcggccaagtgggggcttcactggcactgtatttcaaagcgaagaaagacgcggtactgcgcacgcaagtgaaaggggcaatcattccgggcattctcggcatcggtgagccactgatttacggcgtcaccctaccacgcgtcaaaccgtttgtgacggcctgtattggtggcgcggcgggcggcttcttcatcggcttggtttcctaccttggcttacctgtcggtttgaataccgtgtttggcccttctggtatcgtggcgatcccactgatgacatcgcacagcggcatcttcgcaggcatggcggtcttcgtggttggcctgctcatctcctacgtggtcggcttcctcgccacttacttctttggcagcaaagacgtcgatttaagctga

SEQ ID NO: 79497 - protein, 486 aa, Vibrio vulnificus
MAKITQTMISQLLAAVGGSSNVSKCGNCMTRLRLTLANNGVADQAVIKQIPGVMGVVESDEQFQIILGPGKAQQAAELMNKLIESVINGDVQEQAIASDTNDLSSVAAEQKKQMKSKQTSAVQRFLSKFATIFTPLIPGFIAAGLLLGFATLLEQMFVLEQTPSQFMLDLIAYMKVFGKGLFAFLSILIGYNAQQAFGGSGVNGAILASLFVLGYNPDATSGIYSGMSEFFGYTIDPRGNIIGVLLAAIIGAQVERKVREYMPDDLDMILTSVVTLLIMGVITFVVIMPIGGELFKGMSWLFLNLNDNPLGAAILAGLFLISVVFGIHQGFVPVYFALMEAQGFNSLFPILAMAGGGQVGASLALYFKAKKDAVLRTQVKGAIIPGILGIGEPLIYGVTLPRVKPFVTACIGGAAGGFFIGLVSYLGLPVGLNTVFGPSGIVAIPLMTSHSGIFAGMAVFVVGLLISYVVGFLATYFFGSKDVDLS

SEQ ID NO: 79498 - DNA, 1461 bp, Vibrio vulnificus
  CDS (1)..(1461): transl_table=11
atggcaaagataacccaaacaatgatctcgcagctgctggctgcggtgggtggcagcagtaatgtcagcaaatgtggcaactgcatgacccgacttcgcttgacgctggccaacaatggcgtagcggatcaagccgtgattaagcagatccccggcgtcatgggcgtggtggaaagcgatgagcaatttcaaatcatccttggccctggcaaagcgcagcaagcggcggagctgatgaacaagctgattgaaagcgtcatcaatggcgatgtgcaagaacaggccatggccagcgacacgaacgatctctccagcgttgccgctgagcagaaaaagcagatgaagagcaaacagaccagcgcggtgcaacgctttttgagcaagtttgccaccattttcaccccgctgatccccggtttcattgccgctggtttgctgcttggttttgctacgctgcttgagcaaatgttcgtgctggaacaaaccccaagccaatttatactcgatctgatcgcttacatgaaagtgtttggtaaggggctgtttgccttcctgagcatcttgattggttacaacgcgcagcaagcctttggtggctctggcgtgaacggcgcgattctcgcgtcactctttgtgctgggctacaacccagatgccacctctggcatctactcgggcatgagtgagttttttggctacaccattgacccgcgaggcaacattatcggcgtgctgctggcggcgatcattggtgcgcaagtggaacgcaaagtgcgtgaatacatgcccgatgatctcgacatgattcttacctcggtggtcacgctgctgatcatgggtgtggtcacgtttgtggtgatcatgcctatcggcggtgagctgttcaaaggcatgtcttggctgttcttgaacctcaatgacaacccgttgggcgcagcgattcttgctggtctgtttttgatttcggtggtgtttggtatccaccaaggctttgtgcctgtttattttgcgctgatggaagcgcaaggttttaactcactgttcccaattctggcgatggcgggcggcggccaagtgggggcttcactggctctgtatttcaaagcgaagaaagacgcggtgctgcgcacgcaagtgaaaggggcaatcatcccgggcattctcggcatcggtgaaccactgatttacggcgtcaccctaccacgcgtcaaaccgtttgtgacggcctgtattggtggcgcggcgggcggcttcttcatcggcttggtttcctaccttggcttacctgtcggtttgaataccgtgtttggcccttctggtatcgtggcgatcccactgatgacatcgcacagcggcatcttcgcgggcatggcagtcttcgtggttggcctgctcatctcctacgtggtcggcttcctcgccacttacttctttggcagcaaagacgtcgatttaagctga

SEQ ID NO: 79499 - protein, 486 aa, Vibrio vulnificus
MAKITQTMISQLLAAVGGSSNVSKCGNCMTRLRLTLANNGVADQAVIKQIPGVMGVVESDEQFQIILGPGKAQQAAELMNKLIESVINGDVQEQAMASDTNDLSSVAAEQKKQMKSKQTSAVQRFLSKFATIFTPLIPGFIAAGLLLGFATLLEQMFVLEQTPSQFILDLIAYMKVFGKGLFAFLSILIGYNAQQAFGGSGVNGAILASLFVLGYNPDATSGIYSGMSEFFGYTIDPRGNIIGVLLAAIIGAQVERKVREYMPDDLDMILTSVVTLLIMGVVTFVVIMPIGGELFKGMSWLFLNLNDNPLGAAILAGLFLISVVFGIHQGFVPVYFALMEAQGFNSLFPILAMAGGGQVGASLALYFKAKKDAVLRTQVKGAIIPGILGIGEPLIYGVTLPRVKPFVTACIGGAAGGFFIGLVSYLGLPVGLNTVFGPSGIVAIPLMTSHSGIFAGMAVFVVGLLISYVVGFLATYFFGSKDVDLS

SEQ ID NO: 79500 - DNA, 20 bp, Artificial sequence
  primer
atggccaaagagatcagcag

SEQ ID NO: 79501 - DNA, 25 bp, Artificial sequence
  primer
ttagtccagattgacgttacggcag

SEQ ID NO: 79502 - protein, 544 aa, Artificial sequence
  consensus sequence
  Variant (3)..(4): Xaa in position 3 to 4 is any amino acid
  Variant (6)..(11): Xaa in position 6 to 11 is any amino acid
  Variant (13)..(13): Xaa in position 13 is any amino acid
  Variant (16)..(16): Xaa in position 16 is any amino acid
  Variant (18)..(34): Xaa in position 18 to 34 is any amino acid
  Variant (35)..(35): Xaa in position 35 is any or no amino acid
  Variant (38)..(38): Xaa in position 38 is any amino acid
  Variant (40)..(46): Xaa in position 40 to 46 is any amino acid
  Variant (47)..(47): Xaa in position 47 is any or no amino acid
  Variant (49)..(51): Xaa in position 49 to 51 is any amino acid
  Variant (53)..(53): Xaa in position 53 is any amino acid
  Variant (55)..(93): Xaa in position 55 to 93 is any amino acid
  Variant (94)..(150): Xaa in position 94 to 150 is any or no amino acid
  Variant (153)..(153): Xaa in position 153 is any amino acid
  Variant (155)..(155): Xaa in position 155 is any amino acid
  Variant (158)..(162): Xaa in position 158 to 162 is any amino acid
  Variant (164)..(166): Xaa in position 164 to 166 is any amino acid
  Variant (168)..(192): Xaa in position 168 to 192 is any amino acid
  Variant (193)..(205): Xaa in position 193 to 205 is any or no amino acid
  Variant (207)..(208): Xaa in position 207 to 208 is any amino acid
  Variant (210)..(213): Xaa in position 210 to 213 is any amino acid
  Variant (215)..(220): Xaa in position 215 to 220 is any amino acid
  Variant (224)..(227): Xaa in position 224 to 227 is any amino acid
  Variant (229)..(254): Xaa in position 229 to 254 is any amino acid
  Variant (255)..(292): Xaa in position 255 to 292 is any or no amino acid
  Variant (294)..(297): Xaa in position 294 to 297 is any amino acid
  Variant (299)..(300): Xaa in position 299 to 300 is any amino acid
  Variant (302)..(308): Xaa in position 302 to 308 is any amino acid
  Variant (310)..(316): Xaa in position 310 to 316 is any amino acid
  Variant (318)..(324): Xaa in position 318 to 324 is any amino acid
  Variant (326)..(342): Xaa in position 326 to 342 is any amino acid
  Variant (344)..(376): Xaa in position 344 to 376 is any amino acid
  Variant (377)..(382): Xaa in position 377 to 382 is any or no amino acid
  Variant (384)..(385): Xaa in position 384 to 385 is any amino acid
  Variant (387)..(387): Xaa in position 387 is any amino acid
  Variant (389)..(402): Xaa in position 389 to 402 is any amino acid
  Variant (403)..(405): Xaa in position 403 to 405 is any or no amino acid
  Variant (407)..(407): Xaa in position 407 is any amino acid
  Variant (408)..(409): Xaa in position 408 to 409 is any or no amino acid
  Variant (411)..(411): Xaa in position 411 is any amino acid
  Variant (413)..(414): Xaa in position 413 to 414 is any amino acid
  Variant (417)..(420): Xaa in position 417 to 420 is any amino acid
  Variant (422)..(422): Xaa in position 422 is any amino acid
  Variant (423)..(424): Xaa in position 423 to 424 is any or no amino acid
  Variant (427)..(428): Xaa in position 427 to 428 is any amino acid
  Variant (430)..(451): Xaa in position 430 to 451 is any amino acid
  Variant (452)..(452): Xaa in position 452 is any or no amino acid
  Variant (456)..(456): Xaa in position 456 is any amino acid
  Variant (459)..(461): Xaa in position 459 to 461 is any amino acid
  Variant (464)..(464): Xaa in position 464 is any amino acid
  Variant (466)..(469): Xaa in position 466 to 469 is any amino acid
  Variant (472)..(473): Xaa in position 472 to 473 is any amino acid
  Variant (475)..(476): Xaa in position 475 to 476 is any amino acid
  Variant (478)..(480): Xaa in position 478 to 480 is any amino acid
  Variant (483)..(495): Xaa in position 483 to 495 is any amino acid
  Variant (496)..(501): Xaa in position 496 to 501 is any or no amino acid
  Variant (503)..(504): Xaa in position 503 to 504 is any amino acid
  Variant (506)..(522): Xaa in position 506 to 522 is any amino acid
  Variant (523)..(531): Xaa in position 523 to 531 is any or no amino acid
  Variant (533)..(536): Xaa in position 533 to 536 is any amino acid
  Variant (537)..(540): Xaa in position 537 to 540 is any or no amino acid
  Variant (542)..(543): Xaa in position 542 to 543 is any amino acid
GGXXNXXXXXXCXTRXRXXXXXXXXXXXXXXXXXXGVXGXXXXXXXXQXXXGXGXXXXXXXXXXXXXXXXXXXXXXXXXXXXXXXXXXXXXXXXXXXXXXXXXXXXXXXXXXXXXXXXXXXXXXXXXXXXXXXXXXXXXXXXXXXXXXXXIFXPXIPXXXXXGXXXGXXXXXXXXXXXXXXXXXXXXXXXXXXXXXXXXXXXXXXFXXLXXXXGXXXXXXFGGXXXXGXXXXXXXXXXXXXXXXXXXXXXXXXXXXXXXXXXXXXXXXXXXXXXXXXXXXXXXXXXXXXXXXGXXXXVXXAXXXXXXXEXXXXXXXPXXXXXXXTXXXXXXXXXXXXXXXXXPXXXXXXXXXXXXXXXXXXXXXXXXXXXXXXXXXXXXXXXVXXGXHXXXXXXXXXXXXXXXXXGXXXLXPXXAMXXXXQXXXGAXXAXXXXXXXXXXXXXXXXXXXXXXXLGIXEPXXXGVXLXXXXPFXXAXXGXXXGGXXXXXXXXXXXXXXXXXXXGXXGXXXXXXXXXXXXXXXXXXXXXXXXXXGXXXXXXXXFXXT

SEQ ID NO: 79503 - protein, 20 aa, Artificial sequence
  protein pattern
  Variant (2)..(3): Xaa in position 2 to 3 is any amino acid
  Variant (4)..(6): Xaa in position 4 to 6 is any or no amino acid
  Variant (8)..(8): Xaa in position 8 is any or no amino acid
  Variant (10)..(10): Xaa in position 10 is Ile or Val
  Variant (11)..(11): Xaa in position 11 is Gly, Ser or Thr
  Variant (13)..(13): Xaa in position 13 is Ala or Pro
  Variant (14)..(14): Xaa in position 14 is Ala or Leu
  Variant (15)..(15): Xaa in position 15 is Ile, Leu or Met
  Variant (16)..(16): Xaa in position 16 is Phe or Tyr
  Variant (18)..(18): Xaa in position 18 is Ile or Val
  Variant (19)..(19): Xaa in position 19 is Asn, Ser or Thr
  Variant (20)..(20): Xaa in position 20 is Ile or Leu
PXXXXXLXGXXEXXXXGXXX

SEQ ID NO: 79504 - protein, 28 aa, Artificial sequence
  protein pattern
  Variant (2)..(2): Xaa in position 2 is any or no amino acid
  Variant (4)..(5): Xaa in position 4 to 5 is any or no amino acid
  Variant (7)..(7): Xaa in position 7 is Ile or Val
  Variant (8)..(12): Xaa in position 8 to 12 is any amino acid
  Variant (14)..(14): Xaa in position 14 is any amino acid
  Variant (17)..(17): Xaa in position 17 is Leu or Val
  Variant (19)..(19): Xaa in position 19 is Phe, Ile or Leu
  Variant (20)..(22): Xaa in position 20 to 22 is any amino acid
  Variant (23)..(23): Xaa in position 23 is Asp, Glu, Asn, Arg or Ser
  Variant (24)..(24): Xaa in position 24 is any amino acid
  Variant (25)..(25): Xaa in position 25 is Ala, Asp, Glu, Gly, Asn, Gln or Ser
  Variant (26)..(27): Xaa in position 26 to 27 is any amino acid
  Variant (28)..(28): Xaa in position 28 is Asp, Asn or Ser
GXGXXNXXXXXXCXTRXRXXXXXXXXXX

SEQ ID NO: 79505 - protein, 18 aa, Artificial sequence
  protein pattern
  Variant (2)..(2): Xaa in position 2 is Ile or Val
  Variant (3)..(3): Xaa in position 3 is any amino acid
  Variant (4)..(4): Xaa in position 4 is Ala or Ser
  Variant (5)..(5): Xaa in position 5 is any amino acid
  Variant (6)..(6): Xaa in position 6 is Ala, Gly or Ser
  Variant (7)..(7): Xaa in position 7 is Gly, Asn or Val
  Variant (8)..(8): Xaa in position 8 is any amino acid
  Variant (9)..(9): Xaa in position 9 is Ala, Gly or Ser
  Variant (11)..(11): Xaa in position 11 is any or no amino acid
  Variant (13)..(13): Xaa in position 13 is any or no amino acid
  Variant (15)..(15): Xaa in position 15 is Ala, Cys, Gly or Ser
  Variant (16)..(16): Xaa in position 16 is Phe, Ile, Leu or Met
  Variant (18)..(18): Xaa in position 18 is Ile, Leu or Val
PXXXXXXXXQXGXAXXAX

SEQ ID NO: 79506 - protein, 25 aa, Artificial sequence
  protein pattern
  Variant (2)..(6): Xaa in position 2 to 6 is any amino acid
  Variant (7)..(7): Xaa in position 7 is any or no amino acid
  Variant (9)..(9): Xaa in position 9 is Ile, Met or Val
  Variant (10)..(10): Xaa in position 10 is any amino acid
  Variant (12)..(12): Xaa in position 12 is Ile, Leu, Met or Val
  Variant (14)..(15): Xaa in position 14 to 15 is any amino acid
  Variant (16)..(16): Xaa in position 16 is Phe or Leu
  Variant (17)..(17): Xaa in position 17 is any amino acid
  Variant (18)..(18): Xaa in position 18 is Ala or Pro
  Variant (19)..(19): Xaa in position 19 is Ile or Val
  Variant (20)..(21): Xaa in position 20 to 21 is any amino acid
  Variant (22)..(22): Xaa in position 22 is Ala, Glu, Gly or Gln
  Variant (23)..(23): Xaa in position 23 is Phe, Leu or Met
  Variant (24)..(24): Xaa in position 24 is Ile, Leu or Met
  Variant (25)..(25): Xaa in position 25 is Ala, Asp, Glu, Gly, Asn, Gln or Ser
GXXXXXXVXXGXHXXXXXXXXXXXX

SEQ ID NO: 79507 - protein, 16 aa, Artificial sequence
  protein pattern
  Variant (2)..(3): Xaa in position 2 to 3 is any amino acid
  Variant (4)..(4): Xaa in position 4 is any or no amino acid
  Variant (6)..(7): Xaa in position 6 to 7 is any amino acid
  Variant (8)..(8): Xaa in position 8 is any or no amino acid
  Variant (11)..(11): Xaa in position 11 is Ala or Gly
  Variant (12)..(12): Xaa in position 12 is Asn, Ser or Thr
  Variant (13)..(13): Xaa in position 13 is Ala, Gly or Pro
  Variant (14)..(15): Xaa in position 14 to 15 is any amino acid
GXXXAXXXFGXXXXXG

SEQ ID NO: 79508 - protein, 21 aa, Artificial sequence
  protein pattern
  Variant (2)..(4): Xaa in position 2 to 4 is any amino acid
  Variant (5)..(7): Xaa in position 5 to 7 is any or no amino acid
  Variant (9)..(9): Xaa in position 9 is any amino acid
  Variant (11)..(11): Xaa in position 11 is Ile, Leu or Met
  Variant (14)..(14): Xaa in position 14 is Ala, Gly or Val
  Variant (15)..(15): Xaa in position 15 is Phe, Ile or Leu
  Variant (16)..(16): Xaa in position 16 is Ile or Val
  Variant (17)..(17): Xaa in position 17 is Ala or Gly
  Variant (18)..(18): Xaa in position 18 is Ala, Cys, Gly or Ser
  Variant (20)..(20): Xaa in position 20 is Ile, Leu or Val
  Variant (21)..(21): Xaa in position 21 is Ile or Leu
LXXXXXXFXPXIPXXXXXGXX

SEQ ID NO: 79509 - DNA, 2019 bp, Escherichia coli
  CDS (1)..(2019): transl_table=11
atggatgccctgcaattattaacctggtcgctgattctctatctgtttgctagtctggcttcgctgtttttactcggtctggacagactggctattaagctttccggcatcacatcgctggtgggcggcgtgattggcatcatcagcggaattacgcaattacatgctggtgtaactttagtcgcccgttttgcccccccttttgaatttgccgatttaaccctgcgaatggatagcctctcggcatttatggtgctggttatctccttgctggtggtggtttgttctctctattcattgacttatatgcgcgaatacgagggcaaaggcgcggcggcgatgggcttctttatgaatattttcatcgcatcgatggttgccctgctggtgatggacaacgctttttggttcatcgtgctgtttgaaatgatgtcgctgtcttcctggtttctggtcattgccaggcaggataaaacgtcgatcaacgctggcatgctctacttttttatcgcccacgccggatcggtgctgataatgatcgccttcttgctgatggggcgcgaaagcggcagcctcgattttgccagtttccgcacgctttcactttctccggggctggcgtcggcggtgttcctgctggcctttttcggttttggcgcgaaagccgggatgatgccgttgcacagctggttgccgcgcgctcaccctgccgcaccatcgcacgcttcggcgttgatgtctggcgtaatggtcaaaataggtattttcggcatcctgaaagtagcgatggatctgctggcgcaaacgggtttgcctctgtggtggggcattctggtgatggcgatcggcgcaatctccgcgctcctgggcgtgctatatgcgctggcggaacaggatatcaaacggctgctggcctggagtaccgtcgaaaacgtcggcattattttgctggcagtcggtgtggcgatggtcggtctgtcactgcacgacccgctgctcaccgtggttggactgctcggcgcactgtttcatctgctcaaccatgcgctgttcaaagggctgctatttctcggcgcgggagcgattatttcgcgtttgcatacccacgacatggaaaaaatgggggcactagcgaaacggatgccgtggacagccgcagcatgcctgattggttgcctcgcgatatcagccattcctccgctgaatggttttatcagcgaatggtacacctggcagtcgctgttctcactaagtcgtgtggaagccgtagcgctacaacttgcgggtcctattgctatggtaatgctggcagtcactggtgggctggcagtaatgtgcttcgtaaaaatgtacggtattactttctgtggtgcgccgcgcagtacacacgctgaagaggcacaggaagtgccaaatacgatgatcgtcgccatgctactgctcgcggcactctgcgtattaattgcgcttagtgccagttggctggcaccgaagataatgcatattgcccatgcgtttaccaatacccctcccgccactgtcgccagcggaatagcacttgtacccggcacgtttcatacacaggtcaccccctcattactgttgctgttactactggcgatgcctttgctgcctggcctttactggctgtggtgtcgttcgcgccgcgcagcgtttcgtcgcacaggagatgcctgggcatgcggctacggctgggaaaatgcgatggccccgtcaggcaatggcgtgatgcagccgctgcgtgtggtcttttctgcgctatttcgtctacgacaacagctcgaccctacgctgaggctaaataaaggtcttgcgcacgtcaccgccagggctcagagcacagaacccttctgggatgagcgggtgatccgccccatcgtgagcgccacccaacggctggccaaagaaatacagcatctgcaaagcggcgactttcgtctctattgcctgtatgtggtcgccgcactggttgtgctgctaatcgctattgccgtctaa

SEQ ID NO: 79510 - protein, 672 aa, Escherichia coli
MDALQLLTWSLILYLFASLASLFLLGLDRLAIKLSGITSLVGGVIGIISGITQLHAGVTLVARFAPPFEFADLTLRMDSLSAFMVLVISLLVVVCSLYSLTYMREYEGKGAAAMGFFMNIFIASMVALLVMDNAFWFIVLFEMMSLSSWFLVIARQDKTSINAGMLYFFIAHAGSVLIMIAFLLMGRESGSLDFASFRTLSLSPGLASAVFLLAFFGFGAKAGMMPLHSWLPRAHPAAPSHASALMSGVMVKIGIFGILKVAMDLLAQTGLPLWWGILVMAIGAISALLGVLYALAEQDIKRLLAWSTVENVGIILLAVGVAMVGLSLHDPLLTVVGLLGALFHLLNHALFKGLLFLGAGAIISRLHTHDMEKMGALAKRMPWTAAACLIGCLAISAIPPLNGFISEWYTWQSLFSLSRVEAVALQLAGPIAMVMLAVTGGLAVMCFVKMYGITFCGAPRSTHAEEAQEVPNTMIVAMLLLAALCVLIALSASWLAPKIMHIAHAFTNTPPATVASGIALVPGTFHTQVTPSLLLLLLLAMPLLPGLYWLWCRSRRAAFRRTGDAWACGYGWENAMAPSGNGVMQPLRVVFSALFRLRQQLDPTLRLNKGLAHVTARAQSTEPFWDERVIRPIVSATQRLAKEIQHLQSGDFRLYCLYVVAALVVLLIAIAV

SEQ ID NO: 79511 - DNA, 1917 bp, Arbacia lixula
  CDS (1)..(1917): transl_table=9
atggttataagcccttctacattacttgtttcaataactctcagtattatttgtttgatagtaagaatcctttacacttctaagtcatttgtagctcagcgaaattttttaactagcggtaaaatagccttttcaggagcaagcttaaatataacttccaatgggagagctgtttactcttggacaaaaggacccttttctataaatattcttaagtttctagcctttctttcgttaataaaattgtttttgtttgtcggattagaatttcaagaaacaaacgtaactttctctatttgactaagaaatacagctgctaaagtctcattaagcattttatttgaccactattttatagtttttttgaccgttgcattggttgttacctgatcaataatggaattttctcattattatatggaagaagatcctaaaaagaaagtatttttcctcttattaacaatcttcctattaaaaatgttaatcctcacttgctctaaaagactattcttactatttttaggatgagaaggagttggttttttatctttccttcttataagatgatgaaccacccggaaagatgctagaagatcagctttagctgcagtattatacaaccggataggggatattggcctcattactttcatggctttatctatcctctccttcaaatcttgaaaaatacaagagatattgtttatttcatctaattatacctctttgactccttatatcttatttggtttaatactagctgccgctggaaagtcagctcaattcgggctacacccatggttgccagctgccatggaaggccccaccccagtctctgccctacttcacagttctactatggtagtcgctggagtcttcctcttaactcgaacaagaagcttatttactctaagaccattatttcaaacagttatttttttgttaggaggaataacagccctgtttgctgcatcaaccgctattgcacagcacgatataaagaagatagttgcttactccactacaagacaactaggtttaatggtaacttctatagggataggacaacctatattagcattcttccatatctgtacacatgcctttttcaaggcaatgttatttttatgttcaggaagtatcattcatagccttaaagacgaacaagacctacggaagatgtcaggactaagtagtctcctaccagtaacttcagcttgcttgggtttaggaagactagctttaatgggtacccccttcctagcaggcttttattcgaaggatctcatactagaagcaaccggagcaagcctgttaaaaacactgggccttacaatgagattggtagcaacactactcaccggcacctatagatttcgaattgtctttttctgtttttcttctaacccatcaactaatcgcctttcgccaataggagaagagaaagttaaattaggaaaagccttaatgcgactctctctagggaccgttcttagtgggtggttttttgctaactttgtatttttggccccttcgtttaaagtcaaatgcaacgtaaaggcatttcccttaatagtgacaattcttgggaccgctctcctattcatatttttaacatttctttctaccatagtatttaactatacctcatataaagctttatcagcacaatgattctttgttaaaataacccaccctattatcttgttatcttcattcttttcttctctatttctcataaaccgttcactagatcgaggatgacaagaaaaagtaggcccacaaggggtttcaaggacctccatgagtatatccaaggcctatcaattcacccaaacggggctaataaagaaatacattttttcttcaatcataactctaatacttatattagttggggttgtaatttttttgtaa

SEQ ID NO: 79512 - protein, 638 aa, Arbacia lixula
MVISPSTLLVSITLSIICLIVSILYTSKSFVAQRNFLTSGNIAFSGASLNITSNGSAVYSWTNGPFSINILKFLAFLSLINLFLFVGLEFQETNVTFSIWLSNTAANVSLSILFDHYFIVFLTVALVVTWSIMEFSHYYMEEDPNKNVFFLLLTIFLLNMLILTCSNSLFLLFLGWEGVGFLSFLLISWWTTRNDASSSALAAVLYNRIGDIGLITFMALSILSFNSWNIQEILFISSNYTSLTPYILFGLILAAAGKSAQFGLHPWLPAAMEGPTPVSALLHSSTMVVAGVFLLTRTSSLFTLSPLFQTVIFLLGGITALFAASTAIAQHDIKKIVAYSTTSQLGLMVTSIGIGQPILAFFHICTHAFFKAMLFLCSGSIIHSLNDEQDLRKMSGLSSLLPVTSACLGLGSLALMGTPFLAGFYSKDLILEATGASLLNTLGLTMSLVATLLTGTYSFRIVFFCFSSNPSTNRLSPIGEENVNLGNALMRLSLGTVLSGWFFANFVFLAPSFNVNCNVKAFPLIVTILGTALLFIFLTFLSTIVFNYTSYNALSAQWFFVNITHPIILLSSFFSSLFLINRSLDRGWQENVGPQGVSSTSMSISKAYQFTQTGLIKNYIFSSIITLILILVGVVIFL

SEQ ID NO: 79513 - DNA, 1725 bp, Terebratulina retusa
  CDS (1)..(1725): transl_table=5
atgaaatcccccctcaatctatctaaaagagttaccgttaataaggtctactcaatactcttaattctgtttgctcttatccttctccccttaagcctaagaaaattcctttgaaagtcctcgctactagaatgatcactaataaaaataggaccggcatccattatcctccccctgattctagacaccaaatccattttatttgctgaagtagtcataataatttcaagaagagtactctgatattcctactactacatagacacagacaatactcctcctcgattcactttattagtcgtcctcttcgttcttagaataagtctcctaatctttattcctagacttattgccctaatcctggggtgagacgggctaggcctagtctccttttgcttggttatttactaccaaaataaaaaatcccttgccgcaggggttatcacagccctaataaatcgagtcggagatgcgtgtcttattgccgccatagctctctgtcttaatctctcccactgaaacctcataagaataaatcaagttcccagacttgctcaagcactcctttttctagccgcaataacaaaaagggctcaaatacccttctcagcctggctccccgcagccatagctgcccccacccccgtgtcagcactagttcattcctcaaccctcgtaaccgcgggagtatacattctaatccgatttttcccatttctaacaacttcccaaacattcaaaacatcaaccctccttctaggcctcctaacagccagtatagcaaggctagccgccatcaaagaaaacgacctaaaaaaagtaattgccctatctaccctcagacagttaggtctcatattttccgccctatttcttatatccccaataatctgcctatttcacctcctcactcatgccctattcaaggcccttctatttctagctgcaggaaatattatccacctccattctagaacccaagatatccgactagtaggacacctaagaagctcactccccaccacatccgcggccataaatattgctaattttgctctaataggaaccccattcctagctgctttctactccaaggatctaattatccaagctacggaactctctctaattccagggcccattctttactgatttctcgcctctctagccttaacggctgcatactctttacgcctgagattccttatgctctgatccaggtataaccaaccccccaccagaaatgttaccgactccaacaaaaatgtatactccccaataacaaccctgtccatcggggccattgttgggggggcaattatacaatgatctctgagagaaaactttagccccccaacctccccaatattattaacggtcagcccctcaattcccttaatcagagggctaatccttggtgctcttcttgttctattttcctactcaaaccccccatcaaaagcccccatagccttcttcctaacctcaatatgacacctcaaagatctaacctccctccccatcaacctctccagactaatcctcagaaacaattctaaaaacctcttagatcatgggtgaaacgaaattataacagccaaaggaacccaaaaaactctcacagaaacctccaacccaagatcctcaacagaaaaaagacccctcccatctatccttctaacaaccggagcagtaatattaattccaataatcctccagctgtaa

SEQ ID NO: 79514 - protein, 574 aa, Terebratulina retusa
MKSPLNLSKSVTVNKVYSMLLILFALILLPLSLSKFLWKSSLLEWSLMKMGPASIILPLILDTKSILFAEVVMMISSSVLWYSYYYMDTDNTPPRFTLLVVLFVLSMSLLIFIPSLIALILGWDGLGLVSFCLVIYYQNKKSLAAGVITALMNRVGDACLIAAMALCLNLSHWNLMSMNQVPSLAQALLFLAAMTKSAQMPFSAWLPAAMAAPTPVSALVHSSTLVTAGVYILIRFFPFLTTSQTFKTSTLLLGLLTASMASLAAIKENDLKKVIALSTLSQLGLMFSALFLMSPMICLFHLLTHALFKALLFLAAGNIIHLHSSTQDIRLVGHLSSSLPTTSAAMNIANFALMGTPFLAAFYSKDLIIQATELSLIPGPILYWFLASLALTAAYSLRLSFLMLWSSYNQPPTSNVTDSNKNVYSPMTTLSIGAIVGGAIMQWSLSENFSPPTSPMLLTVSPSIPLISGLILGALLVLFSYSNPPSKAPMAFFLTSMWHLKDLTSLPINLSSLILSNNSKNLLDHGWNEIMTAKGTQKTLTETSNPSSSTEKSPLPSILLTTGAVMLIPMILQL

SEQ ID NO: 79515 - DNA, 1713 bp, Pagurus longicarpus
  CDS (1)..(1713): transl_table=5
attagtttaagaagaatattatttttactagtagcgtctagtttttctattttaatatctttgttttgtattttatttgagaagtgttatgttgtagagtgggagattttatctattaattctaattctattgtagctacatatattttcgattgaatttctttaatatttttagggtttgttttattgatttcttctatggttattttttataggggagattatataagtggtgactataatattaatcgttttatttatttagtcttagcttttgtattctctatggccatacttattgttagtcctaatttaattagaattttattagggtgagatgggttaggtttagtttcttatgctcttgttatttattatcaaaatgaaaaaagagcaaatgctggtatattaactgtactttctaatcgaattggagatgttgctattttattaagaattggtctgatatttaaacttgggggttgaaattttatttattatacctattatttaagtgatatagatagtttagttttgaaacttttagttatactagctgctataactaaaagtgctcagattcctttctcggcatgactaccagcggctatggccgctcctactcctgtttctgctttagttcattcttctactctagttactgctggtgtttatcttataattcgatttaggccatctttaatagggtctggtgtgtctactttacttttacttatttcttgtttaactatgtttatgtctgggctaggagcaaattttgagtatgatttgaagaaaattattgctttatctactcttagtcagttgggtgttatattgagggttttatccttaggtttttctgtattagcattttttcatttattaactcatgctttatttaaagctctgttgtttatgtgtgctggagtagtaattcataatgttaaggagtttcaagatattcgttttataggaagactttgtagaaaaatacctttgacaagaatgtgtataaatttagctaatttggctttatgtggaacaccatttttagctgggttttattctaaagatttaattttagaaatagcttttataagatgaattaatttagtgtgttttattttatatgtggtgtctactagattaacggtttgttatacatttcgtctaatttattatagattaacaggacttcataatttaagttcttatagggctattaatgatagttctgttattataacaagtcctataattgtattaagattgggggcaatttttgggggtgctggcttatcttgaattatttttcctgagagttatataatttgtataactttatctatgaaattactaacattgtttattaggatccttggtgcagttttaggttatatatttaatcttataaatgttaattactctttaaagtctttaaatatatatggcatggtgttatttataggttcaatatgattcataccatttatatctacttttaatttttctaaaaatagtttaactatggggacaagttattataaaatttgtgataaaggttgaagagagtctttgggaggacaaggcttatttagtacggtgatagcattttctttacatggtcaaattttccaggataatgggattaaagttttcatgaagatatttttagttttatctattactttactcttatttattatttaa

SEQ ID NO: 79516 - protein, 570 aa, Pagurus longicarpus
MSLSSMLFLLVASSFSILMSLFCILFEKCYVVEWEILSINSNSIVATYIFDWISLMFLGFVLLISSMVIFYSGDYMSGDYNINRFIYLVLAFVFSMAMLIVSPNLISILLGWDGLGLVSYALVIYYQNEKSANAGMLTVLSNRIGDVAILLSIGLMFKLGGWNFIYYTYYLSDMDSLVLKLLVMLAAMTKSAQIPFSAWLPAAMAAPTPVSALVHSSTLVTAGVYLMIRFSPSLMGSGVSTLLLLISCLTMFMSGLGANFEYDLKKIIALSTLSQLGVMLSVLSLGFSVLAFFHLLTHALFKALLFMCAGVVIHNVKEFQDIRFMGSLCSKMPLTSMCMNLANLALCGTPFLAGFYSKDLILEMAFMSWINLVCFILYVVSTSLTVCYTFRLIYYSLTGLHNLSSYSAINDSSVIMTSPMIVLSLGAIFGGAGLSWIIFPESYMICMTLSMKLLTLFISILGAVLGYMFNLMNVNYSLKSLNMYGMVLFMGSMWFMPFMSTFNFSKNSLTMGTSYYKICDKGWSESLGGQGLFSTVMAFSLHGQIFQDNGIKVFMKMFLVLSITLLLFII

SEQ ID NO: 79517 - DNA, 2019 bp, Escherichia coli O157:H7 EDL933
  CDS (1)..(2019): transl_table=11
  misc_feature (319)..(319): s is g or c
  misc_feature (367)..(367): s is g or c
  misc_feature (372)..(372): s is g or c
  misc_feature (1631)..(1631): y is t or c
  misc_feature (1642)..(1642): k is g or t
atggatgccctgcaattattaacctggtcgctgatcctctatctgtttgccagtctggcttcgctgtttttactcggtctggacagactggctattaagctttccggcatcacatcgctggtgggcggcgtgattggcatcatcagcggaattacgcaattacatgaaggcgtaactttagttgcccgttttgccaccccttttgactttgccgatttaaccctgcgaatggatagcctctcggcatttatggtgctggttatctccttgctggtggtggtttgttcgctctattcattgacttatatgcgcgaatacsagggcaaaggcgcggcggcgatgggcttctttatgaatattttcatcscatcsatggttgccctgctggtgatggacaacgctttttggttcatcgtgctgtttgaaatgatgtcgctgtcttcctggtttctggtcattgccaggcaggataaaacgtcgatcaacgctggcatgctctacttttttatcgcccacgccggatcggtgctgattatgatcgccttcttgctgatggggcgcgaaagcggcagcctagattttgccagtttccgcacgctttcactttctccggggctggcgtcggcggtgttcctgctggcctttttcggttttggcgcgaaagccgggatgatgccgttgcacagctggttgccgcgcgctcaccctgccgcaccatcgcacgcttcggcgttgatgtctggcgtaatggtcaaaatcggtattttcggcatcctgaaagtggcgatggatctgctggcgcaaacgggtttgccgctgtggtggggcattctggtgatggcgatcggcgcaatctccgcgctcctgggcgtgctgtatgcgctggcggaacaggatatcaaacggctgctggcctggagtaccgtcgaaaacgtcggcattattttgctggcagtcggtgtggcgatggtcggtctgtcactacacgacccgctgctcaccgtggttggactgctcggcgcactgtttcatctgctcaaccatgcgctgttcaaagggctgctatttctcggcgcgggcgcgattatttcgcgtttgcatacccacgacatggaaaaaatgggggcactggcgaaacggatgccgtggacagccgcagcatgcctgattggttgcctcgcgatatcagcccttcctccgctgaatggttttatcagcgaatggtacacctggcagtcgctgttctcactaagtcgtgtggaagccgtagcgctacaacttgcgggtcctattgctatggtgatgctggcagtcactggtgggctggcagtaatgtgcttcgtcaaaatgtacggtattactttctgtggtgcgccgcgcagtacacacgctgaagaggcacaggaagtgccaaatacgatgatcgtcgccatgctactgctcgcggcactctgcgtattaattgcgcttagtgccagttggctggcaccgaagataatgcatattgcccatgcgtttaccaatacccctcccgtcactgtcgccagcggaatagcacttgtacccggcacgtttcatacacaggtcaccccctcattactgttgctgttactactggcgatgcctttgcygcctggccttkactggctgtggtgtcgttcgcgccgcgcagcgtttcgtcgcacaggagatgcctgggcatgcggctacggctgggaaaatgcgatggccccgtcaggcaatggcgtgatgcagccgctgcgtgtggtcttctctgcgctatttcgtctacgacaacagctcgaccctacgctgaggctaaataaaggtcttgcgcacgtcaccgccagggctcagagcacagaacccttctgggatgagcgggtgatccgccccatcgtgagcgccacccaacggctggccaaagaaatacagcatctgcaaagcggcgactttcgtctctattgcctgtatgtggtcgccgcactggttgtgctgctaatcgctattgccgtctaa

SEQ ID NO: 79518 - protein, 672 aa, Escherichia coli O157:H7 EDL933
  misc_feature (123)..(123): The Xaa at location 123 stands for Ala, or Pro.
  misc_feature (544)..(544): The Xaa at location 544 stands for Leu, or Pro.
  misc_feature (548)..(548): The Xaa at location 548 stands for Asp, or Tyr.
MDALQLLTWSLILYLFASLASLFLLGLDRLAIKLSGITSLVGGVIGIISGITQLHEGVTLVARFATPFDFADLTLRMDSLSAFMVLVISLLVVVCSLYSLTYMREYZGKGAAAMGFFMNIFIXSMVALLVMDNAFWFIVLFEMMSLSSWFLVIARQDKTSINAGMLYFFIAHAGSVLIMIAFLLMGRESGSLDFASFRTLSLSPGLASAVFLLAFFGFGAKAGMMPLHSWLPRAHPAAPSHASALMSGVMVKIGIFGILKVAMDLLAQTGLPLWWGILVMAIGAISALLGVLYALAEQDIKRLLAWSTVENVGIILLAVGVAMVGLSLHDPLLTVVGLLGALFHLLNHALFKGLLFLGAGAIISRLHTHDMEKMGALAKRMPWTAAACLIGCLAISALPPLNGFISEWYTWQSLFSLSRVEAVALQLAGPIAMVMLAVTGGLAVMCFVKMYGITFCGAPRSTHAEEAQEVPNTMIVAMLLLAALCVLIALSASWLAPKIMHIAHAFTNTPPVTVASGIALVPGTFHTQVTPSLLLLLLLAMPLXPGLXWLWCRSRRAAFRRTGDAWACGYGWENAMAPSGNGVMQPLRVVFSALFRLRQQLDPTLRLNKGLAHVTARAQSTEPFWDERVIRPIVSATQRLAKEIQHLQSGDFRLYCLYVVAALVVLLIAIAV

SEQ ID NO: 79519 - DNA, 1827 bp, Escherichia coli O157:H7 EDL933
  CDS (1)..(1827): transl_table=11
  misc_feature (522)..(522): r is g or a
  misc_feature (1034)..(1034): r is g or a
atgagcgcaatttccctgatcaatagcggcgtggcgtggtttgtcgccgccgctgttctggcatttctcttttcttttcaaaaggcgctaagcggctggatagccggaattggcggcgcggttggtagtctgtatacggcagccgcgggcttcactgtactgactggcgcggttggcgtgagcggtgcgctgtcgctggtaagctacgatgtgcaaatctctccgcttaacgcgatttggctgattacgctcggtctgtgcggtctgtttgtcagcctctacaacattgactggcatcgccacgcgcaggtgaagtgcaacggcttgcagatcaatatgttgatggctgccgccgtctgcgccgtcattgccagcaacctcggcatgttcgtggtaatggccgaagtcatggccttgtgtgcggtgttcctcaccagcaacagcaaagagggcaaactgtggtttgcgctggggcgtcttggcactctgctgctggcgattgcttgctggctgctgtggcarcgttacggcacgctggatctgcgcctgctggatatgcgtatgcaacagctgccgctcggttccgatatctggctgctcagtgtgattggctttggcctgctggccgggattattccgctgcacggctgggtgccgcaggcacatgcgaacgcctctgcgccagctgccgcgttgttttctacggtagtcatgaaaattggcctgctgggcattttaaccctgtcactgctgggcggtaatgcaccgctgtggtgggggatcgcgctgctggtgctcggtatgatcaccgcgtttgtcggcggtctgtatgcgttgatggaacataatatccagcgtctactggcttaccacaccctggaaaatatcggcattatcctgctggggctgggcgctggcgtaacgggtatcgcgctcgaacaaccggcgctgattgctcttggcctggtcggtggtctgtaccatctgcttaaccatagcctgttcaaaagcgtactgttcctcggggcggggarcgtctggttccgtaccggtcatcgcgatatcgaaaaactcggtggtattggcaagaaaatgccggttatctccatcgctatgttagtcgggctgatggcaatggctgcactgccgccgctgaacggttttgccggggaatgggttatctatcaatccttcttcaaactgagcaatagtggcgcgtttgttgcccgtctgctggggccgctgctcgctgtgggtctggcaattaccggtgcgctggcggtgatgtgtatggcgaaagtctatggcgtcacgttcctcggcgcgccgcgtaccaaagaagccgaaaacgccacctgtgcaccgctcctgatgagcgtaagcgtagtggcactggcgatttgctgcgtaattggcggtgttgctgcgccgtggctgctgccgatgctctctgctgctgtacctctgccgctggaacctgctaacaccaccgtttctcaaccgatgatcacgttgctgctgattgcctgcccgctgctgccattcatcattatggcgatttgcaaaggcgatcgtttgccatcgcgttcccgcggcgcggcctgggtgtgcggctacgaccatgaaaaatcaatggtaattaccgcccacggttttgccatgccggtgaaacaggcgtttgcgccggtgctgaaactgcgcaaatggctgaatccggtgtcgctggtgccgggctggcagtgcgaaagcagtgcgttgctgttccgccggatggcgctggttgaactggcggtgctggtggtgattattgtttcacgaggagcctga

SEQ ID NO: 79520 - protein, 608 aa, Escherichia coli O157:H7 EDL933
  misc_feature (345)..(345): The Xaa at location 345 stands for Asn, or Ser.
MSAISLINSGVAWFVAAAVLAFLFSFQKALSGWIAGIGGAVGSLYTAAAGFTVLTGAVGVSGALSLVSYDVQISPLNAIWLITLGLCGLFVSLYNIDWHRHAQVKCNGLQINMLMAAAVCAVIASNLGMFVVMAEVMALCAVFLTSNSKEGKLWFALGRLGTLLLAIACWLLWQRYGTLDLRLLDMRMQQLPLGSDIWLLSVIGFGLLAGIIPLHGWVPQAHANASAPAAALFSTVVMKIGLLGILTLSLLGGNAPLWWGIALLVLGMITAFVGGLYALMEHNIQRLLAYHTLENIGIILLGLGAGVTGIALEQPALIALGLVGGLYHLLNHSLFKSVLFLGAGXVWFRTGHRDIEKLGGIGKKMPVISIAMLVGLMAMAALPPLNGFAGEWVIYQSFFKLSNSGAFVARLLGPLLAVGLAITGALAVMCMAKVYGVTFLGAPRTKEAENATCAPLLMSVSVVALAICCVIGGVAAPWLLPMLSAAVPLPLEPANTTVSQPMITLLLIACPLLPFIIMAICKGDRLPSRSRGAAWVCGYDHEKSMVITAHGFAMPVKQAFAPVLKLRKWLNPVSLVPGWQCESSALLFRRMALVELAVLVVIIVSRGA

SEQ ID NO: 79521 - DNA, 1827 bp, Salmonella typhimurium LT2
  CDS (1)..(1827): transl_table=11
atgagttcactttcactgattactagcggcgtcgcgtggtttgccgccgccgccgttctggcgtttctgttttcgtttcataaagcgctgagcggctggattgccggtatcggcggcgcggtcggcagcctgtgtacggcaggcgcggggttcaccgcgctgaccagcgccgttacggttagcggcgtgatgccgtttaccggccacatgctgcaaattacgccgctgaatgctatctggctgattacgctggggctgtgcggtctgttcgtcagcctgttcaatatcgactggcatcgccatccacaggtaaaagccaacgggctgttaatcaacctgctgatggcggcagccgtctgcgccgtggtcgccagtaatctggggacgatggtggtgatggcggaaatcatggcgctctgcgccgtgttcctcaccggcggtagcaaagagggcaaactgtggtttgcgctgggccgtctcggtacgctgctgctggcaatcgcctgttggctggtgtggcagcgctacggcacgctggatctggggctgctggatcaacgcgctcagcaactgccgctgggctccgatatctggctgctcggcgttatcggttttggtctgctggccgggattatcccgctacacggttgggtgccgcaggcgcacgccaacgccagcgctcccgccgccgcgctgttctcgaccgtggtgatgaaaatcgggttgctgggtatcctcacgctatctctgcttggcggcaatgcgccgctgtggtggggcgtggcgctgttggtgctagggatgatcaccgcctttgtcggcggtctgtacgcgctgatggagcataacattcagcgcctgttggcctatcacacgctggaaaatatcggcatcattttgctcggtctgggcgcaggcgttaccgggattgctctcaatcagccggtactgatcgcgctgggtctgaccggcgggctctatcacctgctgaaccatagcctgttcaaaagcgtgctgtttctgggcgcgggcagcatctggttccgtaccggtcatcgcgatatcgaaaaactgggcggtattggtaaacggatgccggttatttctatcgccatgctggtcggtctgatggcgatggcggcgctgccgccgctgaacggctttgccggcgagtgggtgatttatcagtccttcttcaaactgggcaacagcggtgcgtttgttggtcgtctgttaggaccgctgctggcggttggcctggcgattaccggcgcgctggcggtgatgtgtatggcgaaagtgtatggcgtgacgttccttggcgcgccgcgcacgaaggaagctgaaaatgccagctgcgcgccgatcctgatgggcgtcagcgtggtggcattggcgatttgctgtgtactgggcggggttgccgcgccgtggctgttgccgatgatttccactgcggtaccgttgccgctggaaaccgcgcacaccaccgtatcgcagccgatgatcacgctgctgttggtcgcctgtccgctactgccgttcatcattatggcgatgttcaaaggcaaccgtctgccgtcgcgttctcgcgcggcggcctgggtgtgcggctacgaccatgagcagtcgatggtgattaccgcgcacggttttgccatgccggtgaaagaggcctttgccccggtactcaaactgcgtaagtggctcaacccggtatcgttgattccgggctggcagaacgcggcggccgcggtgctgttccgtcgtctggcgctgattgagctggcggtgctggtggtgattgtggtttcacgaggagcctga

SEQ ID NO: 79522 - protein, 608 aa, Salmonella typhimurium LT2
MSSLSLITSGVAWFAAAAVLAFLFSFHKALSGWIAGIGGAVGSLCTAGAGFTALTSAVTVSGVMPFTGHMLQITPLNAIWLITLGLCGLFVSLFNIDWHRHPQVKANGLLINLLMAAAVCAVVASNLGTMVVMAEIMALCAVFLTGGSKEGKLWFALGRLGTLLLAIACWLVWQRYGTLDLGLLDQRAQQLPLGSDIWLLGVIGFGLLAGIIPLHGWVPQAHANASAPAAALFSTVVMKIGLLGILTLSLLGGNAPLWWGVALLVLGMITAFVGGLYALMEHNIQRLLAYHTLENIGIILLGLGAGVTGIALNQPVLIALGLTGGLYHLLNHSLFKSVLFLGAGSIWFRTGHRDIEKLGGIGKRMPVISIAMLVGLMAMAALPPLNGFAGEWVIYQSFFKLGNSGAFVGRLLGPLLAVGLAITGALAVMCMAKVYGVTFLGAPRTKEAENASCAPILMGVSVVALAICCVLGGVAAPWLLPMISTAVPLPLETAHTTVSQPMITLLLVACPLLPFIIMAMFKGNRLPSRSRAAAWVCGYDHEQSMVITAHGFAMPVKEAFAPVLKLRKWLNPVSLIPGWQNAAAAVLFRRLALIELAVLVVIVVSRGA

SEQ ID NO: 79523 - DNA, 1947 bp, Methanosarcina acetivorans C2A
  CDS (1)..(1947): transl_table=11
gtgaatatattgctcgaaaccttagtgtacggcgcaattgccgctcttgtatccggaactgtccttcctctcctgtaccgcagtaaaaacacaagaaagactgcttttggcctttctcttatctcatcaatcctgctcctggtttttgcaggtacggtcctttatacagggaaagagcccgtatttccggccatcggattcctgccgggcctggacttcaccctggctgcagaccggctttcagccgggtttatcctcttaattgcagcagtcgtgcccggagtttcaatatattcggtcgaatatgtagaacacgcaaaaagcgaggacgggaaaaacctgcaggcagccctgacaaatctctttatccttgccatgctgatggtcgtacttgcaggcaatatggtaggcttcctgattttctgggaaataatgtccctttcctcgctcctactggtgctgcataactattcctcggaggagaacaaaaaagccggctttttctacttcgtgatgacaaatatcagcacagcttttctcttcctgggcttcataagcctcttcaggcttacaggctctacggagttcggaccgcttgaatacgctgcaggtgagctgactcttcccttcctctccctttttgtcggctttggggtcaaggcaggacttgtgcctttccacaagtggctgccctatgcccaccctgcagcgccgtcaagtgtctcggccctgatgtccggagttatgctgaaggttgcagtctacggtttcctgcgtttcctgctctcaatctccacgcctgaactctggtggggagtgcttatccttacagcaggcagcctttcagctctcttcggggtaatttacgccctgaaagaaaacgacataaaaaggctccttgcctacagcagcattgaaaacatagggatcattttcacgggaatcgggctatatgtcatctttggggttgaaggacttgaaacccttgccctgttaagccttgtaggagcctgtttccactcctttaaccatgccctcttcaaaagcctgcttttcctctgtgcaggctcggtggttcatgccacaggcacacggaaaatcgaagccctcgggggacttgtaaaaagcatgcctgcgacctcagcccttttcatgataggctcggtctcgattgcagccctgcccccaacaaacggttttgccggcgagctcctgctctaccaggctttcttccagtcctttgccgtaaccgacccccttcttaccgtatttctaataattgccctctcaagctttgctctgaccggagcgctggcagctgcccttttcgtaaaacttttcgggatcacctgccttgccatgccacgttcggaaaagagccgccttgcagaagaagtccggaaacccatgctgataggccccgcagtgccggcagccttctgcatacttggagggcttttctcaaagcagctcctttctcttgcaggctggaagattgagtttccggacctgcttttgctaggatttctactcgggttgatatatgcagcccttttcgtgctgatccgtacccgtacaaaagaaacgaacccttcaaggatcagcgagacctggagatgcggaattccgaccgttgccccttacatggaatacagttctgcaggcttttccgagcctcttgtgatgatcttcaaaagcgtttataggacaaagatcgtgcacagagccgagtacctcgacaggcaggaaagtctcgttaagaatgggaatgtggaaatccgcctggtccgcttctttgaagaatacctttacatccctcctgcacgggcaatcgagggcttttcgaaatacgtttcaaaactgcagaacggaaaacttgacagttacgtcctttacgcctttctggcagtcattgtattgacaatagcaacaggaggctttgtatga

SEQ ID NO: 79524 - protein, 648 aa, Methanosarcina acetivorans C2A
MNILLETLVYGAIAALVSGTVLPLLYRSKNTRKTAFGLSLISSILLLVFAGTVLYTGKEPVFPAIGFLPGLDFTLAADRLSAGFILLIAAVVPGVSIYSVEYVEHAKSEDGKNLQAALTNLFILAMLMVVLAGNMVGFLIFWEIMSLSSLLLVLHNYSSEENKKAGFFYFVMTNISTAFLFLGFISLFRLTGSTEFGPLEYAAGELTLPFLSLFVGFGVKAGLVPFHKWLPYAHPAAPSSVSALMSGVMLKVAVYGFLRFLLSISTPELWWGVLILTAGSLSALFGVIYALKENDIKRLLAYSSIENIGIIFTGIGLYVIFGVEGLETLALLSLVGACFHSFNHALFKSLLFLCAGSVVHATGTRKIEALGGLVKSMPATSALFMIGSVSIAALPPTNGFAGELLLYQAFFQSFAVTDPLLTVFLIIALSSFALTGALAAALFVKLFGITCLAMPRSEKSRLAEEVRKPMLIGPAVPAAFCILGGLFSKQLLSLAGWKIEFPDLLLLGFLLGLIYAALFVLIRTRTKETNPSRISETWRCGIPTVAPYMEYSSAGFSEPLVMIFKSVYRTKIVHRAEYLDRQESLVKNGNVEIRLVRFFEEYLYIPPARAIEGFSKYVSKLQNGKLDSYVLYAFLAVIVLTIATGGFV

SEQ ID NO: 79525 - DNA, 2022 bp, Thermoanaerobacter tengcongensis MB4
  CDS (1)..(2022): transl_table=11
ttgatgactgttcaacagttatttttgttatctattttcttatatgttgtaggagcacttatctctttgggattaaatagggacggcaaaattgcaaattatgtttctggaacaactgctttcttggcaggatgcactggagtcgcttcagctgttccggtccttattgaagggaaaggttttatattggaaggcatggagtttatcccttttgggcgatttacaattaatgttgatcctctttcagcttttatgacattggttatttctctacttagtattgccacaggtgtttattctatttcttatcaggaagagtatattgggaaaggcaccggcgtaatgggttttttaaataatatctttattgtttcaatgattttggtagttactagtgacaacgctttctattttttagttttttgggagctgatgacgctggtttcttatttcctggtttgttttgaacaggaaaacagagaggcaataaaagctggatttgtgtattttgtaatggcccatgttggcacagttttgataatgatttcgtttatattattttatgtttataccggtacttttgattttgccgcttttaggaatgcaaatctttcgcctgttatcaagaatttagcttttcttctggcttttttgggatttggggttaaggcaggcatcgttcccttccatttctggctgcctcaggctcatcctgccgctccttctaatgtttctgctcttatgtctggtgtcatgattaagacagctatttacggcattataagagttggggtggactttttgggggctgctacatggtggtggggccttacggtccttgcctttggggctatttcagcagtttttggagtgctttatgctgttagtgaaaatgaccttaaacgcttgttggcctattccagcatagagaatgtgggaattatcctgatgggagtcggtgcgggaatgatgggaatagccacaggatacgttagtgtaggcatattaggtattctggcggggctttatcatttgataaatcacgctgtcttcaaagggttgctttttcttggggcgggctcggtagtttaccgcctccacacaaggaatatggaggagatgggaggattggccagatatatgccatggactggattgaccttctttataggcgctttgtcgatttccgcccttcctccgctaaatggctttgtaagcaaatggtttacataccatactctgtttgctgtcagcacaaaagggagtgtgctgattagaatggcatttcctctcgccgcagtcgctttagccttaacaggagctttgacgtctctgtgttttgtaaaagcatatggagtgacttttactggaccttttcgaggtggcaatgaattaaagattaaagaggttcctgtgaccatgcttatagggatggggcttttagcaataggctgttttgttttggggcttggcgcgccggttggggctggatatattgcgaatgtggcttcagcgttgctacatgtatcttcacccaaggtaagtgacggtctgtcgatatttccagcaagcagtgagcaggccatgctttctacgccacttgtgcttgtttttgtcgtaggacttgcgatattgcccctattaattattggaacaggtggaaagcgagcaggaaggcgagtggactttgaaccctgggcatgtggctataaatattcatctcgcatggcgtggacatccacagcctttgctcactcactgtacccgcttttcagtccagtatatttgcttaggactgcatttacagaagctggtcgtttcattattttgcttttcaaaaaggcgatggcgtatatatcacagatagagctgatgtgggaacgttatatatactatcctttgcttcatttcatggtctatataggtaaacgtgcacaaactttccagacaggtaatgtccggatgtactgcctgtacataatcctgactcttggggttcttttgatagcgacggtgagatag

SEQ ID NO: 79526 - protein, 673 aa, Thermoanaerobacter tengcongensis MB4
MMTVQQLFLLSIFLYVVGALISLGLNRDGKIANYVSGTTAFLAGCTGVASAVPVLIEGKGFILEGMEFIPFGRFTINVDPLSAFMTLVISLLSIATGVYSISYQEEYIGKGTGVMGFLNNIFIVSMILVVTSDNAFYFLVFWELMTLVSYFLVCFEQENREAIKAGFVYFVMAHVGTVLIMISFILFYVYTGTFDFAAFRNANLSPVIKNLAFLLAFLGFGVKAGIVPFHFWLPQAHPAAPSNVSALMSGVMIKTAIYGIIRVGVDFLGAATWWWGLTVLAFGAISAVFGVLYAVSENDLKRLLAYSSIENVGIILMGVGAGMMGIATGYVSVGILGILAGLYHLINHAVFKGLLFLGAGSVVYRLHTRNMEEMGGLARYMPWTGLTFFIGALSISALPPLNGFVSKWFTYHTLFAVSTKGSVLIRMAFPLAAVALALTGALTSLCFVKAYGVTFTGPFRGGNELKIKEVPVTMLIGMGLLAIGCFVLGLGAPVGAGYIANVASALLHVSSPKVSDGLSIFPASSEQAMLSTPLVLVFVVGLAILPLLIIGTGGKRAGRRVDFEPWACGYKYSSRMAWTSTAFAHSLYPLFSPVYLLRTAFTEAGRFIILLFKKAMAYISQIELMWERYIYYPLLHFMVYIGKRAQTFQTGNVRMYCLYIILTLGVLLIATVR

SEQ ID NO: 79527 - DNA, 1932 bp, Methanosarcina mazei Go1
  CDS (1)..(1932): transl_table=11
ttgctcgaaaccttaatgtatggtgcaatctctgcccttgtattcggaacagtcctccctctcctgtaccgcagtaaaaacataagaaaggcttcttctggtctttctcttctctcatcaatcctgcttctgggctttgcgggcataattctttacaccagaacagagcctgtttttccagttaccggatttcttccgggcgctggttttaccctgagcgcagacaggcttgcagccgggtttatcctgctaatcggagcagtagtgcccggagtttcaatatattcggtagaatacgttgaacacgctaaaagcgaagccagaaaaagccttcaggcatcccttacaaatcttttcatccttgccatgcttatggtcattcttgcaggcaatatggtaagtttcctggttttctgggaaataatgtccctttcctctctcctcctggttctgcatgactactcttccgaggagaataaaaaagccggctttttctactttgtaatgaccaatataagtacggcttttcttttcgtgggcttcataagcctcttcaggctgacgggttctgccgatttcgggcctctggaataccctgcagcagatctggctttacctttcatctttctgttcatcggatttggagtcaaggcagggcttgtccctttccataaatggcttccctatgctcaccctgcagccccttcaagtgtttcagccctgatgtcaggagtcatgctgaaagttgcagtttacggcttcctgcgttttctgctatcggtatctgctcccgaactctggtggggagtgcttatccttacagcaggcagcatttcagcccttttcggggtaatctatgcccttaaagaaaatgacataaaaaggatgctcgcctacagcagcattgaaaacataggaattattttcacaggaatcgggctgtatgcagtatttaaagttgaggggcttgaatcccttgccctcttaagccttgtaggggcctgcttccatgcctttaaccatgctgtcttcaaaagcctgctcttcctctgtgcaggctcagtggtccatgctacaggcacgaggaaaatcgaagcatttggggggcttgtaaaaagcatgcctgtaacctctgcccttttcctgataggttcggtatctattgcagccatgccgccaacaaatggttttgccggcgagctcctgctttatcaggctttcttccagtcttttgccgtaacagatcctctactgaacatatttctgataatcgccctctcaagctttgcccttaccggagcccttgcagctgcccttttcgtaaaacttttcgggatcacctgccttgcaatcccgcgctctgagaagagcaggcttgcagaagaagtccagaaaccaatgcttgtagggcctgcagtgccggcagctttctgtatactgggcgggttgttttcaaagcagcttctatctctcgcaggctggaaaatcgattttccggaccttctcttgctggggattcttctcgggttgatatacacagcccttttcgtaataatccgctcaaaagaaacgggccctgcaaggattagcgagacatggggatgcgggatcccggcccttgcaccttatatggaatacagctctgcaggcttttccgagcctcttgtaatgatcttcaaaagtatttacaggacaaagattgtgaacagacccgagtacttcgacgaaaaggaaagcctctttaagaacggaaaggtggaaatacgcctgctccgcttctttgaagaatacctttacatcccacctgcgcgggcaattgatattttttcaaaatatgtttcaaaactgcagaacggaaaacttgacagttatgtcctttacgcctttcttgcagtgattgtactaattatagcaaccggaggctttgtatga

SEQ ID NO: 79528 - protein, 643 aa, Methanosarcina mazei Go1
MLETLMYGAISALVFGTVLPLLYRSKNIRKASSGLSLLSSILLLGFAGIILYTRTEPVFPVTGFLPGAGFTLSADRLAAGFILLIGAVVPGVSIYSVEYVEHAKSEARKSLQASLTNLFILAMLMVILAGNMVSFLVFWEIMSLSSLLLVLHDYSSEENKKAGFFYFVMTNISTAFLFVGFISLFRLTGSADFGPLEYPAADLALPFIFLFIGFGVKAGLVPFHKWLPYAHPAAPSSVSALMSGVMLKVAVYGFLRFLLSVSAPELWWGVLILTAGSISALFGVIYALKENDIKRMLAYSSIENIGIIFTGIGLYAVFKVEGLESLALLSLVGACFHAFNHAVFKSLLFLCAGSVVHATGTRKIEAFGGLVKSMPVTSALFLIGSVSIAAMPPTNGFAGELLLYQAFFQSFAVTDPLLNIFLIIALSSFALTGALAAALFVKLFGITCLAIPRSEKSRLAEEVQKPMLVGPAVPAAFCILGGLFSKQLLSLAGWKIDFPDLLLLGILLGLIYTALFVIIRSKETGPARISETWGCGIPALAPYMEYSSAGFSEPLVMIFKSIYRTKIVNRPEYFDEKESLFKNGKVEIRLLRFFEEYLYIPPARAIDIFSKYVSKLQNGKLDSYVLYAFLAVIVLIIATGGFV

SEQ ID NO: 79529 - DNA, 1818 bp, Shigella flexneri 2a str. 301
  CDS (1)..(1818): transl_table=11
ttgtcgccgccgctgttctggcatttctcttttcaaaaagcgctaagtggctggatagccggaattggcggcgcggttggtagtctgtatacggcagccgcgggcttcactgtactgactggcgcggttggcgtgagcggtgcgctgtcgctggtaagctacgatgtgcaaatctccccgcttaacgcgatttggctgattaccctcggcctttgcggtctgtttgtcagcctctataacattgactggcatcgccacgcgcaggtgaagtgcaacggcttgcagatcaatatgttgatggctgccgccgtctgcgccgtcatcgccagcaacctcggcatgttcgtggtaatggccgaagtcatggccttgtgtgcggtgttcctcaccagcaacagcaaagagggcaaactgtggtttgcgctgaggcgtcttggcactctgctgctggtgattgcttgctggctgctgtggcagcgttatggcacgctggatctgcgcctgctggatatgcgtatgcaacagctgccgctcggttccgatatctggctgctcggtgtgattggctttggcctgctggctgggattattccgctgcacggctgggtgccgcaggcacatgctaacgcctctgcgccagctgccgcgttgttttctacggtagtcatgaaaattggcctgctgggcatgttaaccctgtcactgctgggcggtaatgcaccgctgtggtgggggatcgcgctgctggtgctcggcatgatcaccgcgttcgtcggtggtctgtatgcgttgatggaacacaacatccagcgcctgctggcttaccacaccctggaaaatatcggcattatcctgctggggctggggctggggctggggctggggctggggctggggctgggcgctggcgtaacgggtatcgcgctcgaacaaccggcgctgattgctcttggcctggtcggtggtctgtaccatctgcttaaccatagcctgttcaaaagcgtactgttcctcggggcggggagcgtctggttccgtaccggtcatcgcgatatcgaaaaactcggtggtattggcaagaaaatgccggttatctccatcgccatgttagtcgggttgatggcaatggctgcgctgccgccactgaacgggtttgccggggaatgggttatctatcaatccttcttcaaactgagcaatagcggcgcgtttgttgcccgtctgctggggccgctgctcgctgtgggtctggcaattaccggtgcgctggcggtgatgtgtatggcgaaagtctatggcgtcacgttcctcggcgcgccgcgtaccaaagaagccgaaaacgccacctgtgcgccgctcctgatgagcgtaagcgtagtggcactggcgatttgctgcgtaattggcggtgttgctgcgccgtggctgctgccgatgctctctgctgctgtacctctgcctctggagcctgctaacaccaccgtttctcaaccaatgatcacattgctgctgattgcctgcccgctgctgccattcatcattatggcgatttgcaaaggcgaccgcctgccgtcacgttcccgcggtgcggcctgggtgtgcggctacgaccatgaaaaatcaatggtgattaccgctcacggttttgccatgccggttaaacaggcgtttgcgccagtgctgaaactgcgcaaatggctgaatccggtgtcgctagtgccgggctggcagtgcgaaggtagtgcgttgctgttccgccggatggcgctggttgaactggcggtactggtggtgattattgtttcacgaggagcctga

SEQ ID NO: 79530 - protein, 605 aa, Shigella flexneri 2a str. 301
MSPPLFWHFSFQKALSGWIAGIGGAVGSLYTAAAGFTVLTGAVGVSGALSLVSYDVQISPLNAIWLITLGLCGLFVSLYNIDWHRHAQVKCNGLQINMLMAAAVCAVIASNLGMFVVMAEVMALCAVFLTSNSKEGKLWFALRRLGTLLLVIACWLLWQRYGTLDLRLLDMRMQQLPLGSDIWLLGVIGFGLLAGIIPLHGWVPQAHANASAPAAALFSTVVMKIGLLGMLTLSLLGGNAPLWWGIALLVLGMITAFVGGLYALMEHNIQRLLAYHTLENIGIILLGLGLGLGLGLGLGLGAGVTGIALEQPALIALGLVGGLYHLLNHSLFKSVLFLGAGSVWFRTGHRDIEKLGGIGKKMPVISIAMLVGLMAMAALPPLNGFAGEWVIYQSFFKLSNSGAFVARLLGPLLAVGLAITGALAVMCMAKVYGVTFLGAPRTKEAENATCAPLLMSVSVVALAICCVIGGVAAPWLLPMLSAAVPLPLEPANTTVSQPMITLLLIACPLLPFIIMAICKGDRLPSRSRGAAWVCGYDHEKSMVITAHGFAMPVKQAFAPVLKLRKWLNPVSLVPGWQCEGSALLFRRMALVELAVLVVIIVSRGA

SEQ ID NO: 79531 - DNA, 1827 bp, Escherichia coli CFT073
  CDS (1)..(1827): transl_table=11
atgagcgcaatttccctgatcaatagcggcgtggcgtggtttgtcgccgccgctgttctggcatttctcttttcttttcaaaaagcgctaagtggctggatagccggaattggcggcgcggtgggtagcctgtatacggcagccgcgggcttcactgtgctgactggcgcggttggcgtgagcggtgcgctgtcgctggtaagctacgatgtgcaaatctctccgcttaacgcgatttggctgattacgctcggtctgtgcggtctgtttgtcagcctctacaacattgactggcatcgccacgcgcaggtgaaatgcaacggcttgcagatcaatatgttgatggctgccgccgtctgtgccgtcatcgccagcaacctcggcatgttcgtggtaatggccgaaatcatggccctgtgtgcggtgttcctcaccagcaacagcaaagagggcaaactgtggtttgcgctggggcgtcttggcactctgctgctggcgattgcctgctggctgctgtggcagcgttacggtacgctggatctgcgcctgctggatatgcgtatgcaacagctgccgctcggttccgatatctggctgctcggtgtgattggctttggcctgctggccgggattattccgctgcacggctgggtgccacaggcacatgccaacgcctctgcgccagctgccgcgctgttttccacggtagtcatgaaaattggcctgctgggcattttaactctgtcactactgggcggtaatgcaccgctgtggtgggggatcgtactgctggtactcggcatgatcaccgcattcgtcggcggtctgtatgcgttgatggaacacaatatccaacgtctgctggcttaccacaccctggaaaatatcggcattatcctgctggggctgggcgctggcgtaacgggtatcgcgctcgaacaaccggcgctgattgcccttggtctggttggtggtctgtaccatctgattaaccatagcctgttcaagagcgtactgttccttggtgcggggagcgtctggttccgtaccggtcatcgcgatatcgaaaaactcggtggtattggcaagaaaatgccggttatctccatcgccatgttagtcgggctgatggcaatggctgcgctgccgccgctgaacggttttgccggggaatgggttatctatcaatccttcttcaaactgagcaatagtggcgcgtttgttgcccgtctgttcgggccgctgctcgccgtgggtctggcaattaccggtgcgctggcggtgatgtgtatggcgaaagtttatggcgttactttcctcggcgcgccgcgtaccaaagaggccgaaaacgccacctgtgcgccgctcctgatgagcgtaagcgtagtggcactggcgatttgctgcgtaattggcggtgttgctgcgccgtggctactgccgatgctctctgctgctgtacctctgccgctggagcctgctaacaccaccgtttctcaaccgatgatcacgttgctgctgattgcctgcccgctgctgccgttcatcattatggcgatttgcaaaggcgatcgtttgccgtcgcgttcccgcggcgcggcctgggtgtgcggctacgatcatgaaaaatcaatggtgattaccgctcacggttttgccatgccggtgaaacaggcgtttgcgccggtgctgaaactacgcaaatggttgaatccggtgtcgctggtgccgggctggcagtgcgaggggagtgcgttgctgttccgccggatggcgctggttgaactggcggtgctggtggtgattattgtttcacgaggagcctga

SEQ ID NO: 79532 - protein, 608 aa, Escherichia coli CFT073
MSAISLINSGVAWFVAAAVLAFLFSFQKALSGWIAGIGGAVGSLYTAAAGFTVLTGAVGVSGALSLVSYDVQISPLNAIWLITLGLCGLFVSLYNIDWHRHAQVKCNGLQINMLMAAAVCAVIASNLGMFVVMAEIMALCAVFLTSNSKEGKLWFALGRLGTLLLAIACWLLWQRYGTLDLRLLDMRMQQLPLGSDIWLLGVIGFGLLAGIIPLHGWVPQAHANASAPAAALFSTVVMKIGLLGILTLSLLGGNAPLWWGIVLLVLGMITAFVGGLYALMEHNIQRLLAYHTLENIGIILLGLGAGVTGIALEQPALIALGLVGGLYHLINHSLFKSVLFLGAGSVWFRTGHRDIEKLGGIGKKMPVISIAMLVGLMAMAALPPLNGFAGEWVIYQSFFKLSNSGAFVARLFGPLLAVGLAITGALAVMCMAKVYGVTFLGAPRTKEAENATCAPLLMSVSVVALAICCVIGGVAAPWLLPMLSAAVPLPLEPANTTVSQPMITLLLIACPLLPFIIMAICKGDRLPSRSRGAAWVCGYDHEKSMVITAHGFAMPVKQAFAPVLKLRKWLNPVSLVPGWQCEGSALLFRRMALVELAVLVVIIVSRGA

SEQ ID NO: 79533 - DNA, 2013 bp, Bradyrhizobium japonicum USDA 110
  CDS (1)..(2013): transl_table=11
atgtcggctgtcgttttgcaaatgctgtgtgttgccggaatgcttgcatcggcagttctggcgattgttctgagccgctcaacgatcaccacgaccatcatctacggcgtgacattggccgcgtctgcgattgcgttgataggatccattcactggttgctgggcgataccgcgaacgccgatctgattctgccaatcggattgccgtggcttggcgcccatttccgcctcgacggactggcttcgttctttctcgtcgtcgtcaatctcggaggggcatcggcaagcctctatggtctcggctacggtcatcatgaggaggcgccgcagcgcgtgttgcccttcttccccgccttcctggcaggaatgaatcttgtggtgctggcgggtgatgcgttttcttatctgctttgttgggaattcatgtcgctcgcgtcctgggcgctcgtcatggcgcatcatcgtgaaccgggcaacgcgaaagccggttacgtctacctcgtcatggcgagcttcggcacgctcgccctgctgctagccttcggcctcttggcggggccggcgggagactacgaatttgccgccattcgcacggctcaacatacgccctacgtggccacgttggtgttgatcctgatgttgctcggcgccggttcaaaggccggcctggtgccgctgcacgtctggctgccgctcgcgcatcccgcggcgccgagccacgtctcggcgctgatgagcggcgtcatgaccaaggtcgcgatctacggcttcattcgcgtggtattcgatctcctgggacagccgagctggtgggcgagtgtgatcgtactttctcttggcggcctcactgccgtaatggggatcttgtatgcgatgatggaaaaggacctcaagcgcctgctcgcctacagtacgatcgaaaatgtcggcgtcatcttcgcaagcctcggccttgcattggccttccaggccaacggcctgaaactacaggccgcgctcgcgtttgcggcggctctgtttcacgttctcaatcactccttcttcaagagtctgcttttcttcggcgccggcgccgtgctgaccgcgaccggcgaacgggacatggacaagctgggtggcctcattcatcgcatgccgtacacaagcttcgccgttctcgtcggctgtgtctcgatctcagcgcttccgcccttcaacggtttcgtctcggaatggctcatgttccaggctgtattgcagagcccggagttgccgcaatgggcgctgaagatcaccgtgcctgcggtcggagctctattggccttggcggctgcgttggcagcggcgtgtttcgtgaaggcctacggcgtgacctttctagggcgtccgcgcggcgtggcggcggaaaccgcagaggaagtcgaccgctactcgctttcggcaatgttcaccctcgccgcactttgcttgctggccggaattctgccgggaccggtgatcgacgcgctttcgccgatcacgctacagatcctcggcggccgcatgccgatccaggccaacgaaccctggctttcgatcgcgccgattgcggagagtcgcagttcatacaacgggctgcttgttatggtgttcatcgcgatatccgcttcagcggccgtcgtctttattcatcgcttcgcctctcgtgccttaaggcgggggccggcctggggctgtggcttttccgatccgacacccgcggcccaatattcgagcggaagcttcgctcagcctatccgccgcgttttcggtacgctcgtgttccacgcccgcgatcatgtcgagatgccgccccccggggatatcaggccggcgcgcctgcgaatcgaattgcacgatctgatctgggagcgaatgtatgagccgatagcaggcgccgttggcttctctgccgataaactcaatcgcctacagttcctgaccatccggcgctatctcagcctggtctttgcgaccctcgtcacactccttctggttctcgcgatatggtcgtga

SEQ ID NO: 79534 - protein, 670 aa, Bradyrhizobium japonicum USDA 110
MSAVVLQMLCVAGMLASAVLAIVLSRSTITTTIIYGVTLAASAIALIGSIHWLLGDTANADLILPIGLPWLGAHFRLDGLASFFLVVVNLGGASASLYGLGYGHHEEAPQRVLPFFPAFLAGMNLVVLAGDAFSYLLCWEFMSLASWALVMAHHREPGNAKAGYVYLVMASFGTLALLLAFGLLAGPAGDYEFAAIRTAQHTPYVATLVLILMLLGAGSKAGLVPLHVWLPLAHPAAPSHVSALMSGVMTKVAIYGFIRVVFDLLGQPSWWASVIVLSLGGLTAVMGILYAMMEKDLKRLLAYSTIENVGVIFASLGLALAFQANGLKLQAALAFAAALFHVLNHSFFKSLLFFGAGAVLTATGERDMDKLGGLIHRMPYTSFAVLVGCVSISALPPFNGFVSEWLMFQAVLQSPELPQWALKITVPAVGALLALAAALAAACFVKAYGVTFLGRPRGVAAETAEEVDRYSLSAMFTLAALCLLAGILPGPVIDALSPITLQILGGRMPIQANEPWLSIAPIAESRSSYNGLLVMVFIAISASAAVVFIHRFASRALRRGPAWGCGFSDPTPAAQYSSGSFAQPIRRVFGTLVFHARDHVEMPPPGDIRPARLRIELHDLIWERMYEPIAGAVGFSADKLNRLQFLTIRRYLSLVFATLVTLLLVLAIWS

SEQ ID NO: 79535 - DNA, 1827 bp, Salmonella enterica subsp. enterica serovar Typhi Ty2
  CDS (1)..(1827): transl_table=11
atgagttcactttcactgattactagcggcgtcgcgtggtttgccgccgccgccgttctggcgtttctgttttcgtttcataaagcgctgagcggctggattgccggtatcggcggcgcggtcggcagcctgtgtacggcaggcgcggggttcaccgcgctgaccagcgccgttacggttagcggcgtgatgccgtttaccggtcacatgctgcaaattacgccgctgaatgctatctggctgattacgctggggctgtgcggtctgttcgtcagcctgttcaatatcgactggcatcgccatccacaggtaaaagccaacggactgttgatcaacctgctgatggcggcagccgtctgcgctgtggtcgccagtaatctggggacgatggtggtgatggctgaaatcatggcgctctgcgccgtgttccttaccggcggtagcaaagagggcaaactgtggtttgcgctgggccgtctcggtacgctgctgctggcaatcgcctgctggctggtgtggcagcgctacggcacgctggatctggggctgctggatcaacgcgctcagcaactgccgctgggctccgatatctggctgctcggcgttatcggttttggtctgctggccgggattatcccgctacacggttgggtgccgcaggcgcacgccaacgccagcgctcccgccgccgcgctgttctcgaccgtggtgatgaaaatcgggctgctgggcattctctcgctatctctgcttggcggcaatgcgccactgtggtggggcgtggcgctgttggtgcttgggatgatcaccgcctttgtcggcggtctgtacgcgctgatggagcataacattcagcgcctgctggcctatcacacgctggaaaatatcggcatcattttgctcggtctgggcgcaggcgttaccgggattgctctcaatcagccggtactgatcgcgctgggtctgaccggcgggctctatcatctgctgaaccatagcctgttcaaaagcgtgctgttactgggcgcgggcagcatctggttccgtaccggtcatcgcgacatcgaaaaactgggcggtattggtaaacggatgccggttatttctatcgccatgctggtcggtctgatggcgatggcggcgctgccgccgctgaacggctttgccggcgagtgggtgatttaccagtccttcttcaaactgggcaacagcggcgcgtttgttggtcgtctgttaggaccgctgctggcggttggcctggcgattaccggcgcgctggcggtgatgtgtatggcgaaagtttacggcgtgacgttccttggcgcgccgcgcacgaaggaagctgaaaatgccagctgcgcgccgatcctgatgggcgtcagcgtggtggcattggcggtttgctgcgtactgggcggggttgccgcgccgtggctgctgccgatgatttccactgcggtaccgttgccgctggaaaccgcgcacaccaccgtatcgcagccgatgatcacgctgctgttggtcgcctgtccgctactgccattcatcattatggcgatgttcaaaggcaaccgtctgccgtcgcgttctcgcggcgcggcctgggtgtgcggctacgaccatgagcagtcgatggtgattaccgcgcacggtttcgccatgccggtgaaagaggcctttgccccggtactcaaactgcgtaaatggctgaacccggtatcgctggtgccgggctggcagaacgcggcggccgcggggctgttccgtcgtctggcgctgattgagctggcggtgctggtggtgattgtggtttcacgaggagcctga

SEQ ID NO: 79536 - protein, 608 aa, Salmonella enterica subsp. enterica serovar Typhi Ty2
MSSLSLITSGVAWFAAAAVLAFLFSFHKALSGWIAGIGGAVGSLCTAGAGFTALTSAVTVSGVMPFTGHMLQITPLNAIWLITLGLCGLFVSLFNIDWHRHPQVKANGLLINLLMAAAVCAVVASNLGTMVVMAEIMALCAVFLTGGSKEGKLWFALGRLGTLLLAIACWLVWQRYGTLDLGLLDQRAQQLPLGSDIWLLGVIGFGLLAGIIPLHGWVPQAHANASAPAAALFSTVVMKIGLLGILSLSLLGGNAPLWWGVALLVLGMITAFVGGLYALMEHNIQRLLAYHTLENIGIILLGLGAGVTGIALNQPVLIALGLTGGLYHLLNHSLFKSVLLLGAGSIWFRTGHRDIEKLGGIGKRMPVISIAMLVGLMAMAALPPLNGFAGEWVIYQSFFKLGNSGAFVGRLLGPLLAVGLAITGALAVMCMAKVYGVTFLGAPRTKEAENASCAPILMGVSVVALAVCCVLGGVAAPWLLPMISTAVPLPLETAHTTVSQPMITLLLVACPLLPFIIMAMFKGNRLPSRSRGAAWVCGYDHEQSMVITAHGFAMPVKEAFAPVLKLRKWLNPVSLVPGWQNAAAAGLFRRLALIELAVLVVIVVSRGA

SEQ ID NO: 79537 - DNA, 1794 bp, Shigella flexneri 2a str. 2457T
  CDS (1)..(1794): transl_table=11
ttgtcgccgccgctgttctggcatttctcttttcaaaaagcgctaagtggctggatagccggaattggcggcgcggttggtagtctgtatacggcagccgcgggcttcactgtactgactggcgcggttggcgtgagcggtgcgctgtcgctggtaagctacgatgtgcaaatctccccgcttaacgcgatttggctgattaccctcggcctttgcggtctgtttgtcagcctctataacattgactggcatcgccacgcgcaggtgaagtgcaacggcttgcagatcaatatgttgatggctgccgccgtctgcgccgtcatcgccagcaacctcggcatgttcgtggtaatggccgaagtcatggccttgtgtgcggtgttcctcaccagcaacagcaaagagggcaaactgtggtttgcgctgaggcgtcttggcactctgctgctggtgattgcttgctggctgctgtggcagcgttatggcacgctggatctgcgcctgctggatatgcgtatgcaacagctgccgctcggttccgatatctggctgctcggtgtgattggctttggcctgctggctgggattattccgctgcacggctgggtgccgcaggcacatgctaacgcctctgcgccagctgccgcgttgttttctacggtagtcatgaaaattggcctgctgggcatgttaaccctgtcactgctgggcggtaatgcaccgctgtggtgggggatcgcgctgctggtgctcggcatgatcaccgcgttcgtcggtggtctgtatgcgttgatggaacacaacatccagcgcctgctggcttaccacaccctggaaaatatcggcattatcctgctggggctggggctggggctgggcgctggcgtaacgggtatcgcgctcgaacaaccggcgctgattgctcttggcctggtcggtggtctgtaccatctgcttaaccatagcctgttcaaaagcgtactgttcctcggggcggggagcgtctggttccgtaccggtcatcgcgatatcgaaaaactcggtggtattggcaagaaaatgccggttatctccatcgccatgttagtcgggttgatggcaatggctgcgctgccgccactgaacgggtttgccggggaatgggttatctatcaatccttcttcaaactgagcaatagcggcgcgtttgttgcccgtctgctggggccgctgctcgctgtgggtctggcaattaccggtgcgctggcggtgatgtgtatggcgaaagtctatggcgtcacgttcctcggcgcgccgcgtaccaaagaagccgaaaacgccacctgtgcgccgctcctgatgagcgtaagcgtagtggcactggcgatttgctgcgtaattggcggtgttgctgcgccgtggctgctgccgatgctctctgctgctgtacctctgcctctggagcctgctaacaccaccgtttctcaaccaatgatcacattgctgctgattgcctgcccgctgctgccattcatcattatggcgatttgcaaaggcgaccgcctgccgtcacgttcccgcggtgcggcctgggtgtgcggctacgaccatgaaaaatcaatggtgattaccgctcacggttttgccatgccggttaaacaggcgtttgcgccagtgctgaaactgcgcaaatggctgaatccggtgtcgctagtgccgggctggcagtgcgaaggtagtgcgttgctgttccgccggatggcgctggttgaactggcggtactggtggtgattattgtttcacgaggagcctga

SEQ ID NO: 79538 - protein, 597 aa, Shigella flexneri 2a str. 2457T
MSPPLFWHFSFQKALSGWIAGIGGAVGSLYTAAAGFTVLTGAVGVSGALSLVSYDVQISPLNAIWLITLGLCGLFVSLYNIDWHRHAQVKCNGLQINMLMAAAVCAVIASNLGMFVVMAEVMALCAVFLTSNSKEGKLWFALRRLGTLLLVIACWLLWQRYGTLDLRLLDMRMQQLPLGSDIWLLGVIGFGLLAGIIPLHGWVPQAHANASAPAAALFSTVVMKIGLLGMLTLSLLGGNAPLWWGIALLVLGMITAFVGGLYALMEHNIQRLLAYHTLENIGIILLGLGLGLGAGVTGIALEQPALIALGLVGGLYHLLNHSLFKSVLFLGAGSVWFRTGHRDIEKLGGIGKKMPVISIAMLVGLMAMAALPPLNGFAGEWVIYQSFFKLSNSGAFVARLLGPLLAVGLAITGALAVMCMAKVYGVTFLGAPRTKEAENATCAPLLMSVSVVALAICCVIGGVAAPWLLPMLSAAVPLPLEPANTTVSQPMITLLLIACPLLPFIIMAICKGDRLPSRSRGAAWVCGYDHEKSMVITAHGFAMPVKQAFAPVLKLRKWLNPVSLVPGWQCEGSALLFRRMALVELAVLVVIIVSRGA

SEQ ID NO: 79539 - DNA, 1929 bp, Mycobacterium bovis AF2122/97
  CDS (1)..(1929): transl_table=11
atgaccgctgcaccgacggccggcggggtcgtcacttcgggcgtgggcgttgccggggtcggcgtggggttgctgggcatgtttggaccggtgcgtgtagtgcacgtcggttggctgcttccgctgtccggcgtgcacatcgagctcgaccggttgggcggattcttcatggcgctcacgggcgcggtagcggctccggtcggttgttacctgatcggctacgtgcgccgtgaacacctcggtcgggtcccgatggcggtggtgccgctgttcgtcgcggcgatgctgttggtgccggccgcgggctcggtgacgacgtttctgctggcgtgggagctgatggcgatcgcgtcgctgatcctggtgctctccgagcacgcccgcccgcaggtccgctcggcgggcctgtggtacgccgtgatgactcagctgggattcatcgcaatcctggtcgggctggtggtgttggcggcggccgggggttccgaccggttcgccggcctcggggcagtctgcgacggggtccgcgtcgccgtatttatgctcacgctggtcgggtttggttcgaaggcgggcctggtgccactgcacgcctggctgccgcgggcccacccggaggcgccgagcccggtgtcggcgttgatgagcgcggcgatggtcaacctgggcatctacggcatcgtccgtttcgatctgcagctgctggggccgggcccacgctggtgggggcttgcgctgctggccgtgggcggcacgtccgcgctgtatggggtgctgcaggcttcggtggccgccgatctcaaacggctgctggcctattcgacgaccgagaacatgggcctgatcacgctggcgctcggtgcggcaacacttttcgcggataccggagcctacgggccggcgtcgatcgccgccgccgcagcgatgctgcacatgattgcgcacgcggcgtttaagagcctcgccttcatggcggccggatctgtgctggccgcgaccgggctgcgcgacctggacctgctcggcgggctggcccgccgaatgccggcgaccaccgtctttttcggggtggccgcactgggcgcatgtggtctgccgttgggcgccgggtttgtcagtgagtggctgctggtccagtcgttgatccacgctgcccccggacacgaccccatcgtggcgctgacgacaccgctggcggtcggcgtggtcgcactggccaccggtctgagcgtggcggcgatgaccaaggccttcgggatcgggtttctcgcccgtccccgctccacccaagccgaagcggcgcgtgaggcgccggccagcatgcgcgccggcatggcgatcgcggcgggcgcctgcctggtgctggcggtggcaccgctgctggtcgcacccatggtgcggcgggccgccgcgacgctgccggccgctcaggcggtcaagttcaccggtctgggcgccgtggtgcggctgcccgcgatgtccgggtcgatcgcgcccggcgtgatcgccgccgctgtgctcgccgcggcgttggcggtagccgtcctcgcgcggtggcgtttccgccggcgcccggcgccggccaggttgccgctgtgggcttgcggcgcggccgatctcaccgtgcgcatgcaatacacggccacgtcgttcgccgagccgctgcagcgggtcttcggcgacgtgctgcgcccggacaccgacatcgaggtcacccacaccgccgagtcgcgctatatggccgagcggatcacctaccggaccgcggtcgccgacgcgatcgaacagcgcctctatacgccggtggtcggggcggtggccgccatggccgagctgctgcgccgtgcccacaccggcagcgtgcaccgctacctggcctacggcgcgctgggcgtactgatcgtgctggtggtcgcgaggtgtacgtga

SEQ ID NO: 79540 - protein, 642 aa, Mycobacterium bovis AF2122/97
MTAAPTAGGVVTSGVGVAGVGVGLLGMFGPVRVVHVGWLLPLSGVHIELDRLGGFFMALTGAVAAPVGCYLIGYVRREHLGRVPMAVVPLFVAAMLLVPAAGSVTTFLLAWELMAIASLILVLSEHARPQVRSAGLWYAVMTQLGFIAILVGLVVLAAAGGSDRFAGLGAVCDGVRVAVFMLTLVGFGSKAGLVPLHAWLPRAHPEAPSPVSALMSAAMVNLGIYGIVRFDLQLLGPGPRWWGLALLAVGGTSALYGVLQASVAADLKRLLAYSTTENMGLITLALGAATLFADTGAYGPASIAAAAAMLHMIAHAAFKSLAFMAAGSVLAATGLRDLDLLGGLARRMPATTVFFGVAALGACGLPLGAGFVSEWLLVQSLIHAAPGHDPIVALTTPLAVGVVALATGLSVAAMTKAFGIGFLARPRSTQAEAAREAPASMRAGMAIAAGACLVLAVAPLLVAPMVRRAAATLPAAQAVKFTGLGAVVRLPAMSGSIAPGVIAAAVLAAALAVAVLARWRFRRRPAPARLPLWACGAADLTVRMQYTATSFAEPLQRVFGDVLRPDTDIEVTHTAESRYMAERITYRTAVADAIEQRLYTPVVGAVAAMAELLRRAHTGSVHRYLAYGALGVLIVLVVARCT

SEQ ID NO: 79541 - DNA, 1941 bp, Wolinella succinogenes DSM 1740
  CDS (1)..(1941): transl_table=11
atggaaacgatctacactctctttctgctcgcctctctcctctctatcgcgctctataagaagcctctttgggcgcatagattgggatttgcactcgcgagtctattttcactttatgcggcgatcttcttcttttctcatctaggggagacgctggtgtggaaactccctggaagcttcatcagtgcgcccacttttaggcttgattccttggggatgctctttagcttcttaatctcggtggtggcgtttgcggtctcgctctttagccttgattatgctcgattctatgaaaaaaaggcgaatctagcagcctttgcctctcttatgaatgccttcatcctctccatgctgcttgtggtggcgagtgatggggtcttctctttcatgttgctttgggaggtgatgacgctcatctcagccctcttgattctaatcaatgatggcgaaggtgcctccaaaaaggcgatgatctatctaggaatcgcccaactaggagctttctgcctaatggtcgcccttttggtaatggcaagtttggcgggtagctttgaatttagcgagtttggacggctggatattagcgagggggcgagtatcgcactctttttgctgctattggtggggcttgggtcaaaggcggggatgtttccctttcatgtttggcttcctttggcttatggtcaatgcccttcaaatgcctcagcgcttatgagtggggtgatgatcaaggtggcgctttttgccttcatcaagttttcactcctgctcccgctctcgagcacttttggatatatcctcctcctttttgggggacttagcgttctttttggggtgctttatgcggtggttgccaatgattataaggctgcaatcgcctatagctcttgcgagaatgtgggcattatctttttgggactaggagcggctttttatggaataggggagaatcttcctgttgtagcgctgcttggttttgtcgcggcgctctttcatatcctcaaccatgcgctctttaaatcgctccttttcatgctaagcggcaatctctacacagccacaggctccaaagagatggattctttgggggggattcacaaaaagatgcctttcacctctatcctctttcttgtggcggtgctcgccattggcgcacttcctccgctcaatggctttgctagtgagtgggtcacctatcaggcgatgcttcaaggaggcgtagaggaggggattgctcctcgtctcttctttacctttggcatcattgcattggctgtgggtggagccttggcgatcatggctttttccaaagcttatggggcactctttttgggactcccaagggatgaggcaatctatgagggaatccaagaggtctctagtatcagattgtggcctttggcctttttggcgagtctctgtgtgggacttggaatctttatgggcgaggtggtctctctgctctcaacgatggtggcgagctatattcctacggccaatgccgaggatgcaagcaccctctccatgcctttggtggtgttagtgatgcttttgtgtgcggtggtgccttttgtcttgctctacatcaccaaggccaatcacgcccccattcgagtcaccgagccttgggcgtgcggatttatctataacaaaaacatgcagattggctccaatgccttcacgggcgatattcgccgtgcacttcgattcttgttgaggtatgagagtgagagcaaaatggagggctacttctctagggtgacctataagaaaaaagctcgcgatctcttctgggatcgactctatgagcctgtgattagctgggtgatggaggcggctgataagattggaattttccaaaacggtcgaacgaatctctatgcgggttatattttggtctatctttgcctagtgctgatttttggttattaccatctgtga

SEQ ID NO: 79542 - protein, 646 aa, Wolinella succinogenes DSM 1740
METIYTLFLLASLLSIALYKKPLWAHRLGFALASLFSLYAAIFFFSHLGETLVWKLPGSFISAPTFRLDSLGMLFSFLISVVAFAVSLFSLDYARFYEKKANLAAFASLMNAFILSMLLVVASDGVFSFMLLWEVMTLISALLILINDGEGASKKAMIYLGIAQLGAFCLMVALLVMASLAGSFEFSEFGRLDISEGASIALFLLLLVGLGSKAGMFPFHVWLPLAYGQCPSNASALMSGVMIKVALFAFIKFSLLLPLSSTFGYILLLFGGLSVLFGVLYAVVANDYKAAIAYSSCENVGIIFLGLGAAFYGIGENLPVVALLGFVAALFHILNHALFKSLLFMLSGNLYTATGSKEMDSLGGIHKKMPFTSILFLVAVLAIGALPPLNGFASEWVTYQAMLQGGVEEGIAPRLFFTFGIIALAVGGALAIMAFSKAYGALFLGLPRDEAIYEGIQEVSSIRLWPLAFLASLCVGLGIFMGEVVSLLSTMVASYIPTANAEDASTLSMPLVVLVMLLCAVVPFVLLYITKANHAPIRVTEPWACGFIYNKNMQIGSNAFTGDIRRALRFLLRYESESKMEGYFSRVTYKKKARDLFWDRLYEPVISWVMEAADKIGIFQNGRTNLYAGYILVYLCLVLIFGYYHL

SEQ ID NO: 79543 - DNA, 2007 bp, Geobacter sulfurreducens PCA
  CDS (1)..(2007): transl_table=11
atgactgatggagggggaatggtctcgcccggtatgctcctgctctgcgcctcggcccttgccgccctgtcgggggtgccgctgctcgtcagaagcctttcccctgccgccggccagaaggcggccacagtgctcatgctcctggccaccgtgatcggcctgggcagcgccgtcgccaccctcgtcaccggccggaccgaaacctttctcctctcctggggactccccttcggtcccgccgaaatggccgtggaccccctctccgccttttttgccctgccgatcctcctggtggccgcctgctgcgcggtctatgccctcggctactggccggcccgggacaatccccgcacggtgcgcagcctgaccttcttcttcggcctcctcgtagcagccctgatcggggtgatcgtagcgcgcaacggggtcctcttcctcgtggcgtgggagatcatggccgtttccgcctggttcgtcctcaccgccgaccacgcgaaacccgaggtccgggatgccggcaccctctacctgatcaccacccacatcggcaccctggccctgttcgccctgttttcgctcctcaaggggacggcgggatcgtacctcttcccggccccggcatcgctggcggccggcggagggatcggcgccggcatcttcctgaccgcactcctgggcttcggcatcaaggctgggctcatgccgctccacgtctggctcccgtcggcccacgccaacgccccgagccacatctcggccatcatgtccggggtaatcctgaagctcggcatctacggcatcgtccggacggtttccttctttgcccagattccgctctggtgggggatcgtcctgctggtggcgggaatggcgtcggggatcgccggggtcgccttcgctctgggtcagcatgacctcaagcggttgctggcctaccacagcatcgagaacatcgggatcatcgccatggggatcggcgtggccctggtgggcgcggccacgggggttccctccctggcactcctcggcatggcaggggcactgctccacgtactgaaccacgccaccttcaaggcgctccttttcctcggcgccggctcggtgatccatgccgtcggcacccggaaaatcgaccggatggggggcatcgcccgcgtcatgccccggaccgcccttctcttcctgaccggggccgtggccatctgcgggctgccgcccctgaacggcttcgtgagcgagttcctcatctacctgggggtcttccgggaggcggtccacggcaccggcgcggccgcggccgtcacatcactggccgggccggcccttgccctggtggggggactggcggttgcctgcttcgtcaaggtcttcggcgtggttttcctggggctcccccggagcgaagaggcggcccgcgcccacgaggcggggcgccccatgctcgcgcccatggccgtgctgggcgcggtctgcgtcgtggtcggcctggcaccggcggcggtggcgccgctgcttgacgccgcggtgcgctcctggcggccggaactggctctcacggccccggccctggccgatctggcgcccctgggatggctcatggccgttgccgccggcacccttgccacggtggccgttctcgctctcctctacgcccggcggttggccgccgtgccccggggagcctcgcccacctggggctgcggctatctggcccccaccccccggatgcagtacaccgcgtcatccttcgccgagatgctggtccggctcttcggcggcatcctgcgcccccacggcacccagcccggcatccgctcctgtgcgccggcgccgtcggagctccatacccatgtccccgagacggtgctcgaacacctctacctcccgttcatcacgtgggccaatggtaagctcgccccgctccggaggctccagcacggccagttgcacctctacatcctctacaccctgatcactctggtcacgctcctgctgttcggcatgtga

SEQ ID NO: 79544 - protein, 668 aa, Geobacter sulfurreducens PCA
MTDGGGMVSPGMLLLCASALAALSGVPLLVRSLSPAAGQKAATVLMLLATVIGLGSAVATLVTGRTETFLLSWGLPFGPAEMAVDPLSAFFALPILLVAACCAVYALGYWPARDNPRTVRSLTFFFGLLVAALIGVIVARNGVLFLVAWEIMAVSAWFVLTADHAKPEVRDAGTLYLITTHIGTLALFALFSLLKGTAGSYLFPAPASLAAGGGIGAGIFLTALLGFGIKAGLMPLHVWLPSAHANAPSHISAIMSGVILKLGIYGIVRTVSFFAQIPLWWGIVLLVAGMASGIAGVAFALGQHDLKRLLAYHSIENIGIIAMGIGVALVGAATGVPSLALLGMAGALLHVLNHATFKALLFLGAGSVIHAVGTRKIDRMGGIARVMPRTALLFLTGAVAICGLPPLNGFVSEFLIYLGVFREAVHGTGAAAAVTSLAGPALALVGGLAVACFVKVFGVVFLGLPRSEEAARAHEAGRPMLAPMAVLGAVCVVVGLAPAAVAPLLDAAVRSWRPELALTAPALADLAPLGWLMAVAAGTLATVAVLALLYARRLAAVPRGASPTWGCGYLAPTPRMQYTASSFAEMLVRLFGGILRPHGTQPGIRSCAPAPSELHTHVPETVLEHLYLPFITWANGKLAPLRRLQHGQLHLYILYTLITLVTLLLFGM

SEQ ID NO: 79545 - DNA, 1986 bp, Geobacter sulfurreducens PCA
  CDS (1)..(1986): transl_table=11
atggaatccgcgttagaaggggcggaccccgcctctcagattcttgccgccatagtcctggtggccctttccggcgttccgggcgtgctggcgcgccgattcgtgccgggccagatcctggccgccgtcatggctgtggctgcgtctctgcttggcttgaccggcacgattcggacgctgctggagcaccggacaacggccttcagtcttgcctggaccctccccttcggccccgccgacctggccgtcgatcccctgtcggctctcttcctgattcccgtctttctcgtcttcggctgcggctccctctatgctctcggctactggcccgccgctgcgaaccgttccaccgagccggcccttacgttcttctacgggattctggccgcggccatggcgggcctggtggtggcccgcaacggggttctcttcctcatggcgtgggaggctatggccctgtcggcctggttcctcctcgccaccgagcaccgtgacccggccgtgcgccaggcggggatcgtctatctggcggcgacccatgccggcaccgcggcgctcttcgtgctcttctgcgtcctgcggggcgtcaccggatccttcgtgtttcccgcgccacacagcctcgacccggccttggtgccggccacggtcctgtttctggccgcccttgccgggttcggcgccaaggccgggatcatgccgctccacatctggctgcccgcggcccatgccagcgcgccgagccacgtctccgccctcatgtcgggggtcatgctcaagatggggctctacgggctggtgcggaccatctcgtttttcgcgccggtacccctctggtggggcggtctcattctggtgctgggggcggtttcggccctggccggcatcgtcctggcggcgtcccagcgcgatctgaaacggctgctggcctgcagcagcatcgagaacatcggcatcatcgccttgggcatcggtacggccctggtgggggaagccactggcaacgtccccctctataccctcggcatgaccggggcactgctccacctgctcaatcacagcctgttcaagccgctcctctttttcggggccggcgcggtgatccatgccaccggcacccgggagatggaccgaatgggagggcttgcccgcctcatgccccggagcgcgctcttcttcctggtggggtccgtggccatctgcgggctgcctcccctgaacggcttcgtgggggaatttctgctctatgccggcttcttcggcgaggccgtggctgacccggtgccgctcctggccctgtcggcgccgcttctggccgtggtggggggcatcgcgacggtctccttcgtgaagctctacggcgtgatttttctgggggttccccgctgcggcgcgcatcatcactcccacctgcccgactggcggatgggcgcgcccatggggctgctggccctgctctgcctcgcggcggggatcgcgcccgggccggtgctgagcctggtggagccggcagtgggggccttcggcatggttcccccggcccccctcgaaaccctcgttcccctggggtggctcaccctgggggcgggcatgctgggcgctgcggtgatcctctcggggctgctcctgatgttccggctgaaacggaccccggtcgcgcggggtactacctgggggtgcggctacccggccccgtcgccgcggatgcagtacacgggagtttcctttgccgattccctggtgaggcagttcgaaggggtcgtcgccccccgccgggaaggtccggccgtggcgggattcttcccggcaccggttctgttccggttcgtgcctactgaaacgatccttgagcgggtcatcatgccgctgttcagggtcgcggggttttccttcgccttcctgcggcggctgcagcacggccggctgcacctctacatgctctacatcctgaccacgctctttctgctgatggtctgggcccactga

SEQ ID NO: 79546 - protein, 661 aa, Geobacter sulfurreducens PCA
MESALEGADPASQILAAIVLVALSGVPGVLARRFVPGQILAAVMAVAASLLGLTGTIRTLLEHRTTAFSLAWTLPFGPADLAVDPLSALFLIPVFLVFGCGSLYALGYWPAAANRSTEPALTFFYGILAAAMAGLVVARNGVLFLMAWEAMALSAWFLLATEHRDPAVRQAGIVYLAATHAGTAALFVLFCVLRGVTGSFVFPAPHSLDPALVPATVLFLAALAGFGAKAGIMPLHIWLPAAHASAPSHVSALMSGVMLKMGLYGLVRTISFFAPVPLWWGGLILVLGAVSALAGIVLAASQRDLKRLLACSSIENIGIIALGIGTALVGEATGNVPLYTLGMTGALLHLLNHSLFKPLLFFGAGAVIHATGTREMDRMGGLARLMPRSALFFLVGSVAICGLPPLNGFVGEFLLYAGFFGEAVADPVPLLALSAPLLAVVGGIATVSFVKLYGVIFLGVPRCGAHHHSHLPDWRMGAPMGLLALLCLAAGIAPGPVLSLVEPAVGAFGMVPPAPLETLVPLGWLTLGAGMLGAAVILSGLLLMFRLKRTPVARGTTWGCGYPAPSPRMQYTGVSFADSLVRQFEGVVAPRREGPAVAGFFPAPVLFRFVPTETILERVIMPLFRVAGFSFAFLRRLQHGRLHLYMLYILTTLFLLMVWAH

SEQ ID NO: 79547 - DNA, 1935 bp, Dehalococcoides sp. BAV1
  CDS (1)..(1935): transl_table=11
atgatagcgggtttattgcttggcggagggtttttacttctggccgctgccctgacgggcattgtgtttaatcatggcagtaaaaaagtctggcaaggggtactatggctggttatagcggcggcgctatgcttgcttattgggtctttgcagatatttttcggtaatccgctggatatttccctctggagcattgcatccgggctggacatagcctttcatcttgaccgtctggcatcattcttcgtcataataattagccttatttcactctgcgtggccgtgtattcactgggctacaataaccatatatcttcaaacgaacgagccaatctgctctcagcctttatggctgttttcattctctccatgataggcgtggtggcctcggccaatacctttagcctgatatttttctgggagataatggccctaagctccttctttttaatgatgaatgactatcaggagccttttacccagcgggcgggcgtgtattatttcgtgcttacccagcttagcaccattttcctgatgctgatggcagtagttatgtatatccagaacggcagtttcgcactcagcctgagcggtgcatcctccgtcatccagagtctggtttttgttctggcatttctggccttcggaatcaaggccggtatcataccccttcacaagtggctgccttatgcccactctgccagcccttcaaatgtctctgccctgatgtccggggtaatgctgaaagtggccatttacggcttggtacgctttcttatggatgtgcttagcccggaaatgtggtggggtgtgggaatactccttttgggcatgataagtgccttgcttggtattatctacgcctttaaagaacatgaccttaaaatgctgctggctttttgtagtattgaaaatatcggcattatcctgatgggtattggtctgtatgttatttttggcttgtatggtctggatacgctggctatgctggcacttggttcagctttgtttcacagcctgaatcatgccatttttaaaagcctgctttttatgaccgccggttcggtggtaattgccgtgggtgaccgcaatattgaaaaaatgggcgggttgattaaactaatgccctacacttctgttatctttctggtgggggcagtttccatatcggctttgcctcccttcaatggttttatgagtgagctgatgctctttgagtcttttttccagtccttctctctggctgaaagcagtataaagatacttctgttcagtgtactggccatactggctcttacttcagctctggcggccgcttgctttgtaaaggccttcgggacggtctttctggctatgcctcgcagtcaggaagcagcctctgccaaagaagtttcaaaaagtatgattatagggccggccatactggcagttgcctgtctggtattgggtctgtttgctgtccagatattttcggtagccggatatagttttgacctgccggatatgtcactggttggcttggtactggttatcttcggggttttggttttcggcatggtcaggctgttttcgccccgaaaaagccgccggagcgagacctgggcttgcggctatgttcgcccaactccccgctttgagtatactgcctccggttttgccgagccccttttccagatattccggctgatataccgcacccgccattacaatgaacgcagttacgaagataaccagcaggctattttcaaacagggcaaatcagctattcacaccataaagttttttgatgagtatatttatctgccggttgccggtttgttcgggcgtatttcccgtttcatatcccgcctgcaggatgttgatttgggcagccatatcctgtacagctttataactgttttgctggttatactggcggcaaggtggctgtggtga

SEQ ID NO: 79548 - protein, 644 aa, Dehalococcoides sp. BAV1
MIAGLLLGGGFLLLAAALTGIVFNHGSKKVWQGVLWLVIAAALCLLIGSLQIFFGNPLDISLWSIASGLDIAFHLDRLASFFVIIISLISLCVAVYSLGYNNHISSNERANLLSAFMAVFILSMIGVVASANTFSLIFFWEIMALSSFFLMMNDYQEPFTQRAGVYYFVLTQLSTIFLMLMAVVMYIQNGSFALSLSGASSVIQSLVFVLAFLAFGIKAGIIPLHKWLPYAHSASPSNVSALMSGVMLKVAIYGLVRFLMDVLSPEMWWGVGILLLGMISALLGIIYAFKEHDLKMLLAFCSIENIGIILMGIGLYVIFGLYGLDTLAMLALGSALFHSLNHAIFKSLLFMTAGSVVIAVGDRNIEKMGGLIKLMPYTSVIFLVGAVSISALPPFNGFMSELMLFESFFQSFSLAESSIKILLFSVLAILALTSALAAACFVKAFGTVFLAMPRSQEAASAKEVSKSMIIGPAILAVACLVLGLFAVQIFSVAGYSFDLPDMSLVGLVLVIFGVLVFGMVRLFSPRKSRRSETWACGYVRPTPRFEYTASGFAEPLFQIFRLIYRTRHYNERSYEDNQQAIFKQGKSAIHTIKFFDEYIYLPVAGLFGRISRFISRLQDVDLGSHILYSFITVLLVILAARWLW

SEQ ID NO: 79549 - DNA, 2016 bp, Erwinia carotovora subsp. atroseptica SCRI1043
  CDS (1)..(2016): transl_table=11
atggattcacttcagttgcttcagtggtcagcgatctgttacctcgcaggcgccgtgttatctctgctcatggcacgtaaagaaaacgcgtcaatcatcatcgccgccattaccgccatctgcggtggtgtactgggattatgcagcgccgtgcccgtattgttgagcgggcagattcagctatacgctacgcagggcctatttcactttgctacctttactgtgcgtctcgatatgttggccgcctttatggtgacggtcatctcgctgctggtcacagtctgctcgctctactccatcgcctatgtccgtgaatatataggacgaggcgccggcagtatggggggctttatgaatctgtttatcgcttccatggtgggtctggttgtgatggataatgcgttctacttcatcatcctgtttgaagccatgtcgctagcctcttggtttctggttatttctgaacaggatcgtgaatccgtcagcgcaggtctgctctacttctttattgcccatgccggatcggtactgatcatgatcgcattcttcctgatgtggagagaaagcggcagtctggattttgcggcgttccgccggttatcgctctctccagtgctgtcttcggtcgtcttcctgctggcctttttcggtttcggtgccaaagcgggcatgctgccattgcacagctggctgccgcgcgcccatcccgcggcgccgtctcatgcctccgcgttgatgtccggcgtcatggtaaaaataggtatcttcggcatcatcaaagtgggtatcgatctgctagcggcaccacagctgtggtgggggattgtggtgctggcgttcggatccatttccgccgtactgggtgtgttgtatgcgctggcagaacacgatattaagcgcctgctggcctggcataccgtcgaaaacgtcgggatcattttgatgggcgttggcgtagggatggtcggcatcgccactcagcatcaggtattagcgacgctcggtttgctgggcgcgctctatcacctgctgaatcacgctgtgtttaaagggctgctgtttttaggcgctggtgccgtcatctaccgcctgcatacccgtgatatggaaaaaatgggtggcctcggcaaactcatgcccaaaaccgcattggcctttctgattggctgcatgtccatctccgccctgccgccgctcaatggctttatcagtgaatggtacacctaccagtcactgttcagcatgagccacgacggcaatgttctcatgcgcctcagtgcacccgtagccattgtgatgctggccatcacgggggcattagccgcgatgtgcttcgtcaaagtctatggcgtcagtttttgcggcgcgccacgcagtgaggaagccagtcaggcccgggaagtaccgtggcaaatgacgttatccctattgctgctagcactgtgctgcgtagcgctaggccttggcgccagcaaggtagcgcccattattgctcaggttgcgatgtcgctgagcggtgctcaggacgtggcagtcgctcagggaaacttgctgattccggctcaggccgagcaggcgatgttctccccggcactcgtctttattctgctcatcgcgttgccggtgctgccgctgttgatctggttattcctgaaaggtaatcgtcccgcgtttcgccgccatggtgacccatgggcgtgtggttacgcctgggaaccgcagatggtcgtctcggccagcggctttacgcaaccgctgcgcgcgatgttcggcgggctctatcgcatgcgccagcggcttaatccagcccctcagctatccagagcgctacaaggcatcactcagggagccaccatcatcgaaccgttctgggatgaaaaaatcatttacccgttggtgcgtctggtacggcgtatcggtgcacagctacagcggttacagggtggcgacttccgcctctactgtctgtacgtggttgcggcactaaccgtactgctgttgattgtcgcggtgtga

SEQ ID NO: 79550 - protein, 671 aa, Erwinia carotovora subsp. atroseptica SCRI1043
MDSLQLLQWSAICYLAGAVLSLLMARKENASIIIAAITAICGGVLGLCSAVPVLLSGQIQLYATQGLFHFATFTVRLDMLAAFMVTVISLLVTVCSLYSIAYVREYIGRGAGSMGGFMNLFIASMVGLVVMDNAFYFIILFEAMSLASWFLVISEQDRESVSAGLLYFFIAHAGSVLIMIAFFLMWRESGSLDFAAFRRLSLSPVLSSVVFLLAFFGFGAKAGMLPLHSWLPRAHPAAPSHASALMSGVMVKIGIFGIIKVGIDLLAAPQLWWGIVVLAFGSISAVLGVLYALAEHDIKRLLAWHTVENVGIILMGVGVGMVGIATQHQVLATLGLLGALYHLLNHAVFKGLLFLGAGAVIYRLHTRDMEKMGGLGKLMPKTALAFLIGCMSISALPPLNGFISEWYTYQSLFSMSHDGNVLMRLSAPVAIVMLAITGALAAMCFVKVYGVSFCGAPRSEEASQAREVPWQMTLSLLLLALCCVALGLGASKVAPIIAQVAMSLSGAQDVAVAQGNLLIPAQAEQAMFSPALVFILLIALPVLPLLIWLFLKGNRPAFRRHGDPWACGYAWEPQMVVSASGFTQPLRAMFGGLYRMRQRLNPAPQLSRALQGITQGATIIEPFWDEKIIYPLVRLVRRIGAQLQRLQGGDFRLYCLYVVAALTVLLLIVAV

SEQ ID NO: 79551 - DNA, 1959 bp, Desulfotalea psychrophila LSv54
  CDS (1)..(1959): transl_table=11
atgatgaacatctttctactttcactcacagtgttatttgtcggtgggattttttcattactgagctatcgccattttaatgtaatgaaggtcggctatgtgataattacagctgtaggctgtgcgattggtatatatgcaatcacaatccccctgcacggtgctgtagtgcccagcttttcaaggccatggctacatcttttcaccctctctttttccctagatgctctttccgcatttttcctgattcctatctttgtcgtatgccctttagcagcactctacagctatcattatatggacaagattgaagagaagggacgaatcggtgtgagtttctttttctttaatcttctcctcatatctatggccctggtgacagcagctgataatattatcagctttcttttggtatgggagttgatgtcgctctcttccttttttcttgtcattcacgactatcaggaagaggatacacgcagagctggatatatctactttgtctttgcccaggcaggtgcaatgttcatcattgcagcactcgccttagcctatagccaaacaggaatccatgattttgcagcatttgccaccttgccagcccatatcaaattgattgttttcttcctcgccctggtaggatttggttcaaaagcaggcatctttcccctgcatatgtggttaccccatgctcacccggccgcaccatgtcatatctcggcgattatgtccggggtaatgattaagatgggtatctacgggattatccgcctctatgttgagcttgaagacaccagccttataatcggtcaaacagtgctcaccctgggtatgatctcagggattttaggtgtggtttacgcccttggcaagcaggacatcaagaaggtactcgcctatagtagtgtggaaaatataggtgtcatcctcattggtgccggtattggcatgatgggtatgagcacgggaaatatggtgatggcaagttttggctttgcaggctgcctcctccatgtgctcaaccactccctctttaaaaccctactttttcttggtgccggcgctatcgtacaaaagacaggaaccagacgcctcgacgaactgggcggcttgataaaacgtctgccccttaccggtaagagttttctcgcaggcagtgtctccatctctggtctgcctccctttaatggctttattagtgagtttttgatttattatggtgcctttcatggcctgagccttaagggttcagcctttcttttcgccatgctgtccatcctcgcactcgccatcatcggtggccttgccgcctcctgttttacccgaatgatggggataattttccttggtgagccacggactgccaaggcggcaaaggctactgaggcaggatttaccatgacccttcccatgattttcctcgctgcctcctgtctgtttattggccttttcccagcgccctttgtcggtattgtctttagcgcccttgcaagcattcccgctttaacgcctatagacggagcagaggtaacactactcgccgaaaaccttggccttgcagcccggctcttccttgctgtgctcattttcagcacattgctacgtaaacttttataccgcaataaggtggttgtacaagcgccaacctggggctgtgcttttgcccaacccagcgtaaagatgcaatacacagggacctcttatgcgatgagcatcatcgccttctttaggccatttattcaaataaagacaaactattcggggatcaaaagaatattccccaggaagaccacctataaaaccgaggtggacgatatagcagaggtctgtctgattgagcgaattgtaacgcctcttctctactttttaggcaaattccgttggattcaacatggccatattcaactctatattgcctatatagctgtgacaatcatcgtccttcttctctgcgtttaa

SEQ ID NO: 79552 - protein, 652 aa, Desulfotalea psychrophila LSv54
MMNIFLLSLTVLFVGGIFSLLSYRHFNVMKVGYVIITAVGCAIGIYAITIPLHGAVVPSFSRPWLHLFTLSFSLDALSAFFLIPIFVVCPLAALYSYHYMDKIEEKGRIGVSFFFFNLLLISMALVTAADNIISFLLVWELMSLSSFFLVIHDYQEEDTRRAGYIYFVFAQAGAMFIIAALALAYSQTGIHDFAAFATLPAHIKLIVFFLALVGFGSKAGIFPLHMWLPHAHPAAPCHISAIMSGVMIKMGIYGIIRLYVELEDTSLIIGQTVLTLGMISGILGVVYALGKQDIKKVLAYSSVENIGVILIGAGIGMMGMSTGNMVMASFGFAGCLLHVLNHSLFKTLLFLGAGAIVQKTGTRRLDELGGLIKRLPLTGKSFLAGSVSISGLPPFNGFISEFLIYYGAFHGLSLKGSAFLFAMLSILALAIIGGLAASCFTRMMGIIFLGEPRTAKAAKATEAGFTMTLPMIFLAASCLFIGLFPAPFVGIVFSALASIPALTPIDGAEVTLLAENLGLAARLFLAVLIFSTLLRKLLYRNKVVVQAPTWGCAFAQPSVKMQYTGTSYAMSIIAFFRPFIQIKTNYSGIKRIFPRKTTYKTEVDDIAEVCLIERIVTPLLYFLGKFRWIQHGHIQLYIAYIAVTIIVLLLCV

SEQ ID NO: 79553 - DNA, 2007 bp, Burkholderia pseudomallei K96243
  CDS (1)..(2007): transl_table=11
atggaacaggggctgcttctccgatgcgtgctgttcgttgcgctcgcgtggctcgcgctcggctgcgccggactcgcgaacctgcgccgcaccggtgtgatcgcacacggcctcttcccgctcggcgcgctggccgggctcgtgctcgcggcgctcggcctggccggcgtgttcgccgggccgtcgagcgccgtgctgccgctcgggctgcccgacctgccgttccatctgcgtgtcgatccgctgtccgcgtacttcctgttcgtgctcggcgtggtgacggcgggcgtcggcgcgttctcgtccggctacttccgcaagggcgagggcacggcgcccggcctcatctgcttcgagtaccacgtgtgcgtcgcgagcatggtgctgctgctcgtcgcggacgatgcgtactgcttcatggtcgcgtgggagacgctgacgctgtcggcgaccttcctcgtgatgacgaaccaccggatcgccgagatccgccgcgccgcattcgtgtatttcctgatctcgcacgtcggcgcgctcgcgctgctgctgtgcttcggcctgctgcaggcgggcacgggcgactacacgttcgcgaacatgcgcatccagcatctcgacgggctcgccgcatcggccgcgttcgtgctcgcgctcgtcggcttcggcgcgaaagccggcatctttccgctgcacgtctggctgccggacgcgcatccggctgcgccgtcgccggtatccgcgctgctgagcggcttcgtgctgaaggtcggcctgtatggcatattgcgcacggtgctcgatctgctgcacgtgcaggtggcgtggtggggcgtgctcatgctcgcgctcggcctgttcggcgcgttgctcggcgccgtgttcagcacgatccagaccgacatgaagcggctgctcgcctattcgtcgatcgacaacgtcggcctgatgtgcgtgagcctcgggctcacgatcctgttcctcggctaccggctgccctcgctcgccgcgctgtcgctgacggcgctgctgtatcagatcgtcgcgcacgcgtgcttcaagagcctgctgttcctcggcacgggcgccgtgctgcacgcgacgggcgagcgcaatctcggccggctcggcggcttgatccgcttcatgccgtggaccgcgtgggcgatgctcgtcggcgtcgccgcgagcgccgggctgccgccgtcgagcggcttcgtgtccgaatggctgctcgtgcagagcttcctgttcacgccggggctgccggattcggtgctcgggatgacggtgccgctcgtcgcggcgctcgtcgcgctgacggcggcgctcgccggctacgcgatggtcaagttcttcggcatcgtgttcctcggccggccgcgcgaggccaagctcgagcgcgcgcgcgacgcgagcccgtgggagcggatcgcgttcggctggttcgcggccgcgagcgtgctgctcggcctcgcgcccgttcagtacgtgaaggtgctcgatgcgctcacgcgcgcgctcgtcggcgcgggcatcgcgggcacgaatcacgggtggctgctgttcgcgcccgtgtccaccgcgcgcgcgagctacatgccggcgctcttcatgctgttcttcgtcgcgtgctgcgcgctcgcgtggctgctcgtgcggcgcttctatcacggcaggctgcggcgcgcggcgccgtggtcgtgcggcaatccgttcgtgaccgcgcgcatgcaggacacggccgaaggcttcggccagccgatccgcgagatcttcacgccgttcttccggatcgagcggcaactgccgtcgccgttcgatcggcagccggcctaccggatgagcgtcgcggaccgcacgtggcacctgctgtacgagccgatcgccgcgctcgcaaaccgcgtcgccgcgctcgtcgggcggttgcagacgggccgcatcgcgatctatctgacgtacagcttcatcgtgctgatcgtccttctgacggtggtgagacgatggtga

SEQ ID NO: 79554 - protein, 668 aa, Burkholderia pseudomallei K96243
MEQGLLLRCVLFVALAWLALGCAGLANLRRTGVIAHGLFPLGALAGLVLAALGLAGVFAGPSSAVLPLGLPDLPFHLRVDPLSAYFLFVLGVVTAGVGAFSSGYFRKGEGTAPGLICFEYHVCVASMVLLLVADDAYCFMVAWETLTLSATFLVMTNHRIAEIRRAAFVYFLISHVGALALLLCFGLLQAGTGDYTFANMRIQHLDGLAASAAFVLALVGFGAKAGIFPLHVWLPDAHPAAPSPVSALLSGFVLKVGLYGILRTVLDLLHVQVAWWGVLMLALGLFGALLGAVFSTIQTDMKRLLAYSSIDNVGLMCVSLGLTILFLGYRLPSLAALSLTALLYQIVAHACFKSLLFLGTGAVLHATGERNLGRLGGLIRFMPWTAWAMLVGVAASAGLPPSSGFVSEWLLVQSFLFTPGLPDSVLGMTVPLVAALVALTAALAGYAMVKFFGIVFLGRPREAKLERARDASPWERIAFGWFAAASVLLGLAPVQYVKVLDALTRALVGAGIAGTNHGWLLFAPVSTARASYMPALFMLFFVACCALAWLLVRRFYHGRLRRAAPWSCGNPFVTARMQDTAEGFGQPIREIFTPFFRIERQLPSPFDRQPAYRMSVADRTWHLLYEPIAALANRVAALVGRLQTGRIAIYLTYSFIVLIVLLTVVRRW

SEQ ID NO: 79555 - DNA, 2247 bp, Methylococcus capsulatus str. Bath
  CDS (1)..(2247): transl_table=11
gtggttcataacaacccaggccaggccggcaggggtggaaaatcgtccatcgtttcaggcaaacggcttattggcactaaatttgcatgccctggagtatccctctcgccttccccaggttcctccatgacattacttctggcctatgcctccgtggcggccgcgctatcttcgggtctgctggcgctgctgggggagcaccgcgccgcctggacgggaccggcgctgcaggtcgccaagctggtccgcatccccgttcccctgcgcccgaagccggcagtcggccatcatcggcgcttgccgcacgcctggcggcgcatggtgttcgctctcctgacggcgtccggcgtgtcgtccctgggggcgggcctcctgcagctccatgccgatgcggcggtttccggccaactgcctttcggtctgccctggctgcattggcatgtgcggctcgataccctgtcggccttctttctcgtggtgctcggcctgggcgtcatcgccgcgggcgtctacggtccgggctacacccgccagttcgccggccagtactcgttcggggcgctcggtctcttcaccggctcgttcgtggccggcatggagggggtcctgatcgcggacgatgcctatctcttcgtgatcgcatgggaggcgatgacggtatcgagctatttcctggtggtttaccagcacgagcatgcctcgcaccggcgggcggctttcctctacctgctgatgggcgaggtaggcgccatcgccatcatcctcgcgttcggcatcctggccgcggcttcacacagcttcgccttcgacgcctggcgggacgcacacgtcacgccggcctggggaaccgccgccttcctgctggccctggccgggttcgggatgaaggcgggtctggtgccgcttcacgcctggctgccggaagcccatcccgccgcgccggcccacgtttccggcctgatgagcggggtgatgctgaagatcgcggtctacggactgctgcgtttcgcgttcgacctgctgggcgacgtgcagtggtattggggcgcgatcgtgctgggcctcggaaccggctcggcggcgctcggcattctgtacgcggtggtgcagagcgacctgaagcgcctcctggcctactcttcgatcgagaacatggggatcgtgttcatggggttgggcctctgcatggtcttcatcggcaagggacacgtgcagctcgggctgatcggcctggtcgccgccctgtatcacgtgctcaaccactcattgttcaagaacctgctgttcctggcggcgggctcggtggtccaccagacccatcggcacgatctggaacacatggggggtttgatcaagcgcatgccggtcactgccggactgttcctggcgggctcggtcgcgatcgccggcctgccgccgctgaacggcttcgtctcggagtggctgacctttcaggcggccctgcaggcggcgtcggtcatcgacaacggcatcctgcgcagcatggtctcggtggcggcggcgatcctggcgttcaccgccgccgtggccgcggcctgtttcgtcaagctctacggcgtggccttcctgggccagccgcgcgagcggcgctcggcccatgcccacgaggtgtcgcattccggcatgctgtgggcgccggccatgctggccggcctgtgcctgctgctcggggtgcttccgacctgggtgctcgacgccatgcgccccatcacccgccaactgctcggggaaaccctgaccagcgcttcggcccgaggctggctgtggctgacgccgggcggcgtcagcacggcttcgtactcggccccgctggtgctgctggcgatggcgctggcctggtggctcctgcgtcggctcgagcgtcgcgggccggcggccgacgtccggcgcgcgccggcctgggattgcggcttcgggggactgagcccccgcatgcagtacaccgccgccgccttcgctcagccggtcagacgcatcttcgcaccggtgtgggagaccgtcgaaacctcgaccccggagacggcggccgccaatcccttgcaggtcaccgccctgagctaccggctggagatcggggaccgctcctggcgctggctgtacctgccgctgacccgtgtggtcgaggatttggcccgccagacggcgcggatccagaccgggcaggtgcggatctacatcgcgtattccttcatgacgctgatcgttctcctgggagtcgtaagctga

SEQ ID NO: 79556 - protein, 748 aa, Methylococcus capsulatus str. Bath
MVHNNPGQAGRGGKSSIVSGKRLIGTKFACPGVSLSPSPGSSMTLLLAYASVAAALSSGLLALLGEHRAAWTGPALQVAKLVRIPVPLRPKPAVGHHRRLPHAWRRMVFALLTASGVSSLGAGLLQLHADAAVSGQLPFGLPWLHWHVRLDTLSAFFLVVLGLGVIAAGVYGPGYTRQFAGQYSFGALGLFTGSFVAGMEGVLIADDAYLFVIAWEAMTVSSYFLVVYQHEHASHRRAAFLYLLMGEVGAIAIILAFGILAAASHSFAFDAWRDAHVTPAWGTAAFLLALAGFGMKAGLVPLHAWLPEAHPAAPAHVSGLMSGVMLKIAVYGLLRFAFDLLGDVQWYWGAIVLGLGTGSAALGILYAVVQSDLKRLLAYSSIENMGIVFMGLGLCMVFIGKGHVQLGLIGLVAALYHVLNHSLFKNLLFLAAGSVVHQTHRHDLEHMGGLIKRMPVTAGLFLAGSVAIAGLPPLNGFVSEWLTFQAALQAASVIDNGILRSMVSVAAAILAFTAAVAAACFVKLYGVAFLGQPRERRSAHAHEVSHSGMLWAPAMLAGLCLLLGVLPTWVLDAMRPITRQLLGETLTSASARGWLWLTPGGVSTASYSAPLVLLAMALAWWLLRRLERRGPAADVRRAPAWDCGFGGLSPRMQYTAAAFAQPVRRIFAPVWETVETSTPETAAANPLQVTALSYRLEIGDRSWRWLYLPLTRVVEDLARQTARIQTGQVRIYIAYSFMTLIVLLGVVS

SEQ ID NO: 79557 - DNA, 2001 bp, Azoarcus sp. EbN1
  CDS (1)..(2001): transl_table=11
gtgctgcttctcgactggatcctgatcgtcatcgccggctggctcgcgctcgggctcgccggaatcgcggcgctgcgcaacaccgcgttcgtcgcccgcacgctgttcccggcgggcgccgcgctcgggctcgcactggccggattcgcgctcgcggcgatgttcgacacgccgcagaccgcgatcctcgcgctcggcctgccggatctgccgttccacctgcggctcgacggcctgtcggcgttcttcctgttcgtgatcggcgcgaccggcgtcggcatctcgatcttcgccgcgggctatttccgcctcggcgaaggcacgccgccgggcctgatgtgcctcgaatatcacctcttcctcgccagcatggcgatggtcgtgctcgccgacgacgcctatgcgttcatggtgatgtgggagacgatggcgctgtcgtcgttcttcctcgtcacggcgaaccaccgcgtgccggcgatccgcgcagcgggcttcctgtacctgctcgtcgcgcacgtcggcgcgatcgcgatcctgctgtgcttcggcgtgctgcaggcgaacaccggcgactacacgttcgccaacatgcgcgcgcaatcactgccgccgctgtgggcctcggccgcattcctgctcgcgacggtcggtttcggcgcgaaagcaggcatcctgccgctgcacgtgtggctgcccgaagcgcatccggctgcgccgtcgccggtgtcggcgctgatgagcggcgtgatgctgaagaccgcgatctacggcctgctgcgcgtgagcttcgatcttctcggcgcgcagcagtggtggtggggcgtgctgctgctcgcagtgggactggcgacggcgctgtatggcgtcgtgttcagcgcggtgcagaccgacatgaagcgcctgctcgcctattcgtcgatcgagaacatcgggctcctcttcgtcggcctcggcctcggcgtgctgttcaatgcgtacgggatgaccgcgctgtccgcgctggcgctgaccgcagcgctgtaccacgtcatcggccacgcgtttttcaagagcctgctgttcctcgcgacgggctcggtgctgcactcgaccggcgagcgcagcctcggcaagctcggtgggctgatgcgacgcatgccgtgggtcgcgtggctgtcgctcgtcggcgtgctcgcgagctcggggctgccgccgttttccggtttcgtctccgaatggctgctgctgcagagcttcctgttcacgaccgacctgccggactccttcctcaacatgctggtgccggtgctcgccgcaggcatcgcgctggtcgcggcgctcgccggctacacgatggtgaagttcttcggcgtgatctttctcggccagccgcgcgaaccgaagctcgccgaagcccacccggcatcgccgctcgaacgcgccggccttgtatggctcggcgccggctgcgtgctgctcggcctgttcccggtgccgatcatcggcatcatcgaccgcgtcacgcagctcctcgtcggcggcggcatcggcgccacggtgcgggcgaacggctggctgctgctcgcgccgagctcgctcgagcgcgcgagctacaacccgctggtattcctcgttgtcgtcggcctctcggtcctgctcgcggccgtgctcgtgcgccgcttctaccacggccggctgcgccgcgcgccggcgtgggactgcggctatccggcgcagaccgcacgcatgcaggacactgccgagggcttcggccagccgatccgccagatcttcgagccggtgttccgcatgcgacgcgagctgccggcgcccttcgacgcgcggccggtgtatcgggtgacgatcgaggaccatttctggcactggctgtacctccctctcgcgcgcctcacggagcgcgtcgcacgcgtggtcgggcggctgcagcgggggcgcatcgcgatctacctgctgtacagcttcgtcacgctgatcgtgctgctgctggtggcgaaagcatga

SEQ ID NO: 79558 - protein, 666 aa, Azoarcus sp. EbN1
MLLLDWILIVIAGWLALGLAGIAALRNTAFVARTLFPAGAALGLALAGFALAAMFDTPQTAILALGLPDLPFHLRLDGLSAFFLFVIGATGVGISIFAAGYFRLGEGTPPGLMCLEYHLFLASMAMVVLADDAYAFMVMWETMALSSFFLVTANHRVPAIRAAGFLYLLVAHVGAIAILLCFGVLQANTGDYTFANMRAQSLPPLWASAAFLLATVGFGAKAGILPLHVWLPEAHPAAPSPVSALMSGVMLKTAIYGLLRVSFDLLGAQQWWWGVLLLAVGLATALYGVVFSAVQTDMKRLLAYSSIENIGLLFVGLGLGVLFNAYGMTALSALALTAALYHVIGHAFFKSLLFLATGSVLHSTGERSLGKLGGLMRRMPWVAWLSLVGVLASSGLPPFSGFVSEWLLLQSFLFTTDLPDSFLNMLVPVLAAGIALVAALAGYTMVKFFGVIFLGQPREPKLAEAHPASPLERAGLVWLGAGCVLLGLFPVPIIGIIDRVTQLLVGGGIGATVRANGWLLLAPSSLERASYNPLVFLVVVGLSVLLAAVLVRRFYHGRLRRAPAWDCGYPAQTARMQDTAEGFGQPIRQIFEPVFRMRRELPAPFDARPVYRVTIEDHFWHWLYLPLARLTERVARVVGRLQRGRIAIYLLYSFVTLIVLLLVAKA

SEQ ID NO: 79559 - DNA, 1854 bp, Dehalococcoides ethenogenes 195
  CDS (1)..(1854): transl_table=11
atgacagcgggtttttggctcggcgggggtattttgctgctttttgccgccttggcgggcatagtcttcaatcacggcggcaaaaaagtctggcaggcggtgctgtggctgattatagcggcagcggtatgcctgatttgcgggtctttaggggtatttttcggtaacccgctggatatttccctctggagtattgcacccgggctggatatagctttctatattgaccgtctggcctcattttttatcctgataatcagcctggtttcactctgcgtggcaatttattcgctgggttacaataatcacctgttttccaatgaacgtgccaacctgctttcagcctttatgggtattttcatattttccatggccggggtggtggcctcagccaatactttcagcctgttattcttctgggagataatggcgcttagctcctttttcctgatgatgaatgattatcaggcggtatttacccagcgggccggcgtctattatttcgtgcttacccagcttagcactgttttcctgatgctgatggctgtggttatgtatatccaaaacggcagttttgaactcagccttgacggtgcgccgtccggtatccaaagcctcgtttttgtactggcatttctggcttttgggataaaggccggtatcatcccccttcacaagtggctgccttatgcccactcagccagcccctccaatatttccgccctgatgtccggggtaatgctcaaggtggctatttacggtctggtacgcttccttatggatgtgctcagtccggaaatatggtggggggtggtcatactccttttgggagcggtcagcgccttgctgggggtaatatacgccctgaaagagcatgaccttaaaactttgctggctttccacagtattgaaaatatcggcattatcctgatgggtatcgggctgtatgttattttcggtctgtacgggcaggatactttagccctgctggcactcggttcagctttattccacagcctgaaccatgccatctttaaaagcctgctgtttatgactgccgggtcggtggttatggcagtgggtgaccgtaatattgaaaaaatgggcgggctggtgaagctgatgccctacacttcggttatctttctggtgggggcggtttccatatccgccctgccgcctttcaatggttttatgagtgagctgatgctctttgagtctttcttccagtcattttctctggctgaaagcagcataaagatacttctgttcagtgtgctggccatactggcgcttacttcggctctggcggctgcctgttttgtaaaggctttcggggcggtctttctggccatgccccgcagtcaggaagcagcctcggctaaggaagtttcaaaaagcatgattatcgggccggccatactggcagttgcctgtctggtactgggtctttttgcggttcaggtattccagtcggcaggttacagttttgatctgcctgatatgtcactggttggcctggtgctggttatattcggggttttggtcttcggtatggtcaggctgttttcaccccggaaaagccgccggagtgagacatgggcttgcggatatatccgccccaccccccgctttgagtataccgccaccggctttgccgaacctcttttccagatattccggctgatataccgcacccgccactacaatgaacgcagttacgaagataaccagcaggctattttcaagcagggcaagtccgccattcataccttaaagttttttgatgagtatatttacctgccaattgccggtttcttcgggcgtatttcccgtttcgtatcccgcctgtag

SEQ ID NO: 79560 - protein, 617 aa, Dehalococcoides ethenogenes 195
MTAGFWLGGGILLLFAALAGIVFNHGGKKVWQAVLWLIIAAAVCLICGSLGVFFGNPLDISLWSIAPGLDIAFYIDRLASFFILIISLVSLCVAIYSLGYNNHLFSNERANLLSAFMGIFIFSMAGVVASANTFSLLFFWEIMALSSFFLMMNDYQAVFTQRAGVYYFVLTQLSTVFLMLMAVVMYIQNGSFELSLDGAPSGIQSLVFVLAFLAFGIKAGIIPLHKWLPYAHSASPSNISALMSGVMLKVAIYGLVRFLMDVLSPEIWWGVVILLLGAVSALLGVIYALKEHDLKTLLAFHSIENIGIILMGIGLYVIFGLYGQDTLALLALGSALFHSLNHAIFKSLLFMTAGSVVMAVGDRNIEKMGGLVKLMPYTSVIFLVGAVSISALPPFNGFMSELMLFESFFQSFSLAESSIKILLFSVLAILALTSALAAACFVKAFGAVFLAMPRSQEAASAKEVSKSMIIGPAILAVACLVLGLFAVQVFQSAGYSFDLPDMSLVGLVLVIFGVLVFGMVRLFSPRKSRRSETWACGYIRPTPRFEYTATGFAEPLFQIFRLIYRTRHYNERSYEDNQQAIFKQGKSAIHTLKFFDEYIYLPIAGFFGRISRFVSRL

SEQ ID NO: 79561 - DNA, 1731 bp, Eriocheir sinensis
  CDS (1)..(1731): transl_table=5
atggtttgaataatttatatacataagattagaatacttgggctatgagcggggtctttagtttgtggaacagtttctttaataaaattatttagtggtgttactagtgtaattgaatgggatttagcaagattaaattcattatcagtggtgtttgttttaatttttgattgaatttcgatactttttttgtgttttgtattgcttatttctgggagtgtgatgtattatagaggtagatatatgaaggaggataaaaactttaatcgatttatatatttagttttaatgtttgtcttatctatggctataatagttttaagacctaacttggtaagtattcttttaggatgggatggattaggtttagtttcttatgctttagtaattttttatcaaaatgaaaagtctgctaatgctgggatgttaactattttatctaatcgagtaggtgatgttgctattttacttagtattgggctaatggccaggttaggtagatgaaattttgttatttattcttactatattatagatactgagtgaattttgtttaagtttttgttaatgttaagagctatgactaaaagtgctcaaattcctttctcagcatggcttcctgccgctatagcagctcctactcctgtttctgctttagtacattcttctactttagtaactgctggggtgtatttaataattcgatttagtggtgcgttagaaggttctaaaatccaaggaatattattaattatttcttgcttaactatatttatggcgggattaggggccaattttgaatatgatttaaaaaaaattattgccttatcaacgttaagtcaattgggggttatgttaagtattttagctttaggataccctgatctttctttctttcatctgctgagtcatgcattatttaaagcattgttatttatatgcgcaggtattattatccatagggttggcaattatcaggatattcgatgtataggtggtctaattaaatttatgccgttaagagtgtcttttataagagtttcaaatttagccttatgtgggttcccttttttagcagggttttattctaaagatataattttagaggtggcttttatgagatggattaattttatttctttactgttatatattttagctacagggttaacagttatgtatactatacgtctaattttttataggttaagaggtaattcaaatttaagagttataataaatattagggatgaggataaaattataagaaattctatgattttactaggtgtaagagctatttttataggagctgttctatcttgggttattttcccagagccttatataatttgtttgaatgtaataatgaaaaatatagtgttgggggtaagattagcagggggagttataggttatatatttaatttattaaatgtaagttacaatttaaaatctattaataattataagatagtagtaataagggggtctatatgatttataccttttcttaggacaaaaaaaattagagggtctagtctcattagtggggtaggtgttgaaaaattaggagacaaagggtgatttgaatattttggtggtcaggggatgtattttttgtttaagaaatattttaggttgttaaatgagttacaacttaataatattaaagtgtttataaaaatttttgtggttgggttggtgattatattgtttgtttttgtgtag

SEQ ID NO: 79562 - protein, 576 aa, Eriocheir sinensis
MVWMIYMHKISMLGLWAGSLVCGTVSLMKLFSGVTSVIEWDLASLNSLSVVFVLIFDWISMLFLCFVLLISGSVMYYSGSYMKEDKNFNRFMYLVLMFVLSMAMMVLSPNLVSILLGWDGLGLVSYALVIFYQNEKSANAGMLTILSNRVGDVAILLSIGLMASLGSWNFVIYSYYIMDTEWILFKFLLMLSAMTKSAQIPFSAWLPAAMAAPTPVSALVHSSTLVTAGVYLMIRFSGALEGSKIQGMLLIISCLTMFMAGLGANFEYDLKKIIALSTLSQLGVMLSILALGYPDLSFFHLLSHALFKALLFMCAGIIIHSVGNYQDIRCMGGLIKFMPLSVSFMSVSNLALCGFPFLAGFYSKDMILEVAFMSWINFISLLLYILATGLTVMYTMRLIFYSLSGNSNLSVMMNISDEDKIMSNSMILLGVSAIFMGAVLSWVIFPEPYMICLNVMMKNMVLGVSLAGGVMGYMFNLLNVSYNLKSINNYKMVVMSGSMWFMPFLSTKKISGSSLISGVGVEKLGDKGWFEYFGGQGMYFLFKKYFSLLNELQLNNIKVFMKIFVVGLVIMLFVFV

SEQ ID NO: 79563 - DNA, 1935 bp, Dehalococcoides sp. CBDB1
  CDS (1)..(1935): transl_table=11
atgatagcgggtttattgcttggcggagggtttttactactggccgctgccctgacgggcattgtgtttaatcatggcagtaaaaaagtctggcaaggggtactatggctggttatagcggcggcgctatgcttgcttattgggtctttgcagatatttttcggtaatccgctggatatttccctctggagcattgcatccgggctggacatagcctttcatcttgaccgtctggcatcattctttgtcataataatcagccttatttctctctgcgtagccgtgtattcgctgggctacaataaccatatatcttcaaacgaacgagccaatctgctctcagcctttatggcggtcttcatactctccatgataggcgtggtggcctcggccaacacctttagcctgatatttttctgggagattatggcactaagctccttctttttgatgatgaatgactatcaggagtcttttacccagcgggcgggcatttattatttcgtgcttacccagcttagtacggttttcttgatgctgatggccgtagttatgtatattcagaacggcagtttcgcactcagcctgagcggtgcatcctccgtcatccagagtctggtttttgttctggcatttctggcattcggaataaaggccggtatcataccccttcacaagtggctgccttatgcccactctgccagcccttcaaatgtctctgccctgatgtccggggtaatgctgaaagtggccatttacggcttggtacgcttccttatggatgtgcttagcccggaaatgtggtggggtgtgggaatactcctgttcggggcaattagcgccctgttgggggttatatatgctcttaaagagcatgatttaaagaccctgctggcctttcatagtattgaaaatatcggcattatcctgatgggtattggtctgtatgttatttttggcttgtatggtctggatacgctggctatgctggcacttggttcagctttgtttcacagtctgaatcatgccatttttaaaagcctgctttttatgaccgccggttcggtggtaattgccgtgggtgaccgcaatattgaaaaaatgggcgggttgattaaactaatgccctacacttctgttatctttctggtgggggcagtttccatatcggctttgcctcccttcaatggttttatgagtgagctgatgctctttgagtcttttttccagtccttctctctggctgaaagcagtataaagatacttcttttcagtgtactggccatactggctcttacttcagctctggcggccgcttgctttgtaaaggccttcgggacggtctttctggctatgcctcgcagtcaggaagcagcctctgccaaagaagtttcaaaaagtatgattatagggccggccatactggcagttgcctgtctggtattgggtctgtttgctgtccagatattttcggtagccggatatagttttgacctgccggatatgtcactggttggcttggtactggttatcttcggggttttggttttcggcatggtcaggctgttttcgccccgaaaaagccgccggagcgagacctgggcttgcggctatgttcgacctactccccgctttgagtataccgcctccggttttgccgagccccttttccagatattccggctgatataccgcacccgccattacaatgaacgcagttacgaagataaccagcaggctattttcaaacagggcaaatcagctattcacaccataaagttttttgatgagtatatttatctgccggttgccggtttgttcgggcgtatttcccgtttcatatcccgcctgcaggatgttgatttgggcagccatatcctgtacagctttataactgttttgctggttatactggcggcaaggtggctgtggtga

SEQ ID NO: 79564 - protein, 644 aa, Dehalococcoides sp. CBDB1
MIAGLLLGGGFLLLAAALTGIVFNHGSKKVWQGVLWLVIAAALCLLIGSLQIFFGNPLDISLWSIASGLDIAFHLDRLASFFVIIISLISLCVAVYSLGYNNHISSNERANLLSAFMAVFILSMIGVVASANTFSLIFFWEIMALSSFFLMMNDYQESFTQRAGIYYFVLTQLSTVFLMLMAVVMYIQNGSFALSLSGASSVIQSLVFVLAFLAFGIKAGIIPLHKWLPYAHSASPSNVSALMSGVMLKVAIYGLVRFLMDVLSPEMWWGVGILLFGAISALLGVIYALKEHDLKTLLAFHSIENIGIILMGIGLYVIFGLYGLDTLAMLALGSALFHSLNHAIFKSLLFMTAGSVVIAVGDRNIEKMGGLIKLMPYTSVIFLVGAVSISALPPFNGFMSELMLFESFFQSFSLAESSIKILLFSVLAILALTSALAAACFVKAFGTVFLAMPRSQEAASAKEVSKSMIIGPAILAVACLVLGLFAVQIFSVAGYSFDLPDMSLVGLVLVIFGVLVFGMVRLFSPRKSRRSETWACGYVRPTPRFEYTASGFAEPLFQIFRLIYRTRHYNERSYEDNQQAIFKQGKSAIHTIKFFDEYIYLPVAGLFGRISRFISRLQDVDLGSHILYSFITVLLVILAARWLW

SEQ ID NO: 79565 - DNA, 2010 bp, Geobacter metallireducens GS-15
  CDS (1)..(2010): transl_table=11
atggaagcatcaacggcagggcctgacaatcctgtcagcctggtcatagccggcgcgctcctgatcggcgcgtcgggcattccgggcctttttctccccaagaagctggactgggggcagaaatgcgcctctctcaccgtcgttctcggctccatcctgggaatcatcggtgccctggcaacgctctttactgaacggaccgtctcctacaccctcgtaagctcgcttcccttcggcccccttgaggccggcatcgacccgctctccgccttcttcctcctccccgtcttcatcgtcagcgcctgctgcgccgtgtacggcatcggctactggcccgccagccaccacccccgcacggcaccgcggctcacctttttcttcggcgtcctcgccgcttccctggcattggtccccctggcccggaacggagtcctttttctcatcttctgggagatcatggccctttccgcctactttgccctcgccaccgacgatctggagcaggaggttcgagacgcatccctcatctatctcgtggcaacccacgcaagcaccctcaccctcttcgcctgcttctccctgctaaaagcgactgccggttccttttcatttcctgcgacaacggcgctggacggaacaactccccttggggccgccattttcgtgaccgctctcctgggctttggcctcaaggcaggggtgatgccgcttcacgtctggctcccgggcgcccatgccagcgcaccgagccacgtgtcggccctcatgtcgggagtcctcatcaagatgggaatctacggcatggtccgcatcctctccttcttcggagtggtcccgccctggtgggggatggttcttcttatggcgggaattgtgtcgggaatcctcggggttgcctttgccgtgggacagcacgacctgaagcggctcctggcctaccacagcatcgaaaacatcggcatcatcgtcatggggctcggcgttgccctcatcggcaggggagcgggactgccgctcctggtggtcctcgggctcgggggggcgcttctccatatcctgaatcacgcccttttcaagtccctcctcttcctcggggccggtgcggtaattcacgaggctgggacccgggagatcgacagcctcggcgggctgggccgacggatgccctggaccgcggccctctttctcaccggcgccgtggccatttgcggactcccccccctgaacggctttgtgagtgagcttctcgtctatctcggctttttctccggcctcgtgcaggaaaagggggccgcggcccccctgctggggctggcggcgccggccctggccatggtgggagggatggcggtcctctgcttcgtgaaggtattcggcacggtcttcctggggttaccccggtcgtccgacgcggccgggtgccacgaaccggggtgggccatgcggggccccatgatgctccttgccatactctgcgcagccatcggcctcctccccgtggcactcccacgctttctggagccggccctctttgcctggagcccccagctcccctttgccggcgtccggctggcggatgcggcgccctttggctggattaccctcatggggctcatcctccttctggcgattctcggcatcggcgcctggctctggaagcgggtaacggatcaacctcgggggagagtcggcacctggggctgcggctttgcccgtcccactgtccggatgcagtacaccgcctcttcctttgcagagatgttcgtgaacctattcgccgcggtgctccgcccccgggtccacccgcccaaggttcagggcctcttcccggggaaaagcgccttttcgagccatgttcccgaagcggtactggaactggtcatcacgccgctcctctcggccatggaccggaggttctctctggcccgcaagctccagcacggccggctccacctttatatcctctacatcttcgtgacgctggcgctcttgctggcgtgggcctattaa

SEQ ID NO: 79566 - protein, 669 aa, Geobacter metallireducens GS-15
MEASTAGPDNPVSLVIAGALLIGASGIPGLFLPKKLDWGQKCASLTVVLGSILGIIGALATLFTERTVSYTLVSSLPFGPLEAGIDPLSAFFLLPVFIVSACCAVYGIGYWPASHHPRTAPRLTFFFGVLAASLALVPLARNGVLFLIFWEIMALSAYFALATDDLEQEVRDASLIYLVATHASTLTLFACFSLLKATAGSFSFPATTALDGTTPLGAAIFVTALLGFGLKAGVMPLHVWLPGAHASAPSHVSALMSGVLIKMGIYGMVRILSFFGVVPPWWGMVLLMAGIVSGILGVAFAVGQHDLKRLLAYHSIENIGIIVMGLGVALIGRGAGLPLLVVLGLGGALLHILNHALFKSLLFLGAGAVIHEAGTREIDSLGGLGRRMPWTAALFLTGAVAICGLPPLNGFVSELLVYLGFFSGLVQEKGAAAPLLGLAAPALAMVGGMAVLCFVKVFGTVFLGLPRSSDAAGCHEPGWAMRGPMMLLAILCAAIGLLPVALPRFLEPALFAWSPQLPFAGVRLADAAPFGWITLMGLILLLAILGIGAWLWKRVTDQPRGRVGTWGCGFARPTVRMQYTASSFAEMFVNLFAAVLRPRVHPPKVQGLFPGKSAFSSHVPEAVLELVITPLLSAMDRRFSLARKLQHGRLHLYILYIFVTLALLLAWAY

SEQ ID NO: 79567 - DNA, 1983 bp, Geobacter metallireducens GS-15
  CDS (1)..(1983): transl_table=11
atgttcctccttgatccaacgttatttctactggttgcggcgtcctgtgttgctctctcgggtattccggggctgttggcgcgccgctctgcctgggggcaacggatcgcggccatacttgtaatcgctgcgtcgtgccttggcgaggtggctgtcatctcgctcctgtccggcattcccgcttcatcataccagattgactggccccttccttttggaccggcgctcttttccgccgatcatctttccacaatattcctctttccgctcttcctggttaccggtgctgtcgctctgtattccgtggcctactggccggccagggaaaaggcgagcgccggaaggctcaccttctttctcggactctttgccgccgcgatgatcatcgtggtcatggcccgtaacggggtgctgtttctcatggcctgggaggtcatggcgctctctgcctatttcctgctgaccaccgagcagcagagctccgatgttcagcgagtcggaacggtctaccttcttgccacccacaccggcaccatggcgctgtttgtcatgttttccctgctgcgcgggactgtcggcacgttcgcgtttccagccacgcatgccctttccttgaccgtgcctgttgcgacaacggtcatcataaccgccctgatcgggtttggcggcaaggcgggcctcatgcccctgcatttctggcttcccggcgcccatgccaatgcccccagtcacgtttcggcgatgatgtcggggttgatgctcaagatgggtgtgtacggcatcctgcggaccttgtcgtttttcgatcagctgccggtatggctcggctggctcatactcctgctcggtgcctggtccgccattaacgggattgccctggcagcaggacagcgcgacctgaaacgcctgctggcctgcagcagtatcgagaatatcggcattgtctttatcggcatcggcctggctctggtcggcctgaaccagcacgcgccatatctggtggtgtgcggccttgcgggcgcctttatccatatcgtcaaccatggcctgttcaagtcgctcctcttcttgggaagcggggtgctgatacatggcaccggaacccgggagatcgaccggatgggggggcttgcccggcgcatgccggtaacatcgccgctctttctggtcgggtcgctcgccatatgcggtttgccgccgctcaatggatttgtcggcgaattttttctctatatcggtgccatcaccgatggcatcgtcgctccgttgccgctggcggccctggttgcgcctgtcctggcgctggttggcgggctggcggtcctgaccttcgtcaagcttttcgggatcgtctttctcggctctccccgctcggtcgaatctgcccatggccatgaagcatcggcggtgatgaccggaccaatgatgttgctggccggcggatgcctggttgcaggtatggcaccggtgctgctggtgcggctggttaccccggttgtcggcttctatgccgggctcaccccccaggatagtgcccaggttatggggcagatcccccttgtggcgctcacctgcgccaacgtgctccttcttgtggtcattctggctgtcggcgcggcataccgccggcggctgcgtacatctccccgttcccagggaagcacgtgggggtgcggctatctcgagcctacaccccggatgcaatataccggcacatcgttcagcgagatggcggtaagcctgctggggagtatcgttgcccccaaccgtcgcaggcccacgcttgatacgcccattcctcccgccgacgcccgtttcagctatgagacaaccgaaaccgtgctggaccggattctgattcccgtcttccgggtcgtcggcacggcattttcctatctcaggaaagtgcagcacggccagcttcatatttacgtgttgtatatattcgccacgctctgcgtcctgatgatctggaagcactga

SEQ ID NO: 79568 - protein, 660 aa, Geobacter metallireducens GS-15
MFLLDPTLFLLVAASCVALSGIPGLLARRSAWGQRIAAILVIAASCLGEVAVISLLSGIPASSYQIDWPLPFGPALFSADHLSTIFLFPLFLVTGAVALYSVAYWPAREKASAGRLTFFLGLFAAAMIIVVMARNGVLFLMAWEVMALSAYFLLTTEQQSSDVQRVGTVYLLATHTGTMALFVMFSLLRGTVGTFAFPATHALSLTVPVATTVIITALIGFGGKAGLMPLHFWLPGAHANAPSHVSAMMSGLMLKMGVYGILRTLSFFDQLPVWLGWLILLLGAWSAINGIALAAGQRDLKRLLACSSIENIGIVFIGIGLALVGLNQHAPYLVVCGLAGAFIHIVNHGLFKSLLFLGSGVLIHGTGTREIDRMGGLARRMPVTSPLFLVGSLAICGLPPLNGFVGEFFLYIGAITDGIVAPLPLAALVAPVLALVGGLAVLTFVKLFGIVFLGSPRSVESAHGHEASAVMTGPMMLLAGGCLVAGMAPVLLVRLVTPVVGFYAGLTPQDSAQVMGQIPLVALTCANVLLLVVILAVGAAYRRRLRTSPRSQGSTWGCGYLEPTPRMQYTGTSFSEMAVSLLGSIVAPNRRRPTLDTPIPPADARFSYETTETVLDRILIPVFRVVGTAFSYLRKVQHGQLHIYVLYIFATLCVLMIWKH

SEQ ID NO: 79569 - DNA, 2025 bp, Rhodospirillum rubrum ATCC 11170
  CDS (1)..(2025): transl_table=11
atgagcacaacgcaagttttcctcggcgccttcgccgtcctcgccgcccttccggtcctcaccctgctggccggaaaccgcaagtccctggcggggtcgatcacgctggtcggcgtcggtgtcgcctgcctcgccatgctcgggctggccgtcaccgctctgaccgtagggccgatcgccttcgatctgggaaccgtgccgctgtttggcctgacctcgagcctcgccttcaccatcgacggcctgagcgcgatcttcgtcatcttgatttccgtgctcggcaccgcctcggccctctattcggtgggctatatcgcccattaccccgatgaggacgcccggcgctattacgtgcctttcccgctgttcatcgccggcatgctgatggtggcgacgacctcggactggttttgtttcttcttcggctgggagttcatgaccctggtttcctatttcctggtgacgttcgagaaccgggataaggagaacctgtcggcgggcttcatctatttcttcatgacccagctcacctcgatggggctgatgttggctatcatcgtgctgggcacctggggcgggtcgacctccttcgccgccgtcgccaagaccctgggcgcccttcaggccgagaatccggtcgccctttacgggctgcttagcctgttcttcatcggcttcgccaccaaggccggcatgttcccgctgggcatctggctgcccaaggcccatccggccgccccggccagcgtgtcggcgctgctgtcgggcgtgatgatcaagcttggcatctacggcatgctgcgcatcttcctgtgggccctgccgctgggcgaggccacccatgtctggggcatggtgatcaccctgtttggcgtgctgtcgatgctggtcggcaccctgcgcgccctgggcgaacacgattgcaagcgcctgctggcccagcattccatcggccagatgggctatgtgctgcttggcctcggcctgggtctgaccttccttggcagcaatccgctgttcgccgcgcttggctttcttggctgcctctatcatctgatcaaccacgcctgcttcaagtcgctgctgtttttcaacaccggctcgatcctctaccgcgccggcacccgcgaccttgattcgctgggtggcctgtcggcggtgatgccgctgaccgccggctgcgccctggtcggcgccctgtcgatcgccggcaccccgccgttcaacggcttcgtcagcaagtggctgctttatcaaagcgctatcttcggcgacgtcagcacccccgtttacatcctggccgccgtcgtcgccattttcatcggcaccgtcaccctggcctccttcgtcaaatacatgggcaccgcctatcttggcaccttgcccaagcgcttcgtcggcagcggctttggctgcccgcggtcgatggaggcggtcgaggtgttcctggccgtggtctgtctggtgatgggcgttttccccggcccggtggtcgccaccttgcttggcgtgctggatccggccttcgccggcgccggcgtcgatcttggccccagcgtgctgagcgccctgccgtggtcggggctgtcggtcacctcggcctcgggcacgaccctcaccgtcttcgcgccgctggtggtgatcggtggactggccgtcagcttcgccctgtcggcgctgatccacggcgcggtcaaggtgccctcgcgcccggcgcagatctggaactgcggcgaggagatcgacgacgaactggtgcgctaccgcgcttcaagcttctacagcccgtttaagaagctgatcgccccggtctatcgccagcacccgttccccaccctgtcgctgccggcgctgctgccccggctcctcgatctcgacaagtggctctatttcccgatcggcgcgctttttcgcaaatccagcaaggcgatcagccgggcccatacgggtgttccccagctctacctgtcctggcaggtggcgggtggcgccctggccatcgtcttcgccctctggctgatgtga

SEQ ID NO: 79570 - protein, 674 aa, Rhodospirillum rubrum ATCC 11170
MSTTQVFLGAFAVLAALPVLTLLAGNRKSLAGSITLVGVGVACLAMLGLAVTALTVGPIAFDLGTVPLFGLTSSLAFTIDGLSAIFVILISVLGTASALYSVGYIAHYPDEDARRYYVPFPLFIAGMLMVATTSDWFCFFFGWEFMTLVSYFLVTFENRDKENLSAGFIYFFMTQLTSMGLMLAIIVLGTWGGSTSFAAVAKTLGALQAENPVALYGLLSLFFIGFATKAGMFPLGIWLPKAHPAAPASVSALLSGVMIKLGIYGMLRIFLWALPLGEATHVWGMVITLFGVLSMLVGTLRALGEHDCKRLLAQHSIGQMGYVLLGLGLGLTFLGSNPLFAALGFLGCLYHLINHACFKSLLFFNTGSILYRAGTRDLDSLGGLSAVMPLTAGCALVGALSIAGTPPFNGFVSKWLLYQSAIFGDVSTPVYILAAVVAIFIGTVTLASFVKYMGTAYLGTLPKRFVGSGFGCPRSMEAVEVFLAVVCLVMGVFPGPVVATLLGVLDPAFAGAGVDLGPSVLSALPWSGLSVTSASGTTLTVFAPLVVIGGLAVSFALSALIHGAVKVPSRPAQIWNCGEEIDDELVRYRASSFYSPFKKLIAPVYRQHPFPTLSLPALLPRLLDLDKWLYFPIGALFRKSSKAISRAHTGVPQLYLSWQVAGGALAIVFALWLM

SEQ ID NO: 79571 - DNA, 2022 bp, Moorella thermoacetica ATCC 39073
  CDS (1)..(2022): transl_table=11
atgcttacgcaacagcttctgctactctctgtgctcttgtacgttgccggagcccttgcctccctggctcttaatcgggccggtaaaattgccaactatgcttcaggtataagtgcccttgcagcagcaggtaccgggatggcctcggccgtccaggtacttgccggcggagcagcttttacctgggaagcggcggggtttataccctttgccaagtttattataaaggttgatcccctctctgcctttatgttactggttatttcccttctgacaggggctacggctctatattccctctcgtacctggatgagtataccggtaaaggcgcaggggttatgggttttttcaataacctctttattgcctctatggtattagtggtcattagtgggaatgctttttattttctaattttctgggaactgatgacgctggcctcttatttcctggttagctttgatcaggaagacagtgaagctgtcaaggccgggttcatctatctttttatggcccacgcgggaacggctttgattatgctggcttttatcttattctttgtctatacaggtaccttcgatttcgcttccttccgtggggcgaacctcccggtgtttacaaagagcttgatcttcctgctagctttcctgggattcggggccaaggccggtattattccgctccatatctggctgccgaaggctcacccggctgctccgtccaacgcttccgctctcatgtcgggtgtcatgattaaaaccgctatctatggtattctcagggtcagtgtcgatttcctgggggcttctgtttggtggtggggatttattgtcctggcctccggagcgatttcagcagttctgggtgttctctacgccctgggggagcacgatataaagcggctgctggcctatcacagtgttgaaaacgttgggattatattgatgggagccggcgccggcatgatcggcatcgctgccggccagcctgttttaggagtactcgggatcctggcaggcctctaccacttgttaaaccatgccgtctttaaaggcttgctctttcttggggcaggttcggtaatatatcgaacccatacgaaacatatggaggaacttggcggactggccaggcgcatgccctggacggcactcgcttttctggttggtgctgtagccatctcagccatccctcccctcaacggatttgtcagtgagtggtttacctaccagtcgttgtttattgcgagcaccagcagcatcctggctgtgagagtgtttgcgcccctgtttgttgttatgttagccctgacgggcgcgctggcggcgatgtgttttgtgaaggcatatggggttacttttggcggtccctgtcgcagcgggcatgcccgtgaggccagggaggttcccataccgatgcttgccgggatggcaattctggcaattagctgcattatcctcggtgtgggtgcaccggttgttgctccttatattggaaaggtggcttcggcattattagccattactgcggtccaggtaagcgacggtttgctggtatttcctgcaaacagcatgcaggccatgctctccacaccgctcatcgccattctcctcgttggtcttgctacgttacccttgttaattatcgggatccaaggtggtttccaggccggacggcgtatcgatgctgagccgtgggcatgtggatacaagtattcaccgcggatggcctataccgcaactgcctttgctcagccgttgcgcgtactttttcggccggtttattcgctcaggaccaccctcgatggacctggctataccgttgcatcgtatttcaaaggagcagtggtctacatcgccagtgtagaatcgttgtgggaacgttacatttacgctcctctggcacggggcacggtatatctgggtaaaaaattgcaggccttccagatagggaacgtcaggctatattgtctctatataatcataaccctcgtagtcctgttattagcgacggttagatag

SEQ ID NO: 79572 - protein, 673 aa, Moorella thermoacetica ATCC 39073
MLTQQLLLLSVLLYVAGALASLALNRAGKIANYASGISALAAAGTGMASAVQVLAGGAAFTWEAAGFIPFAKFIIKVDPLSAFMLLVISLLTGATALYSLSYLDEYTGKGAGVMGFFNNLFIASMVLVVISGNAFYFLIFWELMTLASYFLVSFDQEDSEAVKAGFIYLFMAHAGTALIMLAFILFFVYTGTFDFASFRGANLPVFTKSLIFLLAFLGFGAKAGIIPLHIWLPKAHPAAPSNASALMSGVMIKTAIYGILRVSVDFLGASVWWWGFIVLASGAISAVLGVLYALGEHDIKRLLAYHSVENVGIILMGAGAGMIGIAAGQPVLGVLGILAGLYHLLNHAVFKGLLFLGAGSVIYRTHTKHMEELGGLARRMPWTALAFLVGAVAISAIPPLNGFVSEWFTYQSLFIASTSSILAVRVFAPLFVVMLALTGALAAMCFVKAYGVTFGGPCRSGHAREAREVPIPMLAGMAILAISCIILGVGAPVVAPYIGKVASALLAITAVQVSDGLLVFPANSMQAMLSTPLIAILLVGLATLPLLIIGIQGGFQAGRRIDAEPWACGYKYSPRMAYTATAFAQPLRVLFRPVYSLRTTLDGPGYTVASYFKGAVVYIASVESLWERYIYAPLARGTVYLGKKLQAFQIGNVRLYCLYIIITLVVLLLATVR

SEQ ID NO: 79573 - DNA, 2007 bp, Burkholderia thailandensis E264
  CDS (1)..(2007): transl_table=11
atggaacagggcctgcttctccgatgcgtgctgttcgtcgcgctcgcgtggctcgtgctcggctgcgccggactcgcgaacatgcgccgcaccggtgtgatcgcacacggcctgtttccgctcggcgcgctggccgggctcgcactcgcggcgctcggcctggccggcgtgttcgccgcgccgtcgaccgccatgctgccgctcggcctgcccgatctgccgttccatctgcgcctcgacgcgctgtccgcctacttcctgttcgtgctcggcgtggtgaccgcgggcgtcggcgcgttttcgtccggctatttccgcaagggcgagggcaccgcgcccggcctcatttgcttcgaataccacgtgtgcatcgcgagcatggcgctcttgctcgtcgcggacgacgcatactgcttcatggtcgcgtgggagacgctgacgctgtcggcgacctttctcgtgatgacgaaccaccggatcgccgagatccgccgcgccgcgttcctctatttcctgatctcgcatgtcggcgcgctcgcgctgctgctgtgcttcggcctgctgcaggcgggcacgggcgattacacgttcgcgaacatgcgcgtgcagcatctcgacggactggccgcgtcggccgcgttcgtgctcgcgctcgtcggcttcggcgcgaaggcgggcattttcccgctgcacgtgtggctgccggacgcgcatccggccgcgccgtcacccgtgtccgcgctgctgagcggcttcgtgctgaaggtcggcctgtacggcatcctgcgcacggtgctcgacctgctgcacgtgcaggtggcgtggtggggcgtgctcatgctcgcgctcggcctgttcagcgcgctgctcggcgtggtgttcagcacgatccagaccgacatgaagcggctgctcgcctattcgtcgatcgacaatgtcggcctgatgtgcgtgagcctcgggctcacgatcctgttcctcggctaccggctacccgcgctcgccgcgctgtcgctgacggcgctgctgtatcagatcgtcgcgcacgcgtgcttcaagagcctgctgttcctcggcacgggcgcggtgctgcacgcgacgggcgagcgcaatctcggccggctcggcggcctgatccacttcatgccgtggaccgcgtgggcgatgctcgtcgccgtcgccgcgagcgccgggctgccgccgtcgagcggcttcgtgtccgagtggctgctcgttcagagcttcctgttcacgcctgggctgccggattcggtgctcgggatgacggtgccgctcgtcgcggcgctcgtcgcgctgacggccgcgctcgccggctacgcgatggtcaagttcttcggcatcgtgttcctcggccagccgcgcgaggcgaagctcgagcgcgcgcgcgacgcgagcccgtgggagcgcgtcgcgttcggctggttcgcggcggcgagcgtgctgcttggcctcgcgcccgtccagtacgtgaaggtgctcgatgcggtcacgcgcacgctgatcggcgcgggcatcggcggcacgaaccacgggtggctgctgttcgcgcccgtgtccaccgcgcgcgcgagctacatgccggcgctcttcatgctgttcttcgtcgcgtgctgtgcgctcgcgtggctgctcgtgcggcgcttctaccacggacggctgcggcgctcggcgccgtggtcgtgcggcaatccgttcgtgaccgcgcggatgcaggacacggccgaaggcttcggccagccgatccgcgagatcttcacgccgtttttccggatcgatcggcagttgccgtcgccgtacgaccggcagccggcataccggatgagcgtcgccgaccgcacctggcatctgctgtacgagccgatcgccgcgctcgtgaaccgcgtcgccgcgctcgtcgggctgttgcagacgggccgcatcgcgatctatctgacgtacagcttcttcgtgctgatcgtcctgctgacggtggtgagacgatggtga

SEQ ID NO: 79574 - protein, 668 aa, Burkholderia thailandensis E264
MEQGLLLRCVLFVALAWLVLGCAGLANMRRTGVIAHGLFPLGALAGLALAALGLAGVFAAPSTAMLPLGLPDLPFHLRLDALSAYFLFVLGVVTAGVGAFSSGYFRKGEGTAPGLICFEYHVCIASMALLLVADDAYCFMVAWETLTLSATFLVMTNHRIAEIRRAAFLYFLISHVGALALLLCFGLLQAGTGDYTFANMRVQHLDGLAASAAFVLALVGFGAKAGIFPLHVWLPDAHPAAPSPVSALLSGFVLKVGLYGILRTVLDLLHVQVAWWGVLMLALGLFSALLGVVFSTIQTDMKRLLAYSSIDNVGLMCVSLGLTILFLGYRLPALAALSLTALLYQIVAHACFKSLLFLGTGAVLHATGERNLGRLGGLIHFMPWTAWAMLVAVAASAGLPPSSGFVSEWLLVQSFLFTPGLPDSVLGMTVPLVAALVALTAALAGYAMVKFFGIVFLGQPREAKLERARDASPWERVAFGWFAAASVLLGLAPVQYVKVLDAVTRTLIGAGIGGTNHGWLLFAPVSTARASYMPALFMLFFVACCALAWLLVRRFYHGRLRRSAPWSCGNPFVTARMQDTAEGFGQPIREIFTPFFRIDRQLPSPYDRQPAYRMSVADRTWHLLYEPIAALVNRVAALVGLLQTGRIAIYLTYSFFVLIVLLTVVRRW

SEQ ID NO: 79575 - DNA, 1902 bp, Acanthaster planci
  CDS (1)..(1902): transl_table=9
atggtaatagaaatcacgagaataattgcaaccataaaagtcaccattataaccatactatttgtctccatattttgcctccagggaactacattgccctataaaagaggccctaaccttaactttggagcacttcatgataaaaagttcgaatacacacacaaaagaaggctattattttcatctgtactaaagagatcagccctcctctcactcataccgctcttcctgaaagtaaaattcaaaaccccagagacaatagtctccgtaaccgaatgacttcccaaaaacgcacatctcattaacctcgaactacgattcgacctttcattcaaactattcttttcagttgcactattcgtctcctgatcaatcctagagttctcacactactatatggcacaagacccagcaccgaacaaattcttccgcctcctaataattttcctactaaaaatgatcatactcacctccactgaaaacgtattccttttatttataggctgggaaggagtcggattcttatcattcttattaataagatgatgaactacacgagcaagagcaaaaaaatctgcccttcaggcagtaatctacaaccgaataggagacataggtatactcctatctttctccctcagggttacaacctttaactcctgaactttatcggaaatatttatcctacagcccaggggctctctcaggaatattctgctagttggagccctcatagctgccgcgggaaagtccgcccaattcggtttacacccctgactcccagcagcaatggaagggcccacccctgtatcagccctcctccacagctctacaatggtagtagcaggaatattccttctaatccgccttggtcctgtatactcaaacgtaaaaacctttaaaacgtgatgccttatactaggctccatcacggccatatttgctgcaacaaccgcaatctctcaacacgacataaagaagataatagcatactccactaccaggcaactagggctcatgatggtagccataggcctaaaccaaccagaaattgcactattccatatttgcacacacgcattcttcaaggcaatgctgttcctatcctctggtagaatcatccacagactaaaggacgaacaagacatacgaaagatgggcgggctccacctaatactccccaacacaaccgcttgtattatcctgggaagacttgccttatctggtacaccattcctggccggattttactccaaggacctaatattagaattaggcctctctaaactttcgaacctgataggaattgttttggcccttctagcaaccctcctaaccgcggcatactcattccgcatcatacacttctgcttcaccaaaagaccagccttctcacccctttctcctaccagagaagaaaaaatcaaactaaccaaagtgttaaaacgactagctattggtacaataatctcaggatggttaatatcaaactttatcctacagcccccgaaaatcaccatcagactcacccttaagagcctcgctgccctattaactgtttccggaatagtattaacagcatcactacttcgcactctttccctaaaaatgccccccaaaaacctcataaacgccaaaacattcaccacaaaacagtgattttacgaacacgcatcccacaacatcctcacgagcttatctttctcgctctctttaacaggaagaacccaaaggatagaccgaggatgaagagaaaatctaggcgcacaaggaataaactcggcctcttctgaaatttcccgggagtaccaactaacccaaacaggctatattaagcagtaccttctcctctctaccaccactttcaccattatagccatagtctccaccacctttctataa

SEQ ID NO: 79576 - protein, 633 aa, Acanthaster planci
MVIEITSIIATINVTIITILFVSIFCLQGTTLPYNSGPNLNFGALHDNKFEYTHNSSLLFSSVLKSSALLSLIPLFLNVNFNTPETIVSVTEWLPNNAHLINLELRFDLSFNLFFSVALFVSWSILEFSHYYMAQDPAPNNFFRLLIIFLLNMIILTSTENVFLLFIGWEGVGFLSFLLISWWTTRASANNSALQAVIYNRIGDIGILLSFSLSVTTFNSWTLSEIFILQPSGSLSNILLVGALIAAAGKSAQFGLHPWLPAAMEGPTPVSALLHSSTMVVAGIFLLIRLGPVYSNVNTFNTWCLILGSITAIFAATTAISQHDIKKIIAYSTTSQLGLMMVAIGLNQPEIALFHICTHAFFKAMLFLSSGSIIHSLKDEQDIRKMGGLHLILPNTTACIILGSLALSGTPFLAGFYSKDLILELGLSNLSNLIGIVLALLATLLTAAYSFRIIHFCFTNSPAFSPLSPTSEENINLTNVLNRLAIGTIISGWLISNFILQPPNITISLTLKSLAALLTVSGIVLTASLLRTLSLNMPPNNLINANTFTTNQWFYEHASHNILTSLSFSLSLTGSTQSIDRGWSENLGAQGINSASSEISREYQLTQTGYIKQYLLLSTTTFTIIAIVSTTFL

SEQ ID NO: 79577 - DNA, 1818 bp, Desulfitobacterium hafniense Y51
  CDS (1)..(1818): transl_table=11
atggacaacttttcagggcaatggcatggggatggcttttcttgcgatggattgacagccttcttccttttagtgctcttgcttgggcaaggtattgcatctctctatggtctgggctatatgaaagattatgaggggaagcgttctctcctctccttttccttatcctgggcagcttttctggggagtatggctggagttttaatcgtcaacaatggcttctattttctttttctttgggaactcatgtcccttttttcgtttttgctggtgatatatgaacacgaagagagctccaatcgccgggcggcgttcatttattttgtcatgacccatgtgggaacggtttttttgattgcggcagttctctatctttacagtaagaccggaagttttctctatggggattgggctgccataaccccgactttaagtccgggggaaaagaacggtctttttctatgctttctgattggttttggtacgaaggcggggttggtgccttttcatatctggctgccctacgctcatcccgttgccccttctccagtgtccgcattaatgtccggggtgatggttaaaattgctctctatatgatgatgagatgggtgtggttgaccctggcccccatggaactatggtggggcgggttaatgctggcactcggagtgctctctgcttttatcggaattctctatgcttgtgtagaacaggatgtaaagcgtctgttggcttattccacagtagagaatatgggtattcttacgatggctttaggaacggccatgattgcccggaccctgggctattcggacctggtggtccttgccctggctgctttcttctggcatggggttcatcatctcctttttaagtccggcttgtttatggctgcgggaaatatcatccaggcaacacatacaaaaagacttgaccaaatgggtggtttacttaagaaaatgcccaggacgggcttgtgggcaatggttggcgctgtggggctttccgcacttccacccttgggaggtttttggggggaatggttgctatttcacgccttatggaagacttccgttcaagtggaagggggattattcaagctggccctgcccttaagtctggcggcgttggcgtttatttctgccttagccctggcaacgatggtgaagtggtttgccggagccttcctgggacaggctcggtcggcaaatgctgcaaatgctcaggagctgccttggcctcagacggtatctatggcaatggccatgatgctgaccctcctggcaacgctgtatcctcaaggcctttggaaactaataagtgtccccattcacgtgttgaaagatacaagcgattctccactcaccgacagtttagctttgccgctttgggcagatttctttaacctgatcaccccttacatcttgctgttaggccttttttcagtgacactctatcagttatccgcaagaaagcgcaagagggtagcagggacctggaattgtggtgtgcctctaacccctcgtatgcaatacacgggcttagggataactatgcctttgcggatagccatgaaaaaggttttggcctttcgccccatcatcgataaaaagtttggggaaaccccttatgtattacagtccctgcactatcgcagccgaacccgcgagataacggaggaagtgttctatcggcctgccatgaagttgcttttgcggtgtgcggaacgaattcgcatcctgcaaaccggcagtattcacacctatttagcttatattctgatcaccttagtggttgtgttgatttggactatgtga

SEQ ID NO: 79578 - protein, 605 aa, Desulfitobacterium hafniense Y51
MDNFSGQWHGDGFSCDGLTAFFLLVLLLGQGIASLYGLGYMKDYEGKRSLLSFSLSWAAFLGSMAGVLIVNNGFYFLFLWELMSLFSFLLVIYEHEESSNRRAAFIYFVMTHVGTVFLIAAVLYLYSKTGSFLYGDWAAITPTLSPGEKNGLFLCFLIGFGTKAGLVPFHIWLPYAHPVAPSPVSALMSGVMVKIALYMMMRWVWLTLAPMELWWGGLMLALGVLSAFIGILYACVEQDVKRLLAYSTVENMGILTMALGTAMIARTLGYSDLVVLALAAFFWHGVHHLLFKSGLFMAAGNIIQATHTKRLDQMGGLLKKMPRTGLWAMVGAVGLSALPPLGGFWGEWLLFHALWKTSVQVEGGLFKLALPLSLAALAFISALALATMVKWFAGAFLGQARSANAANAQELPWPQTVSMAMAMMLTLLATLYPQGLWKLISVPIHVLKDTSDSPLTDSLALPLWADFFNLITPYILLLGLFSVTLYQLSARKRKRVAGTWNCGVPLTPRMQYTGLGITMPLRIAMKKVLAFRPIIDKKFGETPYVLQSLHYRSRTREITEEVFYRPAMKLLLRCAERIRILQTGSIHTYLAYILITLVVVLIWTM

SEQ ID NO: 79579 - DNA, 2010 bp, Burkholderia xenovorans LB400
  CDS (1)..(2010): transl_table=11
atggaacacctgctggtcatccactacgtactgctggtcatcgtgggctggctggccgtcagcgttctggggctcgccggcctgcgacggacgcgcgtggtagcgcacgggctgtttccggtcggcgcagtgtttggcctggctctgttcgggctgggcctgaccggcgttttcgccggtccgcaggaaatcatcctgccgctcgggttgcccgagctcccttttcatctccggctggatggcctgtcggcgtatttcctcgcggtgctcggcatggtgagcacgggcgtgagcgcgttctccgccggttatttccgcaagggtgaaggcacgccgcccggcttactctgcttcgaataccacgtgtgcctcgcgagcatggcgacgctgttactggcagacgacgcgtacagcttcatggtcgcgtgggaaacgatgaccgtgtcggcagttttccttgtcatgaccaatcaccgcatcgcggagatccgtcgagccgcttacctctacttcctgatctcccatgtcggcgcgctggcgctcctgctgtgtttcggcctgctgcaagccaataccggcgactatacgttcgccaacatgcgccaacagcatctcgacgtattctgggcctccgcggcattcctgctggcgctattcggcttcggcgcaaaggcgggtgtgttccccctgcatgtgtggctacccgaggctcatccggccgcgccgtcaccggtgtccgccctcatgagcggctttatcctgaaggcgggactctacggcattctgcgcacggtattcgacctgctgcatgtccagctgtggtggtggggagtcttcgtgctggcgctcggactcttcaccgccctgttcggcgtcgtgttcagcgcgatccagacagacatgaagcggctgctcgcctattcgtcgatcgataacatcggcctgatgttcgtcagcatgggactggcgatcctgtttcgcgcgtacggcatgaacacgctcgccgcgctctcgttgacggcgctgttctaccagatcgccagccatgcgacgttcaaaagcctgctgtttctcggcacgggttccgtgctgcatgccaccggcgaacgcaatctcggccggctgggcggattgatccgcgtgatgccgtggaccgcatgggcggcgctcgtgggcgcgtttgcgagcgccgggctgccgccgttgagcggcttcgtctccgaatggctgttgctgcagagctttctgttcacgccgggcttgccgaacccgttcctgaacatggtggtgccgctggtcgcggcgctgatcgcgctggtagccgcgctagcgggctatacgatggtgaagttcttcggcattgtctttctgggtcaaccgagagagacgaagctggcgcaagcgcgcgacgcgagccgttgggagcgcgtcggcttcgtctggctggcggcgatatgcgtgttgctcgggctgctgccggtgcagttcgtggccgtgctggaccgcgtcacccgtatgctggtgggaaccggcatcggcgaggccgtggcgcgcaatggctggctgctgctcgcgcccaccagcgtagaccgggccagctatatgccggcggtttttctgctgtttttctgcgcgtgctgcgggctcgcctggctgctggtccgccgcctctaccacgggcgcctgaggcgcgcggcgccgtgggcctgcggctatccgttcgtgaccgcgcgcatgcaggacaccgccgaagggttcgggcaacccatccgcgaaatcttcacgccgctattcaaaatcgagcgccggcttccttcgccgttcgactcacacccggtgtacagcgtcaccgtgacggaccgcgcgtggaccctgatctatgcgccgctggaacggctgatcatgcgcatcgcggcattggccgggcggcttcagaccggccgcattgccatgtacctgatgcatagcttcatcgtgctgatcgtgctgctgatgctggtgagacgatga

SEQ ID NO: 79580 - protein, 669 aa, Burkholderia xenovorans LB400
MEHLLVIHYVLLVIVGWLAVSVLGLAGLRRTRVVAHGLFPVGAVFGLALFGLGLTGVFAGPQEIILPLGLPELPFHLRLDGLSAYFLAVLGMVSTGVSAFSAGYFRKGEGTPPGLLCFEYHVCLASMATLLLADDAYSFMVAWETMTVSAVFLVMTNHRIAEIRRAAYLYFLISHVGALALLLCFGLLQANTGDYTFANMRQQHLDVFWASAAFLLALFGFGAKAGVFPLHVWLPEAHPAAPSPVSALMSGFILKAGLYGILRTVFDLLHVQLWWWGVFVLALGLFTALFGVVFSAIQTDMKRLLAYSSIDNIGLMFVSMGLAILFRAYGMNTLAALSLTALFYQIASHATFKSLLFLGTGSVLHATGERNLGRLGGLIRVMPWTAWAALVGAFASAGLPPLSGFVSEWLLLQSFLFTPGLPNPFLNMVVPLVAALIALVAALAGYTMVKFFGIVFLGQPRETKLAQARDASRWERVGFVWLAAICVLLGLLPVQFVAVLDRVTRMLVGTGIGEAVARNGWLLLAPTSVDRASYMPAVFLLFFCACCGLAWLLVRRLYHGRLRRAAPWACGYPFVTARMQDTAEGFGQPIREIFTPLFKIERRLPSPFDSHPVYSVTVTDRAWTLIYAPLERLIMRIAALAGRLQTGRIAMYLMHSFIVLIVLLMLVRR

SEQ ID NO: 79581 - DNA, 2010 bp, Burkholderia xenovorans LB400
  CDS (1)..(2010): transl_table=11
atggaacacctgctggtcatccattacgtattgctcgtgattgcgggctggctggccgtcggtgtgctggggctcgccaacctgcatcgcacacgcgtggtggcgcacagcctgtttccgctcggcgccggattcgctctgctcctgtgcggactgggtctggccggcgttttcgccggtccccagcaagccgttctgccgcccggcctgccgcacctgccgttccatctgcggctcgacggcctgtcagcctatttcctctgtgtactcggcgtggtgagcgcaggtgtgagcgcgttctccgccggctatttccgcaagggcgaaggcactccgcctggcgtgttgtgcttcgaatatcacgtgtgtcttgcaagcatggcaatgctgttgctggcagacgacgcgtattgcttcatggtgtcgtgggaaaccatgacgctgtcggccaccttcctggtgatgaccaatcaccgccttgccgagatccgccgcgccgcctggctttacttcctgatttcccacgtcggcgcgctcgcgctcctgctgtgcttcggcctgttgcaggccaataccggcgactatacgttcgccaacatgcgcgagcagcatctggacgtgttctgggcgtccctcgcgtttctgctggcgctgttcggcttcggcacgaaggcgggcatcttcccgttgcatgtctggctgcccgaggctcatcccgccgcgccgtcgccggtatcggccctcatgagcggattcgtgctgaaggccggcctctacggtgtgctacgcacggtgttcgatctgctgcacgtgcagattgcgtggtggggcgtactcatgctggtactcggactcttcaccgcgctgttcggggtggtgtttagcgccgtccagacggacatgaagcggctgcttgcgtactcatcgatcgacaacatcggtctgatgttcgtcagcatggggctggcgatcctgtgccgcgcatacgggatgagcgcgctggccgccttgtcgatgactgccctgctgtaccagatcgccagccacgcggcattcaagagcctgctgtttctcggcaccgggtccgtactccatgcgaccggcgagcgcaatctcggtcgcctgggcggcctgctgcgtttcatgccgtggaccgcgtgggccgctctggtgggcgtgctggccagcgcgggcctgccgccgttgggcggcttcgtttccgaatggctgctgctgcagagctttctgttcacccccggcttgccggacccgttcctcaatagggtggtcccgctcgccgccgcgctgattgctctcgtggccgcgctcgcgggctacacgatggtcaagttcttcgggatcatctttctcggccagcctcgcgaggcgaagctgcgcgacgcacgggacgcaagtccgtgggaacgcgccggctttgtgtggctcgccgcgatctgtgcgctgctcgggctattgccggtgcaattcgtggccgttctggatcgcgtcacgcagttgctggttggcgcgggcatcggagaggccgtcgcaagaaacggctggctgctgctcgcccctgccggcgtggaccgggccagctacatgccggcggcattcctgctgttcttctttgcctgctgcggactcgcctggctgctggtacgccgtctttaccacggacgcctgcgccgtgcggctccctggaactgcggccatccgttcgtgaacgcgcgcatgcaggacacggccgaagggttcgggcaaccgatccgtgagatcttcgcgccgctgttccggatcgaacggcggcttccttcgcctttcgaccgccagccggtgtacagcatcaccgtgacagatcgcacgtgggcgctgatctatgagccgctcgaacggctggtcaagcgcgtcgcggcactagccggaatgcttcagacgggccgcatcgcggtctatctgacgcacagctttctcgtgctgatcgcactgctgatactggtgagacgatga

SEQ ID NO: 79582 - protein, 669 aa, Burkholderia xenovorans LB400
MEHLLVIHYVLLVIAGWLAVGVLGLANLHRTRVVAHSLFPLGAGFALLLCGLGLAGVFAGPQQAVLPPGLPHLPFHLRLDGLSAYFLCVLGVVSAGVSAFSAGYFRKGEGTPPGVLCFEYHVCLASMAMLLLADDAYCFMVSWETMTLSATFLVMTNHRLAEIRRAAWLYFLISHVGALALLLCFGLLQANTGDYTFANMREQHLDVFWASLAFLLALFGFGTKAGIFPLHVWLPEAHPAAPSPVSALMSGFVLKAGLYGVLRTVFDLLHVQIAWWGVLMLVLGLFTALFGVVFSAVQTDMKRLLAYSSIDNIGLMFVSMGLAILCRAYGMSALAALSMTALLYQIASHAAFKSLLFLGTGSVLHATGERNLGRLGGLLRFMPWTAWAALVGVLASAGLPPLGGFVSEWLLLQSFLFTPGLPDPFLNRVVPLAAALIALVAALAGYTMVKFFGIIFLGQPREAKLRDARDASPWERAGFVWLAAICALLGLLPVQFVAVLDRVTQLLVGAGIGEAVARNGWLLLAPAGVDRASYMPAAFLLFFFACCGLAWLLVRRLYHGRLRRAAPWNCGHPFVNARMQDTAEGFGQPIREIFAPLFRIERRLPSPFDRQPVYSITVTDRTWALIYEPLERLVKRVAALAGMLQTGRIAVYLTHSFLVLIALLILVRR

SEQ ID NO: 79583 - DNA, 2025 bp, Ralstonia metallidurans CH34
  CDS (1)..(2025): transl_table=11
gtggacggcgtgcctgcggtcggacagtggttgttgctcgactggatgctcgttgtcacggccgcgtggctgatgatcggggcaaccggtgtgctcgcactgcatcgtctggcactggtgtcgcgcctgctcttccctctgggcgctctgctcgggctggtgctcagcgcgctggctcttgcggcggtgggtaacagccccgaagtggcagtgctttccatcgggctgccgcgtctgcctttccatctccggctggatagcctgtccgcctatttcctgatggtaatcggtgccgcagcggccggaatctccgtgttcgcggcgggttacttccgccaaggcgagggcacgccccccggcttgctatgcctggagtatcacctgttcctggccagcatggctggcgttgtgctggccgacgacgcctacgcgttcatggtgatgtgggagaccatggcgttgtcatcgttcttcctggcgaccgccaaccaccgcatcgcggaggttcgcagcgccggctacctgtacatcaccatggcacacatcggggcgatcgcggtcctgttgtgctttggcgtcctgcaggccaataccggcgactacaccttcgcgaacatgcgcgcccaaacgctgacgccgttctgggcgtcggtcgcgttcctgcttgcaatgttcggcttcggcgccaaggccggtctgcttccactgcatgtgtggctgcccgaagcgcacccggctgcgccatcgccggtgtcggcaatgatgagtggcgtcatgctcaacaccgccatttatggcctcttgcgtgtggttctggacctggcacagatacatctgtggtggtggggcgggctactgttggcctccggcctggccaccgcgctgtatggcgtggtgttcgccgcagtgcaaaccgacatgaagcggttgctggcctactcatcgattgagaacatgggcctgctgttcgttgctattggcctcgctttgatcttctcggcctacggcatgaaaccgttggccgctctggcactgaccgcagcgctatatcacgtggccagccatgccttcttcaagagcctgcttttccttggtactggcagcgtgctgcatgctactgccgagcgcagcctcggcaagctgggaggtttgatacgccagatgccgtgggtgggctggctcacgctggtgggcgtgctgaccagcgcgggtctgccaccgcttggtgggttcgtctcggagtggttgctcctgcagagctttctgtttacgaccggattgccggtgccgctcctgaccatgcttatccccgtggtggcggcgctgattgcgctggtagcggccctggccggctacacgatggtgaagttcttcggtgtgatctttctcggccttccgcgcgagcccagactcaacgacgcgcaggacgctggcggctgggagcgcgccggcatgctatggctggcactgggaagcatcgcgcttggactattgccatctcctttcatcggcctgatcgatgcagtgacgcagcaattggtcggcagcggcctcggcgcacgtgtcgcgaccagcggctggctgcttgcgccgatcagtccggagcaggccagctacgggccggtcatcttcctgctaggtatccttgccagtttcgcgcttgcctatcttcttgtgcgcggtctctaccatggcaggctgcgtcgcagcgtggcctgggcctgcggctttccgtggggcaccccgcgcatgcaagataccgccgagggtttcggccagccgattcggcagatcttcgagcccttttttcagattaggcgtgacctgcccaccccgttcgacgaacacccgcaatatcgggtgatagtgtcagatccgttctggcgctggctgtacttgcccgtggtccgcctggtcgcggttatggcacgcgcggtcggtgcaattcagcaggggcgcatttcagcgtatctgctgttcagctttctgacgttgattgccgtgctgctggcggtcatgcggtga

SEQ ID NO: 79584 - protein, 674 aa, Ralstonia metallidurans CH34
MDGVPAVGQWLLLDWMLVVTAAWLMIGATGVLALHRLALVSRLLFPLGALLGLVLSALALAAVGNSPEVAVLSIGLPRLPFHLRLDSLSAYFLMVIGAAAAGISVFAAGYFRQGEGTPPGLLCLEYHLFLASMAGVVLADDAYAFMVMWETMALSSFFLATANHRIAEVRSAGYLYITMAHIGAIAVLLCFGVLQANTGDYTFANMRAQTLTPFWASVAFLLAMFGFGAKAGLLPLHVWLPEAHPAAPSPVSAMMSGVMLNTAIYGLLRVVLDLAQIHLWWWGGLLLASGLATALYGVVFAAVQTDMKRLLAYSSIENMGLLFVAIGLALIFSAYGMKPLAALALTAALYHVASHAFFKSLLFLGTGSVLHATAERSLGKLGGLIRQMPWVGWLTLVGVLTSAGLPPLGGFVSEWLLLQSFLFTTGLPVPLLTMLIPVVAALIALVAALAGYTMVKFFGVIFLGLPREPRLNDAQDAGGWERAGMLWLALGSIALGLLPSPFIGLIDAVTQQLVGSGLGARVATSGWLLAPISPEQASYGPVIFLLGILASFALAYLLVRGLYHGRLRRSVAWACGFPWGTPRMQDTAEGFGQPIRQIFEPFFQIRRDLPTPFDEHPQYRVIVSDPFWRWLYLPVVRLVAVMARAVGAIQQGRISAYLLFSFLTLIAVLLAVMR

SEQ ID NO: 79585 - DNA, 1971 bp, Rubrobacter xylanophilus DSM 9941
  CDS (1)..(1971): transl_table=11
atgcagagcctgggccaacagctggttatcgcggccataccggtgataccgctcgtggtgttcttcgtgctggcgctcttcgggcgcctgctgcgggagaacgcccagtacgtggccatcttcgggatggtcttctcggtggtcttctcgttcttcgcgctctacctggtcatccgggacggccggccgctggagttctccgtgtactggataaacctgggggagggcggcggcttccccatcggggtgtacatagacgagctcgcggcggtgatgctggtcgtggtgagcttcgtgagcctcatgatccagctctactccggcgggttcatggcgggcgaccggcgcttcgcctggtactacgcggtgctcaacctgttcaccgcctcgatgctcgggctggtggtggcgcccaacttcatcgagctgtacatctgctgggagctggtgggcctgtgctcgtacctgctcatcgggcactggttcgagaagcccgccgcccgcgacgcggcgctcaaggcgttcatcgtcacccgcatcggggacgcggcgctcttcgtggggatcatcatgttctggcgcgccaccgggaccacggccttcgagggcatcgccgaggccgcgcaggccgggtttatcggggggtcgctgctgaccgccgcggtggtgctggtgttcgtcggggcgataggcaagagcgcccagttcccgctgcacgtgtggttgccggacgcgatggagggtccgaccccggtgtcggccctgatccacgcggccaccatggtcgccgccggcgtctacctggtggcccgcacctacgacatcttcgtgcagagccccacggcgatgctcatcgtcgcctacatcggggccttcaccgcgttcatggccgcgacgatggcgctggtcaagaaggacataaagcgggtgatcgcctactccaccgtctcccagctggggtacatgatgctggggctcggggtgggggccttctcggccgggatgttccacctctacaaccacgccttcttcaaggcgctgctcttcctgtgcgcgggcagcatcatccacgccatggactcctacaacctcttcgagatgggggggctgaggcggaggatgccgctgaccttctggaccatggtgatagccggcctctcgctcgcggggatcttcccgctggcggggttctggtcgaaggacgcgatcatcgcctcggccttcgaggagcactactacgttctgtacgcgctggccatcgggacggtgttcctgacggccttctacatcttccgggccatctttctggccttcaccggcgagccccggacggagggcgcggcccgggccgtcgagtccccgggcgtgatgacggtcccgatggtgatcctggccgtcctctcggtggcgagcggctgggtgggcatcccggagggcttcgggctgccggtgcgcgactacttcgggggcttcgtcgccccgagcgggttcgcccgggagacgctggaggtcgagccccacggcttcagcttcctgctcgccgcgatctcggtgctcgtggggctcgccggcatcgggctggcctacgcgatgtacgtggcgcggccggctctggcgcccgccatggcccgccgcctctttgggctccacaccttcctggacaagggctggtacttcgatgccctctacggggccaccttcgtgcgggccgcttttgcggtggggcgggcggtgcagggcttcgaccgcgaggtgctcggggggctcgtgggcggcatcgcccgcgggaccgggcggctcggcgaggcgctccggcgggtgcagaccgggcgggtccagaactacgcgctgttcatcgtcgtcagcgtgctggtgctggccatagtggcgggcgcccagtacgcggtcatcgtggcggcgctgatagcgctggtgacgctggcgactctggcggtgggggctagactgtga

SEQ ID NO: 79586 - protein, 656 aa, Rubrobacter xylanophilus DSM 9941
MQSLGQQLVIAAIPVIPLVVFFVLALFGRLLRENAQYVAIFGMVFSVVFSFFALYLVIRDGRPLEFSVYWINLGEGGGFPIGVYIDELAAVMLVVVSFVSLMIQLYSGGFMAGDRRFAWYYAVLNLFTASMLGLVVAPNFIELYICWELVGLCSYLLIGHWFEKPAARDAALKAFIVTRIGDAALFVGIIMFWRATGTTAFEGIAEAAQAGFIGGSLLTAAVVLVFVGAIGKSAQFPLHVWLPDAMEGPTPVSALIHAATMVAAGVYLVARTYDIFVQSPTAMLIVAYIGAFTAFMAATMALVKKDIKRVIAYSTVSQLGYMMLGLGVGAFSAGMFHLYNHAFFKALLFLCAGSIIHAMDSYNLFEMGGLRRRMPLTFWTMVIAGLSLAGIFPLAGFWSKDAIIASAFEEHYYVLYALAIGTVFLTAFYIFRAIFLAFTGEPRTEGAARAVESPGVMTVPMVILAVLSVASGWVGIPEGFGLPVRDYFGGFVAPSGFARETLEVEPHGFSFLLAAISVLVGLAGIGLAYAMYVARPALAPAMARRLFGLHTFLDKGWYFDALYGATFVRAAFAVGRAVQGFDREVLGGLVGGIARGTGRLGEALRRVQTGRVQNYALFIVVSVLVLAIVAGAQYAVIVAALIALVTLATLAVGARL

SEQ ID NO: 79587 - DNA, 1911 bp, Cytophaga hutchinsonii ATCC 33406
  CDS (1)..(1911): transl_table=11
atgatggaatttgtttggctaataccagcgctacctctacttggctttctgatattaagcttatttaataaacacatacctaaatctgcttccggctatattgccagtgcaatgatgttaggttcatttgctattgttttaacattgttatgcaaagctgcaggcggcgatttaacagctactactgtaaccgtatttgactggattcatgttggtgatctgaagcttgcgttatcttttcagatagataatctatctgtttggtttatgtcgatcattacgggtgttggctttttaatacatgtgtattcaatcagctacatgcacgacgatgaaggtgtgacacgctatttctcttacctgaatttgtttgtattctccatgcttttgctggtaatggggtcaaactatgtagtgatgtttaccggctgggaaggcgtaggtctttgctcctatttactgatcgggttctggtttaaaaatcaggcatacaatgatgcggctaaaaaagcttttatcatgaaccgtatcggagatctgggattcctgcttggtatgcttttaatctacaaccagttcaaaagtcttgaatacagcgtagtttttgatcaggcattaaagattataaatccgaatgaaccatccggtattattttcgcaatcacgatgttattatttgtaggtgcgatgggtaaaagtgctcagatcccgctttatacctggttaccggatgcgatggcaggccctactcctgtttcagcattgatccacgcggctaccatggttactgcaggtatctacatgattgcccgctcaaacattctgtacagcatggcaccatgcacgttagatattatttatgtagttggtacaggtactgcgattttagccgcgttaattggtttaacacaaaccgatatcaaaaaggtattggcgtattcaaccgtgagtcagttaggtttcatgtttatggctattggccttggaggttattctgcgggtgtattccatgtaacaacacatgctttcttcaaggcattgttattcttgggtgcgggcagtgttattcacgcaatgggcggcgagcaggatatccgtaagatgggtggtttaatgaaaaaactcccgatcacctttatcacattcatcattgcaacattagcgattgccggtattcctccgcttgcaggtttcttctcaaaagatgcgatccttgctttagcgtttgaatccagtccgcttaaatggggcttaggtgttttcgctgccttgttaactacattctatatgttcagaatgttattccttacattcttcggtgaattcagaggaacaacgcatcagaaagaacatctgcatgagtctccgttgttaatgacaatcccattgatggtgctggcattactgacagtagtaagtggtttcattgaaatcccgcacgtatttgtacacgaaggcagcaactggttcagccattatttagctggtgcaaacattgctttgccagcagcctctcacctttcagctgaaactgaattcgtacttatgggttctgcattggtattggttgtgttggttatcataacaacatatgtgttatatgtttctaaaaagacattaccgccatcgtctgaagccgagctttcatttatcgataaactttcatacaataagttctatgtagatgagctatatgataccatcattgtaaaaccgattgctttcttatctgattttacaagtacgttcattgaaaaacaattcattgacaggattgtaaacttctccggaaaatctgttcagtggagcggcaaaacaattcgttatatccagtctggtgatgtaaacacatacgccatctttatggtgattggaattgtagttatcttatttatcaacttagtactgtaa

SEQ ID NO: 79588 - protein, 636 aa, Cytophaga hutchinsonii ATCC 33406
MMEFVWLIPALPLLGFLILSLFNKHIPKSASGYIASAMMLGSFAIVLTLLCKAAGGDLTATTVTVFDWIHVGDLKLALSFQIDNLSVWFMSIITGVGFLIHVYSISYMHDDEGVTRYFSYLNLFVFSMLLLVMGSNYVVMFTGWEGVGLCSYLLIGFWFKNQAYNDAAKKAFIMNRIGDLGFLLGMLLIYNQFKSLEYSVVFDQALKIINPNEPSGIIFAITMLLFVGAMGKSAQIPLYTWLPDAMAGPTPVSALIHAATMVTAGIYMIARSNILYSMAPCTLDIIYVVGTGTAILAALIGLTQTDIKKVLAYSTVSQLGFMFMAIGLGGYSAGVFHVTTHAFFKALLFLGAGSVIHAMGGEQDIRKMGGLMKKLPITFITFIIATLAIAGIPPLAGFFSKDAILALAFESSPLKWGLGVFAALLTTFYMFRMLFLTFFGEFRGTTHQKEHLHESPLLMTIPLMVLALLTVVSGFIEIPHVFVHEGSNWFSHYLAGANIALPAASHLSAETEFVLMGSALVLVVLVIITTYVLYVSKKTLPPSSEAELSFIDKLSYNKFYVDELYDTIIVKPIAFLSDFTSTFIEKQFIDRIVNFSGKSVQWSGKTIRYIQSGDVNTYAIFMVIGIVVILFINLVL

SEQ ID NO: 79589 - DNA, 2022 bp, Rhizobium leguminosarum bv. viciae 3841
  CDS (1)..(2022): transl_table=11
gtgacatcggtttctatcctgttgtcatgtgtggccgcgctgcttgggatggctgtgctcgcagtgccgatcgcccgttcggcctcgcccacgcctatcatctacggtgcaagcctggttttctccgccatcgctttcgttattgcgttcgcctatctggccacggctctccctgccgccgaagcgtcggcgcttgtccttcctctcggcctgccatggctcggaagccacttccggatcgatgcgcttgcggccttgttccttgtgatcgtcaacctcggcggcgcgctctccagcctctacggtctcggctacggccgtcacgaacacgcgccgcatcgggtgctgccgttctttccggcttttctcgccggcatgaaccttgtgatcatggccgatgatgccttcaccttcctcatttcctgggagttcatgtcgctcgcgtcctgggcgatggtgatggcccatcatcgcgacgccggcaaccgcaaggccggctatctctatatcgtcatggcgagcttcggcacgctcgcgctcctgcttgccttcgggctgcttgccggggctgacggaaactatggttttgccgccatgcggatgtccgaacatacgccgttcacggctggtctcgtgctcatcctgctgctgctcggcgccggttccaaggccggcctcgtgccgttgcatgtctggctgccgctggcacatccggctgcgccgagccatgtttcggcactgatgagcggcgtcatgaccaaggtcgccgtctatgcgttcatccgcgtgattttcgacctgatcggcgcgccgacatggtggtcgggcgtcatcgtccttgtgctcggcggcggcacggctgtgctgggcatcctgcatgcgatgatggagagggacctcaaacgtctgcttgcctatagtacgatcgagaatatcggcgtgatcttcgtaggcctcggcctggcgctcgccttcaaggcgaacggcatggatctggcggccgcactggcgctgacggccgcgctgtttcacgctctcaatcattccttcttcaagagcctgctcttcttcggcgccggcgcggtactgacggcaacgggcgagcgggacatggacaagctgggcggccttatccaccgcatgccggtcaccagcttccttttcctcatcggctgcgtcgcgatctccgccctgccgccgttcaacggcttcgtttccgaatggctggcattccaggcgatcctgcaaagccctgatttgccgcaatggggcctgaaaatcctggtgccggcggtgggcgggctactcgccttgtcggcggcactggctggcgcctgtttcgtcaaggcattcggcatcaccttcctcggccgtccccgaaccgtcgtcgccgaacaggcgctggaggtcgaccgcttctctcatgcggcaatgtccgtattggcagcgctctgccttttcgccggcatcctgccgggaatcatcatcgacggccttgcaccggtgacactgtcgctgatcggtgaccggatgccggtgcagacggatattccgtggctgtcgatcgtgccggtcgccgaaagccgcagttcctataacggcctgctggtcttcctgttcaccctcctttcggcgtcgctgacggtctatctcatccaccgtttcgcttcgcggcggctccgccgggcgcccgcctgggattgcggcttccccgaggtcaatccgatgacgcaatatggcggcggcagcttcgcccagcccgtccggcgcgttttcggcacgctgatcttccgggcgcgcgagcgggtcgacataccggcgcccggcgatctccgtccggcacattttgccgtcgagacacatgatctgatctgggaagggctttacctgccgatcgcaggcgccgtcggatttgtggccgaaaagctcaaccacctgcagtttctcacgatccggcgttatctgagcctggtcttcctcgcgctcgtcttcctgcttctggtgctggcgctatggtcctga

SEQ ID NO: 79590 - protein, 673 aa, Rhizobium leguminosarum bv. viciae 3841
MTSVSILLSCVAALLGMAVLAVPIARSASPTPIIYGASLVFSAIAFVIAFAYLATALPAAEASALVLPLGLPWLGSHFRIDALAALFLVIVNLGGALSSLYGLGYGRHEHAPHRVLPFFPAFLAGMNLVIMADDAFTFLISWEFMSLASWAMVMAHHRDAGNRKAGYLYIVMASFGTLALLLAFGLLAGADGNYGFAAMRMSEHTPFTAGLVLILLLLGAGSKAGLVPLHVWLPLAHPAAPSHVSALMSGVMTKVAVYAFIRVIFDLIGAPTWWSGVIVLVLGGGTAVLGILHAMMERDLKRLLAYSTIENIGVIFVGLGLALAFKANGMDLAAALALTAALFHALNHSFFKSLLFFGAGAVLTATGERDMDKLGGLIHRMPVTSFLFLIGCVAISALPPFNGFVSEWLAFQAILQSPDLPQWGLKILVPAVGGLLALSAALAGACFVKAFGITFLGRPRTVVAEQALEVDRFSHAAMSVLAALCLFAGILPGIIIDGLAPVTLSLIGDRMPVQTDIPWLSIVPVAESRSSYNGLLVFLFTLLSASLTVYLIHRFASRRLRRAPAWDCGFPEVNPMTQYGGGSFAQPVRRVFGTLIFRARERVDIPAPGDLRPAHFAVETHDLIWEGLYLPIAGAVGFVAEKLNHLQFLTIRRYLSLVFLALVFLLLVLALWS

SEQ ID NO: 79591 - DNA, 1665 bp, Ligia oceanica
  CDS (1)..(1665): transl_table=5
attagttccttgattatagggtcagaaggtgtgttattgttacaggagggggtaagtattttagtggactgggagtttaggtggacctctagaggaacttacagttttacgttatattttgattgaatttcttgtattttttataggtttgtttgtttaatctctagttcagtgatactgtacagagggggctatatagctggagatgaaaatatcgaccgttttttagttttagtattctcctttgtggccaggatatttttcttgacttttaggttaaatttagtaagaattctattggggtgggatgggctaggattaacttcctatctattagtagtatattatcagaatgagaagtcgagagcggctgggataattacagctttaaggaatcgcatcggagatgctgcaattttattaagaattgccttatcagtggaatatggtagatgaagttttatgtcatgggagagtaaatgtattccatgggagttgggaggattattagttttagctgctgcaactaagagggctcaaatacctttctctgcgtggttgcccgcggctatggcagcccccacgcccgttagggcacttgtccattcttctactctggtgacagcaggagtttatttagttttgcgtttctctgatatactaactagctcaattttaagatccttagctgtggtaggggggttaacaactttaatagcgagagtgagggctaatctcgagacagatttaaagaaggtaattgcattatcaactctaaggcagttgggattgataataacttctttggggttgggaataaggtgcctggcattctttcatttattaacacatgctacttttaaggcccttttgtttatatgtgctgggaaagttattcatgagagtggaagtacacaggattctcgatctatgggggggttaagatggagactgccatatagtgtagcttgtataaatatttctaatttagcattgtgtggatttccgtttatggctgggttttattctaaagatgtaatagtagaggttggactgataacatgatccaggaagattttaattacaatagtagggctaaatgtagggctatctgctacttattcagttcgcctcgcgattaggggtgttattagagttaggaatcaactccccctaagtagtaataatgaagaggataagaatatgttatgatctaagtgtggtctagtgttgatatctgtggttagaggggctagcctgagttgagtgttgtttaattcccccgaaatagtctgtcttagggtgcattcaaaattattagctttggtgaggactgtaataggaggggtagcaggggtgattatatactatttaaaatttaagggggcggggataatgaaaaagttaatattagtgacctactttatgcagatgtggtatttaccttttctgagaggacagggggcaagtaagaggataaacttgtttaaacacctcaaacttgttgatttggggtgaggagaaatactaggagggcaaggtctaaataactcgttaatggtaagttccaaaggattagtaattatgcagagaaataaaattaaattatttctaactgggtttgggtttgtattattaatatgtgtaggattcaggtacctatag

SEQ ID NO: 79592 - protein, 554 aa, Ligia oceanica
MSSLIMGSEGVLLLQEGVSILVDWEFSWTSSGTYSFTLYFDWISCIFYSFVCLISSSVMLYSGGYMAGDENIDRFLVLVFSFVASMFFLTFSLNLVSILLGWDGLGLTSYLLVVYYQNEKSSAAGMITALSNRIGDAAILLSIALSVEYGSWSFMSWESKCIPWELGGLLVLAAATKSAQMPFSAWLPAAMAAPTPVSALVHSSTLVTAGVYLVLRFSDMLTSSILSSLAVVGGLTTLMASVSANLETDLKKVIALSTLSQLGLMMTSLGLGMSCLAFFHLLTHATFKALLFMCAGKVIHESGSTQDSRSMGGLSWSLPYSVACMNISNLALCGFPFMAGFYSKDVMVEVGLMTWSSKILITMVGLNVGLSATYSVRLAISGVISVSNQLPLSSNNEEDKNMLWSKCGLVLMSVVSGASLSWVLFNSPEMVCLSVHSKLLALVSTVMGGVAGVIMYYLKFKGAGMMKKLMLVTYFMQMWYLPFLSGQGASKSMNLFKHLKLVDLGWGEMLGGQGLNNSLMVSSKGLVIMQSNKIKLFLTGFGFVLLMCVGFSYL

SEQ ID NO: 79593 - DNA, 1863 bp, Mycobacterium avium 104
  CDS (1)..(1863): transl_table=11
gtgtgcgggatcgcggcggtattcggcgtgcggcaaacggtgcatgtcggatggctgcttccgttgtccgggttgcagctggacctcgatccggtcggcgggttcttcatggcgttgatcggcggggtcgcggttccggtcggcttctattcgatcggctatgcacggcgtgagcatctgggccgggtttcgttggcgatgttgccgttgttcgtcgcggcgatgatgttggtgcccgccgccggctcggtcacgacgtttctgttggcgtgggagttgatggcgactgcgtcgctggtactggtgctggcgcagcacactcggcccgaggttcgttcggcgggcttgttttatgcggtgatgacccagctcgggttcgtcgcgatcctgatcgggttgatggtgttgtcggctgccggcggcgccgaccgctttgcggacttgacgcgggtgagcgatggtgcccggaccgtggtgttcgtgctgacgatggccggcttcgggtccaaggcgggtctggtgccgttgcatgcctggctgccgcgggcgcacccggaggcgccgagtccggtatcggcgttgatgagcgcggcgatggtcaacctgggcgtctacggcatcgtccggttcgatctgcagctgctcggcccgggtccgcgctggtgggccatcacgctgctggtcgtgggaggcgtgtccgcggtgtacggggtgctgcaggcgtcggtggcgacggatctcaaacggctgcttgcgtattcgaccaccgagaacatggggctgattactctcgcgctgggggcggcgacgctgttggcggattcgggcgcccattcggcggcgacgatcgcgatggctgcggcactgctgcacctgatcgggcacgcggcgttcaagagcctggggttcctcgcggcgggatcggtgctggccgcgaccgggctgcgggatctggacttgctcggggggttggcgcggcggatgccggcgacgacggcgctgttcggggtggccgcgctcggcgcgtccgggttgccgctgggtgcggggtttgtcagcgagtggctgctggtgcagtcgttgattcatgccgcgccgcagcacaacacggtcgtggcgttggcggcgccgctggcggtcggggcggtcgcgctcaccacaggactcggtgtggcggcgatggtgaaagcattcggtatcgggtttctggcccgcccgcgctcgcagccggctgccgacgcgcgtgaagtacctgcggtcatggtggcgggaatggcgctcgcggcgaccggttgcgtcgtggtggcggtggcgcctctggtcgtcgggtccatgttggggcgggtactcaccgagctgcccgcttcccgcgcagtggcgttcactgatttcggcgcggttctgcggctgccgggcctgcacggctcgatcgcgccgggcgcgatcgccgcggctctggctgccgccgtgctggccgcggtcggcctggcgtgttggcggtcgcggcggcgctcggatccagtgacgctgccgctgtgggcctgtggcgccgacgaactcaccccacggatgcagtacaccgccacgtcgttcgccgaaccgctgcaacgcgtgttcgatgacgtgctgcgcccggacaccgacatcgagatcacccacctcaccgagtcgcgctacctggccgaggctgtcacctaccggacccggatcgccgacgcgatcgaggaacggctctacgccccggttatcggggcggtggccgcggccgctcagctggtccggcgcgcccacaccggcagcgtgcacctctatctcgcctacggcatgcttggcgtgctgatcgtgctggtggtggcccggtga

SEQ ID NO: 79594 - protein, 620 aa, Mycobacterium avium 104
MCGIAAVFGVRQTVHVGWLLPLSGLQLDLDPVGGFFMALIGGVAVPVGFYSIGYARREHLGRVSLAMLPLFVAAMMLVPAAGSVTTFLLAWELMATASLVLVLAQHTRPEVRSAGLFYAVMTQLGFVAILIGLMVLSAAGGADRFADLTRVSDGARTVVFVLTMAGFGSKAGLVPLHAWLPRAHPEAPSPVSALMSAAMVNLGVYGIVRFDLQLLGPGPRWWAITLLVVGGVSAVYGVLQASVATDLKRLLAYSTTENMGLITLALGAATLLADSGAHSAATIAMAAALLHLIGHAAFKSLGFLAAGSVLAATGLRDLDLLGGLARRMPATTALFGVAALGASGLPLGAGFVSEWLLVQSLIHAAPQHNTVVALAAPLAVGAVALTTGLGVAAMVKAFGIGFLARPRSQPAADAREVPAVMVAGMALAATGCVVVAVAPLVVGSMLGRVLTELPASRAVAFTDFGAVLRLPGLHGSIAPGAIAAALAAAVLAAVGLACWRSRRRSDPVTLPLWACGADELTPRMQYTATSFAEPLQRVFDDVLRPDTDIEITHLTESRYLAEAVTYRTRIADAIEERLYAPVIGAVAAAAQLVRRAHTGSVHLYLAYGMLGVLIVLVVAR

SEQ ID NO: 79595 - DNA, 1995 bp, Nocardioides sp. JS614
  CDS (1)..(1995): transl_table=11
gtgaccggtgtcgagctgggcatgaccgcgcaggtcgtgctcgcggccgcagccgtcgcggccgcggtgctggccccgccccggctgcgcaacctggtggcggggacacttgccgccgccgtcggcgcggccggcgtggtgaccggcgccgccgcgctcaccgaccactccggctcgcttgacctgtcgacggccctccccctcacgggcgtagccctcgaccccacgccgctcggcggcttcgtgatgctggtcgcgggagcggtcggcgctgtggccgccgtcttcgcgatcggctacgcacacggaccggccgcctcgcgcacctcctgggcggcgctccccgcgttcctggtctcgatgcagctggtgcccgcggccgcagatgccgtctcgttcctgctgatgtgggagctgatggcgctcgcctcggcggtgctggtcctcaccgagcaccgggaccgagaggaagtgcggtccgcggcactctggtacgccgcgatgacccacctgagcttcgggctgctgctgctgggcttcaccgtgctcgtggaggagggcggcggcaccggcttcgacgccatgagcgccgtcgaccccacgtccctccaggcgtcgatcgccttcgtgctgctgatcgcgggtttcgcgaccaaggcgggcgcggtcccgttccacgtctggttgccccgggcccacccggccgcgccgagccacgtctccgcggtgatgagcgcggcgatggtcaagatgggggtgtacggcgcgctgctggtcgcgctccgcctgctgccgggcggccccacctggtgggggttcgtcgtggtggcactcggcgcggtgtccgcgacgtacggcatcctccaggcctcggtcaccagcgacctcaagcgcctgctcgcgtactcgacgaccgagaacgtcgggctgatgttcctcgcgctcgggacggcgatgctcctgcgctcccacgatgtctcggccccggcggacgcggcgctcgtcgcctgcctgctgctgctcaccagtcacgccgccttcaagaccgcactgttcctcggcgcgggggccgtgctgcacgccaccggtgagcgggacctggaccgaatggggggtctcgcggcccggatgccggtcaccaacgtggcgttcgctctcggcgctctgggcgcggcggcgctcccgctgagcgtgggcttcgtggccgagtggacgctgctccagtcgctgatccacggcgcccgtccggacgatcgactggtcgcggcgatgatgccgatctcggtcgccgtcgtcgccctcacggcggggctggcgctgctcacgttcgtcaaggcctacgggatcgccttcctggcccggccccgctcgtccggtgccgccgaggcccgggaggcgacacccggcatgcgcacggcgatgctcgtggccgcggtcgccgtcgtcggcctcggcctggttcctggcccgctcgccgacctcgccgggcgcgccgcgggtgtcgccgatcccgggtcagaggtggccgtcgacctgcccgggatcgcgggcggcgtgctcgatcccgtcgccgtgtccgtcctggcggtgctgctcgcggcgccggtcggcgtggtcgcgctggccgcggcacggcgccgccggcggcgccgggtggacctcgcctgggggtgcgggggcgcgcgggtcagcccgcggatgcagtacaccgcgacgtcgtacgccgaacccctggcgcgcgtgttcgacgacgccgtccggccggagcgcgacgtggtggtcacccactacagcgagtcccgctacctggtcgagcgcgtgcagttccgccagcggctcgacgaggtcgtcgagacccggctctaccagcccgtgctgcgcgtcggcgaccgtgtcggggccgcggcgcgccggctgcagaacggcagcatccatcgctacctgggctactccttcgccgccctggtcgccgtgctcgtggtggtcgcgctgtga

SEQ ID NO: 79596 - protein, 664 aa, Nocardioides sp. JS614
MTGVELGMTAQVVLAAAAVAAAVLAPPRLRNLVAGTLAAAVGAAGVVTGAAALTDHSGSLDLSTALPLTGVALDPTPLGGFVMLVAGAVGAVAAVFAIGYAHGPAASRTSWAALPAFLVSMQLVPAAADAVSFLLMWELMALASAVLVLTEHRDREEVRSAALWYAAMTHLSFGLLLLGFTVLVEEGGGTGFDAMSAVDPTSLQASIAFVLLIAGFATKAGAVPFHVWLPRAHPAAPSHVSAVMSAAMVKMGVYGALLVALRLLPGGPTWWGFVVVALGAVSATYGILQASVTSDLKRLLAYSTTENVGLMFLALGTAMLLRSHDVSAPADAALVACLLLLTSHAAFKTALFLGAGAVLHATGERDLDRMGGLAARMPVTNVAFALGALGAAALPLSVGFVAEWTLLQSLIHGARPDDRLVAAMMPISVAVVALTAGLALLTFVKAYGIAFLARPRSSGAAEAREATPGMRTAMLVAAVAVVGLGLVPGPLADLAGRAAGVADPGSEVAVDLPGIAGGVLDPVAVSVLAVLLAAPVGVVALAAARRRRRRRVDLAWGCGGARVSPRMQYTATSYAEPLARVFDDAVRPERDVVVTHYSESRYLVERVQFRQRLDEVVETRLYQPVLRVGDRVGAAARRLQNGSIHRYLGYSFAALVAVLVVVAL

SEQ ID NO: 79597 - DNA, 2028 bp, Photobacterium sp. SKA34
  CDS (1)..(2028): transl_table=11
atgagttcactcaactatttgtttttatctgttttgttgtatgttatcggggcttttatctccttaacactacacaagcaagaacgtctagcaacaaaactttccggcattctatgtgctatgggcggattaactgggctggcatcatccattccaacattgttggatggtcaggttatttcttatcagatagcaagtccatttagctttgctgactgtattattcgaattgatgcattatctgcgtttatggtttttgtgatttcgttacttgttatcgcaagcgctatttattcactctcttacatgaaggaatacgaaggaaaaggtgcatgggcaatgggattctttatgaatatctttattgcctctatggttgccctcgtcgtttcagacaatgcattttattttattgtcttttttgaaatgatgtcgttagcatcttattttttggttatttcagagcaaaacgataaatcaataaatgccggtttacagtatttcttaattgcacacgcaggttcggtgttgattatgattgctttctttatcctgtatagccaatgcggcagtttaaactttcaggattttaaatcagcaaacttatctcaaacacaagcatcagttgtttttctattagctttttttggttttggagccaaggcgggcatgatcactcttcatgggtggctaccacaagctcaccctgccgcaccttcaaatgcatcttcgttaatgtctggtgtcatggtgaagataggtatttttgggataatcaaagtcggtattgattttctaggggctgatacggcttggtggggataccttgttcttgcctttggctgtgtatcatctgttcttggtgtgatgtatgcactggctgaacatgacattaaacgattattggcttatcacaccgttgaaaatgtgggcattattctaatgggtgttggtattggtatggttggcattgcaacgaaccatcctgttatcgcaacattaggtctactcggtggtttataccatttattaaatcacgctatatttaaagggttattgttcttaggtgcaggctccgttattttccgtgttcatactaaagatatggaaaaaatgggaggcttggcgaaagtgatgccttataccgctattgcttttcttatcggtacgatggctatttctgcgttaccgcctttaaatggcttcgttagtgaatggtttatctatcagtctcttctttccatgagtaaagaaggcaatttcttaatgacaattgctgggcctattgccgttgtaatgctggcattaacgggtgcattagcttgcatgtgttttgttaaagtgtatggaatttgttttggcggtgcaccacgtagtgaaagtgcggcaaaagcaacagaagtaccttggccaatggtggctgctacagcagggcttgctggagtttgtattgcacttggcgttggctcgccatgggttgcacctattatctctcatgttgcatcaagcttaacatctgcagaatcagtgacggttacgcaaggtatcgcgttaattcctgataacgcttcacaagctattctttctacgcctgtaatcgcattaacattaattggattactgattgtacctttattaattcttgccattttcaaaggtaaaaagttacaacgtcgccattccggcgatccatgggcatgtggttatgcttatgaagatcgaatgatggtttctgctggtggcttcactcaaccacttcgtgaaatgtttgccccgttataccgcattcgtcaacagctagatcctagtaggctaatggtttcaatcctaaaaggaacgacttctactgccgccaatattgaacctttctttgataacaaagttgttttaccgattgcacgaggtgtacagcgtgtaggtagagttgttcagtggcttcagtatggtgatttccgtacttactgtctgtacatggttatcgcattagtggtgctgttatttattcccgttgatttaggagcgaagtaa

SEQ ID NO: 79598 - protein, 675 aa, Photobacterium sp. SKA34
MSSLNYLFLSVLLYVIGAFISLTLHKQERLATKLSGILCAMGGLTGLASSIPTLLDGQVISYQIASPFSFADCIIRIDALSAFMVFVISLLVIASAIYSLSYMKEYEGKGAWAMGFFMNIFIASMVALVVSDNAFYFIVFFEMMSLASYFLVISEQNDKSINAGLQYFLIAHAGSVLIMIAFFILYSQCGSLNFQDFKSANLSQTQASVVFLLAFFGFGAKAGMITLHGWLPQAHPAAPSNASSLMSGVMVKIGIFGIIKVGIDFLGADTAWWGYLVLAFGCVSSVLGVMYALAEHDIKRLLAYHTVENVGIILMGVGIGMVGIATNHPVIATLGLLGGLYHLLNHAIFKGLLFLGAGSVIFRVHTKDMEKMGGLAKVMPYTAIAFLIGTMAISALPPLNGFVSEWFIYQSLLSMSKEGNFLMTIAGPIAVVMLALTGALACMCFVKVYGICFGGAPRSESAAKATEVPWPMVAATAGLAGVCIALGVGSPWVAPIISHVASSLTSAESVTVTQGIALIPDNASQAILSTPVIALTLIGLLIVPLLILAIFKGKKLQRRHSGDPWACGYAYEDRMMVSAGGFTQPLREMFAPLYRIRQQLDPSRLMVSILKGTTSTAANIEPFFDNKVVLPIARGVQRVGRVVQWLQYGDFRTYCLYMVIALVVLLFIPVDLGAK

SEQ ID NO: 79599 - DNA, 2046 bp, Xanthobacter autotrophicus Py2
  CDS (1)..(2046): transl_table=11
atgcccgatgccgccttcgccgcacagcttcccgtcagcggacaactcctcgtggccctcggcgcggtggcggtgcttctggctctcgccgggctcggtgtggcgacggcgcggcgccccgcgggccggccgctcgtctatggcggcgcgctggcggtgacacttttggccggtctctccgcccttaccgccatcgcggcgccggcggctgggatcgtgctgccccttggcattccctggatcggcgcccacctgcggctcgatgcgttgtctgcggtcttcctcgcggtgatcaatctcggcggcgcggcggcgagcctctatggcctcggctacggccggcacgatcatgcgccggaacgggtgctgcccttcttcccggccttcctcgccggcatgaacatggtgctgctggcggacgacgcctacagtttcctcctgtcgtgggaattcatgtcgctggcgtcctgggcgctggtggtggcccacgacaaggaggcgggcaatgtgcgcgccggcctcgtctacatcctcatggcctcgttcggcacgctggcgctgatgctggcctttggcctgctcgccgccggctccgggggcggctatgccttcgatgccatgcgcgaggcgccgcccgtgggcgccttcgccgcgctggtgctggcgcttgcgctgctgggggcggggtccaaggcgggtctgatgccgctgcacgtctggctgccgctggcccatcccgccgcgcccagccacgtctccgccctcatgagcggggtgatgaccaaggtggcggtctacggcttcatccgcatcgtgtttgatctctccggcccgccggactggtggtggggcatcccggtgctgggtgccggcggcgtcgcggcggtcatcggcgtgctgcaggcgctgttgcagggcgacaccaagcgcgtgctcgcctattccaccatcgagaatatcggcctcattttcatcggcctcgggctggcgctggccttctcggccaacggatttcccaccgccgccgcgctggcgctcacggcggcgctgttccatgtgctcaaccatgcggccatgaagagcctgctgttcttcggtgccggcgctgtgctgaccgccaccggcacccggcagatggaggaactgggcggcctcatccaccgcatgcccaccaccagcgtggtgatgctgatcggctgcgccgccatctcggccctgccgccgctcaatggttttgcctccgaatggctggtgtttcaggcggtgctgctgagcccggagcttccggtctgggggctgaagctgatggtgccggccgtgggcgcgctgatggcgctcgccgccgcgctcgccgccgcctgcttcgtgcggctctacggcatcgccttcctcggccggccgcgcagcccgaaggcgagcgaggcccacgaggtggacgccttctcccgtgccgccatgatcgcgcttgccgccgtgtgcgtgggcgccggcctgctgcccggctttgtcatcgatgtgctgcagccggcggtgggcggcctcgtgggccagaccatgccggcgcagggctcagtggcgtggctctccatcatcccggtggcggagagccgcagctcctacaacgggctgctggtctttgccttcacggcactgtcggcgctgctggcggccttcgtcatccaccgcttcgcctcgggcgcggtacggcgggcgccgccgtgggattgcggcttccccaatgccagcccgctgagccagtattccgccgcctccttcgcccagcccatccgccgggtgttcgcgcgcggcctgttcgcggcccgcgagaaggtggagatgccgccccccggcgcgctcactcccgcccggttctcctccagcgcgcgcgatcccgcctgggccttcctgttcctgcccctgacggcggcggtggactatgtggccgagcgggcgaaccggctgcaatacctcaccatccgccagtatctgggcctggttttttcggccctggtgctgctgcttctggtgctcgccctatggacctga

SEQ ID NO: 79600 - protein, 681 aa, Xanthobacter autotrophicus Py2
MPDAAFAAQLPVSGQLLVALGAVAVLLALAGLGVATARRPAGRPLVYGGALAVTLLAGLSALTAIAAPAAGIVLPLGIPWIGAHLRLDALSAVFLAVINLGGAAASLYGLGYGRHDHAPERVLPFFPAFLAGMNMVLLADDAYSFLLSWEFMSLASWALVVAHDKEAGNVRAGLVYILMASFGTLALMLAFGLLAAGSGGGYAFDAMREAPPVGAFAALVLALALLGAGSKAGLMPLHVWLPLAHPAAPSHVSALMSGVMTKVAVYGFIRIVFDLSGPPDWWWGIPVLGAGGVAAVIGVLQALLQGDTKRVLAYSTIENIGLIFIGLGLALAFSANGFPTAAALALTAALFHVLNHAAMKSLLFFGAGAVLTATGTRQMEELGGLIHRMPTTSVVMLIGCAAISALPPLNGFASEWLVFQAVLLSPELPVWGLKLMVPAVGALMALAAALAAACFVRLYGIAFLGRPRSPKASEAHEVDAFSRAAMIALAAVCVGAGLLPGFVIDVLQPAVGGLVGQTMPAQGSVAWLSIIPVAESRSSYNGLLVFAFTALSALLAAFVIHRFASGAVRRAPPWDCGFPNASPLSQYSAASFAQPIRRVFARGLFAAREKVEMPPPGALTPARFSSSARDPAWAFLFLPLTAAVDYVAERANRLQYLTIRQYLGLVFSALVLLLLVLALWT

SEQ ID NO: 79601 - DNA, 1914 bp, Desulfitobacterium hafniense DCB-2
  CDS (1)..(1914): transl_table=11
atgataaacatagagcggggtattcgggtaggaaccatgggtctatccttaatgatagcaatcctgggcattctctttctgggttggaatttccatatggacaacttttcagggcaatggcatggggaaggcttttcttgcgatggattgacagccttcttccttttagtgctcttgcttgggcaaggtattgcatctctctatggtctgggctatatgaaagattatgaggggaagcgttctctcctctccttttccttatcctgggcagcttttctggggagtatggctggagttttaatcgtcaacaatggcttctattttctttttctttgggaactcatgtcccttttttcgttcttgctggtgatatatgaacacgaagagagctccaatcgtcgggcggcgttcatttattttgtcatgacccatgtgggaacggtttttttgattgcggcagttctctatctttacagtaagaccggaagttttctctatggggattgggctgccataaccccgactttaagtccgggggaaaagaacggtctttttctatgctttctgattggttttggtacgaaggcggggttggtgccttttcatatctggcttccctacgctcatcccgttgccccttctccagtgtccgcattaatgtccggggtgatggttaaaattgctctctatatgatgatgagatgggtgtggttgaccctggcccccatggaactttggtggggcgggttaatgctggcactcggagtgctctctgcttttatcggaattctctatgcttgtgtagaacaggatgtaaagcgtttgttggcttattccacagtagagaatatgggtattcttacgatggctttaggaacggccatgattgcccggaccctgggctattcggacctagtggtccttgccctggctgctttcttctggcatgggattcatcatctcctttttaagtccggcttgtttatggccgcgggaaatatcatccaggcaacacatacaaaaagacttgaccaaatgggtggtttacttaagaaaatgcccaggacgggcttgtgggcaatggttggcgctgtggggctttccgcgcttccacccttgggaggtttttggggggaatggttgctatttcacgccttatggaagacttccgttcaagtggaagggggactgttcaagctggccctgcccttgagcctggcagctttggcgtttatttctgccttagctctggcaactatggtgaagtggtttgccggagccttcctggggcaggctcggtcggcaaatgctgcaaatgctcaggagctgccttggcctcagacggtatctatggcaatggccatgatgctgaccctcctggcaacgctgtatcctcaaggcctttggaaactaataagtgtccccattcacgtgttgaaagatacaagcgattctccactcaccgacagtttagctctgccgctttgggcagatttctttaacctgatcaccccttacatcttgctgttaggccttttttcagtgacactctatcagttatccgcaagaaagcgcaagagagtagcagggacctggaactgtggtgtgcctttaacccctcgtatgcaatacacgggcttagggataaccatgcccttgcggatagccctgaaaaaggttttggcctttcgccccattattgataaaaagtttggggaaaccccctatgtgttacagtccttgcactatcgcggccgaacccgtgagatgacggaggaagtgttctatcggcctgccatgaagttgcttttgcggtgtgcagaacgagttcgcatcctgcaaaccggcagtattcacacctatttagcttatattctgatcaccttagtggttgtgttgatttggactatgtaa

SEQ ID NO: 79602 - protein, 637 aa, Desulfitobacterium hafniense DCB-2
MINIERGIRVGTMGLSLMIAILGILFLGWNFHMDNFSGQWHGEGFSCDGLTAFFLLVLLLGQGIASLYGLGYMKDYEGKRSLLSFSLSWAAFLGSMAGVLIVNNGFYFLFLWELMSLFSFLLVIYEHEESSNRRAAFIYFVMTHVGTVFLIAAVLYLYSKTGSFLYGDWAAITPTLSPGEKNGLFLCFLIGFGTKAGLVPFHIWLPYAHPVAPSPVSALMSGVMVKIALYMMMRWVWLTLAPMELWWGGLMLALGVLSAFIGILYACVEQDVKRLLAYSTVENMGILTMALGTAMIARTLGYSDLVVLALAAFFWHGIHHLLFKSGLFMAAGNIIQATHTKRLDQMGGLLKKMPRTGLWAMVGAVGLSALPPLGGFWGEWLLFHALWKTSVQVEGGLFKLALPLSLAALAFISALALATMVKWFAGAFLGQARSANAANAQELPWPQTVSMAMAMMLTLLATLYPQGLWKLISVPIHVLKDTSDSPLTDSLALPLWADFFNLITPYILLLGLFSVTLYQLSARKRKRVAGTWNCGVPLTPRMQYTGLGITMPLRIALKKVLAFRPIIDKKFGETPYVLQSLHYRGRTREMTEEVFYRPAMKLLLRCAERVRILQTGSIHTYLAYILITLVVVLIWTM

SEQ ID NO: 79603 - DNA, 1827 bp, Escherichia coli B
  CDS (1)..(1827): transl_table=11
atgagcgcaatttccctgatcaatagcggcgtggcgtggtttgtcgccgccgctgttctggcatttctcttttcttttcaaaaagcgttaagtggctggatagctggaattggcggcgcggttggtagtctgtatacggcagccgcgggcttcactgtactgactggcgcggttggcgtgagcggtgcgctgtcgctggtaagctacgatgtgcaaatctctccgcttaacgcgatttggctgattacgctcggtctgtgcggtctgtttgtcagcctctacaacattgactggcatcgccacgcgcaggtgaagtgcaacggcttgcagatcaatatgttgatggctgccgccgtctgcgccgtcattgccagcaacctcggcatgttcgtggtaatggccgaaatcatggccctgtgcgcggtgttcctcaccagcaacagcaaagagggcaaactgtggtttgcgctggggcgtcttggcactctgctgctggcgattgcttgctggctgctgtggcagcgttacggcacgctggatctgcgcctgctggatatgcgtatgcaacagctgccgctcggttccgatatctggctgctcggagtgattggctttggcctgctggccgggattattccgctgcacggctgggtgccgcaggcacatgcgaacgcctctgcgccagctgccgcgttgttttctacggtagtcatgaaaattggcctgctgggcattttaaccctgtcactgctgggcggtaatgcaccgctgtggtgggggatcgcgctgctggtgctcggcatgatcaccgcgtttgtcggtggtctgtatgcgctgatggagcacaacatccagcgcctgctggcttaccacaccctggaaaatatcggcatcatcctgctggggctgggcgctggcgtaacgggtatcgcgctcgaacaaccggcgctgattgctcttggcctggtcggtggtctgtaccatctgcttaaccatagcctgttcaaaagcgtactgttcctcggggcggggagcgtctggttccgtaccggtcatcgcgatatcgaaaaactcggtggtattggcaagaaaatgccggttatctccatcgccatgttagtcgggctgatggcaatggctgcgctgccgccgctgaatggttttgccggggaatgggttatctatcaatcatttttcaaactgagcaatagtggcgcgtttgttgcccgtctgctggggccgctgctcgctgtggggctggcaattaccggtgcgctggcggtgatgtgtatggcgaaagtctatggcgtcacgttcctcggcgcgccgcgtaccaaagaagccgaaaacgccacctgtgcgccgctcctgatgagcgtaagcgtagtggcactggcgatttgctgcgtaattggcggtgttgctgcgccgtggctactgccgatgctctctgctgctgtacctctgccgctggagcctgctaacaccaccgtttctcaaccgatgatcacgttgctgctgattgcctacccgctgctgccattcatcattatggcgatttgcaaaggcgatcgtttgccatcgcgttcccgcggtgcggcctgggtgtgcggttacgaccacgaaaaatcaatggtgattaccgctcacggttttgccatgccggtgaaacaggcgtttgcgccggtgctgaaactacgcaaatggctgaatccggtgtctctggtgccgggctggcagtgcgaggggagtgcgttgctgttccgccggatggcgctggttgaactggcggtactggtggtgattattgtttcacgaggagcctga

SEQ ID NO: 79604 - protein, 608 aa, Escherichia coli B
MSAISLINSGVAWFVAAAVLAFLFSFQKALSGWIAGIGGAVGSLYTAAAGFTVLTGAVGVSGALSLVSYDVQISPLNAIWLITLGLCGLFVSLYNIDWHRHAQVKCNGLQINMLMAAAVCAVIASNLGMFVVMAEIMALCAVFLTSNSKEGKLWFALGRLGTLLLAIACWLLWQRYGTLDLRLLDMRMQQLPLGSDIWLLGVIGFGLLAGIIPLHGWVPQAHANASAPAAALFSTVVMKIGLLGILTLSLLGGNAPLWWGIALLVLGMITAFVGGLYALMEHNIQRLLAYHTLENIGIILLGLGAGVTGIALEQPALIALGLVGGLYHLLNHSLFKSVLFLGAGSVWFRTGHRDIEKLGGIGKKMPVISIAMLVGLMAMAALPPLNGFAGEWVIYQSFFKLSNSGAFVARLLGPLLAVGLAITGALAVMCMAKVYGVTFLGAPRTKEAENATCAPLLMSVSVVALAICCVIGGVAAPWLLPMLSAAVPLPLEPANTTVSQPMITLLLIAYPLLPFIIMAICKGDRLPSRSRGAAWVCGYDHEKSMVITAHGFAMPVKQAFAPVLKLRKWLNPVSLVPGWQCEGSALLFRRMALVELAVLVVIIVSRGA

SEQ ID NO: 79605 - DNA, 2019 bp, Escherichia coli B
  CDS (1)..(2019): transl_table=11
atggatgccctgcaattattaacctggtcgctgatcctctatctgtttgccagtctggcttcgctgtttttactcggtctggacagactggctattaagctttccggcatcacatcgctggtgggcggcgtgattggcatcatcagcggaattacgcaattacatgctggtgtaactttagtcgcccattttgccaccccttttgactttgccgatttaaccctgcgaatggatagcctctcggcatttatggtgctggttatctccttgctggtggtggtttgttcgctctattcattgacttatatgcgcgaatacgagggcaaaggcgcggcggcgatgggcttctttatgaatcttttcatcgcatcgatggttgccctgctggtgatggacaacgctttttggttcatcgtgctgtttgaaatgatgtcgctgtcttcctggtttctggtcattgccaggcaggataaaacgtcgatcaacgctggcatgctctacttttttatcgcccacgccggatcggtgctgataatgatcgccttcttgctgatggggcgcgaaagcggcagcctcgattttgccagtttccgcacgctttcactttctccggggctggcgtcggcggtgttcctgctggcctttttcggttttggcgcgaaagccgggatgatgccgttgcacagctggttgccgcgcgctcaccctgccgcaccatcgcacgcttcagcgttgatgtctggcgtaatggtcaaaatcggtattttcggcatcctgaaagtggcgatggatctgctggcgcaaacgggtttgccgctgtggtggggcattctggtgatggcgatcggcgcaatctccgcgctcctgggcgtgctgtatgcgctggcggaacaggatatcaaacggctactggcctggagtaccgtcgaaaacgtcggcattattttgctggcggtcggtgtggcgatagtcggtctgtcactgcacgacccgctgctcaccgtggttggactgctcggcgcactgtttcatctgctcaaccatgcgctgttcaaagggctgctatttctcggcgcgggcgcgattatttcgcgtttgcatacccacgacatggaaaaaatgggggcactggcgaaacggatgccgtggacagccgcagcatgcctgattggttgcctggcgatatcagcccttcctccgctgaatggttttatcagcgaatggtacacctggcagtcgctgttctcactaagtcgtgtggaagccgtagcgctacaacttgcgggtcctattgctatggtaatgctggcagtcactggtgggctggcagtaatgtgcttcgtaaaaatgtacggtattactttctgtggtgcgccgcgcagtacacacgctgaagaggcacaggaagtgccaaatacgatgatcgtcgccatgctactgctcgcggcactctgcgtattaattgcgcttagtgccagttggctggcaccgaagataatgcatattgcccatgcgtttaccgatacccctcccgtcactgtcgccagcggaatagcacttgtacccggcacgtttcatacacgggtcactccttcattactgttgctgttactactggcgatgcctttgctgcctggcctttactggctgtggtgtcgttcgcgccgcgcagcgtttcgtcgcacaggagatgcctgggcatgcggctacagctgggaaaatgcgatggccccgtcaggcaatggcgtgatgcagccgctgcgtgtggtcttttctgcgctatttcgtctacgacaacagctcgaccctacgctgaggctaaataaaggtcttgcgcacgtcaccgccagggctcagagcacagaacccttctgggatgagcgggtgatccgccccatcgtgagcgccacccaacggctggccaaagaaatacagcatctgcaaagcggcgactttcgtctctattgcctgtatgtggtcgccgcactggttgtgctgctaatcgctattgccgtctaa

SEQ ID NO: 79606 - protein, 672 aa, Escherichia coli B
MDALQLLTWSLILYLFASLASLFLLGLDRLAIKLSGITSLVGGVIGIISGITQLHAGVTLVAHFATPFDFADLTLRMDSLSAFMVLVISLLVVVCSLYSLTYMREYEGKGAAAMGFFMNLFIASMVALLVMDNAFWFIVLFEMMSLSSWFLVIARQDKTSINAGMLYFFIAHAGSVLIMIAFLLMGRESGSLDFASFRTLSLSPGLASAVFLLAFFGFGAKAGMMPLHSWLPRAHPAAPSHASALMSGVMVKIGIFGILKVAMDLLAQTGLPLWWGILVMAIGAISALLGVLYALAEQDIKRLLAWSTVENVGIILLAVGVAIVGLSLHDPLLTVVGLLGALFHLLNHALFKGLLFLGAGAIISRLHTHDMEKMGALAKRMPWTAAACLIGCLAISALPPLNGFISEWYTWQSLFSLSRVEAVALQLAGPIAMVMLAVTGGLAVMCFVKMYGITFCGAPRSTHAEEAQEVPNTMIVAMLLLAALCVLIALSASWLAPKIMHIAHAFTDTPPVTVASGIALVPGTFHTRVTPSLLLLLLLAMPLLPGLYWLWCRSRRAAFRRTGDAWACGYSWENAMAPSGNGVMQPLRVVFSALFRLRQQLDPTLRLNKGLAHVTARAQSTEPFWDERVIRPIVSATQRLAKEIQHLQSGDFRLYCLYVVAALVVLLIAIAV

SEQ ID NO: 79607 - DNA, 1734 bp, Tigriopus californicus
  CDS (1)..(1734): transl_table=5
atcctaaaacttccaaattggagaggagtaatatgaggaagactcttattagttaggggattcttgttgatagcaggaggcctgagatgtgcaggcaatcacgagagggtggttttattatgggaggggtttagccagatttgtcatcccttggggttttgccttctagtagactcggaaagatgtttttttgggagaaccgtttgtttaattgctgggagagttatattatttagggtttattatataaggagcgaaaaatttttttatcgatttgtgggtattattttggtttttgtgagttctatagttctattaatctttaggcccggactgttatctgtatttattggttgagatgggttgggagtaacctctttcttattggtgatttatttttttagggataaatctttgaatgcaggactgctaacactattgacaaatcgattaggggacattttcttgcttctcagggtgagcgttgcatgggggaggtttggcgccgagttaaggaggcttgaagggagaggctttaggttagggggggtatggctcctaggaatttttgctgctagtttaactaaaagtgctcaagtgcctttttctgcttggctgcccgcagccatggctgcccctaccccagtatctgcgctagtacactcttctactctagtaaccgcaggtctttacctattaatccgatttaggagaggcttaagaaatagggaattttgatcatgaggactatttattagaaggtgtacgttagtaatagcaagatttagaagtttggtagagtatgatataaaaaaaattgttgcactttcaaccttgagacaattaggtttgataggcatggcagtaagaatgcagtcaatgaggggggccttttttcatctaattatacatgcctattttaaagccttattgtttataattatgggatactgaattcatcagtgttccgggtaccaagatttgcgaattagaagcatttcgtctcaagaattcaacttgtccagaacattaaccctgctagctcttagaaggttaaggggagtcccatttctgtcaggatttatttctaaagattatttgttagaaagaagtagtatattaagtagcgtcagaagtgtgaggggattattaatagtggtggggtgtatattgacagttatatatagggggcggctcttgacgagtttgttgggttttaaatgaaggggggagcctgtatgtaattggtcggagaataggtgggccttttggaggagtttactagttttgagaatattaagattagtaggggggtgatggttgagggggtatctaaggcctttaggaagagttttattaattccaaaagaaattaagtttgtatttagaataattgttttagggggtataattttgagctggggcttatgtcgctgagaaagaaggttgaccggatctcttgggctacttggtagactttgaggattgaggtttttaagatttccctctttagcaaaaagagctctgtatgtgggtataaggtctcgagaggttgaagatctgtgactacccttgatatcaagagggtgggttcaggcaagatttggggagtttaggaggtctatcgggtctaggaggataaaaaactatagactttttagaaatttgcctatcctagggctaagaactttcagaggattttgctggttttacacgggccagtttacattataa

SEQ ID NO: 79608 - protein, 577 aa, Tigriopus californicus
MLKLPNWSGVMWGSLLLVSGFLLMAGGLSCAGNHESVVLLWEGFSQICHPLGFCLLVDSESCFFGSTVCLIAGSVMLFSVYYMSSEKFFYRFVGIILVFVSSMVLLIFSPGLLSVFIGWDGLGVTSFLLVIYFFSDKSLNAGLLTLLTNRLGDIFLLLSVSVAWGSFGAELSSLEGSGFSLGGVWLLGIFAASLTKSAQVPFSAWLPAAMAAPTPVSALVHSSTLVTAGLYLLIRFSSGLSNSEFWSWGLFISSCTLVMASFSSLVEYDMKKIVALSTLSQLGLMGMAVSMQSMSGAFFHLIMHAYFKALLFMIMGYWIHQCSGYQDLRISSISSQEFNLSSTLTLLALSSLSGVPFLSGFISKDYLLESSSMLSSVSSVSGLLMVVGCMLTVMYSGRLLTSLLGFKWSGEPVCNWSENSWAFWSSLLVLSMLSLVGGWWLSGYLSPLGSVLLIPKEIKFVFSMIVLGGMILSWGLCRWESSLTGSLGLLGSLWGLSFLSFPSLAKSALYVGMSSREVEDLWLPLMSSGWVQASFGEFSSSIGSSSMKNYSLFSNLPILGLSTFSGFCWFYTGQFTL

SEQ ID NO: 79609 - DNA, 1734 bp, Tigriopus californicus
  CDS (1)..(1734): transl_table=5
attctaaaactttcaaattgaggagggctggtttgggggagtattctgctgatcgggggcttaatattaatattagggggcttgaggtgtgtgggcaatcatcagagcgttgttctattatgggaggggttttcaagaatttgtcaccctttgggattctgtctattagtagatgcggaaaggtgtttttttgggagaactgtctgtttaattgctggtagggtgataggattcagggtgtactatatgaggagagaaaaatttttttatcgatttgtggggattattctagattttgtaggatcaataattcttctgatttttaggcctggtctattgtcggtatttattgggtgagatgggttaggggtttcctctttcttgttagtaatttattttttgagcgataaatccctaaacgcgggccttctaactttactaagcaaccgcttaggtgatatttttttgttactaagagtaagagctgcatgggggagggttggggctgagttaagtagtcttgagggaagagggtttagtttaagaggaattatatttgtgggaatctttgctgcgaggctaactaaaagtgcccaagtgcccttttctgcttggctaccagcagctatggctgctcctacccccgtttctgctttagtgcactcttctaccctagtaactgcaggactttacctattaattcggttcagaaggggtttaataaggagcgagttttgatcctgggggttatgaattagaagaggcacattagtaatggctagttttagaagtttggtagagtgcgatataaaaaaaattgttgcactttcaaccctcagacagctgggtctcatagggatagcagtcaggatggaatctataggggcagcttttttccacttaatcatacatgcctacttcaaggctctattgtttataattatagggtattggattcatcagtgttcgggttaccaggacttacgtgttaggagaatctcgtctcaagaatttaatatatctactgtatttacccttttggcgcttagaagactaaggggtgttccttttctatccggctttatttctaaggactacctgctagaaagtacaagaatactaagcagagttagtagagggagggggttactgatagtactagggtgtgtgttgacggtaatatatagaggacgtcttttggctaggttattaggtttcaaatgaagtggagaacccgtatcccattggtccgagaaaagcggggtcttttgagcaagtttagtggttttgagaattttaagattaagggggggggtatgactgagaggatacctgagccctgtgggaacaaggctactggttcccaaagaaattaaacttgtttttaggctaattgttctgggaggaatggttttgaggtgaggttttttgcggtgagagaggcggttttcaagatatttaactagactgggaaggctttgaggactaaggtttttaagttttcctttgttaggtagaagtgctctgtacgtagggaaaatatcaagggagattgaggacctatgactacccttagcttctagggggtgaatccaatcaaggtttttggatatcagcggctccctgggggtaagaagggcaaaaaatttcatcctttttagaaatttgcctattttagggctgagcatgtttagcgggttttgctggttttttactggccaatttacactatag

SEQ ID NO: 79610 - protein, 577 aa, Tigriopus californicus
MLKLSNWGGLVWGSILLIGGLMLMLGGLSCVGNHQSVVLLWEGFSSICHPLGFCLLVDAESCFFGSTVCLIAGSVMGFSVYYMSSEKFFYRFVGIILDFVGSMILLIFSPGLLSVFIGWDGLGVSSFLLVIYFLSDKSLNAGLLTLLSNRLGDIFLLLSVSAAWGSVGAELSSLEGSGFSLSGIMFVGIFAASLTKSAQVPFSAWLPAAMAAPTPVSALVHSSTLVTAGLYLLIRFSSGLMSSEFWSWGLWISSGTLVMASFSSLVECDMKKIVALSTLSQLGLMGMAVSMESMGAAFFHLIMHAYFKALLFMIMGYWIHQCSGYQDLRVSSISSQEFNMSTVFTLLALSSLSGVPFLSGFISKDYLLESTSMLSSVSSGSGLLMVLGCVLTVMYSGRLLASLLGFKWSGEPVSHWSEKSGVFWASLVVLSILSLSGGVWLSGYLSPVGTSLLVPKEIKLVFSLIVLGGMVLSWGFLRWESRFSSYLTSLGSLWGLSFLSFPLLGSSALYVGKMSSEIEDLWLPLASSGWIQSSFLDISGSLGVSSAKNFILFSNLPILGLSMFSGFCWFFTGQFTL

SEQ ID NO: 79611 - DNA, 2019 bp, Magnetospirillum gryphiswaldense
  CDS (1)..(2019): transl_table=11
atgccttttgccatgctgatcgccggcgccttgctgtcgctgcctttgttggcgctgttcgcggtgctggtcggcaggcgcgatgccgcccattccatcacctatgccggctgcttcgtcgcctccatcgccttgctggccggcgggttgacctatctgggcggccatgatgcctcgccccggctggtgttgcccttgggtctgccgtggctgaaggcgcatttccgcatcgacaatctgtcggcgctgttcatgctgatgatcaatctgggtgctgccgccgcctccgccttcgccgtcggctacagccagcatttgccgcaacgtcgccgcgtcaccccgttcttccccctgttcctgctggccatgaatctggtgttgatggccgatgacgccttcatcttcctggtctcgtgggaattcatgtcgctggcgtcgtggctgatggtggtgtccgaccacacggaagaagaaaaccgcaaggccggcaacgtctatctgatcatggccgccttcggcaccttctgtctgttgccggccttcggcctgatggctggccccggcggcgatttcaccttcgacgccatgcgcatcaaggatttggggctgatgggcggtttcctggtggcgctgctggccatcatgggcgccgggtccaaggccgggctggtgccgctgcacgcctggctgcccttggcccatcccgccgcccccagccatgtctcggccctgatgagcggggtcatgaccaaggtggcgctttacggcatgatccgtatcctgctcgacctgcacggcaccttgtcgtggcattggggcgctggcctgatgctggtgggcggcatcaccgccgtcatgggcgtgctctatgcggtattgcaggacgatctgaaaaccctgctggcctattccaccgtggaaaatatcggcgtcgccgtcatcggtctgggcttggccatcgccttcaagggcgacggtcagaccgaactggccgccctggccctggtcgccagcctgtatcacatggccaaccattcggtgttcaagaccctgctgtttttgggcgccggcgccgtcatcagcgccaccggccaccggtcgctgaccgttttgggtgggttgttgaagcgtatgccgtggaccggcaccgcctttctggtcggcgccgccgccatttccgccttgccgccgttgaacggcttcgtctcggaatggctgatcctgcaatcgttgttcaagggaccggccatgccgcattgggcgatgaagttcggcgtgcccgtggtcggcgccttcctcgccctggccgcagcgctggccgccacctgcttcgtccgcgcctatggcatcgcctttttggggcgcccccgttccaccgatgccgcccaggcgaccgaggtcagcttcggcatgcgctggtccatggtggtgctggcggtgctgtgcgtggtgctcggcgtcatcccggtcaccgtcaccgacgccctgtcgcacgcggtgcagcctttgaccggcgtccagttcgccgtttccgccgatctggggtggccgtggctatcgccggtttcggccacccgcggcgcctattccggcaccatcctggtcatgttcgggctggccttgttcgccatcgccatcttcaccgtgcaccgtctgggcacccaggccatccgccgcgccgacccgtgggattgcggccatcccgaggacatcccccagacccagtacaccagccaatcctttgcccagccgctgcgccgggcctttggccacaccatcttccaggcgcgggaaacggtggtcatgcccgagccgggcgacgattccccggccacccataaggtcaccatgttcgaccccatctggtcgggcctgtacgcgcccctgggccgggtcatcggctggatcgccgaccacgtcaaccggctgcaatacctgaccgtgcgcggctatctgctgatgatgttcctgaccttggtgttcatgctgctggtggtggcggtgaggcaacagctatga

SEQ ID NO: 79612 - protein, 672 aa, Magnetospirillum gryphiswaldense
MPFAMLIAGALLSLPLLALFAVLVGRRDAAHSITYAGCFVASIALLAGGLTYLGGHDASPRLVLPLGLPWLKAHFRIDNLSALFMLMINLGAAAASAFAVGYSQHLPQRRRVTPFFPLFLLAMNLVLMADDAFIFLVSWEFMSLASWLMVVSDHTEEENRKAGNVYLIMAAFGTFCLLPAFGLMAGPGGDFTFDAMRIKDLGLMGGFLVALLAIMGAGSKAGLVPLHAWLPLAHPAAPSHVSALMSGVMTKVALYGMIRILLDLHGTLSWHWGAGLMLVGGITAVMGVLYAVLQDDLKTLLAYSTVENIGVAVIGLGLAIAFKGDGQTELAALALVASLYHMANHSVFKTLLFLGAGAVISATGHRSLTVLGGLLKRMPWTGTAFLVGAAAISALPPLNGFVSEWLILQSLFKGPAMPHWAMKFGVPVVGAFLALAAALAATCFVRAYGIAFLGRPRSTDAAQATEVSFGMRWSMVVLAVLCVVLGVIPVTVTDALSHAVQPLTGVQFAVSADLGWPWLSPVSATRGAYSGTILVMFGLALFAIAIFTVHRLGTQAIRRADPWDCGHPEDIPQTQYTSQSFAQPLRRAFGHTIFQARETVVMPEPGDDSPATHKVTMFDPIWSGLYAPLGRVIGWIADHVNRLQYLTVRGYLLMMFLTLVFMLLVVAVRQQL

SEQ ID NO: 79613 - DNA, 1989 bp, Rhodothermus marinus
  CDS (1)..(1989): transl_table=11
atgaaccacacgaccctggttggactgaccctgctccttccgctggcgggggcggttttcaatggactgggcggccttgcctttcacggactccggcgccagaaggtactcatcggggcgctggcgacgctggccgtggccgtgcccttcgtgctggcgctctatctgtttctgacctacgaaggggagccgttgctggcccgcttctttacctggatcgccgcgggcgagctggaactggccttccagtaccggatcgacgaactctcgctcgtaatgacgctcatcgtcacgggcgtgggcgcgctcatccatctgtactcgatcggctacatgtacgaggaccgggggtactggaagtacttcagctacctgaaccttttcatcttcatgatgctcaacctggtcctcgccgacaacctgacgctgctgtttctgggctgggagggcgtcggactctgctcctacctgctgatcggcttctggtacgaggacttcaaaaacagcgaggccgccaacaaggccttcatcgtcaaccgcgtgggcgacgcggccttcctgctggcgatgtttctgctgttccgggaggtgggaagcctgaacttcggcgcgttgctggccgatccggccgcgttgccgtcgggtgtggtggcggcggctgtgctgctgctgttcatcggcgccacgggcaaaagcgctcagattccgctctttgtgtggctcccggacgccatggccggcccgacgcccgtctcggcgctgatccatgccgccacgatggtcacgagcggtctgtacctgttcgcccgcatttcgccgctggcgctggccgcgccgggcgtgctcgtggtggtggcgctggtgggcgcgctgacggccttcatggcggccacgatcgccgtcacgcagtacgacatcaaaaaggtgctggcctattcgacggtctcgcagctcggctacatgttcatggcggccggcgtgggcgctttcttcgtgtcgatcttccacgtgctcacgcacgcgttcttcaaggcctgcctctttctcggatcgggtagcgtgatccacgccatgcatcacgtggagcacacgctgcacgagcggggccatcacggccatctcgatccacaggacatgcgcaacatgggcgggctgggacgcttcatgccggccacgcgcaccacgtatctgatcgccacgctggccattgcaggctttccgctgacggccggcttcttctcgaaagacgagattctgttcaaggccttcgaatacggctacaacggccacgcctacgcctggatcgcctggattctgggcgtggtgacggcgctgctgacggccttctacatgatgcgctcctacgtgctcacctttgagggcacgccgcgctggcccatggccgatcaggtgcacccgcacgagtcgcccgcgacgatgacgctgccgctctgggtgctggccgcgctgtcgctggtgggtggcttcgtgggactgccgggcgtgatcgcccacggcgaatggattctgattcaccactacctgggcgcttcgggtggcggaccggtggccgagcccgaactgcacgcgcacgtgccgctggtcatcgaatgggcgctgatcgggctgggcgtggcgatcgcgctgatcgggctctactggagctggacggcctaccgccgccacggcctggcctacgacgacatgctccgcgaacggttcggcgccttctaccgcgtctgggccgccaagtactactgggatgaattctacgatcgggcgatcgtgcagccgctgctgcgctttgcccgcaacgggctggccgctttcgatcagaaagtcatcgacggagcggtcaacggcgtggcgcggctgatggccgaactcggccagcgtgtgcgccgggtgcagaccggcgtcgtgcaggcctacgccatggccatcgtgctcggcgtggcgctcgtactggcgctgatgctgtttggctaa

SEQ ID NO: 79614 - protein, 662 aa, Rhodothermus marinus
MNHTTLVGLTLLLPLAGAVFNGLGGLAFHGLRRQKVLIGALATLAVAVPFVLALYLFLTYEGEPLLARFFTWIAAGELELAFQYRIDELSLVMTLIVTGVGALIHLYSIGYMYEDRGYWKYFSYLNLFIFMMLNLVLADNLTLLFLGWEGVGLCSYLLIGFWYEDFKNSEAANKAFIVNRVGDAAFLLAMFLLFREVGSLNFGALLADPAALPSGVVAAAVLLLFIGATGKSAQIPLFVWLPDAMAGPTPVSALIHAATMVTSGLYLFARISPLALAAPGVLVVVALVGALTAFMAATIAVTQYDIKKVLAYSTVSQLGYMFMAAGVGAFFVSIFHVLTHAFFKACLFLGSGSVIHAMHHVEHTLHERGHHGHLDPQDMRNMGGLGRFMPATRTTYLIATLAIAGFPLTAGFFSKDEILFKAFEYGYNGHAYAWIAWILGVVTALLTAFYMMRSYVLTFEGTPRWPMADQVHPHESPATMTLPLWVLAALSLVGGFVGLPGVIAHGEWILIHHYLGASGGGPVAEPELHAHVPLVIEWALIGLGVAIALIGLYWSWTAYRRHGLAYDDMLRERFGAFYRVWAAKYYWDEFYDRAIVQPLLRFARNGLAAFDQKVIDGAVNGVARLMAELGQRVRRVQTGVVQAYAMAIVLGVALVLALMLFG

SEQ ID NO: 79615 - DNA, 1914 bp, Desulfitobacterium dehalogenans
  CDS (1)..(1914): transl_table=11
atgatggtgggtatggagcgaggtgttaggataggaacaatgagcctaacgctagtgatggcaatcctcggaattttctttctgggctggaattttccggttggtgatccttcgggtcaatggaatgtggccggtttttctttcgatggattgaccgcattcttcctttttttgctttttcttgggcaaggagtggcatctctttacggcctgggctatatgaaggaatatgagggaaaaaaatctcttatatccttttccttatcctgggtggcctttctgggtagtatggctggggttttacttgtcaataacggcttttattttctcttcctttgggaacttatgtctcttttctcattttttttggtggtctatgaacatgaggagacttccaatcgcaaagcggccttcatttattttgttatgacccatgtgggaacggtctttttgattgcggccgttctgtacctctacagcaagaccggaagctttctttatggggattgggccgccatagcctcagaattaagcccaggagaaaaaatagtctctttctatgtttttggtgggtttggaacgaaagcagggctggtgccatttcatatctggctgccctatgctcatcctgttgccccttctccggtatctgcattaatgtccggggtgatggtaaagatcgcgctctatatgatcatgaggctggtttggttaactctggcccccatggagctatggtggggcgggctaatgctggcgcttggggtgctttcggcttttatcgggattctctacgcctgtgtggaacggaatgtaaaacgcttgctagcctactcgacagtggagaatatgggtattctgactatggccttagggacggctatgatcgcccaaaccttgggttatacggaattagtggtccttgccctggctgcctttttctggcatggggttcatcatctcctttttaagtccaatatgtttatggccgcgggaaatattattcaagcaacccatacaaaaaagcttgatcagatgggtggtttactcaagaaaatgcccagaactggcttatgggcaatggttggcgctgtcggacttgccgcactcccgcccttgggaggtttttggggggaatggctgttatttcatgccttatggaagacttccattcaagtgggagggggactgctcaagctgatgttgcctttaattctgacagctttggcttttgtctctgccttggctttggcaaccatggtgaaatggttctccggggcttttttggggcaggcacggacggcaaatgctgaaaaggctcaagagctgccctggtcacagacagtatccatgggaagttcaatgatgctaaccctactcattctgctttggccgcaaggccttttgaaactcatgagtgtccccattcaagtgctaagctatcaaagctcttcttcattaaccgacagcttaatttctccgtttttttccgatttccttagcctgattactccttatattttacttctgggtcttttctccggaacgctctatttgttatcaggaggaaaacggaggagggtaagcggaacctggaactgcggtgttcctttaacccctcgtatgcaatacacaagtttagggataaccatgcctttgcggattgtcctgaaacggattttggcctttcattccattatcgataaaaagtttggggaaaacccctatgtattacagtctttaaaatatcgtggccgaacccgtgaaatggtggaggaagcgttctatcggccttccatgaaactggttttgtggtgtgcggatcggattcgcattctgcaaaccggcagtatccacacttatctggcttatattctgttgaccttagtggttgtattgatttggactatgtag

SEQ ID NO: 79616 - protein, 637 aa, Desulfitobacterium dehalogenans
MMVGMERGVRIGTMSLTLVMAILGIFFLGWNFPVGDPSGQWNVAGFSFDGLTAFFLFLLFLGQGVASLYGLGYMKEYEGKKSLISFSLSWVAFLGSMAGVLLVNNGFYFLFLWELMSLFSFFLVVYEHEETSNRKAAFIYFVMTHVGTVFLIAAVLYLYSKTGSFLYGDWAAIASELSPGEKIVSFYVFGGFGTKAGLVPFHIWLPYAHPVAPSPVSALMSGVMVKIALYMIMRLVWLTLAPMELWWGGLMLALGVLSAFIGILYACVERNVKRLLAYSTVENMGILTMALGTAMIAQTLGYTELVVLALAAFFWHGVHHLLFKSNMFMAAGNIIQATHTKKLDQMGGLLKKMPRTGLWAMVGAVGLAALPPLGGFWGEWLLFHALWKTSIQVGGGLLKLMLPLILTALAFVSALALATMVKWFSGAFLGQARTANAEKAQELPWSQTVSMGSSMMLTLLILLWPQGLLKLMSVPIQVLSYQSSSSLTDSLISPFFSDFLSLITPYILLLGLFSGTLYLLSGGKRRRVSGTWNCGVPLTPRMQYTSLGITMPLRIVLKRILAFHSIIDKKFGENPYVLQSLKYRGRTREMVEEAFYRPSMKLVLWCADRIRILQTGSIHTYLAYILLTLVVVLIWTM

SEQ ID NO: 79617 - DNA, 1827 bp, Escherichia coli
  CDS (1)..(1827): transl_table=11
atgagcgcaatttccctgatcaatagcggcgtggcgtggtttgtcgccgccgctgttctggcatttctcttttcttttcaaaaagcgttaagtggctggatagctggaattggcggcgcggttggtagtctgtatacggcagccgcgggcttcactgtactgactggcgcggttggcgtgagcggtgcgctgtcgctggtaagctacgatgtgcaaatctctccgcttaacgcgatttggctgattacgctcggtctgtgcggtctgtttgtcagcctctacaacattgactggcatcgccacgcgcaggtgaagtgcaacggcttgcagatcaatatgttgatggctgccgccgtctgcgccgtcattgccagcaacctcggcatgttcgtggtaatggccgaaatcatggccctgtgcgcggtgttcctcaccagcaacagcaaagagggcaaactgtggtttgcgctggggcgtcttggcactctgctgctggcgattgcttgctggctgctgtggcagcgttacggcacgctggatctgcgcctgctggatatgcgtatgcaacagctgccgctcggttccgatatctggctgctcggagtgattggctttggcctgctggccgggattattccgctgcacggctgggtgccgcaggcacatgcgaacgcctctgcgccagctgccgcgttgttttctacggtagtcatgaaaattggcctgctgggcattttaaccctgtcactgctgggcggtaatgcaccgctgtggtgggggatcgcgctgctggtgctcggcatgatcaccgcgtttgtcggtggtctgtatgcgctggtggagcacaacatccagcgcctgctggcttaccacaccctggaaaatatcggcatcatcctgctggggctgggcgctggcgtaacgggtatcgcgctcgaacaaccggcgctgattgctcttggcctggtcggtggtctgtaccatctgcttaaccatagcctgttcaaaagcgtactgttcctcggggcggggagcgtctggttccgtaccggtcatcgcgatatcgaaaaactcggtggtattggcaagaaaatgccggttatctccatcgccatgttagtcgggctgatggcaatggctgcgctgccgccgctgaatggttttgccggggaatgggttatctatcaatcatttttcaaactgagcaatagtggcgcgtttgttgcccgtctgctggggccgctgctcgctgtggggctggcaattaccggtgcgctggcggtgatgtgtatggcgaaagtctatggcgtcacgttcctcggcgcgccgcgcaccaaagaagccgaaaacgccacctgtgcgccgctcctgatgagcgtaagcgtagtggcactggcgatttgctgcgtaattggcggtgttgctgcgccgtggctactgccgatgctctctgctgctgtacctctgccgctggagcctgctaacaccaccgtttctcaaccgatgatcacgttgctgctgattgcctgcccgctgctgccattcatcattatggcgatttgcaaaggcgatcgtttgccatcgcgttcccgcggtgcggcctgggtgtgcggttacgaccacgaaaaatcaatggtgattaccgctcacggttttgccatgccggtgaaacaggcgtttgcgccggtgctgaaactacgcaaatggctgaatccggtgtctctggtgccgggctggcagtgcgaggggagtgcgttgctgttccgccggatggcgctggttgaactggcggtactggtggtgattattgtttcacgaggagcctga

SEQ ID NO: 79618 - protein, 608 aa, Escherichia coli
MSAISLINSGVAWFVAAAVLAFLFSFQKALSGWIAGIGGAVGSLYTAAAGFTVLTGAVGVSGALSLVSYDVQISPLNAIWLITLGLCGLFVSLYNIDWHRHAQVKCNGLQINMLMAAAVCAVIASNLGMFVVMAEIMALCAVFLTSNSKEGKLWFALGRLGTLLLAIACWLLWQRYGTLDLRLLDMRMQQLPLGSDIWLLGVIGFGLLAGIIPLHGWVPQAHANASAPAAALFSTVVMKIGLLGILTLSLLGGNAPLWWGIALLVLGMITAFVGGLYALVEHNIQRLLAYHTLENIGIILLGLGAGVTGIALEQPALIALGLVGGLYHLLNHSLFKSVLFLGAGSVWFRTGHRDIEKLGGIGKKMPVISIAMLVGLMAMAALPPLNGFAGEWVIYQSFFKLSNSGAFVARLLGPLLAVGLAITGALAVMCMAKVYGVTFLGAPRTKEAENATCAPLLMSVSVVALAICCVIGGVAAPWLLPMLSAAVPLPLEPANTTVSQPMITLLLIACPLLPFIIMAICKGDRLPSRSRGAAWVCGYDHEKSMVITAHGFAMPVKQAFAPVLKLRKWLNPVSLVPGWQCEGSALLFRRMALVELAVLVVIIVSRGA

SEQ ID NO: 79619 - DNA, 1923 bp, Mycobacterium tuberculosis
  CDS (1)..(1923): transl_table=11
atgaccgctgcaccgacggccggcggggtcgtcacttcgggcgtgggcgttgccggggtcggcgtggggttgctgggcatgtttggaccggtgcgtgtagtgcacgtcggttggctgcttccgctgtccggcgtgcacatcgagctcgaccggttgggcggattcttcatggcgctcacgggcgcggtagcggctccggtcggttgttacctgatcggctacgtgcgccgtgaacacctcggtcgggtcccgatggcggtggtgccgctgttcgtcgcggcgatgctgttggtgccggccgcgggctcggtgacgacgtttctgctggcgtgggagctgatggcgatcgcgtcgctgatcctggtgctctccgagcacgcccgcccgcaggtccgctcggcgggcctgtggtacgccgtgatgactcagctgggattcatcgcaatcctggtcgggctggtggtgttggcggcggccgggggttccgaccggttcgccggcctcggggcagtctgcgacggggtccgcgccgccgtatttatgctcacgctggtcgggtttggttcgaaggcgggcctggtgccactgcacgcctggctgccgcgggcccacccggaggcgccgagcccggtgtcggcgttgatgagcgcggcgatggtcaacctgggcatttacggcatcgtccgtttcgatctgcagctgctggggccgggcccacgctggtgggggcttgcgctgctggccgtgggcggcacgtccgcgctgtatggggtgctgcaggcttcggtggccgccgatctcaaacggctgctggcctattcgacgaccgagaacatgggcctgatcacgctggcgctcggtgcggcaacacttttcgcggataccggagcctacgggccggcgtcgatcgccgccgccgcagcgatgctgcacatgattgcgcacgcggcgtttaagagcctcgccttcatggcggccggatctgtgctggccgcgaccgggctgcgcgacctggacctgctcggcgggctggcccgccgaatgccggcgaccaccgtctttttcggggtggccgcactgggcgcatgtggtctgccgttgggcgccgggtttgtcagtgagtggctgctggtccagtcgttgatccacgctgcccccggacacgaccccatcgtggcgctgacgacaccgctggcggtcggcgtggtcgcactggccaccggtctgagcgtggcggcgatgaccaaggccttcgggatcgggtttctcgcccgtccccgctccacccaagccgaagcggcgcgtgaggcgccggccagcatgcgcgccggcatggcgatcgcggcgggcgcctgcctggtgctggcggtggcaccgctgctggtcgcacccatggtgcggcgggccgccgcgacgctgccggccgctcaggcggtcaagttcaccggtctgggcgccgtggtgcggctgcccgcgatgtccgggtcgatcgcgcccggcgtgatcgccgccgctgtgctcgccgcggcgttggcggtagccgtcctcgcgcggtggcgtttccgccggcgcccggcgccggccaggttgccgctgtgggcttgcggcgcggccgatctcaccgtgcgcatgcaatacacggccacgtcgttcgccgagccgctgcagcgggtcttcggcgacgtgctgcgcccggacaccgacatcgaggtcacccacaccgccgagtcgcgctatatggccgagcggatcacctaccggaccgcggtcgccgacgcgatcgaacagcgcctctatactccggtggtcggggcggtggccgccatggccgagctgctgcgccgtgcccacaccggcagcgtgcaccgctacctggcctacggcgcgctgggcgtactgatcgtgctggtggtcgcgaggtga

SEQ ID NO: 79620 - protein, 640 aa, Mycobacterium tuberculosis
MTAAPTAGGVVTSGVGVAGVGVGLLGMFGPVRVVHVGWLLPLSGVHIELDRLGGFFMALTGAVAAPVGCYLIGYVRREHLGRVPMAVVPLFVAAMLLVPAAGSVTTFLLAWELMAIASLILVLSEHARPQVRSAGLWYAVMTQLGFIAILVGLVVLAAAGGSDRFAGLGAVCDGVRAAVFMLTLVGFGSKAGLVPLHAWLPRAHPEAPSPVSALMSAAMVNLGIYGIVRFDLQLLGPGPRWWGLALLAVGGTSALYGVLQASVAADLKRLLAYSTTENMGLITLALGAATLFADTGAYGPASIAAAAAMLHMIAHAAFKSLAFMAAGSVLAATGLRDLDLLGGLARRMPATTVFFGVAALGACGLPLGAGFVSEWLLVQSLIHAAPGHDPIVALTTPLAVGVVALATGLSVAAMTKAFGIGFLARPRSTQAEAAREAPASMRAGMAIAAGACLVLAVAPLLVAPMVRRAAATLPAAQAVKFTGLGAVVRLPAMSGSIAPGVIAAAVLAAALAVAVLARWRFRRRPAPARLPLWACGAADLTVRMQYTATSFAEPLQRVFGDVLRPDTDIEVTHTAESRYMAERITYRTAVADAIEQRLYTPVVGAVAAMAELLRRAHTGSVHRYLAYGALGVLIVLVVAR

SEQ ID NO: 79621 - DNA, 24 bp, Artificial sequence
  primer
atggatgccctgcaattattaacc

SEQ ID NO: 79622 - DNA, 24 bp, Artificial sequence
  primer
ttagacggcaatagcgattagcag

SEQ ID NO: 79623 - protein, 541 aa, Artificial sequence
  consensus sequence
  Variant (2)..(2): Xaa in position 2 is any amino acid
  Variant (4)..(24): Xaa in position 4 to 24 is any amino acid
  Variant (26)..(44): Xaa in position 26 to 44 is any amino acid
  Variant (45)..(48): Xaa in position 45 to 48 is any or no amino acid
  Variant (50)..(65): Xaa in position 50 to 65 is any amino acid
  Variant (67)..(69): Xaa in position 67 to 69 is any amino acid
  Variant (71)..(74): Xaa in position 71 to 74 is any amino acid
  Variant (76)..(91): Xaa in position 76 to 91 is any amino acid
  Variant (92)..(99): Xaa in position 92 to 99 is any or no amino acid
  Variant (101)..(115): Xaa in position 101 to 115 is any amino acid
  Variant (116)..(116): Xaa in position 116 is any or no amino acid
  Variant (118)..(136): Xaa in position 118 to 136 is any amino acid
  Variant (137)..(150): Xaa in position 137 to 150 is any or no amino acid
  Variant (152)..(154): Xaa in position 152 to 154 is any amino acid
  Variant (158)..(159): Xaa in position 158 to 159 is any amino acid
  Variant (161)..(161): Xaa in position 161 is any amino acid
  Variant (163)..(163): Xaa in position 163 is any amino acid
  Variant (167)..(167): Xaa in position 167 is any amino acid
  Variant (169)..(180): Xaa in position 169 to 180 is any amino acid
  Variant (182)..(207): Xaa in position 182 to 207 is any amino acid
  Variant (208)..(213): Xaa in position 208 to 213 is any or no amino acid
  Variant (215)..(216): Xaa in position 215 to 216 is any amino acid
  Variant (218)..(220): Xaa in position 218 to 220 is any amino acid
  Variant (222)..(223): Xaa in position 222 to 223 is any amino acid
  Variant (225)..(227): Xaa in position 225 to 227 is any amino acid
  Variant (229)..(232): Xaa in position 229 to 232 is any amino acid
  Variant (234)..(234): Xaa in position 234 is any amino acid
  Variant (236)..(237): Xaa in position 236 to 237 is any amino acid
  Variant (240)..(246): Xaa in position 240 to 246 is any amino acid
  Variant (248)..(253): Xaa in position 248 to 253 is any amino acid
  Variant (255)..(263): Xaa in position 255 to 263 is any amino acid
  Variant (264)..(289): Xaa in position 264 to 289 is any or no amino acid
  Variant (291)..(293): Xaa in position 291 to 293 is any amino acid
  Variant (295)..(296): Xaa in position 295 to 296 is any amino acid
  Variant (299)..(300): Xaa in position 299 to 300 is any amino acid
  Variant (303)..(305): Xaa in position 303 to 305 is any amino acid
  Variant (307)..(320): Xaa in position 307 to 320 is any amino acid
  Variant (321)..(336): Xaa in position 321 to 336 is any or no amino acid
  Variant (339)..(342): Xaa in position 339 to 342 is any amino acid
  Variant (345)..(360): Xaa in position 345 to 360 is any amino acid
  Variant (362)..(364): Xaa in position 362 to 364 is any amino acid
  Variant (367)..(392): Xaa in position 367 to 392 is any amino acid
  Variant (393)..(404): Xaa in position 393 to 404 is any or no amino acid
  Variant (406)..(417): Xaa in position 406 to 417 is any amino acid
  Variant (419)..(422): Xaa in position 419 to 422 is any amino acid
  Variant (424)..(443): Xaa in position 424 to 443 is any amino acid
  Variant (444)..(445): Xaa in position 444 to 445 is any or no amino acid
  Variant (447)..(453): Xaa in position 447 to 453 is any amino acid
  Variant (455)..(495): Xaa in position 455 to 495 is any amino acid
  Variant (496)..(537): Xaa in position 496 to 537 is any or no amino acid
  Variant (539)..(539): Xaa in position 539 is any amino acid
DXLXXXXXXXXXXXXXXXXXXXXXYXXXXXXXXXXXXXXXXXXXXXXXMXXXXXXXXXXXXXXXXEXXXLXXXXLXXXXXXXXXXXXXXXXXXXXXXXXGXXXXXXXXXXXXXXXXGXXXXXXXXXXXXXXXXXXXXXXXXXXXXXXXXXGXXXKAGXXPXHXWLPXAXXXXXXXXXXXXSXXXXXXXXXXXXXXXXXXXXXXXXXXXXXXXXLXXGXXXAXXGXXXAXXXXDXKXXLAXXXXXXXGXXXXXXGXXXXXXXXXXXXXXXXXXXXXXXXXXXXXXXXXXXHXXXHXXFKXXLFXXXGXXXXXXXXXXXXXXXXXXXXXXXXXXXXXXGGXXXXMPXXXXXXXXXXXXXXXXPXXXGFXXXXXXXXXXXXXXXXXXXXXXXXXXXXXXXXXXXXXXLXXXXXXXXXXXXFXXXXRXXXXXXXXXXXXXXXXXXXXXXLXXXXXXXGXXXXXXXXXXXXXXXXXXXXXXXXXXXXXXXXXXXXXXXXXXXXXXXXXXXXXXXXXXXXXXXXXXXXXXXXXXXXXXXXXXXWXCG

SEQ ID NO: 79624 - protein, 17 aa, Artificial sequence
  protein pattern
  Variant (2)..(2): Xaa in position 2 is any or no amino acid
  Variant (4)..(5): Xaa in position 4 to 5 is any amino acid
  Variant (6)..(8): Xaa in position 6 to 8 is any or no amino acid
  Variant (10)..(10): Xaa in position 10 is Phe or Leu
  Variant (11)..(11): Xaa in position 11 is Phe or His
  Variant (12)..(12): Xaa in position 12 is any amino acid
  Variant (14)..(14): Xaa in position 14 is Leu or Val
  Variant (16)..(16): Xaa in position 16 is any amino acid
AXGXXXXXPXXXWXPXA

SEQ ID NO: 79625 - protein, 17 aa, Artificial sequence
  protein pattern
  Variant (2)..(4): Xaa in position 2 to 4 is any amino acid
  Variant (6)..(7): Xaa in position 6 to 7 is any amino acid
  Variant (10)..(10): Xaa in position 10 is Ala, Gly, Asn, Pro, Ser or Thr
  Variant (11)..(11): Xaa in position 11 is any amino acid
  Variant (14)..(14): Xaa in position 14 is Phe, Leu or Met
  Variant (15)..(16): Xaa in position 15 to 16 is any amino acid
HXXXHXXFKXXLFXXXG

SEQ ID NO: 79626 - protein, 14 aa, Artificial sequence
  protein pattern
  Variant (2)..(2): Xaa in position 2 is Pro or Ser
  Variant (3)..(3): Xaa in position 3 is Ala, Cys, Ser or Thr
  Variant (4)..(4): Xaa in position 4 is any amino acid
  Variant (5)..(5): Xaa in position 5 is Ala, Ile or Val
  Variant (6)..(6): Xaa in position 6 is Ala or Ser
  Variant (8)..(9): Xaa in position 8 to 9 is any amino acid
  Variant (10)..(10): Xaa in position 10 is any or no amino acid
  Variant (12)..(12): Xaa in position 12 is Ala, Gly, Ser or Thr
  Variant (13)..(13): Xaa in position 13 is any amino acid
  Variant (14)..(14): Xaa in position 14 is Ile, Leu, Met or Val
AXXXXXAXXXSXXX

SEQ ID NO: 79627 - DNA, 1254 bp, Escherichia coli
  CDS (1)..(1254): transl_table=11
atgttaaagcgtgaaatgaacattgccgattatgatgccgaactgtggcaggctatggagcaggaaaaagtacgtcaggaagagcacatcgaactgatcgcctccgaaaactacaccagcccgcgcgtaatgcaggcgcagggttctcagctgaccaacaaatatgctgaaggttatccgggcaaacgctactacggcggttgcgagtatgttgatatcgttgaacaactggcgatcgatcgtgcgaaagaactgttcggcgctgactacgctaacgtccagccgcactccggctcccaggctaactttgcggtctacaccgcgctgctggaaccaggtgataccgttctgggtatgaacctggcgcatggcggtcacctgactcacggttctccggttaacttctccggtaaactgtacaacatcgttccttacggtatcgatgctaccggtcatatcgactacgccgatctggaaaaacaagccaaagaacacaagccgaaaatgattatcggtggtttctctgcatattccggcgtggtggactgggcgaaaatgcgtgaaatcgctgacagcatcggtgcttacctgttcgttgatatggcgcacgttgcgggcctggttgctgctggcgtctacccgaacccggttcctcatgctcacgttgttactaccaccactcacaaaaccctggcgggtccgcgcggcggcctgatcctggcgaaaggtggtagcgaagagctgtacaaaaaactgaactctgccgttttccctggtggtcagggcggtccgttgatgcacgtaatcgccggtaaagcggttgctctgaaagaagcgatggagcctgagttcaaaacttaccagcagcaggtcgctaaaaacgctaaagcgatggtagaagtgttcctcgagcgcggctacaaagtggtttccggcggcactgataaccacctgttcctggttgatctggttgataaaaacctgaccggtaaagaagcagacgccgctctgggccgtgctaacatcaccgtcaacaaaaacagcgtaccgaacgatccgaagagcccgtttgtgacctccggtattcgtgtaggtactccggcgattacccgtcgcggctttaaagaagccgaagcgaaagaactggctggctggatgtgtgacgtgctggacagcatcaatgatgaagccgttatcgagcgcatcaaaggtaaagttctcgacatctgcgcacgttacccggtttacgcataa

SEQ ID NO: 79628 - protein, 417 aa, Escherichia coli
MLKREMNIADYDAELWQAMEQEKVRQEEHIELIASENYTSPRVMQAQGSQLTNKYAEGYPGKRYYGGCEYVDIVEQLAIDRAKELFGADYANVQPHSGSQANFAVYTALLEPGDTVLGMNLAHGGHLTHGSPVNFSGKLYNIVPYGIDATGHIDYADLEKQAKEHKPKMIIGGFSAYSGVVDWAKMREIADSIGAYLFVDMAHVAGLVAAGVYPNPVPHAHVVTTTTHKTLAGPRGGLILAKGGSEELYKKLNSAVFPGGQGGPLMHVIAGKAVALKEAMEPEFKTYQQQVAKNAKAMVEVFLERGYKVVSGGTDNHLFLVDLVDKNLTGKEADAALGRANITVNKNSVPNDPKSPFVTSGIRVGTPAITRRGFKEAEAKELAGWMCDVLDSINDEAVIERIKGKVLDICARYPVYA

SEQ ID NO: 79629 - DNA, 2504 bp, Oryza sativa
  CDS (27)..(1508)
atatacttgtaccccgttgctcttgtatgctacgtgcaaggtatcagcagtgccaagacaaaaataaaagcaaaatgaacggagttcaccacaccaacagcaatgtgttccctgaggctcttaagagtctcaaggaggccgatcctgagatatatggcatcattcaggacgagaaagccaggcaatggaagggcattgagctcatcgcctcagaaaacttcacgtcccgccctgtgctggaggcccttggctcatgcatgaccaacaagtacagtgagggtcagccaggcgcgaggtactatggaggcaacgagcacattgacagggcagagctgctgtgcaagaagcgagccttggaggcattcagcctggatccagcagcatggggagtcaatgtgcagccctactctggcagtcctgcaaactttgcagcctacaccgccctgctgcagccgcatgaccgcatcatgggcctggagcggccaagcggtgggcacctgacacacggctactacacaggcaccaaaaagatcagcgccaccagcatcttctttgagagcctgccatacaagctgaacccacagaccggctttgttgactacgataagctggaggagaaggccctggagtacaggcccaagctgatcatctgtggaggcagcgcatacgcacgcgagtgggactacaagcgcttcaggcagattgcagacaaggttggcgcctacctgcttgttgacatggcacacatcagcggcctggtggcggccggagtggtggacagcccgttcgagtatgctgacatcgtgaccacgaccacacacaagagcctgcgaggcccacgcgctggcatgatcttcatgcgcaaggggcccaagcctgcagaccgcctggcaaagggtgagccagaaggcacggagtatgattacgagtccaagatcgactttgcagtgttcccatcgctgcagggcggcccccacaaccaccagatcgcagccctggccgtcgcacttaagcacgccgccagtgaggagttcaaggcctaccagcgccaggtcgtcgccaacagcagagccctcggggaggccctgaagaagcacggccacaagctggtcacagacggcacagacaaccacctgctgctgtgggacctgcggggagagggcatcacaggcgccaagatggagaaggcctgtgatgaggcgcacatcacgctcaacaagaacgcggtggtgggagacgtcagcgcaatgaacccaggcggcgtgcggataggcacacccgccatgacctcccgcggcttgactgaggcagactttgaaaaggtagcagagttcctgcacgaagtgttgcaggttgccaaggaggtgcaggccagccacggcaagctgctcaaggactggattgtgggcatcacaggcaatgccaagctggcagaaattcgcagccgagtggaggcttttgcgagcagcttctccatgccaggctacgcagtggatgacctgcaatgagcagcggcagcagcagcagtgccggtgacagcagcagcagcagctgtgtttggcaccagcctgcccacaccaagccaacatgccggagatggtgtggcagcagcagcagtagcagcaggagctacatcaagttggcagtgttaggctcctgtttgacactaactagaggctaaaacagtgatgctgactcaagcaggggttgtgtgtggcattgacaaacctgtcctgctgcaagttaagctgcagatggtgcaggccgcagcagcgttgggttcttggcagccctgcgcaccgccggctgtggcaaggtattgtaggtagatggctggttcttagtcttggggtgggggatagtctaggttggttgagcatacgggttcctggttgcagctgcagccaagaaccttcacattttgttcactcacaatacagtgggcactccttgcgcctgcagcagacatgccaacacgggttgccggctgtgtgcagcacaccttgcagagaccagcaagcagtgctgcagcatggcgcccggtccatagcatgctgcggggcgggactttcaggtcagtatgtgcgtttggcctttctggctgtccttgttgtgcatgcctctgtgtcctgaattcgccctcttgagtgtggatgtgttgattacagcatttgctgctgatatccgacatgtttctgtgcggccaggcggcttgtttagttctgaggcagttggcagcagcctgtcaacatacgtgaaacacgcacatgcactgcgtgacacacactgttggtgttgcgatcagcagcacattgtacatgtatagcagctgcaaatgctgcgattggtgtggtgccagtgtccataaagacctgcctatggcatgcatgtgcccgtgttgcccaatggtttgtacagctcgtgtacaggctgcagcctgtagtgtgccaacatttacacagtgccgccgtgtttgttcgactggcattgtaaccgtgttgctt

SEQ ID NO: 79630 - protein, 493 aa, Oryza sativa
MLRARYQQCQDKNKSKMNGVHHTNSNVFPEALKSLKEADPEIYGIIQDEKARQWKGIELIASENFTSRPVLEALGSCMTNKYSEGQPGARYYGGNEHIDRAELLCKKRALEAFSLDPAAWGVNVQPYSGSPANFAAYTALLQPHDRIMGLERPSGGHLTHGYYTGTKKISATSIFFESLPYKLNPQTGFVDYDKLEEKALEYRPKLIICGGSAYAREWDYKRFRQIADKVGAYLLVDMAHISGLVAAGVVDSPFEYADIVTTTTHKSLRGPRAGMIFMRKGPKPADRLAKGEPEGTEYDYESKIDFAVFPSLQGGPHNHQIAALAVALKHAASEEFKAYQRQVVANSRALGEALKKHGHKLVTDGTDNHLLLWDLRGEGITGAKMEKACDEAHITLNKNAVVGDVSAMNPGGVRIGTPAMTSRGLTEADFEKVAEFLHEVLQVAKEVQASHGKLLKDWIVGITGNAKLAEIRSRVEAFASSFSMPGYAVDDLQ

SEQ ID NO: 79631 - DNA, 2754 bp, Oryza sativa
  CDS (1073)..(2488)
tctgcccagtgctctgaatgtcaaagtgaagaaattcaaccaagcgcgggtaaacggcgggagtaactatgactctcttaaggtagccaaatgcctcgtcatctaattagtgacgcgcatgaatggattaacgagattcccactgtccctgtctactatccagcgaaaccacagccaagggaacgggcttggcggaatcagcggggaaagaagaccctgttgagcttgactctagtccgactttgtgaaatggcttgagaggtgtaggataagtgggagccctcgggcgcaagtgaaataccactacttttaacgttattttacttattccgtgagtcggaagcggggcctggcccctccttttggctctaaggcccgagtccctcgggccgatccgggcggaagacattgtcaggtggggagtttggctggggcggcacatctgttaaaagataacgcaggtgtcctaagatgagctcaacgagaacagaaatctcgtgtggaacaaaagggtaaaagctcgtttgattctgatttccagtacgaatacgaaccgtgaaagcgtggcctatcgatcctttagaccttcggagtttgaagctagaggtgtcagaaaagttaccacagggataactggcttgtggcagccaagcgttcatagcgacgttgctttttgatccttcgatgtcggctcttcctatcattgtgaagcagaattcaccaagtgttggattgttcacccaccaatagggaacgtgagctgggtttagaccgtcgtgagacaggttagttttaccctactgatgaccgtgccgcgatagtaattcaacctagtacgagaggaaccgttgattcacacaattggtcatcgcgcttggttgaaaagccagtggcgcgaagctaccgtgtgccggattatgactgaacgcctctaagtcagaatccaagctagcagtatgagtactctcttggagcggcttaaattctcacccaactttcgaccatctgtctctcttcttcctccaaagacaattcctttttgattgttcctttcattcaattcatcttcacaatgtcttcgtacgctcttcccaagtcccaccaggacctcatggagaagtccctggtggacaccgacaatgaggtcgctcagattatggagagggagattcagcgtcagcgcgagtccatcctcctcatcgcctcagagaacgtcacctcgcgcgccgtcttcgatgctctcggctcgcccatgtccaacaaatactccgagggctaccccggtgcccgctactacggtggcaacgagcacattgatgccattgagctgctctgccagaagcgcgccctcgaggcgttcggtctggatgcagagaaatggggcgttaacgttcagtgccttagtggtagcccggcaaacttgcaggtctaccaggccatcatgaggccacacgacaggctcatgggccttgacttgccccacggtggacatttgagccacggctaccagacaccacaaaggaagatctcggccgtctccacctacttcgagaccttcccctaccgcgtcaacctcgagactggtctcatcgactatgaccagcttgagcagaatgcgctcatgtaccgccccaaggtcctcgtcgctggtacctccgcatactgccgtgggatcgactacgcccgcatgcgggaaatcgccgacaaggtcggctgctacctgatgatggacatggcccatatctccggtctcatcgccgccggcgtcaacaagtcgcccttcccatatgccgacatcgtcacaaccaccacccacaagtcgctccgtggaccccgcggtgccatgatcttcttccgcaagggcgtccgcaagaccgacgcaaagactggcaaggagaccctctacgacctcgaagggcctatcaacttctccgtcttccccggccaccagggcggcccgcacaaccacaccatcaccgcgctcgccgtcgcgctcaagcaggcccaatccgacgacttcacgctctaccagcaacaagtgatcaaaaacgccaagcagctcgaaaacaccttcaaggagctgggcttcaagctcgtcaccgacggcacagacaaccacatggtcctcatcgacctcaagcccttctccctcgacggcgcgcgcgtcgaagccgtcctcgaacaagtcaacatcgcttgtaataagaacaccaccccgggcgacaagagcgcgctcacgcccatggggatccgcatcggcgcgcccgccatgacctcgcgcggcctgggcgaggccgactttgcaaagattgcaaactacattaacacgtgcatccagatttgcaagaaggtgcaggccgagctgcccaaggagaacaacaagctcaaggactttaaggccaaggttgcgggcggcgaggtggaggagattaatcagttgaagaaggagattgccgcgtgggctgtcaccttcccccttcccatctaagcagtgtgcatgatcttgggtggcgtacacggcgtttttttaaatgggtaatttcaacaaaaggaatggatgggtgttggcatatttcaacattttcacgcggcatgagttggatgggatgacaaaatgatacctggagattagggaagattggggaggagatatcattctgctcgatgagtgtgtatgcttgataggagctagattgatgcttaaccattaatcgggaagaatacaagcaatttcaaaatgaatatgtacatatc

SEQ ID NO: 79632 - protein, 471 aa, Oryza sativa
MSSYALPKSHQDLMEKSLVDTDNEVAQIMEREIQRQRESILLIASENVTSRAVFDALGSPMSNKYSEGYPGARYYGGNEHIDAIELLCQKRALEAFGLDAEKWGVNVQCLSGSPANLQVYQAIMRPHDRLMGLDLPHGGHLSHGYQTPQRKISAVSTYFETFPYRVNLETGLIDYDQLEQNALMYRPKVLVAGTSAYCRGIDYARMREIADKVGCYLMMDMAHISGLIAAGVNKSPFPYADIVTTTTHKSLRGPRGAMIFFRKGVRKTDAKTGKETLYDLEGPINFSVFPGHQGGPHNHTITALAVALKQAQSDDFTLYQQQVIKNAKQLENTFKELGFKLVTDGTDNHMVLIDLKPFSLDGARVEAVLEQVNIACNKNTTPGDKSALTPMGIRIGAPAMTSRGLGEADFAKIANYINTCIQICKKVQAELPKENNKLKDFKAKVAGGEVEEINQLKKEIAAWAVTFPLPI

SEQ ID NO: 79633 - DNA, 1878 bp, Triticum aestivum
  CDS (69)..(1601)
ctcgtgccgaattcggcacgagcctaccgagaggtgcacgaggaggccgcccaccaccaccacccaccatggccatggcgacggcgctccgcaagctctccgcccgcggccagcccctctcccgcctcacgccgctctactccatggcgtccctgccggcgacggaggagagatccgcagtcacctggccgaagcagttgaacgcgccgctggaggaggtcgaccccgagattgccgacatcatcgagctcgagaaggcccgccaatggaaggggctggagctcatcccgtcggagaacttcacctccctgtcggtgatgcaggcggtgggatccgtcatgaccaacaagtacagcgaggggtaccccggcgcgagatactacggtggaaacgaatacattgatatggccgagacgctgtgtcagaaacgtgctttggaggccttcaatttggacccagagaagtggggagtgaatgtgcaacctctatcgggttcacctgccaacttccatgtatacactgctctgctgaagccacatgacagaattatggctctggatcttcctcacggtggacatctttcccatggctaccagactgacacaaagaaaatctcagcagtttcaatattctttgagacaatgccttacagactggatgaaagcactggcttgattgattatgaccagttggagaaaagtgccgttctgtttaggccaaagttgattgttgctggtgctagtgcatatgcccgcctttatgattataaccgcatgcggaagatctgtgacaagcagaaggcagttcttctggcagacatggcacatatcagtgggctagttgctgctggtgtaattccgtctccttttgagtatgcagatgtggtgactaccactacccacaagtcactccgtggtccacgtggagccatgatctttttccggaagggagtgaaagaaataaacaaacaagggaaggaggttaagtatgattttgaggacaaaatcaatgctgctgtcttcccaggtttgcaaggtggaccccataaccatactattactggcctggcagttgcgcttaagcaggcaactactcaggagtacagagcttatcaagagcaagttatgagcaactctgctagatttgctgagagcttaacttcaaaaggctacgatattgtttctggtgggactgataaccatttagttttggtgaacctcaagaaaaagggaatagatggttcacgtgtggagaaggttttagaaaatgtgcatattgcagcaaacaagaacacggttcctggtgatgtttcagctatggtacccggaggcatcaggatgggaacccccgcacttacatcaagaggatttgttgaggaggacttcgccaaggttgctgacttcttcgattcggcagtgaacttggccttgaaggttaaagctgcagcagcaggtaccaaactgaaggactttgttgccactttgcaatccgacagcaacatccaagctgaaattgcaaagcttcgccacgatgtggaggaatatgcgaaacaattcccaacaattggattcgagaaggagaccatgaagtacaagaactaagaactgctgtgtttcaacagcaaaggaagcaaacaagaagcacagctgaggacaagtccatgtaaacaatagatccatgatgaagcgccaccatatgtaaaaggaatccaagcattttacagaatatgggaactttgtcgatagtttcttattgcaggcacatactgtaagatgcttcgctgatatgctataaaaaaaaaaaaaaaaaaaaaaaaaaaaaaaaaaaaaaaaaaaaaaaaaaaaaaaaaaaaaaaaaaaaaaaaaaaaaaaaaaaaaa

SEQ ID NO: 79634 - protein, 510 aa, Triticum aestivum
MAMATALRKLSARGQPLSRLTPLYSMASLPATEERSAVTWPKQLNAPLEEVDPEIADIIELEKARQWKGLELIPSENFTSLSVMQAVGSVMTNKYSEGYPGARYYGGNEYIDMAETLCQKRALEAFNLDPEKWGVNVQPLSGSPANFHVYTALLKPHDRIMALDLPHGGHLSHGYQTDTKKISAVSIFFETMPYRLDESTGLIDYDQLEKSAVLFRPKLIVAGASAYARLYDYNRMRKICDKQKAVLLADMAHISGLVAAGVIPSPFEYADVVTTTTHKSLRGPRGAMIFFRKGVKEINKQGKEVKYDFEDKINAAVFPGLQGGPHNHTITGLAVALKQATTQEYRAYQEQVMSNSARFAESLTSKGYDIVSGGTDNHLVLVNLKKKGIDGSRVEKVLENVHIAANKNTVPGDVSAMVPGGIRMGTPALTSRGFVEEDFAKVADFFDSAVNLALKVKAAAAGTKLKDFVATLQSDSNIQAEIAKLRHDVEEYAKQFPTIGFEKETMKYKN

SEQ ID NO: 79635 - DNA, 1254 bp, Proteus mirabilis
  CDS (1)..(1254): transl_table=11
atgttaaaacgtgaaatgaatattgctgattacgatccggaattatggaatgcaatggaaggtgaagtgactcgtcaagaagagcacatcgaattaattgcttctgaaaactatactagtcctcgtgttatgcaggcgcagggatctcagctgaccaacaaatatgcagaaggttatccaggtaaacgctactacggcggttgtgaatacgttgatgttgttgaacaattagctattgatcgtgccaaagcactatttggtgctgattatgcaaacgtacaacctcactctggatcacaagcgaatgcggctgtgtatatggcattacttaaaccgggtgatacagtattagggatgaatttggcccaaggtggtcacttaactcacggctctccggttaacttctctggtaaactctacaatatcgttccttatggtattgatgaagccggtaaaattgattaccaagatatcgctgagcaagctaaaaagcataaaccaaaaatgatcattggtggtttttcagcttattcaggtttggttgattgggctaaaatgcgtgaaatcgcagatagtgtaggggcttacttatttgtcgatatggctcacgttgcaggtatgattgcagcgggtgtctatccaaacccagtaccacatgctcacgttgtgactacaacaacacacaaaacattagcaggtcctcgtggtggtcttatccttgctaagggtggcgatgaagagttttataagaaattaaactctgccgtattccctggctctcaaggtggtcctttaatgcatgtgatcgcgggtaaagccgttgcattaaaagaagcaatggaacctgagtttaaagtttaccagcaacaagttgcaaaaaatgcgaaagcaatggtagacgttttcttagcgcgcggttataaagtagtatctggtggcacagagaaccacctgtttttattagacttagttgataaagatattacaggtaaagatgctgatgctgcactgggtcgtgctaatatcactgtgaacaaaaatagtgtgccaaatgatcctcgcagtccatttgttacatctggtattcgtattggttctcctgcgattacacgtcgtggttttaaagaagcggaagcaaaagatttagccggttggatgtgtgatgtccttgataatatcaatgatgaagcgaacattgaaaaagtgaaacaaaaagtcttggatatctgcgctaaatttccagtttacgcataa

SEQ ID NO: 79636 - protein, 417 aa, Proteus mirabilis
MLKREMNIADYDPELWNAMEGEVTRQEEHIELIASENYTSPRVMQAQGSQLTNKYAEGYPGKRYYGGCEYVDVVEQLAIDRAKALFGADYANVQPHSGSQANAAVYMALLKPGDTVLGMNLAQGGHLTHGSPVNFSGKLYNIVPYGIDEAGKIDYQDIAEQAKKHKPKMIIGGFSAYSGLVDWAKMREIADSVGAYLFVDMAHVAGMIAAGVYPNPVPHAHVVTTTTHKTLAGPRGGLILAKGGDEEFYKKLNSAVFPGSQGGPLMHVIAGKAVALKEAMEPEFKVYQQQVAKNAKAMVDVFLARGYKVVSGGTENHLFLLDLVDKDITGKDADAALGRANITVNKNSVPNDPRSPFVTSGIRIGSPAITRRGFKEAEAKDLAGWMCDVLDNINDEANIEKVKQKVLDICAKFPVYA

SEQ ID NO: 79637 - DNA, 2144 bp, Zea mays
  CDS (220)..(1755)
cattgggacctcgagccggcggggactggtctccatagtgtaccaaacccacgaggccacaagcacgggactggcatatattatccatgtaaataaaataaagtatataaataaccccataaaaagctaggacgggactacctcccaaactcgcgagcgagtcgaggctccaaccccggcacatcacaggaggaggaggacgacgcgcccaccatggccatggcgacggccctccgcaagctctccgccaacgctctgcgccgccagccgctctcccgcatcacgccgctctactacatggcgtcccttccggcgacggaggagagatccggaatcacctggactaagcagttgaacgcgccgctggaagaggtcgaccccgagattgctgacatcatcgagcacgagaaggcccgccaatggaagggtctggagctcatcccgtcggagaatttcacgtcggtgtcagtgatgcaggcagtgggttccgtcatgaccaacaagtacagcgaggggtaccctggcgcaagatactacgggggaaatgagtttattgatatggcagagtccttgtgtcagaaacgtgctttggaggctttccgtttggacccggcgaaatggggagtgaatgtgcaacctctatccggttcgcccgccaacttccatgtatacactgcactcttgaagccacatgaaaggatcatggctttggatcttcctcacggtggacatctttctcatggttaccagactgacactaagaagatatctgcaacttcaatattttttgagacaatgccttacagattggatgaaagcactggattgattgattacgatcagttggagaaaagcgctgttctttttaggccaaagttgatcattgctggtgcaagtgcatatgctcggctatatgattatgaccgtatgcggaagatatgcaacaagcagaaggcaatacttctagcagacatggcacatattagtgggcttgttgcagctggtgttgttccatctccttttgattatgcagatgtagtgactaccactactcacaaatcactccgtgggccacgtggagccatgatcttttacaggaagggagtcaaagaaataaataaacaaggaaaagaggttatgtatgattttgaggacaaaatcaatgctgctgtctttcctggtctgcaaggtgggcctcataaccataccattactggcttggctgttgcgctcaaacaggcaactactccagaatacagagcttaccaagagcaagttatcagtaattgtgctaaatttgcgcagagcctgatttcaaaaggatatgaactcgtctctggtgggactgacaaccatttagttctggtgaatctcaagaataaggggatagatggttcaagggtggagaaggttttagaaagtgtgcatattgcagcaaacaagaacacagttcctggtgatgtttcagctatggtgccaggaggcatcaggatgggaaccccagcccttacgtcgagaggatttgttgaagaagatttcgctaaagttgctgacttcttcgatgcagcagtgaatctggccttgaagattaaggctgcaacgacaggtggaacaaagctgaaggactttgttgccactttgcaatctgatagcatccaagttgagattgcaaagcttcgccatgatgtagaggaatttgcaaaacaattcccaacaattggatttgagaaagagaccatgaaatacaagaactaatatctggatgacaagaagagaatgaggtcactcttcttgcagtaagcattcgaagcaagatgccacgatgattattgggagtttaaccatggtgtaatggcatcttatgttaaagagatgttggcaatttacagcatgtggaactttcgtcaatcatattgtagacacataccgcgagatgctatattgaccggacaattgcatttccatatgtgtaaaaaaaaagcgttcaaaaaaaaaacgtacatcctgacacacactccacccccatccccactcacaagcacacgtcaccctgcccgcaaggctatctactcatctctataatcaaactatactatgtgaaagttatagtctacggtgcaaaatagtgcaaaatagtgttttag

SEQ ID NO: 79638 - protein, 511 aa, Zea mays
MATALRKLSANALRRQPLSRITPLYYMASLPATEERSGITWTKQLNAPLEEVDPEIADIIEHEKARQWKGLELIPSENFTSVSVMQAVGSVMTNKYSEGYPGARYYGGNEFIDMAESLCQKRALEAFRLDPAKWGVNVQPLSGSPANFHVYTALLKPHERIMALDLPHGGHLSHGYQTDTKKISATSIFFETMPYRLDESTGLIDYDQLEKSAVLFRPKLIIAGASAYARLYDYDRMRKICNKQKAILLADMAHISGLVAAGVVPSPFDYADVVTTTTHKSLRGPRGAMIFYRKGVKEINKQGKEVMYDFEDKINAAVFPGLQGGPHNHTITGLAVALKQATTPEYRAYQEQVISNCAKFAQSLISKGYELVSGGTDNHLVLVNLKNKGIDGSRVEKVLESVHIAANKNTVPGDVSAMVPGGIRMGTPALTSRGFVEEDFAKVADFFDAAVNLALKIKAATTGGTKLKDFVATLQSDSIQVEIAKLRHDVEEFAKQFPTIGFEKETMKYKN

SEQ ID NO: 79639 - DNA, 1875 bp, Zea mays
  CDS (206)..(1621)
caccaacaacaccaccagtccaccaccacccacctcccacatgtgcacacgcgcccacctcccgtccaccaccgctatatatcccggcgccccttcctccctcccccgtccttccctccgcctccgcctccgcccccgcccccgcccacgcccactcctcgctgccaccactcctgtcacctcttcccgcgccgacgcagccgccatggaccccgtcgccacatgggggctaaccccgctcgcgggcgccgacccggagatctacgacctcctggagcgcgagaagcggcgccagcgtcgcggcatcgagctcatcgcctccgagaacttcacctccttcgccgtcatggaggcgctcggctccgcgctcactaacaagtactccgagggcatgcccggtgcccgctactacggcggcaacgacgtcatcgacgagatcgagaacctctgccggtcacgcgcgctcgctgccttccaccttgacgccgcgtcctggggcgtcaacgtgcagccctactcgggctcccccgccaacttcgccgcctacaccgcgctgctcaacccgcacgaccggatcatggggctcgaccttccctccggcggacacctcactcacgggtactacacggccggcggtaagaagatctccgccacctcgatctactttgagagcctgccgtacaaggtgagcgccgcaacggggtacatcgactacgagaagctcgaggagaaggcacttgacttccgccccaagctcatcatctgcggtggcagtgcgtacccgagggactgggattacgccaagctcagggccgtcgccgacaaggtcggggccctgctgctctgcgacatggcgcacatcagcgggctcgtcgccgcgcaggaagctgcaaatccttttgaatattgtgatgtggttaccacaaccacgcacaagtccctcagagggccaagggctggcatgatcttctacaggaaaggccctaagccccccaagaagggccagcctgagggtgctgtttatgattacgaagacaagatcaactttgcagtgttcccatctctccaaggtggccctcacaaccaccagattgctgcacttgctgttgctctacagcaaactatgtcgcctggcttcaaggcctatgcaaagcaagtgaaggccaatgctgttgcaattggaaactatctcatgagcaagggctacaagatggtgactgatggaactgagaaccaccttgttctctgggatctccgcccccttggcttgactggaaacaaggtcgaaaagctatgtgatctttgccacatcacattgaacaagaatgctgtcttcggtgacagcagtgcattgtctccgggtggtgtccgcattggcgcgccagcaatgacctcgaggggtctactggagaaggatttcgagcagattggggagttcctccaccaggcagtgaccatctgcctgaacatccagaaggagtacggcaagctcctcaaggacttcaacaagggcctggtgaacaacaaggacatcgagaacctcaaggtccaggtggagaagtttgccgactccttcgacatgcctgggttcacgcttgagagcatgaaatacaaggagtagatatgcctctttcatgcgcggcaaggtcctcctgtaccgatgtctttccttgtggtggcgcagggtgccatggcactgcattgccgccacacttacgatgatgatgatgggttatggattttgtctacaatgtcagcaggataggctcacaattgccccctgccctccggtttggtcgcctctcaggttttcatttggtagttgttcgcagggaaccatatgagaattgcaatgtcaatcaggtgtttgccaat

SEQ ID NO: 79640 - protein, 471 aa, Zea mays
MDPVATWGLTPLAGADPEIYDLLEREKRRQRRGIELIASENFTSFAVMEALGSALTNKYSEGMPGARYYGGNDVIDEIENLCRSRALAAFHLDAASWGVNVQPYSGSPANFAAYTALLNPHDRIMGLDLPSGGHLTHGYYTAGGKKISATSIYFESLPYKVSAATGYIDYEKLEEKALDFRPKLIICGGSAYPRDWDYAKLRAVADKVGALLLCDMAHISGLVAAQEAANPFEYCDVVTTTTHKSLRGPRAGMIFYRKGPKPPKKGQPEGAVYDYEDKINFAVFPSLQGGPHNHQIAALAVALQQTMSPGFKAYAKQVKANAVAIGNYLMSKGYKMVTDGTENHLVLWDLRPLGLTGNKVEKLCDLCHITLNKNAVFGDSSALSPGGVRIGAPAMTSRGLLEKDFEQIGEFLHQAVTICLNIQKEYGKLLKDFNKGLVNNKDIENLKVQVEKFADSFDMPGFTLESMKYKE

SEQ ID NO: 79641 - DNA, 1944 bp, Arabidopsis thaliana
  CDS (204)..(1766)
ctcactagtcccccccccccccggagctttttttgttgtgatatatcccgtaaaaccctaaacatagtcacttcatcgtctcctccactgtatcattcaatctctgtcttccttctttttagcgacctcgtctccaaagctcacaaattttctacctttccggagtagagagaaagatgcaagcttgttgtggtggtaattcgatggcttctcttcagcaacctggacgggttcaaggatctgtctttcccccaattatgcctccagtgaccaaattttctcagcagttgaagttcaatatttcaaaacctttccgttcttcatttctgaaaagaaacctggtctctgaaatgagagcatcttcagtctcgctacctaatgtcgagataagcagcaaagaaatcccttttgaggactatggtcttggtgaagttgatccagaggtccgaaccatcatcacaaaggagaaagatagacaattcaggagcttggagcttattgcatctgagaatttcacgtctcgagcagttatggaggcggttggctcatgccttaccaacaagtattctgagggactgcctggtaaaagatattatggtggcaatgagtacattgatcagttggagacgctttgccagaaccgggctttggcagccttccgcttagattctacgaaatggggggttaatgttcagccgttatctggttcacctgcaaactttgctgtctacactgcgatacttagccctcatgatcggatcatgggtttggatttacctcacggtggtcatctgtcgcatgggttcatgaccgctaaaaggcgtgtatctggaacttcaatatactttgagtccatgccttatcgacttgatgaatcaacaggcattgttgactacgatatgctcgagaaaactgctacacttttcagaccaaagcttattatcgcaggagctagtgcatacagccgagattttgactatcctcgcatgaggaagatcgcagactcagttggtgcttttctgatgatggatatggctcatatcagtgggcttgtggctgcttctgtggtagctgacccttttgagtattgtgatattgttacaacaacaactcacaagtctttgagaggtccgagaggtggcatgatcttcttcaggaaggatccaattaatggggttgatcttgaatctgccgtgaacaatgctgtcttccctggtttgcagggtggccctcataaccacacaattggaggattagcagtctgcttgaaacacgcacaatcaccggaattcaaggcgtaccagaaaagagttgtgtctaactgtagagctctagctaaccgattggttgaactcgggtttaagctagtttctggtggcagcgataaccacttggttctcgtcgatcttagacccatgggtatggatggtgcgcgggttgagaaaatcttagacatggcatctattactctcaacaagaactctgtccctggggacaaaagtgcgttggtaccagggggaataaggataggatcccccgcgatgacgacaagaggactgtcagagaaagactttgtagtagtggctgacttcatcaaggaaggtgtggagataacaatggaagccaagaaagccgcgccgggttcaaagcttcaagatttcaacaagttcgtgacatctcctgagtttccattgaaagagagagtgaagagtctaaaggagagagtggaaaccttcacatctcgttttcccattcctggcgtttaagctataaacacacacagatatgctcttgttgtaccttaattattcacctttttcatctgtcttttagggtttttacttgcttgtgtcccaagtttaaagttacagttgaatcgagagaaattattttcaaaaataaatttatttgtggaacaatgattcgtctatgttcccaaatctc

SEQ ID NO: 79642 - protein, 520 aa, Arabidopsis thaliana
MASLQQPGRVQGSVFPPIMPPVTKFSQQLKFNISKPFRSSFLKRNLVSEMRASSVSLPNVEISSKEIPFEDYGLGEVDPEVRTIITKEKDRQFRSLELIASENFTSRAVMEAVGSCLTNKYSEGLPGKRYYGGNEYIDQLETLCQNRALAAFRLDSTKWGVNVQPLSGSPANFAVYTAILSPHDRIMGLDLPHGGHLSHGFMTAKRRVSGTSIYFESMPYRLDESTGIVDYDMLEKTATLFRPKLIIAGASAYSRDFDYPRMRKIADSVGAFLMMDMAHISGLVAASVVADPFEYCDIVTTTTHKSLRGPRGGMIFFRKDPINGVDLESAVNNAVFPGLQGGPHNHTIGGLAVCLKHAQSPEFKAYQKRVVSNCRALANRLVELGFKLVSGGSDNHLVLVDLRPMGMDGARVEKILDMASITLNKNSVPGDKSALVPGGIRIGSPAMTTRGLSEKDFVVVADFIKEGVEITMEAKKAAPGSKLQDFNKFVTSPEFPLKERVKSLKERVETFTSRFPIPGV

SEQ ID NO: 79643 - DNA, 1944 bp, Arabidopsis thaliana; identical to SEQ ID NO: 79641
  CDS (258)..(1766)

SEQ ID NO: 79644 - protein, 502 aa, Arabidopsis thaliana
MPPVTKFSQQLKFNISKPFRSSFLKRNLVSEMRASSVSLPNVEISSKEIPFEDYGLGEVDPEVRTIITKEKDRQFRSLELIASENFTSRAVMEAVGSCLTNKYSEGLPGKRYYGGNEYIDQLETLCQNRALAAFRLDSTKWGVNVQPLSGSPANFAVYTAILSPHDRIMGLDLPHGGHLSHGFMTAKRRVSGTSIYFESMPYRLDESTGIVDYDMLEKTATLFRPKLIIAGASAYSRDFDYPRMRKIADSVGAFLMMDMAHISGLVAASVVADPFEYCDIVTTTTHKSLRGPRGGMIFFRKDPINGVDLESAVNNAVFPGLQGGPHNHTIGGLAVCLKHAQSPEFKAYQKRVVSNCRALANRLVELGFKLVSGGSDNHLVLVDLRPMGMDGARVEKILDMASITLNKNSVPGDKSALVPGGIRIGSPAMTTRGLSEKDFVVVADFIKEGVEITMEAKKAAPGSKLQDFNKFVTSPEFPLKERVKSLKERVETFTSRFPIPGV

SEQ ID NO: 79645 - DNA, 2073 bp, Glycine max
  CDS (187)..(1770)
cccacgcgtccgcccacgcgtccgctcaactttgaaattcttaaaaccctaactggtccgaaccattggagccaccgtgcaatagttcctcctctcactctctccctcaacacaccattgattttggtttcagctttatttggaagagggttgtaacgctgacgtgaaatttttctgaagacaaagatgcaggcttgtacaacgatgagttctttgcagcaacaacctatttggaccaaagggttaaatttccctgcaaaagggtatggcagcaataacgggtttctacctcaggtgaggttctgcaatattaagccatccaaagcttctcatgttgaagcaagtttagtcactgggaagccgtcatctgtgcctttctctgtgcctgaaattggaggcgacggaagtagcttcctggactatggcttgagtgaagctgatcctgatgttcgtgcaattattgacaaggaaaaggaccgacaatttaaaagtcttgagcttattgcttctgagaattttacatctagagcagtgatggaagcagttgggtcgtgcctcacaaacaagtactcagaaggattgccgggtaaaaggtactatggtggcaatgagtacattgatgagcttgaaatcctatgtcaacaaagggcactggctgcatttcatgtagatgaaaacaaatggggtgttaatgttcaaactttatctggttcccctgctaattttgcagtatacactgcagttcttaaaccacatgatcggataatgggtttggacttgcctcacggaggacatttgtctcatggattcatgacacccaaaaaacgtgtatcagccacatcaatttattttgaatctatgccttatcgacttgatgaatcaacaggtcttattgattatgatatgctggagaaaactgctactctgtttcgtccaaaactcattgttgctggtgctagtgcttatcctcgggacattgactaccctcgtatgagaaaaattgcagatgaagtaggtgcttttcttatgatggatatggctcatataagtgggcttgttgctgcatctgtactttctaatccctttgagtattgtgatattgtgaccaccacaacccacaagtctttacgaggtccaagaggtggtatgatattcttcaagaaagatactgtgcatggggttgatttggagcctgccattaacaatgctgtttttcctggtctacaggggggtcctcataaccacacaattggaggactagcagtttgcttgaagtatgctcagtctccagaatttaaaaattatcaaaatcaggtggttgctaactgtagagctcttgctaagcgattaattgagcatggatataaactggtttctggtggtagtgacaatcacctggttcttgtcgatctaaggccatctggtcttgatggtgctcgggtggagaaaattcttgacttggcttctataaccctcaacaaaaattcagtgcctggtgataagagtgccctagttccaggaggcattcgcattggggcaccagcaatgacaacaagaggacttggtgagaaagaattttcactcattgctgatttcattcatgagggtgtgcaaataagtcttgaagccaaaagtttggtctcaggaacgaagctccaagattttttgaagtttgtaacatcttctgaatttcctttgggagagaaggtatcagagttgcgtaggaaagttgaagctcttactactcagtatccaatacccggagtctaagtgtacccgcataatgaatacttaaaactaagacgctgttaaaaaattttgtacaataatcatgcttcgatgtgtgttgctaataatatgttgtaacattttatggcaaatgcagcagcagctttatgattatcccatttataattggaagcaaaccaatccaatccttgatccttcaaatattccttagtaattaatattgtagatgaatggaaagcaaattggtaacgagtggcccgacttcttggggttcgaaaagctttgtacttgaattgaaagaccacttcaagacttaggtccttt

SEQ ID NO: 79646 - protein, 527 aa, Glycine max
MQACTTMSSLQQQPIWTKGLNFPAKGYGSNNGFLPQVRFCNIKPSKASHVEASLVTGKPSSVPFSVPEIGGDGSSFLDYGLSEADPDVRAIIDKEKDRQFKSLELIASENFTSRAVMEAVGSCLTNKYSEGLPGKRYYGGNEYIDELEILCQQRALAAFHVDENKWGVNVQTLSGSPANFAVYTAVLKPHDRIMGLDLPHGGHLSHGFMTPKKRVSATSIYFESMPYRLDESTGLIDYDMLEKTATLFRPKLIVAGASAYPRDIDYPRMRKIADEVGAFLMMDMAHISGLVAASVLSNPFEYCDIVTTTTHKSLRGPRGGMIFFKKDTVHGVDLEPAINNAVFPGLQGGPHNHTIGGLAVCLKYAQSPEFKNYQNQVVANCRALAKRLIEHGYKLVSGGSDNHLVLVDLRPSGLDGARVEKILDLASITLNKNSVPGDKSALVPGGIRIGAPAMTTRGLGEKEFSLIADFIHEGVQISLEAKSLVSGTKLQDFLKFVTSSEFPLGEKVSELRRKVEALTTQYPIPGV

SEQ ID NO: 79647 - DNA, 2055 bp, Glycine max
  CDS (75)..(1631)
cggctcgagcgggacttcttcttcaaaaacacacaagcacactacactttgtctctgttctgtgtgtgcgagaaatggcgatggcaatggcgcttcgcaggctttcatcttcaattgacaagcctctgcgccctctcttcaatgccggttccctctactacaagtcgtctttgcctgatgaagctgtttacgacaaggagcgacccggagttacatggccgaagcagttgaatgctccacttgaggtcgtggatcctgagattgctgatattattgagcttgagaaagctaggcaatggaaggggctagaattgataccgtcagagaatttcacctctgtgtctgtgatgcaagcggttggatcggttatgaccaacaaatacagtgaggggtaccctggtgcaagatattatggtggaaatgagtatattgacatggctgaaacactgtgccaaaagcgtgccctagaagcttttagattggatcccgctaaatggggagtgaacgtgcagcctctgtcagggtctcctgcaaatttccacgtttacactgcattgcttaaacctcatgaaagaatcatggcacttgatcttcctcatggtggccatctttctcacggatatcagactgataccaaaaagatatctgcagtctcgatattttttgagacaatgccatatcgattgaatgaaagtacaggatacatcgactatgaccagatggagaaatctgctacactcttcaggccaaaattaattgttgctggagctagcgcttatgcacgtctctatgattatgaacgtgtacgcaaggtttgcgataaacagaaagctatactattggcagatatggcacacatcagtggattggttgcagctggtgtcatcccatcaccttttgattatgctgatgtagttactaccacaactcacaagtcacttcgaggaccacgtggagctatgatattctacagaaaaggggttaaagaaattaacaaacaaggaaaagaggtattgtatgactacgaagacaaaatcaaccaagctgttttccctggactgcaaggtggccctcacaaccacactattactggtttagctgttgcgttgaagcaggccactactcccgaatatagagcatatcaagagcaagttctcagcaacagctttaaatttgcacaggctctgagtgagagaagctatgagcttgtctctggtggaaccgagaatcacctggttttggtgaatctgaagaataagggtattgatggctccagagttgagaaggtgttggaagcagttcatattgcagctaataaaaacactgttcctggagatgtgtctgccatggttcctggtggcatcaggatgggaacccctgctcttacttctagaggatttgttgaggaggattttgtcaaggtagcagagttttttgatgcagcagtgaagatagctgtgaagattaagggagagagcaaaggaacaaagctgaaggacttcttggccacaattgagtcatcttctacctttcaatcggagatagcaaagctccgccttgatgttgaggagtatgcaaaacaatttccaaccattggttttgataaagcaaccatgaagcacaagaattgagaaaagaaaattttccattaggtcatcccatggtcttactggcaagcaattcaacaagatcagttttcctgatccatggtagaggacgacaacatattttaaaaacaatgtcaaaagcctttatatgtaagaatccagaaaatcttgatcgttatgttgaaatgtatagatgcatatgtaataaaggcttcaaataccaaatttcttaatcagatgattgttgaacctatcccctataatggggttacaatcgatcgtaagtggttgtatctgctataaattcaactagcctcctcaattgcatagaatcctgctggatgctgatgtgaattattttacctcaatgatatttcttaaataaaaatttcatttgccttaaaaaaaaaaaactgaattcctttatttatcctaattccccggatcc

SEQ ID NO: 79648 - protein, 518 aa, Glycine max
MAMAMALRRLSSSIDKPLRPLFNAGSLYYKSSLPDEAVYDKERPGVTWPKQLNAPLEVVDPEIADIIELEKARQWKGLELIPSENFTSVSVMQAVGSVMTNKYSEGYPGARYYGGNEYIDMAETLCQKRALEAFRLDPAKWGVNVQPLSGSPANFHVYTALLKPHERIMALDLPHGGHLSHGYQTDTKKISAVSIFFETMPYRLNESTGYIDYDQMEKSATLFRPKLIVAGASAYARLYDYERVRKVCDKQKAILLADMAHISGLVAAGVIPSPFDYADVVTTTTHKSLRGPRGAMIFYRKGVKEINKQGKEVLYDYEDKINQAVFPGLQGGPHNHTITGLAVALKQATTPEYRAYQEQVLSNSFKFAQALSERSYELVSGGTENHLVLVNLKNKGIDGSRVEKVLEAVHIAANKNTVPGDVSAMVPGGIRMGTPALTSRGFVEEDFVKVAEFFDAAVKIAVKIKGESKGTKLKDFLATIESSSTFQSEIAKLRLDVEEYAKQFPTIGFDKATMKHKN

SEQ ID NO: 79649 - DNA, 1876 bp, Oryza sativa
  CDS (70)..(1485)
gcgttctctcgccgccgcaaccaccgccgcctcgccgcagcatcacgggcagccgccgccgccgccgccatggactccgtcgcgtcgtgggggctgaccccgctcgccgcggccgacccgctcgtccacgacctcctcgagcgggagaagcggcggcagcggagcggcatcgagctcatcgcctcggagaacttcacctccttcgccgtcatggaggccctcggctccgcgctcaccaacaagtactccgaggggatgcccggggcgcgctactacggcgggaacgacgtcatcgacgagatcgagaacctgtgccgcgaccgcgccctcgccgcgttccgcctcgacgccgcgtcgtggggcgtcaacgtgcagccctactccggctcgccggccaacttcgccgcctacacggcgctcctcaacccgcacgaccgcatcatggggctcgacctcccctccggtggccacctcacccatggctactacaccgcgggcgggaagaagatctccgcgacgtcgatctacttcgagagcctcccctacaaggtgagcgccgccacggggtacatcgactacgagaagctggaggagaaggcgctcgacttccgccccaagctcatcatctgcggcggcagcgcgtacccgagggactgggactacgccaagctcagggccgtcgccgacaaggtcggggcgctgctcctctgcgacatggcgcacatcagcggcctcgtcgccgcgcaggaagctgcaaatccttttgagtactgtgatgtggttaccaccaccacgcacaagtccctccgaggaccaagagctggcatgatcttctacaggaagggccctaagcctcccaagaagggccagcctgagggtgctgtctatgactacgaggacaagatcaacttcgcagtgttcccgtcactgcaaggtggtcctcacaaccaccagattgcagcccttgctgttgctctgcagcaaaccatgacacctggattcaaggcctacgcaaagcaggtcaaggccaacgctgtcgccattggcaagtatcttatgagcaagggctacaaaatggtgactgatggaactgagaaccaccttgttctctgggatcttcgccctcttggcttgactggcaacaaggttgagaagatgtgtgacctttgcagcattacacttaacaagaatgctgtctttggtgacagcagtgcattggctcctggcggtgtccgcattggtactcctgcgatgacatccaggggtcttgtcgagaaggactttgagcagatcggcgagttcctccaccaggccgtgaccatctgcctcaacatccagaaggagcacggcaagctcctcaaggacttctccaagggcctggtgaacaacaaggacatcgagaacctcaagctggaggtcgagaagttcgccacctccttcgacatgcccggcttcaccctcgacagcatgaagtacaaggagtaggaaaacaaaaacacacacaaaccatggtcctaccgccgctaatcgtcgaccagctgtgctctcgtggaccgccgtcgtcgtcatcttcttcctcggcacaagctggccctgtgttacggattttgtctgcccatcgagatgataggtttcataaaacgctctctcccccaccctgctgctgcctctggtttggttgccaacctcatcccccatcggtttttttcctcctcttgtttctaatttctaggagctgtgccttttggaatcatggaatgtcaagtatttgccaataatcaatccgtttgatttctgcctaccttgtgttttctgtgggattgctaaactatcaaactgtgcgaagctacgaaaaaaagaaatgctggaatttttc

SEQ ID NO: 79650 - protein, 471 aa, Oryza sativa
MDSVASWGLTPLAAADPLVHDLLEREKRRQRSGIELIASENFTSFAVMEALGSALTNKYSEGMPGARYYGGNDVIDEIENLCRDRALAAFRLDAASWGVNVQPYSGSPANFAAYTALLNPHDRIMGLDLPSGGHLTHGYYTAGGKKISATSIYFESLPYKVSAATGYIDYEKLEEKALDFRPKLIICGGSAYPRDWDYAKLRAVADKVGALLLCDMAHISGLVAAQEAANPFEYCDVVTTTTHKSLRGPRAGMIFYRKGPKPPKKGQPEGAVYDYEDKINFAVFPSLQGGPHNHQIAALAVALQQTMTPGFKAYAKQVKANAVAIGKYLMSKGYKMVTDGTENHLVLWDLRPLGLTGNKVEKMCDLCSITLNKNAVFGDSSALAPGGVRIGTPAMTSRGLVEKDFEQIGEFLHQAVTICLNIQKEHGKLLKDFSKGLVNNKDIENLKLEVEKFATSFDMPGFTLDSMKYKE

SEQ ID NO: 79651 - DNA, 1750 bp, Sorghum bicolor
  CDS (58)..(1473)
gccccccgccccctcctcgcctccgccagtcctgtcaacccctcccacgccgccgccatggaccccgtcgccacatgggggctaaccccgctcgccggcgccgacccggagatctacgacctcctggagcgcgagaagcggcgccagcgtcgcggcatcgagctcatcgcctccgagaacttcacctccttcgccgtcatggaggcactcggctctccgctcaccaacaagtactctgagggcatgcccggtgcccgctactacggcggcaacgacgtcatcgacgagatcgagaacctctgccggtcacgcgcgctcgctgccttccgcctcgacgccgcgttctggggcgtcaacgtgcagccctactcgggctcccccgccaacttcgccgcttacaccgcgctgctcaacccgcacgaccggatcatggggcttgaccttccctccggcggacacctcactcacggctactatactgccggcgggaagaagatctccgccacctcgatctactttgagagcctgccgtacaaagtgagcgccaccaccgggtacatcgactacgagaaactcgaggagaaggcacttgacttccgccccaagctcatcatctgcggtggcagcgcgtacccgagggactgggactactccaggctcagggccatcgccgacaaggtcggggccctgctgctctgcgacatggcgcacatcagcggactcgtcgccgcggaggaagctgcaaatccttttgaatattgtgatgtggttaccactaccacacacaagtctcttagagggccaagggctggcatgatcttctacaggaaaggccctaagccccccaagaagggccagcctgagggtgctgtgtatgattatgaagacaagatcaactttgctgtgttcccatctctccaaggtggccctcacaaccaccagattgctgcacttgctgttgctctgcagcaaactatgacacctggcttcaaggcctatgcaaagcaagtgaaggccaatgctgttgcaattggaaactatctcatgagcaagggctacaagatggtgactgatggaactgagaaccaccttgttctctgggatctccgccctcttggcttgactggaaacaaggttgaaaaactctgtgacctttgccacatcacattgaacaagaatgctgtctttggtgacagcagtgcattggctccgggtggtgtccgcattggtgcgccagcaatgacctcgaggggtctagtggagaaggactttgagcagattggagagttcctccaccaggcggtgaccatctgcctgaacattcagaaggagtacggcaagctcctcaaggacttcaacaagggcctgttgaacaacaaggacattgagaacctcaagacccaggtggagaagttcgccgactctttcgacatgcctgggttcacgcttgagagcatgaagtacaaggagtagatgtctcccgtgtataacaaggccctcttgtaccaatgtttttcttggccatggcggagggtgccatggcactgcactgccacacttaaggtgatgatggcttatggattttgtctacaacgtcagcagtataggctcacaagtgccccctgccctctggtttggtcgccttcggtttatcaggttttcctttggtacttgttcgcagggagtcatgaaaatgtcaatcaggtgtttgccaataataattccgtggtttcagccagcagcttttttt

SEQ ID NO: 79652 - protein, 471 aa, Sorghum bicolor
MDPVATWGLTPLAGADPEIYDLLEREKRRQRRGIELIASENFTSFAVMEALGSPLTNKYSEGMPGARYYGGNDVIDEIENLCRSRALAAFRLDAAFWGVNVQPYSGSPANFAAYTALLNPHDRIMGLDLPSGGHLTHGYYTAGGKKISATSIYFESLPYKVSATTGYIDYEKLEEKALDFRPKLIICGGSAYPRDWDYSRLRAIADKVGALLLCDMAHISGLVAAEEAANPFEYCDVVTTTTHKSLRGPRAGMIFYRKGPKPPKKGQPEGAVYDYEDKINFAVFPSLQGGPHNHQIAALAVALQQTMTPGFKAYAKQVKANAVAIGNYLMSKGYKMVTDGTENHLVLWDLRPLGLTGNKVEKLCDLCHITLNKNAVFGDSSALAPGGVRIGAPAMTSRGLVEKDFEQIGEFLHQAVTICLNIQKEYGKLLKDFNKGLLNNKDIENLKTQVEKFADSFDMPGFTLESMKYKE

SEQ ID NO: 79653 - DNA, 2144 bp, Zea mays; identical to SEQ ID NO: 79637
  CDS (214)..(1755)

SEQ ID NO: 79654 - protein, 513 aa, Zea mays
MAMATALRKLSANALRRQPLSRITPLYYMASLPATEERSGITWTKQLNAPLEEVDPEIADIIEHEKARQWKGLELIPSENFTSVSVMQAVGSVMTNKYSEGYPGARYYGGNEFIDMAESLCQKRALEAFRLDPAKWGVNVQPLSGSPANFHVYTALLKPHERIMALDLPHGGHLSHGYQTDTKKISATSIFFETMPYRLDESTGLIDYDQLEKSAVLFRPKLIIAGASAYARLYDYDRMRKICNKQKAILLADMAHISGLVAAGVVPSPFDYADVVTTTTHKSLRGPRGAMIFYRKGVKEINKQGKEVMYDFEDKINAAVFPGLQGGPHNHTITGLAVALKQATTPEYRAYQEQVISNCAKFAQSLISKGYELVSGGTDNHLVLVNLKNKGIDGSRVEKVLESVHIAANKNTVPGDVSAMVPGGIRMGTPALTSRGFVEEDFAKVADFFDAAVNLALKIKAATTGGTKLKDFVATLQSDSIQVEIAKLRHDVEEFAKQFPTIGFEKETMKYKN

SEQ ID NO: 79655 - DNA, 2136 bp, Zea mays
  CDS (143)..(1705)
aaacccctccgaccacccaatctccgccccccgcattctgtcgaacacctcgtcttcgctcgcaccgaccccaccgcaccgcaccgcaccgcacctcacctccaccaacaacaccaccagtccaccaccacccacctcccacatgtgcacacgcgccctcctcccgtccaccaccgctatatatcccggcgccccttcctccctcccccgtccttccctccgcctccgcccccgcccactcctcgctgccaccactcctgtcacctcttcccgcgccgacgcagccgccatggaccccgtcgccacatgggggctaaccccgctcgcgggcgccgacccggagatctacgacctcctggagcgcgagaagcggcgccagcgtcgcggcatcgagctcatcgcctccgagaacttcacctccttcgccgtcatggaagcgctcggctccgcgctcactaacaagtactccgagggcatgcccggcgcccgctactacggcggcaacgacgtcatcgacgagatcgagaacctctgccggtcacgcgcgctcgctgccttccgccttgacgccgcgtcctggggcgtcaacgtgcagccctactcgggctcccccgccaacttcgccgcctacaccgcgctgctcaacccgcacgaccggatcatggggctcgaccttccctccggcggacacctcactcacgggtactacacggccggcggtaagaagatctccgccacctcgatctactttgagagcctgccgtacaaggtgagcgccgcaacggggtacatcgactacgagaagctcgaggagaaggcacttgacttccgccccaagctcatcatctgcggtggcagtgcgtacccgagggactgggattacgccaagctcagggccgtcgccgacaaggtcggggccctgctgctctgcgacatggcgcacatcagcgggctcgtcgccgcgcaggaagctgcaaatccttttgaatattgtgatgtggttaccacaaccacgcacaagtccctcagagggccaagggctggcatgatcttctacaggaaaggccctaagccccccaagaagggccagcctgagggtgctgtttatgattacgaagacaagatcaactttgcagtgttcccatctctccaaggtggccctcacaaccaccagattgctgcacttgctgttgctctacagcaaactatgtcgcctggcttcaaggcctatgcaaagcaagtgaaggccaatgctgttgcaattggaaactatctcatgagcaagggctacaagatggtgactgatggaactgagaaccaccttgttctctgggatctccgcccccttggcttgactggaaacaaggtcgaaaagctatgtgatctttgccacatcacattgaacaagaatgctgtcttcggtgacagcagtgcattgtctccgggtggtgtccgcattggcgcgccagcaatgacctcgaggggtctactggagaaggatttcgagcagattggggagttcctccaccaggcagtgaccatctgcctgaacatccagaaggagtacggcaagctcctcaaggacttcaacaagggcctggtgaacaacaaggacatcgagaacctcaaggtccaggtggagaagtttgccgactccttcgacatgcctgggttcacgcttgagagcatgaaatacaaggagtagatatgcctctcccatgcgcggcaaggtcctcctgtaccgatgtctttccttgtggtggcgcagggtgccatggcactgcattgccgccacacttacgatgatgatgatgggttatggattttgtctacaatgtcagcaggataggctcacaattgccccctgccctccggtttggtcgcctctcaggttttcatttggtagttgttcgcagggaaccatatgagaattgcaatgtcaatcaggtgtttgccaataataattgggtggtttctgctcttgctctggtcattaccatgcattttttattctgttggtgagttggtcgatttattatctcctgcagtcctgctggcactgccggtggtcgtttgattatcatgtatgaatcttcctggagactgttgctcgattaacatatcgcctgctcctgc

SEQ ID NO: 79656 - protein, 520 aa, Zea mays
MCTRALLPSTTAIYPGAPSSLPRPSLRLRPRPLLAATTPVTSSRADAAAMDPVATWGLTPLAGADPEIYDLLEREKRRQRRGIELIASENFTSFAVMEALGSALTNKYSEGMPGARYYGGNDVIDEIENLCRSRALAAFRLDAASWGVNVQPYSGSPANFAAYTALLNPHDRIMGLDLPSGGHLTHGYYTAGGKKISATSIYFESLPYKVSAATGYIDYEKLEEKALDFRPKLIICGGSAYPRDWDYAKLRAVADKVGALLLCDMAHISGLVAAQEAANPFEYCDVVTTTTHKSLRGPRAGMIFYRKGPKPPKKGQPEGAVYDYEDKINFAVFPSLQGGPHNHQIAALAVALQQTMSPGFKAYAKQVKANAVAIGNYLMSKGYKMVTDGTENHLVLWDLRPLGLTGNKVEKLCDLCHITLNKNAVFGDSSALSPGGVRIGAPAMTSRGLLEKDFEQIGEFLHQAVTICLNIQKEYGKLLKDFNKGLVNNKDIENLKVQVEKFADSFDMPGFTLESMKYKE

SEQ ID NO: 79657 - DNA, 1875 bp, Zea mays; identical to SEQ ID NO: 79639
  CDS (41)..(1621)

SEQ ID NO: 79658 - protein, 526 aa, Zea mays
MCTRAHLPSTTAIYPGAPSSLPRPSLRLRLRPRPRPRPLLAATTPVTSSRADAAAMDPVATWGLTPLAGADPEIYDLLEREKRRQRRGIELIASENFTSFAVMEALGSALTNKYSEGMPGARYYGGNDVIDEIENLCRSRALAAFHLDAASWGVNVQPYSGSPANFAAYTALLNPHDRIMGLDLPSGGHLTHGYYTAGGKKISATSIYFESLPYKVSAATGYIDYEKLEEKALDFRPKLIICGGSAYPRDWDYAKLRAVADKVGALLLCDMAHISGLVAAQEAANPFEYCDVVTTTTHKSLRGPRAGMIFYRKGPKPPKKGQPEGAVYDYEDKINFAVFPSLQGGPHNHQIAALAVALQQTMSPGFKAYAKQVKANAVAIGNYLMSKGYKMVTDGTENHLVLWDLRPLGLTGNKVEKLCDLCHITLNKNAVFGDSSALSPGGVRIGAPAMTSRGLLEKDFEQIGEFLHQAVTICLNIQKEYGKLLKDFNKGLVNNKDIENLKVQVEKFADSFDMPGFTLESMKYKE

SEQ ID NO: 79659 - DNA, 1835 bp, Nicotiana tabacum
  CDS (56)..(1612)
gcacccaaaacacaagtcatttgggtgtgtgtaacagggggagaagctcacaattatggccatggcaacggctcttcgaagactttcctcttctgttgacaaaccaattaagcgtctctataatggcggctctctctattacatgtcatcgttgcctaatgaagctgtttacgagaaggaaaaaaatggtgtcacgtggccaaagcaacttaatgctcctctagaggaggttgatccagaaattgctgacattattgagcttgagaaagcacgccagtggaagggacttgaactcattccttcagaaaatttcacttctgtgtctgtaatgcaagctgttggatctgttatgacaaacaagtacagtgaaggataccctggggctagatactatggaggaaatgagtatattgacatggcggaaaccttatgccagaaacgtgctttagaagccttcaggttggatcctgcaaaatggggagtgaatgtgcagcctctgtcaggatcacctgctaattttcatgtttacactgcacttttaaaacctcatgaaagaatcatggcccttgatcttccccacggtggacatctttctcatggatatcagactgatacaaagaagatatctgccgtctctatattttttgagaccatgccatatagactgaatgagagcactggctacattgactatgaccagcttgagaaaagtgccacactctttaggccaaagttaattgtcgctggtgctagtgcttatgcacgtctttatgactatgcacgtatccgaaaggtttgtgacaaacagaaggctatcatgttggcagatatggctcatattagtgggttagttgcagctggagtcatcccatcaccatttgattatgcagatgttgtgaccaccacaacccacaaatcccttcgcgggcctcgtggtgccatgattttcttccggaagggtgtgaaggaggttaacaagcaaggcaaggaggtgttgtacgactatgaagataaaattaaccaggcagtctttcccggacttcaaggtggtcctcacaaccatacaattactggcttggcagttgctttgaaacaggcaatgactccagaatacagagcttaccaagagcaatgccttagcaactgctcaaaatttgcccaggctttagcgggaatgggttatgaacttgtttctggtggaacagagaatcacttggttttggtgaacttgaaaaacaagggtattgatggttctagggttgaaaaagttttggaagcggtacatattgcagcgaataagaacactgttcctggagatgtatctgccatggtccctggtggcatcagaatggggactcctgcactcacatcaaggggatttattgaggaagattttgtgaaagttgctgaattctttgatgctgctgtgaagatagcagtgaaaataaagactgaagctcaaggaacaaagttgaaagactttgtgacaacactacagtctagcgcttcaatccagtcggagattgcaaaactccgccatggtgtggaggagtatgcaaagcagttccctacaattgggtttgagaaggaaaccatgaagtacaaaaactgagagctcgactgagtatatacacaagggaccaatatccaacatcctcaaggtgaatgggatagacatccaaactgcagttcgctcccaaggattggattgtcatcttttactaatactatgtaaaatccagcagtgtttggttcccaagtttgccactttgtatattaacgattgtaattcttctgaggtccttgaaagcaataaactcctgttgtcacggtaa

SEQ ID NO: 79660 - protein, 518 aa, Nicotiana tabacum
MAMATALRRLSSSVDKPIKRLYNGGSLYYMSSLPNEAVYEKEKNGVTWPKQLNAPLEEVDPEIADIIELEKARQWKGLELIPSENFTSVSVMQAVGSVMTNKYSEGYPGARYYGGNEYIDMAETLCQKRALEAFRLDPAKWGVNVQPLSGSPANFHVYTALLKPHERIMALDLPHGGHLSHGYQTDTKKISAVSIFFETMPYRLNESTGYIDYDQLEKSATLFRPKLIVAGASAYARLYDYARIRKVCDKQKAIMLADMAHISGLVAAGVIPSPFDYADVVTTTTHKSLRGPRGAMIFFRKGVKEVNKQGKEVLYDYEDKINQAVFPGLQGGPHNHTITGLAVALKQAMTPEYRAYQEQCLSNCSKFAQALAGMGYELVSGGTENHLVLVNLKNKGIDGSRVEKVLEAVHIAANKNTVPGDVSAMVPGGIRMGTPALTSRGFIEEDFVKVAEFFDAAVKIAVKIKTEAQGTKLKDFVTTLQSSASIQSEIAKLRHGVEEYAKQFPTIGFEKETMKYKN

SEQ ID NO: 79661 - DNA, 1845 bp, Brassica napus
  CDS (148)..(1701)
gccaaaagcagaggccaaaattctctctgtcatctctccacaggataaacccactagtcttttttttttctctcgttcatgattcaaatctatctctagggtgtttccaaagagagagggagctaggcagagagaggttcagcgaaaatggcgatggccatggctcttcggagactttcttcttcagttgacaaacctattcgtcctcttatcagatcaactacatgctacatgtcatctctgcccagtgaagctgttgatgacaaggagagatctcgtgtcacttggccaaaacagcttaacgcatctttggaggaggttgatcctgagattgctgacattattgagcatgagaaagctagacaatggaagggacttgaactcattccatctgagaatttcacatctgtctcggtgatgcaagctgttggctctgtgatgactaacaagtacagtgaagggtaccctggtgctagatactatggaggaaatgagtacatagacatggcagagactttatgccaaaagcgcgctcttgaggctttcagattagatcctgaaaagtggggagtgaatgtgcaacccttgtctggatctcctgccaacttccatgtctacactgcattgctcaaacctcatgagagaatcatggcacttgatcttcctcatggtggtcatctttctcatggttatcagactgacaccaagaagatatctgctgtgtctatcttctttgagacaatgccttatcgcttggacgagagcactggctacattgactatgatcagatggagaaaagtgctactcttttcaggccaaaactgattgttgctggtgcgagtgcttatgctcgattgtatgactatgcccgcatccgaaaggtgtgtaacaagcaaaaagctgtgatgctagcagatatggcacacatcagtggtttggttgctgctggtgtaatcccttcaccgttcgactatgcagatgttgtgaccaccacaactcacaagtcacttcgtggaccccgtggagccatgattttctacagaaagggtgttaaggaaattaacaaacaagggaaagaggttttgtatgattttgaagacaagataaatcaagctgtcttccctggtcttcaaggtggtccacataaccacactattacaggactagctgttgctttaaaacaggcaactacttcagagtacaaagcataccaagagcaagtcctcagtaactctgcaaagtttgctcagactctgatggagaaaggttatgaacttgtttctggtggaactgacaaccatctggttctagtgaacctgaagcccaagggaattgatggatctagagttgagaaagtgttggaagctgttcacattgcatccaacaaaaacactgttcctggagatgtttctgccatggttcctggtggaatcagaatgggtacacctgctctcacttccagaggctttgttgaggaagactttgctaaagtagctgaatactttgacaaagctgtaacgttggctctcaaagtcaaatctgaagctcaagggaccaagctgaaagactttgtgtcagcaatggaagcttcttcaaccattcaatcagagattgctaagctgcgccatgaagttgaggaatttgctaaacagtttccaacaattgggtttgagaaagaaaccatgaagtacaagaactaaatgttttatcctacaagtctttttattatgctttgaacttccatggaatgtatagatgataataatccacgtacactctaaactctgtcttatgctatgagaaaaaaataatgggcgttctatgcaagaaaaaaaaaaaaaaaa

SEQ ID NO: 79662 - protein, 517 aa, Brassica napus
MAMAMALRRLSSSVDKPIRPLIRSTTCYMSSLPSEAVDDKERSRVTWPKQLNASLEEVDPEIADIIEHEKARQWKGLELIPSENFTSVSVMQAVGSVMTNKYSEGYPGARYYGGNEYIDMAETLCQKRALEAFRLDPEKWGVNVQPLSGSPANFHVYTALLKPHERIMALDLPHGGHLSHGYQTDTKKISAVSIFFETMPYRLDESTGYIDYDQMEKSATLFRPKLIVAGASAYARLYDYARIRKVCNKQKAVMLADMAHISGLVAAGVIPSPFDYADVVTTTTHKSLRGPRGAMIFYRKGVKEINKQGKEVLYDFEDKINQAVFPGLQGGPHNHTITGLAVALKQATTSEYKAYQEQVLSNSAKFAQTLMEKGYELVSGGTDNHLVLVNLKPKGIDGSRVEKVLEAVHIASNKNTVPGDVSAMVPGGIRMGTPALTSRGFVEEDFAKVAEYFDKAVTLALKVKSEAQGTKLKDFVSAMEASSTIQSEIAKLRHEVEEFAKQFPTIGFEKETMKYKN

SEQ ID NO: 79663 - DNA, 1846 bp, Brassica napus
  CDS (146)..(1699)
gccaaaagcagaggccaaaattctctctgtcatctctccacaggataaacccactagtcttttttttttctctcgttcatgattcaaatctatctctagggtttccaaagagagagggagctaggcagagagaggttcagcgaaaatggcgatggccatggctcttcggcgactttcttcttcagttgacaaacctattcgtcctcttatcagatcaactacatgctacatgtcatctctgcccagtgaagctgttgatgacaaggagagatctcgtgtcacttggccaaaaaagcttaacgcatctttggaggaggttgatcctgagattgctgacattattgagcatgagaaagctagacaatggaagggacttgaactcattccatctgagaatttcacatctgtctcggtgatgcaagctgttggctctgtgatgactaacaagtacagtgaagggcaccctggtgctagatactatggaggaaatgagtacatagacatggcagagactttatgccaaaagcgcgctcttgaggctttcagattagatcctgaaaagtggggagtgaatgtgcaacccttgtctggatctcctgccaacttccatgtctacactgcattgctcaaacctcatgagagaatcatggcacttgatcttcctcatggtggtcatctttctcatggttatcagactgacaccaagaagatatctgctgtgtctatcttctttgagacaatgccttatcgcttggacgagagcactggctacattgactatgatcagatggagaaaagtgctactcttttcaggccaaaactgattgttgctggtgcgagtgcttatgctcgattgtatgactatgcccgcatccgaaaggtgtgtaacaagcaaaaagctgtgatgctagcagatatggcacacatcagtggtttggttgctgctggtgtaatcccttcaccgttcgactatgcagatgttgtgaccaccacaactcacaagtcacttcgtggaccccgtggagccgtgattttctacagaaagggtgttaaagaaattaacaaacaagggaaagaggttttgtatgattttgaagacaagataaatcaagccgtcttccctggtcttcaaggtggtccacataaccacactattacaggactagctgttgctttaaaacaggcaactacttcagagtacaaagcataccaagagcaagtcctgagcaactctgcaaagttcgctcagactctgatggagaaaggttatgaacttgtttctggtggaaccgacaaccatctggttctagtgaacctgaagcccaagggaattgatggatctagagttgagaaagtgttggaagctgttcacattgcatcaaacaaaaacactgttcctggagatgtttctgccatggttcctggtggaatcagaatgggtacacctgctctcacttccagaggctttgttgaggaagactttgctaaagtagctgaatactttgacaaagctgtaacgttggctctcaaagtcaaatctgaagctcaagggaccaagctgaaagactttgtgtcagcaatggaagcttcttcaaccattcaatcagagattgctaagctgcgccatgaagttgaggaatttgctaaacagtttccaacaattgggtttgagaaagaaaccatgaagtacaagaactaaatgttttatcctacaagtctttttttattatgctttgaacttccatggaatgtatagatgataataatccacgtacactctaaactctgtcttatgctatgagaaaaaataatgaacgttctatgcaaatcgaaaaaaaaaaaaaaa

SEQ ID NO: 79664 - protein, 517 aa, Brassica napus
MAMAMALRRLSSSVDKPIRPLIRSTTCYMSSLPSEAVDDKERSRVTWPKKLNASLEEVDPEIADIIEHEKARQWKGLELIPSENFTSVSVMQAVGSVMTNKYSEGHPGARYYGGNEYIDMAETLCQKRALEAFRLDPEKWGVNVQPLSGSPANFHVYTALLKPHERIMALDLPHGGHLSHGYQTDTKKISAVSIFFETMPYRLDESTGYIDYDQMEKSATLFRPKLIVAGASAYARLYDYARIRKVCNKQKAVMLADMAHISGLVAAGVIPSPFDYADVVTTTTHKSLRGPRGAVIFYRKGVKEINKQGKEVLYDFEDKINQAVFPGLQGGPHNHTITGLAVALKQATTSEYKAYQEQVLSNSAKFAQTLMEKGYELVSGGTDNHLVLVNLKPKGIDGSRVEKVLEAVHIASNKNTVPGDVSAMVPGGIRMGTPALTSRGFVEEDFAKVAEYFDKAVTLALKVKSEAQGTKLKDFVSAMEASSTIQSEIAKLRHEVEEFAKQFPTIGFEKETMKYKN

SEQ ID NO: 79665 - DNA, 1824 bp, Zea mays
  CDS (105)..(1520)
ggtcgacttcgctgtcgacgatttcgttccgcccccgcccccgcccacgcccactcctcgctgccaccactcctgtcacctcttcccgcgccgacgcagccgccatggaccccgtcgccacatgggggctaaccccgcccgcgggcgccgacccggagatctacgacctcctggagcgcgagaagcggcgccagcgtcgcggcatcgagctcatcgcctccgagaacttcacctccttcgccgtcatggaagcgctcggctccgcgctcactaacaagtactccgagggcatgcccggcgcccgctactacggcggcaacgacgtcatcgacgagatcgagaacctctgccggtcacgcgcgctcgctgccttccaccttgacgccgcgtcctggggcgtcaacgtgcagccctactcgggctcccccgccaacttcgccgcctacaccgcgctgctcaacccgcacgaccggatcatggggctcgaccttccctccggcggacacctcactcacgggtactacacggccggcggtaagaagatctccgccacctcgatctactttgagagcctgccgtacaaggtgagcgccgcaacggggtacatcgactacgagaagctcgaggagaaggcacttgacttccgccccaagctcatcatctgcggtggcagtgcgtacccgagggactgggattacgccaagctcagggccgtcgccgacaaggtcggggccctgctgctctgcgacatggcgcacatcagcgggctcgtcgccgcgcaggaagctgcaaatccttttgaatattgtgatgtggttaccacaaccacgcacaagtccctcagagggccaagggctggcatgatcttctacaggaaaggccctaagccccccaagaagggccagcctgagggtgctgtttatgattacgaagacaagatcaactttgcagtgttcccatctctccaaggtggccctcacaaccaccagattgctgcacttgctgttgctctacagcaaactatgtcgcctggcttcaaggcctatgcaaagcaagtgaaggccaatgctgttgcaattggaaactatctcatgagcaagggctacaagatggtgactgatggaactgagaaccaccttgttctctgggatctccgcccccttggcttgactggaaacaaggtcgaaaagctatgtgatctttgccacatcacattgaacaagaatgctgtcttcggtgacagcagtgcattgtctccgggtggtgtccgcattggcgcgccagcaatgacctcgaggggtctactggagaaggatttcgagcagattggggagttcctccaccaggcagtgaccatctgcctgaacatccagaaggagtacggcaagctcctcaaggacttcaacaagggcctggtgaacaacaaggacatcgagaacctcaaggtccaggtggagaagtttgccgactccttcgacatgcctgggttcacgcttgagagcatgaaatacaaggagtagatatgcctctttcatgcgcggcaaggtcctcctgtaccgatgtctttccttgtggtggcgcagggtgccatggcactgcattgccgccacacttacgatgatgatgatgggttatggattttgtctacaatgtcagcaggataggctcacaattgccccctgccctccggtttggtcgcctctcaggttttcatttggtagttgttcgcagggaaccatatgagaattgcaatgtcaatcaggtgtttgccaataataattgggtggtttctgctcttgctctggccaaaaaaaaaaaaaaaaa

SEQ ID NO: 79666 - protein, 471 aa, Zea mays
MDPVATWGLTPPAGADPEIYDLLEREKRRQRRGIELIASENFTSFAVMEALGSALTNKYSEGMPGARYYGGNDVIDEIENLCRSRALAAFHLDAASWGVNVQPYSGSPANFAAYTALLNPHDRIMGLDLPSGGHLTHGYYTAGGKKISATSIYFESLPYKVSAATGYIDYEKLEEKALDFRPKLIICGGSAYPRDWDYAKLRAVADKVGALLLCDMAHISGLVAAQEAANPFEYCDVVTTTTHKSLRGPRAGMIFYRKGPKPPKKGQPEGAVYDYEDKINFAVFPSLQGGPHNHQIAALAVALQQTMSPGFKAYAKQVKANAVAIGNYLMSKGYKMVTDGTENHLVLWDLRPLGLTGNKVEKLCDLCHITLNKNAVFGDSSALSPGGVRIGAPAMTSRGLLEKDFEQIGEFLHQAVTICLNIQKEYGKLLKDFNKGLVNNKDIENLKVQVEKFADSFDMPGFTLESMKYKE

SEQ ID NO: 79667 - DNA, 1748 bp, Glycine max
  CDS (91)..(1506)
cggtcgacgatttcgtcacaacaacactctctcttctcgctcttggcttttcgctcttcactcactctcattcattcatttccaccgttcatggatccagtaagcgtgtggggtaacacgcccttggcgacggtggatcccgagatccatgacctcatcgagaaggagaagcgccgtcaatgccgcggaatcgagctcatcgcctccgagaacttcacctccttcgccgtcatcgaggccctcggcagcgctctcacgaacaaatactccgagggcatgccgggcaaccgctactacggcggcaatgaatacatcgaccagatcgaaaacctctgccgctcacgcgccctccaagccttccacctcgacgcccaatcctggggcgtcaacgtccagccctactccggctccccggccaacttcgccgcctacaccgccgtcctcaacccccacgaccgcatcatggggctagatctcccctccggcggccacctcacccacggctactacacctccggcggaaagaagatctccgccacctccatttacttcgagagcctcccttacaaggtaaactccaccaccggctacatcgactacgaccgcttggaagaaaaagccctagacttcaggccaaaactcataatctgcggtggcagcgcgtaccctcgcgattgggactacaaacgtttcagggaagtcgctgataagtgcggagcattgcttctctgcgacatggcgcacactagcggccttgtggccgcgcaggaagtgaacagccccttcgagtattgcgacattgtgaccaccacgactcacaagagcttgcggggcccacgtgcggggatgatcttttaccggaagggccccaagccgccgaagaaggggcagccggagaacgcggtttatgatttcgaggacaagattaacttcgcggtgttcccttcgctgcagggtgggccccacaaccaccagatcggtgctctcgccgtggcgctgaagcaggccgcgtcgcccgggtttaaggcctacgcgaagcaggttaaggcgaacgccgttgcgcttggaaaatacttgatggggaaagggtacagccttgtcactggcggaacggagaaccatcttgttttgtgggatctgagacctcttggattgactgggaataaggtggagaaactctgtgatctctgtaacattactgttaacaagaacgctgtttttggtgatagcagtgccttggcccctggtggagtgcgaattggtgcccctgccatgacttctaggggtttggttgaaaaagactttgagcagattggtgagttccttcaccgtgctgtgactctcacactggagatccagaaggagcatggcaaacttctcaaggatttcaacaagggtctcgtcaacaacaaggctattgaagatctcaaagctgatgttgagaagttctctgccttgtttgacatgcctggcttcctggtatctgaaatgaagtacaaggattaggttcaaccataccactttctactaaattgtgtcactcaagttcgacacaaagtgcagaaatggagaaaaaggaaatatgtgtcttcctttcctgggagtgatagggtttatcgccatggtgtttcaattcaaaagtttgaagtttctttgtctttgatttcatgtttaattttgttagcctgattgatatcatattttttttcttatttaacaattgaaataatacgtgctgcctttctttc

SEQ ID NO: 79668 - protein, 471 aa, Glycine max
MDPVSVWGNTPLATVDPEIHDLIEKEKRRQCRGIELIASENFTSFAVIEALGSALTNKYSEGMPGNRYYGGNEYIDQIENLCRSRALQAFHLDAQSWGVNVQPYSGSPANFAAYTAVLNPHDRIMGLDLPSGGHLTHGYYTSGGKKISATSIYFESLPYKVNSTTGYIDYDRLEEKALDFRPKLIICGGSAYPRDWDYKRFREVADKCGALLLCDMAHTSGLVAAQEVNSPFEYCDIVTTTTHKSLRGPRAGMIFYRKGPKPPKKGQPENAVYDFEDKINFAVFPSLQGGPHNHQIGALAVALKQAASPGFKAYAKQVKANAVALGKYLMGKGYSLVTGGTENHLVLWDLRPLGLTGNKVEKLCDLCNITVNKNAVFGDSSALAPGGVRIGAPAMTSRGLVEKDFEQIGEFLHRAVTLTLEIQKEHGKLLKDFNKGLVNNKAIEDLKADVEKFSALFDMPGFLVSEMKYKD

SEQ ID NO: 79669 - DNA, 1655 bp, Brassica napus
  CDS (21)..(1436)
ctcactcactcattctcaccatggatccagtctcatcctggggaaacacccctctcgtcacggtcgatcccgagatccacgacctcatcgagaaggagaaacgccgccagtgccgcggaatcgaactcatcgcctccgagaatttcacctccttcgccgtcatcgaagctctcggaagcgcgctgaccaacaaatactccgaaggcatgcccggtaaccgttactacggaggcaacgagttcatcgaccagatcgagaacctctgccagtcacgcgctctcgaagccttccgtctcgagtcagcatcctggggcgtcaatgtgcagccctactccggatctccggccaacttcgccgcttacaccgccttgcttcagcctcacgatcgaatcatggggcttgatctgccgtcgggtggtcatctcacgcatggatactacacatccggagggaagaagatctctgctacttccatctactttgagagccttccttataaggtgaacttcaccactggttacatcgattacgataagcttgaggagaaggccatggatttcaggcctaagttgctcatctgtggcggtagtgcctaccctagggactgggattacgctagattgagagccgttgctgataaggttggagctcttttgctctgtgacatggctcacattagtggcctcgttgctgctcaggaagctgcaaacccatttgagtactgtgacgttgtgacaacaacaacccacaagagtttgaggggtccaagggctggtatgatcttctacaggaagggcccaaaaccaccaaagaagggacaacccgagggtgcagtctatgactttgaggacaaaatcaactttgctgtgttccctgcgcttcaaggtggtcctcacaaccaccagatcggtgctctagctgttgcgttgaagcaggctaacactcctggtttcaaggtctatgcgaaacaggtgaaagccaatgctgttgcccttgcaaactacctgatgggtaagggatacagtattgtaaccggtggaactgagaaccaccttgttctttgggatcttcgccctcttggattgaccggtaacaaggttgagaagctttgcgatctgtgcaacattactttgaacaagaatgctgtctttggagacagcagtgctcttgctcctggaggtgtaagaatcggtactcctgcgatgacatcaaggggattggtggagaaggactttgagatgataggagagttcttgagccgatcagtgacactgacattgaacatccagaaggagcatggtaaactgttgaaggactttaacaagggtttggtgaacaacaaagagatcgaggagctcaaggctgatgtcgagaagttctcagcctcctatgagatgcctggattcctcatgtctgcgatgaagtaccaggattagagatttcctctctctatcaaagagtaatcttttattatctctatatataatatgcttttgtagggccgcctgattggaattcacaaggcgaagagatgaagaaacaaacagtaaaatacaaaaagggttttttttttgagtaatttcttcttgaatgtttttattttatcttattgaaattgttgtattttgttggctttttaataatatcaagcgagt

SEQ ID NO: 79670 - protein, 471 aa, Brassica napus
MDPVSSWGNTPLVTVDPEIHDLIEKEKRRQCRGIELIASENFTSFAVIEALGSALTNKYSEGMPGNRYYGGNEFIDQIENLCQSRALEAFRLESASWGVNVQPYSGSPANFAAYTALLQPHDRIMGLDLPSGGHLTHGYYTSGGKKISATSIYFESLPYKVNFTTGYIDYDKLEEKAMDFRPKLLICGGSAYPRDWDYARLRAVADKVGALLLCDMAHISGLVAAQEAANPFEYCDVVTTTTHKSLRGPRAGMIFYRKGPKPPKKGQPEGAVYDFEDKINFAVFPALQGGPHNHQIGALAVALKQANTPGFKVYAKQVKANAVALANYLMGKGYSIVTGGTENHLVLWDLRPLGLTGNKVEKLCDLCNITLNKNAVFGDSSALAPGGVRIGTPAMTSRGLVEKDFEMIGEFLSRSVTLTLNIQKEHGKLLKDFNKGLVNNKEIEELKADVEKFSASYEMPGFLMSAMKYQD

SEQ ID NO: 79671 - DNA, 1845 bp, Helianthus annuus
  CDS (348)..(1763)
aatctcccctctctccacgacaatttcgacacccattttccacacatcactcaagtacctggtgttaaccttttggtctgcgtcaaacgggtggcatagcatcggaaccccttcagacatgctttccaatgtcgaattccaaccgcaatggctccaaaatcctccaattgcagaatgtgccaagacttccttctgcggtgcccatttcacgatcaaacctctcgccttcatctcactcaccaaaccctccggcaaaaactcaatccattcaaaccctttaaccgaaccgggtcgaaccacccccaacaacctctcctctctctatactctactctctctagaccagcatggatcccgttaatgtgtggggcaacacccccctagacgccgccgacccagagatcttcgacctcattgagaaagaaaaacgccgccaatgtcgcggaatcgaactgattgcatccgaaaacttcacctcatttgcagtcatccaagctttgggatcccccttgaccaacaaatactccgagggcatgcctggaaaccgttactacggtggcaacgagtacatcgaccagatcgaaaacctctgccgttctcgcgccttacaggcttaccgtctagatcccaccaaatggggtgttaatgtccagccctattctggatctcctgccaattttgctgcctatacagccctcttagagccccatgatcggatcatgggccttgatttgccatcaggtgggcatttgacgcatggatattatacttccggtgggaagaagatatcagctacctcgatttactttgagagtttgccgtataaagtgaattcgactacgggatatatcgattacgagaagatggaggagaaggccttggactttagacccaagttgattatttgtggggggagtgcgtacccgagagattgggattacaagaggatcaggggcattgctgataaatgtggggccctcatgttgtgtgatatggctcatatcagtggccttgttgctgcacaggaagctgcagatccgttcgaatactgtgacgtggtcactaccaccacccacaagagtctcaggggaccaagagctggtatgatcttctaccgcaaaggtccaaaaccaccgaagaagggtcagccagaagatgctgtttatgactttgaagacaagatcaattttgctgtgttcccggctctgcaaggtgggccgcacaaccaccagattggtgctctagcggttgcgttgaaacaggccatgtcacctggattcaaggcatatgctaagcaagttagagccaatgctgttgcacttggtaactacttgatgagcaaagactacaagcttgtgaccggtggaactgaaaaccatcttgtgttgtgggatcttcgtcctcttggcttgaccgggaacaaggtggagaagctttgcgatcttgcaaacatcactgttaacaagaatgctgtgtttggtgacagcagtgctttggccccaggaggtgttcgtattggtacacctgcaatgacctcaaggggtttagttgagaaggattttgagcaaattggggagtttcttcaccgtgcaattcaaatcactttaagcatccagaaggagttcgggaaattattgaaggatttcaacaagggtttggtgaacaacaaggagatcgaacaactcaaggctgatgtcgagaagttttctggttcgtttgacatgcctgggttctcgttggccgacatgaagtataaggattgagaagatgaagagatctatgtaatgaatgatgtttgtgttgttattagtaacattttctggtgtttgttttgatgtctagtac

SEQ ID NO: 79672 - protein, 471 aa, Helianthus annuus
MDPVNVWGNTPLDAADPEIFDLIEKEKRRQCRGIELIASENFTSFAVIQALGSPLTNKYSEGMPGNRYYGGNEYIDQIENLCRSRALQAYRLDPTKWGVNVQPYSGSPANFAAYTALLEPHDRIMGLDLPSGGHLTHGYYTSGGKKISATSIYFESLPYKVNSTTGYIDYEKMEEKALDFRPKLIICGGSAYPRDWDYKRIRGIADKCGALMLCDMAHISGLVAAQEAADPFEYCDVVTTTTHKSLRGPRAGMIFYRKGPKPPKKGQPEDAVYDFEDKINFAVFPALQGGPHNHQIGALAVALKQAMSPGFKAYAKQVRANAVALGNYLMSKDYKLVTGGTENHLVLWDLRPLGLTGNKVEKLCDLANITVNKNAVFGDSSALAPGGVRIGTPAMTSRGLVEKDFEQIGEFLHRAIQITLSIQKEFGKLLKDFNKGLVNNKEIEQLKADVEKFSGSFDMPGFSLADMKYKD

SEQ ID NO: 79673 - DNA, 1943 bp, Hordeum vulgare
  CDS (56)..(1588)
gctccaacccctacccagaaggagaggaggaggccgcccaccaccaccacccaccatggccatggcgacggcgctccgcaagctctccgcccgcggtcagcccctctcccgactcacgccgctctactccatggcgtccctgccggcgacggaggagagatccgcagtcacctggccgaagcagctcaacgcgccgctggaggaggtcgacccggagattgccgacatcatcgagctcgagaaggcccgccaatggaaggggctggagctcatcccgtcggagaacttcacctccctgtcggtgatgcaggccgtgggatccgtcatgacgaacaagtacagcgaggggtaccccggcgccagatactacggtggaaacgaatacattgatatggccgagacgctgtgccagaaacgtgctttggaggccttcaatttggacccggagaagtggggagtgaatgtgcaacctctgtcgggttcacctgccaacttccatgtatacactgctctgctgaagccacatgacagaattatggccctggatcttcctcacggtggacatctttcccatggttaccagactgacacaaagaaaatctcagcagtttcaatattctttgagacaatgccttacagactggatgaaagcactggcttgattgattatgaccagttggagaaaagtgccgttctttttaggccaaagttgattgttgctggtgctagtgcatatgctcgcctttatgattataaccgcatgcggaagatctgtgacaagcagaaggcagttcttctcgcagacatggcacatatcagtgggctagttgctgctggtgtcattccctctccttttgagtatgccgatgtggtgactaccactacccacaagtcactccgtggtccacgtggagccatgatctttttccggaagggggtgaaagaaataaacaaacaagggaaggaggttaagtatgattttgaggacaaaatcaatgctgctgtcttccctggtctgcaaggtggaccacataaccatactattactggcctggccgttgcgcttaagcaggcaactactcaggagtaccgagcttatcaagagcaagttatgagcaactctgctagatttgctgagagcttgacttccaaaggctacgacattgtctctggtgggactgataaccatttagttttggtgaacctcaagaaaaagggaatagatggttcaagagtggagaaggttttagaaaatgtgcatattgcagcaaacaagaacacagttcctggtgatgtttcagctatggtacccggaggcatcaggatgggaacccccgcgcttacatcaagaggatttgttgaggaggacttcgccaaggttgccgaattcttcgattcggcagtgaacttggctttgaaggttaaagctgcagcagcaggtaccaaactgaaggactttgttgccactttgcaatccgacagcaacatccaagctgaaattgcaaagcttcgccacgatgtggaggaatatgcaaaacaattcccaacaatcggattcgagaaagagaccatgaagtacaagaactaagcactgctgtgtttcaacagcaaggaagcaaacaggaagcacaactgaggacaagtccatgtaaacaatagatccatgatgaagcgccatcttatgtaaaaggaatccaagcattttacagaatatgggaactttgtcaatagtttcttattgcaggcacatactgtaagatgtttcgctgatatgctatatgaaccaccatccttcttggataagcatttacttacacaaaaaaaaaaaaaagctccgtggataacacgtatgattcggctttgagatcttgagcggtttgtgagcttcatgtatggacattatctttgtgatgaaattcctgccataaaaaaaaaaaaaaaaa

SEQ ID NO: 79674 - protein, 510 aa, Hordeum vulgare
MAMATALRKLSARGQPLSRLTPLYSMASLPATEERSAVTWPKQLNAPLEEVDPEIADIIELEKARQWKGLELIPSENFTSLSVMQAVGSVMTNKYSEGYPGARYYGGNEYIDMAETLCQKRALEAFNLDPEKWGVNVQPLSGSPANFHVYTALLKPHDRIMALDLPHGGHLSHGYQTDTKKISAVSIFFETMPYRLDESTGLIDYDQLEKSAVLFRPKLIVAGASAYARLYDYNRMRKICDKQKAVLLADMAHISGLVAAGVIPSPFEYADVVTTTTHKSLRGPRGAMIFFRKGVKEINKQGKEVKYDFEDKINAAVFPGLQGGPHNHTITGLAVALKQATTQEYRAYQEQVMSNSARFAESLTSKGYDIVSGGTDNHLVLVNLKKKGIDGSRVEKVLENVHIAANKNTVPGDVSAMVPGGIRMGTPALTSRGFVEEDFAKVAEFFDSAVNLALKVKAAAAGTKLKDFVATLQSDSNIQAEIAKLRHDVEEYAKQFPTIGFEKETMKYKN

SEQ ID NO: 79675 - DNA, 1844 bp, Helianthus annuus
  CDS (119)..(1762)
aatctcccctctctccacgacaatttcgacacccattttccacacatcactcaagtacctggtgttaaccttttggtctgcgtcaaacgggtggcatagcatcggaaccccttcagacatgctttccaatgtcgaattccaaccgcaatggctccaaaatcctccaattgcagaatgtgccaagacttccttctgcggtgcccatttcacgatcaaacctctcgccttcatctcactcaccaaaccctccggcaaaaactcaatccattcaaaccctttaaccgaaccgggtcgaaccacccccaacaacctctcctctctctatactctactctctctagaccgcatggatcccgttaatgtgtggggcaacacccccctagacgccgccgacccagagatcttcgacctcattgagaaagaaaaacgccgccaatgtcgcggaatcgaactgattgcatccgaaaacttcacctcatttgcagtcatccaagctttgggatcccccttgaccaacaaatactccgagggcatgcctggaaaccgttactacggtggcaacgagtacatcgaccagatcgaaaacctctgccgttctcgcgccttacaggcttaccgtctagatcccaccaaatggggtgttaatgtccagccctattctggatctcctgccaattttgctgcctatacagccctcttagagccccatgatcggatcatgggccttgatttgccatcaggtgggcatttgacgcatggatattatacttccggtgggaagaagatatcagctacctcgatttactttgagagtttgccgtataaagtgaattcgactacgggatatatcgattacgagaagatggaggagaaggccttggactttagacccaagttgattatttgtggggggagtgcgtacccgagagattgggattacaagaggatcaggggcattgctgataaatgtggggccctcatgttgtgtgatatggctcatatcagtggccttgttgctgcacaggaagctgcagatccgttcgaatactgtgacgtggtcactaccaccacccacaagagtctcaggggaccaagagctggtatgatcttctaccgcaaaggtccaaaaccaccgaagaagggtcagccagaagatgctgtttatgactttgaagacaagatcaattttgctgtgttcccggctctgcaaggtgggccgcacaaccaccagattggtgctctagcggttgcgttgaaacaggccatgtcacctggattcaaggcatatgctaagcaagttagagccaatgctgttgcacttggtaactacttgatgagcaaagactacaagcttgtgaccggtggaactgaaaaccatcttgtgttgtgggatcttcgtcctcttggcttgaccgggaacaaggtggagaagctttgcgatcttgcaaacatcactgttaacaagaatgctgtgtttggtgacagcagtgctttggccccaggaggtgttcgtattggtacacctgcaatgacctcaaggggtttagttgagaaggattttgagcaaattggggagtttcttcaccgtgcaattcaaatcactttaagcatccagaaggagttcgggaaattattgaaggatttcaacaagggtttggtgaacaacaaggagatcgaacaactcaaggctgatgtcgagaagttttctggttcgtttgacatgcctgggttctcgttggccgacatgaagtataaggattgagaagatgaagagatctatgtaatgaatgatgtttgtgttgttattagtaacattttctggtgtttgttttgatgtctagtac

SEQ ID NO: 79676 - protein, 547 aa, Helianthus annuus
MLSNVEFQPQWLQNPPIAECAKTSFCGAHFTIKPLAFISLTKPSGKNSIHSNPLTEPGRTTPNNLSSLYTLLSLDRMDPVNVWGNTPLDAADPEIFDLIEKEKRRQCRGIELIASENFTSFAVIQALGSPLTNKYSEGMPGNRYYGGNEYIDQIENLCRSRALQAYRLDPTKWGVNVQPYSGSPANFAAYTALLEPHDRIMGLDLPSGGHLTHGYYTSGGKKISATSIYFESLPYKVNSTTGYIDYEKMEEKALDFRPKLIICGGSAYPRDWDYKRIRGIADKCGALMLCDMAHISGLVAAQEAADPFEYCDVVTTTTHKSLRGPRAGMIFYRKGPKPPKKGQPEDAVYDFEDKINFAVFPALQGGPHNHQIGALAVALKQAMSPGFKAYAKQVRANAVALGNYLMSKDYKLVTGGTENHLVLWDLRPLGLTGNKVEKLCDLANITVNKNAVFGDSSALAPGGVRIGTPAMTSRGLVEKDFEQIGEFLHRAIQITLSIQKEFGKLLKDFNKGLVNNKEIEQLKADVEKFSGSFDMPGFSLADMKYKD

SEQ ID NO: 79677 - DNA, 1398 bp, Bombyx mori
  CDS (1)..(1398)
atgagcgccaagttactaaatagcaacctctgggaggctgatcctgaacttttcgatattatcgtcaaagaaaaggaccgtcaacgagctggactagagatgatagcatcagaaaattttacatcagttcctgtacttcagtgcctgagttcatgtcttcataacaaatattctgaaggcatgcccaatcaacggtactatggggggaatgaatatattgatgaaatagagatactggcacagaacaggtctctggaagcatacagattaaaatcggaagaatggggcgtcaatgtacagccatattcaggctctccggcgaactttgccgtttataccggcattgtcgaaccccatggcaggataatggggttagatttacctgacggtggacatctcacccatggtttctttactgctactaaaaaaatatctgctacgtcaatattctttgaaagcatgccatataaggtagatcctaaaagcggattaattgattacgacaaactagcagaaacagcgaagttgttcaagcctcgtttgatcatcgctggcatgagctgttactcaagatgtctcgattataagaggttccgtgagatcgcagacgcaaatggagcttatctgatggctgatatggctcacgtatctggactggttgctgcaggtgtaataccgagcccgttcgaatactgcgatattgtgaccaccaccactcataagacgctgcgtggtcctcgtgccggtgtcatattcttccgcaagggcgtgaggtccgtcaaggcgaacggacagaaggtcatgtacgatttggaatcgaagataaaccaggctgtgttcccgggcctgcagggcggaccgcacaaccacgcaatagcggccatagccacggccatgaaacaagctacaactactgaattcgtcgaatatcagaaacaggtgataaagaacgcgcagcggttgtgcgagggtttaatatcgcgcgggtactctatagcgacgggcggcaccgacgtgcacctcgcgctcgtggatctgcgcggcgtcgggctgcggggcgcgccggccgagcgcgtgctcgagctctgcagcgtggcctgcaacaagaacaccgtgcccggcgacattagcgcgctcaaccccagcggcatcagactcggtacaccagcgttgaccacaagaggtctcaaggaagctgatattgataaagttgtcgattttattgatagagcattgaaaataggtctagaaatcattaaggtttccgggctgaaacttgttgacttcaataaagccattgaagaaaatgctgagttcaaaaagaaaattgaaaatctgaaggaagaagttgaaaactacagcaaatcattccctttgcctgggttcgataaatattaa

SEQ ID NO: 79678 - protein, 465 aa, Bombyx mori
MSAKLLNSNLWEADPELFDIIVKEKDRQRAGLEMIASENFTSVPVLQCLSSCLHNKYSEGMPNQRYYGGNEYIDEIEILAQNRSLEAYRLKSEEWGVNVQPYSGSPANFAVYTGIVEPHGRIMGLDLPDGGHLTHGFFTATKKISATSIFFESMPYKVDPKSGLIDYDKLAETAKLFKPRLIIAGMSCYSRCLDYKRFREIADANGAYLMADMAHVSGLVAAGVIPSPFEYCDIVTTTTHKTLRGPRAGVIFFRKGVRSVKANGQKVMYDLESKINQAVFPGLQGGPHNHAIAAIATAMKQATTTEFVEYQKQVIKNAQRLCEGLISRGYSIATGGTDVHLALVDLRGVGLRGAPAERVLELCSVACNKNTVPGDISALNPSGIRLGTPALTTRGLKEADIDKVVDFIDRALKIGLEIIKVSGLKLVDFNKAIEENAEFKKKIENLKEEVENYSKSFPLPGFDKY

SEQ ID NO: 79679 - DNA, 1803 bp, Oryza sativa (japonica cultivar-group)
  CDS (1)..(1803)
atggatctctcgcggccggaatcgtcggacctgtcgctgggtttccactcgctcggccacgcccgcgggcacgcggtcacggggccgctgcggctgttcgatgacatggaggacgccaagccggagaagagcgtcggtggcggcggaggaggagggggaggaggaggcgaggaggaggatggggaggaagggggcgaccagcacttctccctcctcggccacgcgctctgcgtcaagcgtccacgccgcgcgctctacggaggcggaggcggaggcggggcaggaggtggaggaggaggaggaggggaggcgtcctcctgctcgtcttcctcctcgtcgctgcacccggcgaagcggcaggcgacggcggagcgcggcgcggatctggaggcccgccgcggcgccgtccgcgcgtggggcaaccaggcgctggcggaggccgacccggacgtgcacgcgctgatggagctcgagcgcgaccgccaggtgcgcgggatcgagctgatcgcgtcggagaacttcgtctgccgcgcggtgctcgaggcgctcggcagccacctcaccaacaagtactctgagggccatcccggggctcggtactatggcgggaaccagcacatcgacggcatcgagcgcctctgccatgagcgcgccctcgccgccttcggtctcgaccccgcctgctggggggtcaacgtccagccatactcctgcacctctgcaaacctagctgtttacacaggtctcctcctgcccaaggaccgtatcatggggctcgagccgccttccggtggccatgtcagccacgggtactacacaccaagtggtaagaaggtgtctggagcatccatattcttcgagagcttgtcgtacaaggtgaatccgcagactgggtatattgattacgacaagcttgaggagcgggcaatggatttccaccctaagattctcatatgtggtgggagctcataccccagggagtgggattttgcacggatgaggctcattgctgataagtgcggtgcggtgctcatgtgcgatatggcacatatcagcgggcttgttgcggccaaggaatgccgtagtccctttgattactgtgatgtggttacatcaactactcacaagaatctgagaggtcctagaggtggtataatatttttcaggagagggaaaaacttaaggaggcgtactggatctttttctcaagcggatgagaatgattatgacttcgaggacaggataaattttgcagttttcccttcaatgcaaggaggaccccataataatcatattgcagccttggcgataactctgaagcaagtagcaacacctgaatacaaagcatacatcatacaagttaagaaaaatgcccaagctttggcatcagccttactcagaagaaaatgcagattggttactggtggcaccgataaccacttggtactttgggacctcagaaatttaggcttgactggaaagaactttgagaaggtctgtgaggcatgccacatctccataaataagatgccgatatatggggataatggctcaatatctcctgggggtgttcggattggaacacctgcaatgactactagaggttgcttggaagatgactttgaggtgatcgcagatttcctcatcagagccacccaaatagctagtaatcttatgaaagaacatggaaaaatgcagaaggaattcctgagaggcctacagaacaataaagatatcatagaactccgtaaccaggttgagaattttgcatcgcagtttgcaatgccaggttttgatgtatga

SEQ ID NO: 79680 - protein, 600 aa, Oryza sativa (japonica cultivar-group)
MDLSRPESSDLSLGFHSLGHARGHAVTGPLRLFDDMEDAKPEKSVGGGGGGGGGGGEEEDGEEGGDQHFSLLGHALCVKRPRRALYGGGGGGGAGGGGGGGGEASSCSSSSSSLHPAKRQATAERGADLEARRGAVRAWGNQALAEADPDVHALMELERDRQVRGIELIASENFVCRAVLEALGSHLTNKYSEGHPGARYYGGNQHIDGIERLCHERALAAFGLDPACWGVNVQPYSCTSANLAVYTGLLLPKDRIMGLEPPSGGHVSHGYYTPSGKKVSGASIFFESLSYKVNPQTGYIDYDKLEERAMDFHPKILICGGSSYPREWDFARMRLIADKCGAVLMCDMAHISGLVAAKECRSPFDYCDVVTSTTHKNLRGPRGGIIFFRRGKNLRRRTGSFSQADENDYDFEDRINFAVFPSMQGGPHNNHIAALAITLKQVATPEYKAYIIQVKKNAQALASALLRRKCRLVTGGTDNHLVLWDLRNLGLTGKNFEKVCEACHISINKMPIYGDNGSISPGGVRIGTPAMTTRGCLEDDFEVIADFLIRATQIASNLMKEHGKMQKEFLRGLQNNKDIIELRNQVENFASQFAMPGFDV

SEQ ID NO: 79681 - DNA, 1542 bp, Oryza sativa (japonica cultivar-group)
  CDS (1)..(1542)
atggccatggcgacggcgctccgcaagctctcctccgacgccctccgccgccagccgctctcccgcatcaccccgctctactacatggcgtccctgccggcgacggaggagagatccggagtcacctggccgaagcagctgaacgcgccgctggaggaggtggatcccgagatcgccgacatcatcgagcacgagaaggcccgccaatggaagggtctggagctcatcccgtcggagaacttcacctcggtgtcagtgatgcaggcggtgggatccgtcatgaccaacaagtacagcgaggggtaccccggcgcgagatactacggtggaaacgaatacattgatatggccgagtcattgtgccagaaacgtgctttggaggccttccgcttggacccagcgaaatggggagtgaatgtgcaacctctatcagggtcacctgccaacttccatgtttacactgccctattgaaaccacatgagagaatcatggctttggatcttcctcatggtggacatctttctcacggctaccagactgatactaagaagatttcagcagtttcgatattctttgagacaatgccctacagattggatgaaagcactggcttgattgattatgatcagatggagaaaagtgccgttctttttaggccaaagttgatcgttgcgggtgcaagtgcatatgcgcgtctttatgactatgaccgcatgcggaaggtttgtgacaagcagaaggcaatacttctagcagatatggcacatatcagtgggcttgtcgcagctggtgttgttccatctccttttgattatgcagatgtagtgactaccactactcacaagtcactccgtggaccacgtggagccatgatcttttacaggaagggggtgaaaggagtaaacaagcaaggcaaagaggttatgtatgactttgaggacaagatcaatgctgctgtcttcccaggtctgcaaggtggaccacataatcataccattactggcttagctgttgcgcttaagcaggcaactactccggagtacagagcttatcaagagcaagttatgagtaactgtgcaaaatttgcacagagcttgacagcaaaaggctacgaacttgtctctggtgggactgacaaccatttagtgttggtaaatctcaagagcaagggcatagatggttcaagagtggagaaggttttagaaaacgtgcacattgcagcaaacaagaacacagttcctggtgatgtttcagctatggtaccaggaggcatcaggatgggaaccccagcactgacctcaagaggatttgttgaggaggactttgctaaggttgctgatttcttcgatgcagcagtgaacttggctttgaaggttaaggctgcagcaggtggaacaaaactgaaggactttgttgccactttgcaatctgatagcaacattcaatccgagattgcaaaacttcgccatgatgtggaggaatatgcaaaacagttccccacaattgggtttgagaaagaaaccatgaagtacaagaactaa

SEQ ID NO: 79682 - protein, 513 aa, Oryza sativa (japonica cultivar-group)
MAMATALRKLSSDALRRQPLSRITPLYYMASLPATEERSGVTWPKQLNAPLEEVDPEIADIIEHEKARQWKGLELIPSENFTSVSVMQAVGSVMTNKYSEGYPGARYYGGNEYIDMAESLCQKRALEAFRLDPAKWGVNVQPLSGSPANFHVYTALLKPHERIMALDLPHGGHLSHGYQTDTKKISAVSIFFETMPYRLDESTGLIDYDQMEKSAVLFRPKLIVAGASAYARLYDYDRMRKVCDKQKAILLADMAHISGLVAAGVVPSPFDYADVVTTTTHKSLRGPRGAMIFYRKGVKGVNKQGKEVMYDFEDKINAAVFPGLQGGPHNHTITGLAVALKQATTPEYRAYQEQVMSNCAKFAQSLTAKGYELVSGGTDNHLVLVNLKSKGIDGSRVEKVLENVHIAANKNTVPGDVSAMVPGGIRMGTPALTSRGFVEEDFAKVADFFDAAVNLALKVKAAAGGTKLKDFVATLQSDSNIQSEIAKLRHDVEEYAKQFPTIGFEKETMKYKN

SEQ ID NO: 79683 - DNA, 1764 bp, Oryza sativa (japonica cultivar-group)
  CDS (1)..(1764)
atgctcgatcgcgcgacgggggggcggcgccgcgccgcgggcgaagggatggaccatcggcccgacctgtccctcgccctccacccgccgccgccgcccgagggctcgtccgccgccgccgccgaggaggtgggggaggaggaggccgaaggcggcgaggggcggttctccctcatgggccagccgctcttcctcaagcggccgcggccgcggcccccgcgcccgccccgcgcgcgcggggtgggggacgacgtcgacgtcgacgtcgacgacgactcatccccgtgctgctcctcctcctgcctctcgcccgcggcgaagcggcgggcggcggcgggaggactcgaggcgcgccgcgcggccgtgcgcgcgtggggatgccagccgctcacggaggcggacccggacgtgcacgagctgatggagcgggagcggcgccggcaggcgggcggggtcgagctcatcgcctccgagaactacgcctgccgcgcggtgctcgacgcgctcggcagccacctcaccaacaagtactccgagggcctccccggcgcgcgctactactgcggcaaccagcacatcgacgccatcgagcgcctctgctgcgaccgcgcgctcgccgccttcggcctcgacccgtcgcgctggggcgtcaacgtgcagccctactcctgcacctccgccaacttcgccgtctacacggggctcctcctccccaacgacaggatcatgggcctcgactcgccgtccggcggccacgtcagccacgggtactacacgcccagcggcaagaaggtctccggcgcctccatcttcttcgagaacctctcctacagggtgaacccgcacaccgggtacatcgattacgataaggtagaggagaaggccgtggatttccaccccaagattctcatctgcggcgcgagctcgtatccaagggattgggactatgcacggatgcggcttgttgctgataagtgcggcgcagtactcatgtgtgacatggcacaaatcagtggtcttgtggcagcgaaggaatgtcgaaatccctttgactactgcgatattgttacttcaaccacacacaagagcttgaggggtcctagaggtggtataatatttttcaggaaagggaaaaatctaaggaaacgggtcggatctttaactcaagtggttgaaaatgatcagtatgattttgaggaccgtataaattttgctgttttcccttcaatgcaaggtggaccccacaataaccatattgctgctctggctatagctctaaaacaagtagccatgccagaattcaaagcatacattcaacaagtcaagaaaaatgcccaagctttggcgatggccttgctcaggaggaaatgcagactggttactggtggcacagataatcatttgatgctctgggacctaagaacatttggcttgacagggaagaactttgagaaggtctgtgaggcatgtcatatctctcttaataaaacaccaatatatggagataatggttcgatttctcctggaggtgtgcggattggaactcctgccatgacaactagaggttgcttggagagtgactttgagataatggcagaattccttttgagggcagcacatatagcaagtattgttttgaaggagcatggaaggcttcagaaggattttctgaaaggtctggagaacaataatgacattattgaactccggaatcaggtggagacatttgccttacaatttgccatgccgggatttgatgtataa

SEQ ID NO: 79684 - protein, 587 aa, Oryza sativa (japonica cultivar-group)
MLDRATGGRRRAAGEGMDHRPDLSLALHPPPPPEGSSAAAAEEVGEEEAEGGEGRFSLMGQPLFLKRPRPRPPRPPRARGVGDDVDVDVDDDSSPCCSSSCLSPAAKRRAAAGGLEARRAAVRAWGCQPLTEADPDVHELMERERRRQAGGVELIASENYACRAVLDALGSHLTNKYSEGLPGARYYCGNQHIDAIERLCCDRALAAFGLDPSRWGVNVQPYSCTSANFAVYTGLLLPNDRIMGLDSPSGGHVSHGYYTPSGKKVSGASIFFENLSYRVNPHTGYIDYDKVEEKAVDFHPKILICGASSYPRDWDYARMRLVADKCGAVLMCDMAQISGLVAAKECRNPFDYCDIVTSTTHKSLRGPRGGIIFFRKGKNLRKRVGSLTQVVENDQYDFEDRINFAVFPSMQGGPHNNHIAALAIALKQVAMPEFKAYIQQVKKNAQALAMALLRRKCRLVTGGTDNHLMLWDLRTFGLTGKNFEKVCEACHISLNKTPIYGDNGSISPGGVRIGTPAMTTRGCLESDFEIMAEFLLRAAHIASIVLKEHGRLQKDFLKGLENNNDIIELRNQVETFALQFAMPGFDV

SEQ ID NO: 79685 - DNA, 1416 bp, Oryza sativa (japonica cultivar-group)
  CDS (1)..(1416)
atggactccgtcgcgtcgtgggggctgaccccgctcgccgcggccgacccgctcgtccacgacctcctcgagcgggagaagcggcggcagcggagcggcatcgagctcatcgcctcggagaacttcacctccttcgccgtcatggaggccctcggctccgcgctcaccaacaagtactccgaggggatgcccggggcgcgctactacggcgggaacgacgtcatcgacgagatcgagaacctgtgccgcgaccgcgccctcgccgcgttccgcctcgacgccgcgtcgtggggcgtcaacgtgcagccctactccggctcgccggccaccttcgccgcctacacggcgctcctcaacccgcacgaccgcatcatggggctcgacctcccctccggtggccacctcacccatggctactacaccgcgggcgggaagaagatctccgcgacgtcgatctacttcgagagcctcccctacaaggtgagcgccgccacggggtacatcgactacgagaagctggaggagaaggcgctcgacttccgccccaagctcatcatctgcggcggcagcgcgtacccgagggactgggactacgccaagctcagggccgtcgccgacaaggtcggggcgctgctcctctgcgacatggcgcacatcagcggcctcgtcgccgcgcaggaagctgcaaatccttttgagtactgtgatgtggttaccaccaccacgcacaagtccctccgaggaccaagagctggcatgatcttctacaggaagggccctaagcctcccaagaagggccagcctgagggtgctgtctatgactacgaggacaagatcaacttcgcagtgttcccgtcactgcaaggtggtcctcacaaccaccagattgcagcccttgctgttgctctgcagcaaaccatgacacctggattcaaggcctacgcaaagcaggtcaaggccaacgctgtcgccattggcaagtatcttatgagcaagggctacaaaatggtgactgatggaactgagaaccaccttgttctctgggatcttcgccctcttggcttgactggcaacaaggttgagaagatgtgtgacctttgcagcattacacttaacaagaatgctgtctttggtgacagcagtgcattggctcctggcggtgtccgcattggtactcctgcgatgacatccaggggtcttgtcgagaaggactttgagcagatcggcgagttcctccaccaggccgtgaccatctgcctcaacatccagaaggagcacggcaagctcctcaaggacttctccaagggcctggtgaacaacaaggacatcgagaacctcaagctggaggtcgagaagttcgccacctccttcgacatgcccggcttcaccctcgacagcatgaagtacaaggagtag

SEQ ID NO: 79686 - protein, 471 aa, Oryza sativa (japonica cultivar-group)
MDSVASWGLTPLAAADPLVHDLLEREKRRQRSGIELIASENFTSFAVMEALGSALTNKYSEGMPGARYYGGNDVIDEIENLCRDRALAAFRLDAASWGVNVQPYSGSPATFAAYTALLNPHDRIMGLDLPSGGHLTHGYYTAGGKKISATSIYFESLPYKVSAATGYIDYEKLEEKALDFRPKLIICGGSAYPRDWDYAKLRAVADKVGALLLCDMAHISGLVAAQEAANPFEYCDVVTTTTHKSLRGPRAGMIFYRKGPKPPKKGQPEGAVYDYEDKINFAVFPSLQGGPHNHQIAALAVALQQTMTPGFKAYAKQVKANAVAIGKYLMSKGYKMVTDGTENHLVLWDLRPLGLTGNKVEKMCDLCSITLNKNAVFGDSSALAPGGVRIGTPAMTSRGLVEKDFEQIGEFLHQAVTICLNIQKEHGKLLKDFSKGLVNNKDIENLKLEVEKFATSFDMPGFTLDSMKYKE

SEQ ID NO: 79687 - DNA, 1356 bp, Archaeoglobus fulgidus DSM 4304
  CDS (1)..(1356): transl_table=11
gtgtcaagaatttgcatatctctcgaagagatgaattccatgagggatgttcacggaagccttaaatatttttcatccgtagcagaggacatgaatccttcagacgtcttccaaatcatcgaagggcataccaaactgatgcgggactccataccgctgattgccagtgagaacttaacctccctctccgtgaggaggtgttacgtttccgatctcggccacaggtatgcggagggaagagtgggggagaggttctacgagggctgcaagtatgttgaccaaatcgagagcatggcgattgagttaacgagaaaaatatttgaggctgagcacgcaaacgtccagccaatttccggtgttgttgcgaacctcgcagcctttttcgctctgacaaatgttggagacaccattatgagcatctccgtcccttgtggcgggcacataagccacgatagggtttctgcggctggtttgagagggttgagggtgattcactatccctttaacagcgaggagatgagcgttgacgttgacgagacgagaaaggttgcagaaagggagaggccgaagctcttcatcctcggctcgtccctcatactcttcaggcagcctgtgaaggagattagggagattgcggacgaaattggcgcttacgtaatgtacgacgccagccacgttctcggactcattgccggaaaggccttccagaacccgctcaaggagggggcagacgtaatgaccggcagcacccacaagaccttcttcggcccacagagagcaataatcgccagcagaaaggagcttgccgagaaggttgacagggccgtatttccgggggtggtgagcaaccaccaccttaacacccttgcaggctatgttgttgccgcaatggaaatgctggagttcggtgaggattacgcaaagcaggtggttaggaatgcaaaggctctggcggaggagctttacagcctcggctacaaggttctcggagagaagagggggttcaccgaaacccatcaggtggccgttgacgtcagggagttcggaggtggggagagggtggcgaaagtcctcgaaaatgcaggaatcatacttaacaagaacctgctgccttgggactccctcgaaaagaccgcaaatccgtcgggaataagaattggagtgcaggaggtaacgagaattggaatgaaggaggaagagatgagggcgattgcagaaatcatggatgcggcgataaaggagaaaaaatccgtcgatgagcttaggaacgaggttaaggagcttaaagagaggtttaacgttataaagtatagttttgacgagagcgaagcttaccacttccccgatttgagatga

SEQ ID NO: 79688 - protein, 451 aa, Archaeoglobus fulgidus DSM 4304
MSRICISLEEMNSMRDVHGSLKYFSSVAEDMNPSDVFQIIEGHTKLMRDSIPLIASENLTSLSVRRCYVSDLGHRYAEGRVGERFYEGCKYVDQIESMAIELTRKIFEAEHANVQPISGVVANLAAFFALTNVGDTIMSISVPCGGHISHDRVSAAGLRGLRVIHYPFNSEEMSVDVDETRKVAERERPKLFILGSSLILFRQPVKEIREIADEIGAYVMYDASHVLGLIAGKAFQNPLKEGADVMTGSTHKTFFGPQRAIIASRKELAEKVDRAVFPGVVSNHHLNTLAGYVVAAMEMLEFGEDYAKQVVRNAKALAEELYSLGYKVLGEKRGFTETHQVAVDVREFGGGERVAKVLENAGIILNKNLLPWDSLEKTANPSGIRIGVQEVTRIGMKEEEMRAIAEIMDAAIKEKKSVDELRNEVKELKERFNVIKYSFDESEAYHFPDLR

SEQ ID NO: 79689 - DNA, 1800 bp, Arabidopsis thaliana
  CDS (1)..(1800)
atggaccgtatagctcaatcagatctctctttaggattcggtagctcccacgctttacctctacctcatcctcctagaatcccaatcgctgatgactcaatcacgcttcagattgattccagcttccgtccttcgtctaatcctatgcctcctgttcctcttcagttacttgagcagagattcgatgtcaccggatcctgtagccgagttgttgaggaggacgatgaggttgttggtgataatgatgatgatgatcaaagagaagaggagcaatttattctcttgggtcatcctatgaagttgaaacgaggtagaggtgggaattcgtattcattggcatcatcaagtccttgtaagagatttgtagttgattcagggattgaaagtaggcgagctgttgttagagcttggggtaatcagtcgattgaagaagctgatcctgagattcatgagtttatggaaaaggagaagcagagacaatttagaggtattgagcttatagcttctgagaatttcgtgtgtagagctgtgatggaagctttaggaagtcatttgactaataagtactctgaaggaatgcctggagctagatactatacggggaatcagtatattgatcagattgagattctttgccaagagcgtgcgcttgcagcttttggactaaatcatgagaaatggggagttaatgtgcagccttattcgtgcacttctgccaatttcgctgttttcactggtcttttgatgcccggtgaacgaattatgggattggattctccctcaggtggtcatatgagtcatgggtattatacaccaggtgggaagaaagtctctggtgcgtctatattctttgagagctttccatataaggttgaccctcgtacagggtatattgattacgataagcttgaggaaaaggcgcttgactatcgtcctaagatacttatttgtggtgggagttcatatccgagggactgggaattccctaggtttaggcatattgcagacaaatgtggagctgttttgatgtttgacatggcacagattagtggtcttgtcgctgccaaggaaagtccaaatccattcgattattgcgatattgttacctcaacaacacacaagtctctccgtggccctaggggcggcatcatattttacaagagaggcttgaagcccaagaagcaaagcataaatcttaatcactgtgagagcaatatccagtatgattttgaagaaaaaatcaacttttctgtctttccatcgttgcaaggggggcctcacaataaccatatagctgctctagccattgccctcaagcaggccgcttcaccagagtacaagctttacatgcgacaggtcaaaaaaaatgctaaggctttagcatctgctttgataagcagaaagtgcaagctgataacaggtggcaccgataatcatttgcttctctgggatctgactcctttgggcttgacaggcaaggtgtatgagaaagtttgcgagatgtgccatatcacggtcaacaaagtggccattttcagcgaaaacggtgttatttcccctggaggagtgagaataggcagtccggctatgacctcaagaggttgtttagaaccagaatttgagacaatggctgattttctatatagagctgctcagatagctagtgctgcacaaagggaacacgggaagttgcaaaaggaaccgctcaaaagcatctatcactgtaaagagattgcagatcttcggaaccaagtcgaagcttttgctactcagtttgcaatgcctgcctttgacatgtga

SEQ ID NO: 79690 - protein, 599 aa, Arabidopsis thaliana
MDRIAQSDLSLGFGSSHALPLPHPPRIPIADDSITLQIDSSFRPSSNPMPPVPLQLLEQRFDVTGSCSRVVEEDDEVVGDNDDDDQREEEQFILLGHPMKLKRGRGGNSYSLASSSPCKRFVVDSGIESRRAVVRAWGNQSIEEADPEIHEFMEKEKQRQFRGIELIASENFVCRAVMEALGSHLTNKYSEGMPGARYYTGNQYIDQIEILCQERALAAFGLNHEKWGVNVQPYSCTSANFAVFTGLLMPGERIMGLDSPSGGHMSHGYYTPGGKKVSGASIFFESFPYKVDPRTGYIDYDKLEEKALDYRPKILICGGSSYPRDWEFPRFRHIADKCGAVLMFDMAQISGLVAAKESPNPFDYCDIVTSTTHKSLRGPRGGIIFYKRGLKPKKQSINLNHCESNIQYDFEEKINFSVFPSLQGGPHNNHIAALAIALKQAASPEYKLYMRQVKKNAKALASALISRKCKLITGGTDNHLLLWDLTPLGLTGKVYEKVCEMCHITVNKVAIFSENGVISPGGVRIGSPAMTSRGCLEPEFETMADFLYRAAQIASAAQREHGKLQKEPLKSIYHCKEIADLRNQVEAFATQFAMPAFDM

SEQ ID NO: 79691 - DNA, 1413 bp, Arabidopsis thaliana
  CDS (1)..(1413)
atggaaccagtctattcttggggaaacacgcatcttgacttcgtcgatccggagatctacgacctaatcgagaaggagaaacatcgtcaatgtcgaggaatcgaactcatagcagccgagaatttcacttccgtggccgtcatggaagctctcggaagttgcttaaccaacaaatactcggaaggtatgcctggtaatcgttactacggaggtaccgagttcatcgatgagatagagagtctctgccgctcacgctctctcgaagccttccattgcaatccagagaaatggggcgttaacgttcagccttactctggttcccctgcgaatttcgcagcctacaccgccttgctccagcctcatgatcgtatcatggggcttgatttgccatcaggtggtcatataacgcatggttactatagctctggtgggaagaacatctccgcgacctcgatctactttgaaaaccttccctacaaggtggattccaagactggttacattgattacgacaaacttgaggagaaagctatggattttaggcctaagttaattatctgtggaggcacttcttaccctagggaatgggattacgcgagattcagggctgtcgccgacaaggttggagcttttttgctctgtgatatggctcataacagtgccctcgttgctgctcaggaagccgcagacccgttcgagtactgtgacgttgtgacaacgtcaactcacaagagcttgagaggtccaagggctggtatgatcttttatagaaagggaccaaaaccagccaagaagggccaacccgagggtgaagtctacgatttcgacgcaaaaatcaactctgcggtattccctgcgcttcaaagtggtcctcacaataacaagattggtgctctagctgttgcgttgaagcaggttatggctcctagcttcaaagtttatgcaaaacaggtgaaagctaatgctgcttgccttgcaagctacctaataaataagggatatactcttgtaaccgatggaactgataaccaccttattctttgggatcttcgccctcttggattgaccggtaacaaggttgagaaggtttgtgaattgtgctacattactttgaacaggaatgcggtattcggagacactagttttcttgctcccggaggtgtaagaatcggtacaccggcgatgacatcgagaggattggtggagaaggactttgagaagataggagagttcctgcaccgtgccgtgacaatcacgttggacatccaggagcagtacggtaaggtgatgaaggacttcaacaagggtttggtgaacaacaaggagatcgatgagataaaggctgacgttgaggagttcacgtacgattttgatatgcctggatttttcatctctgagtcaaggaacgattag

SEQ ID NO: 79692 - protein, 470 aa, Arabidopsis thaliana
MEPVYSWGNTHLDFVDPEIYDLIEKEKHRQCRGIELIAAENFTSVAVMEALGSCLTNKYSEGMPGNRYYGGTEFIDEIESLCRSRSLEAFHCNPEKWGVNVQPYSGSPANFAAYTALLQPHDRIMGLDLPSGGHITHGYYSSGGKNISATSIYFENLPYKVDSKTGYIDYDKLEEKAMDFRPKLIICGGTSYPREWDYARFRAVADKVGAFLLCDMAHNSALVAAQEAADPFEYCDVVTTSTHKSLRGPRAGMIFYRKGPKPAKKGQPEGEVYDFDAKINSAVFPALQSGPHNNKIGALAVALKQVMAPSFKVYAKQVKANAACLASYLINKGYTLVTDGTDNHLILWDLRPLGLTGNKVEKVCELCYITLNRNAVFGDTSFLAPGGVRIGTPAMTSRGLVEKDFEKIGEFLHRAVTITLDIQEQYGKVMKDFNKGLVNNKEIDEIKADVEEFTYDFDMPGFFISESRND

SEQ ID NO: 79693 - DNA, 1416 bp, Arabidopsis thaliana
  CDS (1)..(1416)
atggaaccagtctcttcatggggtaacacctctctcgtctccgtagatccagagatccacgacctaatcgagaaggagaaacgtcggcaatgtcgaggaatcgaacttatcgcttccgagaatttcacttccttcgccgtcatcgaagctctcggaagtgccttaaccaacaaatactccgaaggtattcctggtaatcgttattacggaggtaacgaattcatcgatgagatcgagaatctttgccgttcaagagctctcgaagctttccattgtgatccagcagcgtggggcgttaatgttcagccgtattctggatctccggcaaatttcgctgcttacacggctttgcttcagcctcacgatcgtatcatggggcttgatttgccttcaggtggtcatttgactcatggttactatacatctggtggtaagaagatctctgcgacttcgatctactttgagagtcttccgtataaggtgaatttcaccactggttacattgattacgataagcttgaagagaaggcgttggatttcaggcctaagttgcttatctgtggtggtagtgcgtatcctagggattgggattacgctagatttagagctattgctgataaggttggagctcttttgctttgtgacatggctcacatcagtggtctcgttgctgctcaggaagctgcaaacccatttgagtactgtgacgttgtgacaaccacaacccacaagagtttgaggggtccaagggctggtatgattttctacaggaagggtccaaaaccaccaaagaagggtcaacccgagggtgcagtctatgattttgaggacaaaatcaactttgctgtattccctgcgcttcaaggtggtcctcacaatcaccagattggtgctctagctgttgcgttgaagcaggctaatactcctgggttcaaggtctacgcaaaacaagtgaaagccaatgctgttgcccttggaaactacctaatgagcaagggttaccagattgtgaccaatggaactgagaaccaccttgttctctgggatcttcgccctcttggattgaccggaaacaaggttgagaagctctgcgatctgtgcagcattacattgaacaagaacgcagtatttggagacagtagtgctcttgctcctggaggtgtaagaatcggtgcacccgcgatgacatcgagaggattggtggagaaggactttgagcagataggagaattcctgagccgtgcagtgacactgacgttggacatccaaaagacatacggtaagttgttgaaggacttcaacaagggtttggtgaacaacaaagatctcgatcagctcaaggctgatgtcgagaagttctcggcgtcttatgagatgcctggattcctcatgtctgagatgaagtacaaggattag

SEQ ID NO: 79694 - protein, 471 aa, Arabidopsis thaliana
MEPVSSWGNTSLVSVDPEIHDLIEKEKRRQCRGIELIASENFTSFAVIEALGSALTNKYSEGIPGNRYYGGNEFIDEIENLCRSRALEAFHCDPAAWGVNVQPYSGSPANFAAYTALLQPHDRIMGLDLPSGGHLTHGYYTSGGKKISATSIYFESLPYKVNFTTGYIDYDKLEEKALDFRPKLLICGGSAYPRDWDYARFRAIADKVGALLLCDMAHISGLVAAQEAANPFEYCDVVTTTTHKSLRGPRAGMIFYRKGPKPPKKGQPEGAVYDFEDKINFAVFPALQGGPHNHQIGALAVALKQANTPGFKVYAKQVKANAVALGNYLMSKGYQIVTNGTENHLVLWDLRPLGLTGNKVEKLCDLCSITLNKNAVFGDSSALAPGGVRIGAPAMTSRGLVEKDFEQIGEFLSRAVTLTLDIQKTYGKLLKDFNKGLVNNKDLDQLKADVEKFSASYEMPGFLMSEMKYKD

SEQ ID NO: 79695 - DNA, 1308 bp, Vibrio cholerae O1 biovar eltor str. N16961
  CDS (1)..(1308): transl_table=11
gtggagtcattgtgtggtttttttgcaatttcagtcaatctgagtcaggagatacagatgcttaagcgtgatatgaacatcgctgattacgatccggagctatacgctgccattcaggaagagacgcttcgtcaagaagaacatattgaacttattgcttcagaaaactacaccagcccgcgtgtaatgcaagcacaaggttctcaactgaccaacaagtacgccgaaggttatccaggtaagcgttactatggtggttgtgagtacgtggacaaagcagaagctttagcgattgatcgtgcttgccaactgtttggctgtgaatacgcgaacgttcagccgcactctggatctcaagcgaacagcgctgtgtacatggcgctgctcaacccaggtgacaccgtgctaggtatgagccttgctcacggtggtcatttgactcacggttcaccggttaacttctcgggtaagcactacaatgtgatcccttacggtatcgatgaagcgggtcaaattaactacgatgaaatggaagccttagcactggagcataagccaaagatgatcatcggtggcttctcggcttactcacaaatcgtggattggaaacgcatgcgtgaaatcgccgataaagtgggtgcttacctgtttgttgacatggcgcacgttgcgggtctgattgcggcgggtgtttacccaagcccagtgccttttgcacacgttgtcacgaccaccacgcataaaacactggcaggtccacgcggtggcttgatcttgtcaaatgccggtgaggagatgtacaagaagctgaactctgcagtattccctggcggccaaggcggtcctttgatgcacgtgattgcggctaaagcggtggcgttcaaagaagcaatggagcctgagtttaaagagtatcaagcgcgtgtggtgaaaaacgccaaagccatggtggcgcagttccaagaacgtggttacaagatcgtctctaacagcacggaaaaccatttgttccttgttgatctgattgataaaaacatcacaggtaaagaagctgatgccgctctgggcgctgccaatatcacggttaacaagaactcggtaccaaatgacccacgcagcccgtttgtgacttcaggtatccgtgtcggtacaccagcaatcactcgccgtggttttaccgagcaagacgcaaaagatctcgccaactggatgtgtgatgttctagacaacatcaatgatcaaggtgtgattgaagcgacgaaacaaaaagtattggcgatctgtcaacgtctgcctgtttacgcttaa

SEQ ID NO: 79696 - protein, 435 aa, Vibrio cholerae O1 biovar eltor str. N16961
MESLCGFFAISVNLSQEIQMLKRDMNIADYDPELYAAIQEETLRQEEHIELIASENYTSPRVMQAQGSQLTNKYAEGYPGKRYYGGCEYVDKAEALAIDRACQLFGCEYANVQPHSGSQANSAVYMALLNPGDTVLGMSLAHGGHLTHGSPVNFSGKHYNVIPYGIDEAGQINYDEMEALALEHKPKMIIGGFSAYSQIVDWKRMREIADKVGAYLFVDMAHVAGLIAAGVYPSPVPFAHVVTTTTHKTLAGPRGGLILSNAGEEMYKKLNSAVFPGGQGGPLMHVIAAKAVAFKEAMEPEFKEYQARVVKNAKAMVAQFQERGYKIVSNSTENHLFLVDLIDKNITGKEADAALGAANITVNKNSVPNDPRSPFVTSGIRVGTPAITRRGFTEQDAKDLANWMCDVLDNINDQGVIEATKQKVLAICQRLPVYA

SEQ ID NO: 79697 - DNA, 1287 bp, Methanothermobacter thermautotrophicus str. Delta H
  CDS (1)..(1287): transl_table=11
ttggagatgattttcatggtcagcaatcaggattataccgagaagatcagacagcttatgaaggaccataacagctggatggagtcaagcattaacctcatagcaagtgaaaacataacgagttcacgggtgaaggaggcactcctctcggatctatcccaccgatatgcagagggcctccccggtgaaagactctatgagggatgcaggtacatcgacgagattgaagagttaacaattgaactttcaaagaggctcttcagggcggaacatgcgaacgtccagccaacatcaggtgtcgtggcaaacctcgcctgtttcttcgccacagcagaggtgggcgaccccataatggccatggaggtcccctacggaggacacatatcccatgccagggtcagcgcagccggtgtaaggggtttccagatatacacacacccctttgactttgagaacatgaacatagacgccgatgcaatgaagaagaagatactggaggttaaaccaaggataatactcttcggcggaagcctcttcctcttccctcaccctgtggaggaggctcttgaggccgccgaggaggtgggggcaaggataatgtacgatggtgcccacgtcctgggcctcattgcagggggctacttccaggacccactacgtgagggcgccgacatgcttgttggaagcacccacaagaccttcccgggcccacagggcggtataatcctctgcagggaggaacttgcagctgacatagatgaggcggtgttccccggacttgtgagcaaccaccacctccaccacgtggccggccttgggatagcaacggcagagatgctggaatttggagctgaatatgcagcccagacaatcaataatgccaggaaactcgctgaaaacctccatgaactcggattcaacgtgttatgtgagcaccttgacttcacagagtcccaccaggtggtgatggacgtctctgatattggaagggcagcagagatctcaaagaggctcgaggccaacaacataatactcaacaagaacctcctcccatgggatgatgtgaacaggtcagatgacccatcagggatacgcataggtacacaggagataacaaggaggggcatgaaggagtcagagatgtcagaggttgcagagtacatcaagagagttgttatggacggaaaggatgtcagggacgaggttgcagagttcatgtcatcatatacccgggtccactacgcctttgaggactcggaggcctacaagtacatggagatccagtag

SEQ ID NO: 79698 - protein, 428 aa, Methanothermobacter thermautotrophicus str. Delta H
MEMIFMVSNQDYTEKIRQLMKDHNSWMESSINLIASENITSSRVKEALLSDLSHRYAEGLPGERLYEGCRYIDEIEELTIELSKRLFRAEHANVQPTSGVVANLACFFATAEVGDPIMAMEVPYGGHISHARVSAAGVRGFQIYTHPFDFENMNIDADAMKKKILEVKPRIILFGGSLFLFPHPVEEALEAAEEVGARIMYDGAHVLGLIAGGYFQDPLREGADMLVGSTHKTFPGPQGGIILCREELAADIDEAVFPGLVSNHHLHHVAGLGIATAEMLEFGAEYAAQTINNARKLAENLHELGFNVLCEHLDFTESHQVVMDVSDIGRAAEISKRLEANNIILNKNLLPWDDVNRSDDPSGIRIGTQEITRRGMKESEMSEVAEYIKRVVMDGKDVRDEVAEFMSSYTRVHYAFEDSEAYKYMEIQ

SEQ ID NO: 79699 - DNA, 1275 bp, Halobacterium sp. NRC-1
  CDS (1)..(1275): transl_table=11
atggcccgtgcgccaccccctgagagtatggcttacgacgaggttcgggaggtcgacccggaggtcgccgacgcgctcaccggcgagcgccaccggcaaaacgacacgctcgcgatgatcgccagcgagaaccacgtcagcgaggcggtcatggaagcccaatccagcgagctcacgaacaagtacgccgaggggtatccggggtcgcgatactacggcggctgcgagtacgccgacgacgtcgaggagctcgccgtcgcgcgcgccaaggagctgttcggggccgatcacgtgaacgtccagccccacagcgggtcgtcggcgaacatgggcgtctacttcgccacgcttgcgcccggcgacaagatcctctcgctggatctcacccacggcggccacctgagccacggccaccccgcgaacttcgcgggccagctctacgaggtcgagcagtacgaggtcgacgccgagacggggcgcctcgactacgaggcgctgcgcgagcacgccgacgcgttcgagccggacatgatcgtctccgggttctcggcgtacccccgggaggtcgagtgggagcgcatccaggcggccgccgacgccgtcggcgcgctgcacatggccgacatcgcgcacatcacgggcctggtggcggcgggcgaacacgcctccccggtcggcgtcgcggatttcgtcaccggatcgacgcacaagaccatccgggcgggccgcggcgggatcgtgatgtgcgacgaggcgttcgccgacgacatcgattcggcggtgttcccgggcgcgcagggcggccccctgatgcacaacatcgccgggaaggccgtggggttcaacgaggcgctcgacccggcgttcgaggagtacgccgcgcaggtcgtggagaacgccgccgttctcggcgagcgcctccaggagcacggcttctcgctggtctccgggggcaccgacacacatctggtgctcgtcgacctccgcgagtcacaccccgacatctccggcggggacgtggagggcgaactggaggacgtcggcatcgtactgaacgcgaacacggtgcccgacgagacgcggtcggcgttcgacccctccgggatccgcatcggcacgccggcgctgacgacccgtggcttcgacgccgacgcgatggagacggttgcggactgcatcgcgcgcgtcatcgacaacctcggcgacgagtcggtgtacgccgatgtcgccgacaccgttgcggacctctgcgagcagtacccgcagtacgagtga

SEQ ID NO: 79700 - protein, 424 aa, Halobacterium sp. NRC-1
MARAPPPESMAYDEVREVDPEVADALTGERHRQNDTLAMIASENHVSEAVMEAQSSELTNKYAEGYPGSRYYGGCEYADDVEELAVARAKELFGADHVNVQPHSGSSANMGVYFATLAPGDKILSLDLTHGGHLSHGHPANFAGQLYEVEQYEVDAETGRLDYEALREHADAFEPDMIVSGFSAYPREVEWERIQAAADAVGALHMADIAHITGLVAAGEHASPVGVADFVTGSTHKTIRAGRGGIVMCDEAFADDIDSAVFPGAQGGPLMHNIAGKAVGFNEALDPAFEEYAAQVVENAAVLGERLQEHGFSLVSGGTDTHLVLVDLRESHPDISGGDVEGELEDVGIVLNANTVPDETRSAFDPSGIRIGTPALTTRGFDADAMETVADCIARVIDNLGDESVYADVADTVADLCEQYPQYE

SEQ ID NO: 79701 - DNA, 1311 bp, Deinococcus radiodurans R1
  CDS (1)..(1311): transl_table=11
gtgcccggcgttgccgtaagtagagggccgttctttctggacaccccacagtcagctgggggccgcaggctttaccatctgttcatgaccactgccgaccagcctcaggccgtccgcgacgacgcggtcttcgacctgattgcccaggaagccgagcgccagcgcaccggccttgagctgattgcctccgagaacttcacctccgccgccgtgcgcgaggcccagggcagcgtgctgaccaacaagtacgccgagggctaccccggcaagcgctggtacggcggctgtgaagtggtggatcaggtggagcagctcgccatcgaccgcgtcaagcagctctttaacgccgagtgggccaacgtgcagccgcactcgggctcgagcgccaacctcgcggtgtacaacgccctgattcagcccggcgacacggtgctcggcatggacctttcgcacggcgggcacctgacacacggcaacaaggccaacttctcggggatgcgctaccagatggtcgcttaccagcttgaccgcgaaaccgagcgcatcgacatggaagaagtgcgccgcctcgcccacgagcacaagcccaagatgattattgccggggcgagcgcctacagccgcgtcatcgactttgccgccttccgcgaaattgccgatgaggtgggcgccctgctcttcgccgacatcgcccacatcgcgggcctgatcgcggcaggcgaacaccccaacgcgctgccgcacgcgcacgtcgtcgcctcgaccacccacaagaccctgcgcgggccacgcggcggcatcatcctggcgaacgaccccgaaatcgccaagcagctcgaccgcacggtgtttcccggctaccagggcggccccctcgaacacgtcatcgcggccaaggcggtggccttcggtgaggcgctgcgtcccgagttcaaggactatgcccggcagatcatcaagaatgcccaggcgctggcgggcgagttccagcaaaagggctaccgcgtcgtctcgggcggcaccgacaaccacctttttctgctcgacctgcgcccccaggggctgaacggcaccaaggcgacgcggctgctcgacgccaaccacatcaccatttccaagtccaccctgccctacgacaccgagaaaatcctgcacggcggcggcatccgcatcggcacgcccgccgtcaccacgcgcggcatgaccgaagcgcacatgacgcaggtggccgacctgattgaccgtgccctgaaaggcgaggacgtgcaggccaaggtccacgactttgccggtggcttcccactgccctga

SEQ ID NO: 79702 - protein, 436 aa, Deinococcus radiodurans R1
MPGVAVSRGPFFLDTPQSAGGRRLYHLFMTTADQPQAVRDDAVFDLIAQEAERQRTGLELIASENFTSAAVREAQGSVLTNKYAEGYPGKRWYGGCEVVDQVEQLAIDRVKQLFNAEWANVQPHSGSSANLAVYNALIQPGDTVLGMDLSHGGHLTHGNKANFSGMRYQMVAYQLDRETERIDMEEVRRLAHEHKPKMIIAGASAYSRVIDFAAFREIADEVGALLFADIAHIAGLIAAGEHPNALPHAHVVASTTHKTLRGPRGGIILANDPEIAKQLDRTVFPGYQGGPLEHVIAAKAVAFGEALRPEFKDYARQIIKNAQALAGEFQQKGYRVVSGGTDNHLFLLDLRPQGLNGTKATRLLDANHITISKSTLPYDTEKILHGGGIRIGTPAVTTRGMTEAHMTQVADLIDRALKGEDVQAKVHDFAGGFPLP

SEQ ID NO: 79703 - DNA, 1275 bp, Xylella fastidiosa 9a5c
  CDS (1)..(1275): transl_table=11
gtgtttttttccggagttgctatgttcccgcgtgatgctcgtcttgatatgtacgatcccgaattggctaaggctattgctgctgaagtgatgcgtcaggaggatcacgttgagttgattgccagtgaaaattattgcagtacgttggtgatgcaggtgcaggggagtcagctgaccaataagtatgctgaagggtattctggaaagcgttactacggtggttgtgagtgtgtcgatatcgctgagcaattggcgattgagcgtgccaaacagctgtttggtgctgactatgccaatgtgcagccccatagcggttcacaagccaatcaagcggtgtactttgccctgttgcagccgggcgatacgattctcgggatgagcttggcgcatggcggccatttgactcatggcgctaatgtcaatgtgtctggcaagttgttcaatgcggttcagtacggagtcaatggtcaagggttgattgattacgaggctgttgaatcgcttgcgttagagcatcggccgaagatggttgtggcgggcttttcggcgtattcgcagaaaatcgattgggcgcgcttccgcgccattgctgatcaggtgggcgcttacttgcttgtggatatggcacatgtggccggcttggtggcggcttgtgtctatccgaatccgctgccgcatgctcatgttgtgacttcgacgacgcataagacactgcgcggcccacgtggcggcattattgtggcgcaggcaccacaggaggcgttggttaagaagttgcagtcgattgtgtttcctgggatccagggtggtccattgatgcatgtgattgcggctaaagcggttgcttttaaggaagcgctggagcctgcgtttaaggtgtatcagcagcaggtggtgaagaatgcgaaggcgatggctgagaccctcatgttacgtggctataagattgtctctggtggtacagaaaatcatttgatgctggttgacatgatcggcagggatgtttccgggaaggatgctgagggtgcactgggtcaggctcatatcaccgtcaataagaatgccgtgccagatgatccgcgctctccgttcgtaacctctgggttacgcttggggactccggcagtcacgacgcggggttaccaggagcaggattgtgtggacttagcgcactggattgctgatgtgcttgacgcgcctgcggatgcgacggtcattgccgcagtccgtgagaaggttgcggcgcagtgcaggaagtatcctgtgtatcgctga

SEQ ID NO: 79704 - protein, 424 aa, Xylella fastidiosa 9a5c
MFFSGVAMFPRDARLDMYDPELAKAIAAEVMRQEDHVELIASENYCSTLVMQVQGSQLTNKYAEGYSGKRYYGGCECVDIAEQLAIERAKQLFGADYANVQPHSGSQANQAVYFALLQPGDTILGMSLAHGGHLTHGANVNVSGKLFNAVQYGVNGQGLIDYEAVESLALEHRPKMVVAGFSAYSQKIDWARFRAIADQVGAYLLVDMAHVAGLVAACVYPNPLPHAHVVTSTTHKTLRGPRGGIIVAQAPQEALVKKLQSIVFPGIQGGPLMHVIAAKAVAFKEALEPAFKVYQQQVVKNAKAMAETLMLRGYKIVSGGTENHLMLVDMIGRDVSGKDAEGALGQAHITVNKNAVPDDPRSPFVTSGLRLGTPAVTTRGYQEQDCVDLAHWIADVLDAPADATVIAAVREKVAAQCRKYPVYR

SEQ ID NO: 79705 - DNA, 1560 bp, Chlamydophila pneumoniae J138
  CDS (1)..(1560): transl_table=11
ttgctaaaagtttttgagaaatttaagaaattcgcaatagtggaaatatttacaaaggtggttgcggtggtttcgttgttgcataagtttttagaaaatgcttcggggaaaaagggacaaagtttagcttcgacagcgtatttagcagctcttgaccatctcttaaatgcgtttccttccattggggagagaatcattgatgagttgaagagccagcgttcccatttaaagatgattgcttctgaaaactattcttcactttcagtgcagttggctatggggaacttgctcacagataagtattgtgaaggaagtccctttaagcgtttctattcctgttgtgaaaatgtagatgctattgagtgggagtgtgtagagacagcgaaagaactttttgctgcggattgcgcttgtgttcagcctcattctggggctgatgctaatttactggcagtaatggccattctcacgcacaaagtccaaggcccagctgtcagtaagttaggttataaaactgtaaacgaattaacagaagaagaatacactctacttaaggctgaaatgtcttcttgtgtttgcttaggaccttcattaaattctggaggccatttgacccatgggaacgtacgtttaaatgtgatgtctaagcttatgcgttgcttcccctatgatgtcaatccggatacggagtgttttgattatgcagagatctcccggttagctaaggagtataaacctaaggtactgatcgcaggatattcttcctattctcgaagattaaactttgcagttttaaaacagattgcagaggattgtggatctgtcttgtgggtagatatggcgcattttgcaggcctagttgctgggggagtgtttgttgatgaagaaaatcctattccttatgcagatatagtgacaacaacaacgcataagacattacgcggtcctcgcgggggattagttttggcaactcgagagtatgaaagcactctcaataaggcgtgtcctttgatgatgggaggtcctctacctcacgtgatagctgctaaaacagtggctttgaaggaagctctctctgtggatttcaagaaatacgctcatcaggttgtaaataatgctcgtcgattagcagagagatttttaagtcatgggctacgtcttttgacgggaggaacagacaaccacatgatggtgattgatttaggttctttgggcatttctggaaaaattgctgaagatatcttgagttccgtaggaattgctgtgaatcggaattcattaccttcagatgctattggtaagtgggacacttcaggtatacgtttaggaacccctgcactaacgactttgggtatgggtatcgatgaaatggaagaagttgcagatattattgtgaaagtattgcgaaatattcgtttaagttgccatgttgaagggagttctaagaaaaataaaggggaacttcctgaagccatagcgcaggaagctagagatcgtgttcgcaacttgttgctgcgtttcccgctctaccctgaaattgatttagaagctttagtttag

SEQ ID NO: 79706 - protein, 519 aa, Chlamydophila pneumoniae J138
MLKVFEKFKKFAIVEIFTKVVAVVSLLHKFLENASGKKGQSLASTAYLAALDHLLNAFPSIGERIIDELKSQRSHLKMIASENYSSLSVQLAMGNLLTDKYCEGSPFKRFYSCCENVDAIEWECVETAKELFAADCACVQPHSGADANLLAVMAILTHKVQGPAVSKLGYKTVNELTEEEYTLLKAEMSSCVCLGPSLNSGGHLTHGNVRLNVMSKLMRCFPYDVNPDTECFDYAEISRLAKEYKPKVLIAGYSSYSRRLNFAVLKQIAEDCGSVLWVDMAHFAGLVAGGVFVDEENPIPYADIVTTTTHKTLRGPRGGLVLATREYESTLNKACPLMMGGPLPHVIAAKTVALKEALSVDFKKYAHQVVNNARRLAERFLSHGLRLLTGGTDNHMMVIDLGSLGISGKIAEDILSSVGIAVNRNSLPSDAIGKWDTSGIRLGTPALTTLGMGIDEMEEVADIIVKVLRNIRLSCHVEGSSKKNKGELPEAIAQEARDRVRNLLLRFPLYPEIDLEALV

SEQ ID NO: 79707 - DNA, 1476 bp, Agrobacterium tumefaciens str. C58
  CDS (1)..(1476): transl_table=11
gtgtggcttggccgcgcatcatcgaagcgccgcctttattttccgtcgtatcctgtttttcataaaaacatctgtcacttttcgccgcaacgtcgcagtttgacgggcaaatctcgctggccgtattgctcttgttcgggcagggcgctaagacgccatcgcattactgtttcaggagccttcaccatgtcgaacacagatgctttcttctcccgtccgcttgccgaagtcgatccggatattttcggcgcgatcgagaaggaactgggtcgccagcgccacgagatcgaactgatcgcctcggaaaacatcgtttcccgcgctgtgcttgaagcgcagggttcgatcatgaccaacaaatatgcggaaggttatccgggcaagcgttattacggcggctgccagttcgtcgatatcgctgaagagcttgccatcgagcgcgccaagaagctgttcggcgtcaacttcgccaacgttcagccgaactccggttcgcagatgaatcaggccgtgttcctcgcgcttttgcagccgggcgataccttcatgggtctcgatctgaactcggggggccacctgacgcatggttcgccggtcaacatgtccggtaaatggttcaacgtcgtgtcctacggcgtgcgtgaaggcgacaacctgctcgacatggacgaagtggagcgcaaggccaaggaaacccggccgaagctgatccttgccggcggcaccgcctattcgcgcgtctgggactggaagcgcttccgcgagatcgccgatgaagtcggcgcctatctgatggtcgacatggcccacatcgccggtctcgttgccggtggccagcacccgtcgccgttcccgcattgccatgttgccaccaccacgacgcacaagtctctgcgcggcccgcgtggcggcatgatcctcaccaatgacgaggatctggccaagaagttcaactcggccgtattccccggcctgcagggtggcccgctgatgcatgtcatcgccgccaaggccgttgccttcggcgaagcgctgcagccggaattcaaggactatgccgcgcaggtcgtgaagaacgccaaggcgctggccgaaaccctgatcgaaggcggtctcgatgtcgtctccggcggcaccgacaaccacctgatgctggtcgatcttcgcaagaagaacgccaccggcaagcgcgcggaagcagcccttggccgcgcttacatcacctgcaacaagaacggcattcctttcgacccggaaaaacccttcgtcacgtcgggtgtccgtctcggcacgccggccggcacgacgcgcggtttcaaggaagcggaattccgcgaaatcggcaagctgatcgtcgaggttctcgacggcctgaaggttgccaattcggatgaaggtaatgcctccgtcgaggctgccgtgcgcgaaaaggtcgtcggtttgaccgaccgtttcccgatgtatccgtacatgtaa

SEQ ID NO: 79708 - protein, 491 aa, Agrobacterium tumefaciens str. C58
MWLGRASSKRRLYFPSYPVFHKNICHFSPQRRSLTGKSRWPYCSCSGRALRRHRITVSGAFTMSNTDAFFSRPLAEVDPDIFGAIEKELGRQRHEIELIASENIVSRAVLEAQGSIMTNKYAEGYPGKRYYGGCQFVDIAEELAIERAKKLFGVNFANVQPNSGSQMNQAVFLALLQPGDTFMGLDLNSGGHLTHGSPVNMSGKWFNVVSYGVREGDNLLDMDEVERKAKETRPKLILAGGTAYSRVWDWKRFREIADEVGAYLMVDMAHIAGLVAGGQHPSPFPHCHVATTTTHKSLRGPRGGMILTNDEDLAKKFNSAVFPGLQGGPLMHVIAAKAVAFGEALQPEFKDYAAQVVKNAKALAETLIEGGLDVVSGGTDNHLMLVDLRKKNATGKRAEAALGRAYITCNKNGIPFDPEKPFVTSGVRLGTPAGTTRGFKEAEFREIGKLIVEVLDGLKVANSDEGNASVEAAVREKVVGLTDRFPMYPYM

SEQ ID NO: 79709 - DNA, 1311 bp, Thermoplasma acidophilum DSM 1728
  CDS (1)..(1311): transl_table=11
gtgtatttaacaagccagcgatccaacagtatgtcttacgaggatgccgagtacataagagagatggcgatgaaacacagcgagatgttcggtgaaggcatcgcgctgatagcttcagagaacgtgatgagcccccttgcgaaggaggtcatgataagcgatctcgagtcgaggtatgcggagggattgccgcatcacaggtactatcagggaaattattatgtggatttgatcgaggacagaacaaacgagcttttatcaaagctcttcagaacaagccagactgatccaaggccaatatctggaacaaacgcaaactccgcagcgatatacgcactggcagggccaggggatctggttgccacgccatcgctgtctggaggtgggcacataagtgctgcagagtttggcatacttggcatgagatcggtcaggaccatcaattatccctatgatatggatacgatgaccatagaccctgaccaggcatctaagatgataataaaggagaagccaaaggtctgcctcttcgggcagtctgtcttcatgttcccggcaccgcttaaagagatggcagaagcctttcatgaggttggatgcaaggtctggtacgatggggcgcatgtacttggccttatagccggcgggaggttccaggatccgctgagagagggtgctgatatcgtaacaggaagcacgcacaaaacattcccagggcctcagcatggagtcatccttggaaatacggacgatgaaacctggaaggccgtcaggcgcgctgtatttcctggcgtcctgagcaaccaccatctcaatgccatggcagcgctgggcataacggcagcagaggagctggaattcggtaaaagatatgctgatgacatcatatctaacgcaaaggttctggcagaagaactgtatgcaaacggcttcaacgtgcttgcagaaaagagaggcttcaccgaatcccacactatggccgtggacgtcagcaagaacggcggtggcaaatacgtggcagagaccctcgaaaaatgcggaataatactgaacaaaaacctgctgccatgggacgataacaagaaatcacagaatccgagcggcataaggatcggtgttcaggaggcaacaagagtcggtatgggcaaatcggagatgaaggagatagcgtcactcataaccagggccataatcaggcatgaagatccggaaaagataaaggcggaggttaaacagctgaagtcaggattcagggaggtaaaatactgctacggtaagatggacggatactcatacataaagctgatctga

SEQ ID NO: 79710 - protein, 436 aa, Thermoplasma acidophilum DSM 1728
MYLTSQRSNSMSYEDAEYIREMAMKHSEMFGEGIALIASENVMSPLAKEVMISDLESRYAEGLPHHRYYQGNYYVDLIEDRTNELLSKLFRTSQTDPRPISGTNANSAAIYALAGPGDLVATPSLSGGGHISAAEFGILGMRSVRTINYPYDMDTMTIDPDQASKMIIKEKPKVCLFGQSVFMFPAPLKEMAEAFHEVGCKVWYDGAHVLGLIAGGRFQDPLREGADIVTGSTHKTFPGPQHGVILGNTDDETWKAVRRAVFPGVLSNHHLNAMAALGITAAEELEFGKRYADDIISNAKVLAEELYANGFNVLAEKRGFTESHTMAVDVSKNGGGKYVAETLEKCGIILNKNLLPWDDNKKSQNPSGIRIGVQEATRVGMGKSEMKEIASLITRAIIRHEDPEKIKAEVKQLKSGFREVKYCYGKMDGYSYIKLI

SEQ ID NO: 79711 - DNA, 1797 bp, Arabidopsis thaliana
  CDS (1)..(1797)
atggatttgagtcgttctcaaacaaattttcaattagggtttggttgttcacacgcatcaatgactccaacaccaacaccaagagctccaatcgcagacgattcgattaatctacaagtcgatcaaagtttccgatcattaccaacaactttctctccgattccgttacaattactcgaacaaaaagccgagaagaccaccaccgttgatgagccaaagaaagatggaggaggaggaggagatcaaaaggaagacgagcatttcagaatcttaggtcaccatatgtgtctcaaaaggcaaagagattgtccacttttgttaacgcaatcaaagcatccgaagagaagttccatcggtgattcagatctggaatcgcgacgtgctgctgtacgagcttggggtgatcaaccgattcatttggcggatcctgatattcatgagcttatggagaaagagaagcaacgacaagtaagaggaattgaattgattgcttctgagaatttcgtgtgtagagctgtaatggaagctttaggtagtcatttaacgaataaatactctgaaggtatgcctggagctagatactatactgggaatcaatatattgatcagattgagaatctctgtattgagcgtgctcttactgcgtttggtcttgaatctgataaatggggtgttaatgttcagccttattcttgtacttctgctaacttcgcggtgtataccggacttttattgcccggtgaacggattatggggcttgattcgccttctggtggtcatatgagtcatggttattgtactcctggtgggaagaagatttcggctgcttccatcttctttgagagttttccttataaagtgaatcctcaaactgggtatattgattatgataagcttgaagataaggcgcttgattaccgtcctaagattcttatttgtggtgggagttcttatcctagggattgggattttgcaagggttagacagattgcagataagtgtggagctgttttgatgtgtgatatggctcatattagcggtcttgttgcaactaaggaatgttcaaatccatttgatcactgtgacatagtaacctccactactcacaaaggtctacgtggtcctagaggaggtatcatcttctacaggagaggcccaaagataagaaagcagggccatcactctagccattgtgacacttccacgcattacgatctagaggaaaagatcaactttgctgtttttccatctctacaaggaggtccacacaacaaccatatcgctgctcttgccattgcattgaaacaagtggccactccagagtacaaagcttacatacaacagatgaagaaaaacgcccaagctttagcagcagctcttcttagaagaaaatgcagactggttactggtggtacagacaaccatttgttgctgtgggatctcactcctatgggcttaacagggaaagtctacgagaaagtgtgtgagatgtgccatatcactttaaacaagacggctatattcggggacaatggtacaatatctcctggaggtgtaagaatagggacacccgcaatgacaacccgaggctgtatagagtctgatttcgagacaatggcggattttctgataaaggcggctcagataacaagtgcgttgcagagagagcatggaaagtcacacaaggagtttgtgaaaagtttatgcaccaacaaagacatagctgagcttagaaaccgagtcgaagcatttgctttgcagtatgagatgcctgcttctcttattcgaattgaatga

SEQ ID NO: 79712 - protein, 598 aa, Arabidopsis thaliana
MDLSRSQTNFQLGFGCSHASMTPTPTPRAPIADDSINLQVDQSFRSLPTTFSPIPLQLLEQKAEKTTTVDEPKKDGGGGGDQKEDEHFRILGHHMCLKRQRDCPLLLTQSKHPKRSSIGDSDLESRRAAVRAWGDQPIHLADPDIHELMEKEKQRQVRGIELIASENFVCRAVMEALGSHLTNKYSEGMPGARYYTGNQYIDQIENLCIERALTAFGLESDKWGVNVQPYSCTSANFAVYTGLLLPGERIMGLDSPSGGHMSHGYCTPGGKKISAASIFFESFPYKVNPQTGYIDYDKLEDKALDYRPKILICGGSSYPRDWDFARVRQIADKCGAVLMCDMAHISGLVATKECSNPFDHCDIVTSTTHKGLRGPRGGIIFYRRGPKIRKQGHHSSHCDTSTHYDLEEKINFAVFPSLQGGPHNNHIAALAIALKQVATPEYKAYIQQMKKNAQALAAALLRRKCRLVTGGTDNHLLLWDLTPMGLTGKVYEKVCEMCHITLNKTAIFGDNGTISPGGVRIGTPAMTTRGCIESDFETMADFLIKAAQITSALQREHGKSHKEFVKSLCTNKDIAELRNRVEAFALQYEMPASLIRIE

SEQ ID NO: 79713 - DNA, 1590 bp, Arabidopsis thaliana
  CDS (1)..(1590)
atgcaagcttgttgtggtggtaattcgatggcttctcttcagcaacctggacgggttcaaggatctgtctttcccccaattatgcctccagtgaccaaattttctcagcagttgaagttcaatatttcaaaacctttccgttcttcatttctgaaaagaaacctggtctctgaaatgagagcatcttcagtctcgctacctaatgtcgagataagcagcaaagaaatcccttttgaggactatggtcttggtgaagttgatccagaggtccgaaccatcatcacaaaggagaaagatagacaattcaggagcttggagcttattgcatctgagaatttcacgtctcgagcagttatggaggcggttggctcatgccttaccaacaagtattctgagggactgcctggtaaaagatattatggtggcaatgagtacattgatcagttggagacgctttgccagaaccgggctttggcagccttccgcttagattctacgaaatggggggttaatgttcagccgttatctggttcacctgcaaactttgctgtctacactgcgatacttagccctcatgatcggatcatgggtttggatttacctcacggtggtcatctgtcgcatgggttcatgaccgctaaaaggcgtgtatctggaacttcaatatactttgagtccatgccttatcgacttgatgaatcaacaggcattgttgactacgatatgctcgagaaaactgctacacttttcagaccaaagcttattatcgcaggagctagtgcatacagccgagattttgactatcctcgcatgaggaagatcgcagactcagttggtgcttttctgatgatggatatggctcatatcagtgggcttgtggctgcttctgtggtagctgacccttttgagtattgtgatattgttacaacaacaactcacaagtctttgagaggtccgagaggtggcatgatcttcttcaggaaggatccaattaatggggttgatcttgaatctgccgtgaacaatgctgtcttccctggtttgcagggtggccctcataaccacacaattggaggattagcagtctgcttgaaacacgcacaatcaccggaattcaaggcgtaccagaaaagagttgtgtctaactgtagagctctagctaaccgattggttgaactcgggtttaagctagtttctggtggcagcgataaccacttggttctcgtcgatcttagacccatgggtatggatggtgcgcgggttgagaaaatcttagacatggcatctattactctcaacaagaactctgtccctggggacaaaagtgcgttggtaccagggggaataaggataggatcccccgcgatgacgacaagaggactgtcagagaaagactttgtagtagtggctgacttcatcaaggaaggtgtggagataacaatggaagccaagaaagccgcgccgggttcaaagcttcaagatttcaacaagttcgtgacatctcctgagtttccattgaaagagagagtgaagagtctaaaggagagagtggaaaccttcacatctcgttttcccattcctggcgtttaa

SEQ ID NO: 79714 - protein, 529 aa, Arabidopsis thaliana
MQACCGGNSMASLQQPGRVQGSVFPPIMPPVTKFSQQLKFNISKPFRSSFLKRNLVSEMRASSVSLPNVEISSKEIPFEDYGLGEVDPEVRTIITKEKDRQFRSLELIASENFTSRAVMEAVGSCLTNKYSEGLPGKRYYGGNEYIDQLETLCQNRALAAFRLDSTKWGVNVQPLSGSPANFAVYTAILSPHDRIMGLDLPHGGHLSHGFMTAKRRVSGTSIYFESMPYRLDESTGIVDYDMLEKTATLFRPKLIIAGASAYSRDFDYPRMRKIADSVGAFLMMDMAHISGLVAASVVADPFEYCDIVTTTTHKSLRGPRGGMIFFRKDPINGVDLESAVNNAVFPGLQGGPHNHTIGGLAVCLKHAQSPEFKAYQKRVVSNCRALANRLVELGFKLVSGGSDNHLVLVDLRPMGMDGARVEKILDMASITLNKNSVPGDKSALVPGGIRIGSPAMTTRGLSEKDFVVVADFIKEGVEITMEAKKAAPGSKLQDFNKFVTSPEFPLKERVKSLKERVETFTSRFPIPGV

SEQ ID NO: 79715 - DNA, 1614 bp, Drosophila melanogaster
  CDS (1)..(1614)
atgcagcgggcgcgctctacactgacacaaaagcttcggttttgccttagtcgggacctgaacaccaaagttggcaacccggttaacttcgagactggaaagcttagcggagctttaactcgcatcgccgccaaaaaacaaccatcaccaacgccattcttaccggcgatcagacgatattcggactccaagcagagcactttgaagaatatggccgatcagaaactgctgcaaaccccgctggcacagggcgatccggagctggccgagctgatcaagaaggagaaggagcgccagcgcgaaggactcgagatgatcgccagtgagaacttcacctcggtggcggttctcgagagcctgagctcctgcctgaccaacaagtactccgagggatatcccggcaagaggtactacggtggcaacgagtacatcgaccgcatagagctgctcgcccagcaacgcggacgcgagctgttcaacctggacgatgagaagtggggcgttaatgtgcagccttattccggatccccggccaatctggctgtctacacgggcgtctgccggccccacgatcgcatcatgggcctggatctgcccgatggcggtcacttgacgcacggtttcttcacgcccaccaagaagatatcggccacatcgatcttcttcgagagcatgccgtacaaagtgaacccggagacgggcatcatcgattacgataagttggcggaggcggcgaagaatttccggccgcagatcatcattgctggcatatcgtgctactcccgtctgctggactatgcgcgtttccgacagatttgcgatgatgtgggcgcctacctgatggccgacatggcccatgtggcgggcattgtggccgcgggattgataccatcgccgttcgaatgggccgacattgtgaccaccaccacgcacaagacactgcgaggtccgcgcgccggcgtgatcttcttccgcaagggcgtgcgcagcaccaaggccaatggagacaaggtactctacgatctggaggagcgcatcaaccaggcggtgtttccatcactccagggtggtccgcacaacaacgccgtggctggcattgccaccgccttcaagcaggccaagagtcccgaattcaaggcctaccagacgcaggtgctcaagaatgccaaggccctgtgcgatggcctcatttcgcgaggctatcaggtggccaccggcggcaccgacgtccatttggtgctggtcgatgtgcgtaaggctggcctgaccggcgccaaggccgagtacatcctcgaggaggtgggcatcgcgtgcaacaagaacactgtgcccggcgacaagtccgccatgaatccctccggcatccggctgggcacaccggccctgaccactcgcggccttgccgagcaggacatcgagcaggtggtggccttcatcgatgctgccctaaaggttggcgtccaggcagccaagctggccggcagtcccaagataaccgattaccacaagacgctggccgagaatgtggagctcaaggcccaggtggacgagatccgcaagaatgtggcccagttcagcaggaaattcccgctgcccggcctggagaccctgtag

SEQ ID NO: 79716 - protein, 537 aa, Drosophila melanogaster
MQRARSTLTQKLRFCLSRDLNTKVGNPVNFETGKLSGALTRIAAKKQPSPTPFLPAIRRYSDSKQSTLKNMADQKLLQTPLAQGDPELAELIKKEKERQREGLEMIASENFTSVAVLESLSSCLTNKYSEGYPGKRYYGGNEYIDRIELLAQQRGRELFNLDDEKWGVNVQPYSGSPANLAVYTGVCRPHDRIMGLDLPDGGHLTHGFFTPTKKISATSIFFESMPYKVNPETGIIDYDKLAEAAKNFRPQIIIAGISCYSRLLDYARFRQICDDVGAYLMADMAHVAGIVAAGLIPSPFEWADIVTTTTHKTLRGPRAGVIFFRKGVRSTKANGDKVLYDLEERINQAVFPSLQGGPHNNAVAGIATAFKQAKSPEFKAYQTQVLKNAKALCDGLISRGYQVATGGTDVHLVLVDVRKAGLTGAKAEYILEEVGIACNKNTVPGDKSAMNPSGIRLGTPALTTRGLAEQDIEQVVAFIDAALKVGVQAAKLAGSPKITDYHKTLAENVELKAQVDEIRKNVAQFSRKFPLPGLETL

SEQ ID NO: 79717 - DNA, 1446 bp, Streptomyces coelicolor A3(2)
  CDS (1)..(1446): transl_table=11
ttgcccgccgaaatctcccccgagtccaccgcctaccgagccgccctcgacgtgatccgcgccgtcgagccgcgcgtcgcggacgccatcggccaggaggtcgccgaccagcgcgagatgctcaagctgatcgcctccgagaactacgcctccccggccacgctcctggcgatgggcaactggttcagcgacaagtacgccgagggcaccatcggccgccgcttctacgccggctgccgcaacgtcgacaccgtcgagtccctcgccgccgagcacgcgcgcgagctgttcggcgcccgccacgcctacgtccagccgcactccggcatcgacgccaacctggtcgccttctgggccgtcctgggcgcccgggtcgaggtgcccttcctggagaagaccggcgcccgccaggtcaacgacctgaccgacgccgactgggccgagctgcgccaggccttcggcaaccagcggatgctcggcatgtccctggacgccggcggccacctcacccacggcttccgcccgaacatctccggcaagatgttcgaccagcgctcctacggcaccgacccggccaccggcctcatcgactacgaggccctgcgcgcctccgcccgcgagttcaagccgctgatcatcgtcgcgggctactccgcgtacccccggctggtgaacttccggatcatgcgcgagatcgccgacgaggtcggcgcgaccctcatggtcgacatggcgcacttcgccggactcgtcgcgggcaaggtgctcaccggcgacttcgacccggtcccgcacgcccagatcgtgacgaccaccacccacaagtcgctgcgcggcccgcgcggcggcatggtcctgtgcgacgactccctcaaggaccaggtcgaccgcggctgcccgatggtcctcggcggcccgctcccgcacgtcatggccgccaaggccgtcgccctcgccgaggcccgccggcccgcgttccaggactacgcccagcgcatcgtggacaacgcccgcgccctcgccgagggcctgacgaagcgcggcgccaccctggtgaccggcggcacggacaaccacctcaacctgatcgacgtggcctcctcctacggcctcaccggccgccaggccgaggccgcgctgctcgactccggcatcgtcaccaaccgcaacgccatcccggccgacccgaacggcgcctggtacacctccggcatccgcatcggcaccccggcgctgaccacgcgcggtctcggcacggcggagatggacgaggtcgcgggcctcatcgaccgcgtcctcaccgccaccgagcccggcaccaccaagtccggcgccccgtccaaggcctcccacgtcctcgacgcgaaggtcgccgacgagatctcgcaccgcgccaccgacctggtggccggcttcccgctgtacccggagatcgacctcggctga

SEQ ID NO: 79718 - protein, 481 aa, Streptomyces coelicolor A3(2)
MPAEISPESTAYRAALDVIRAVEPRVADAIGQEVADQREMLKLIASENYASPATLLAMGNWFSDKYAEGTIGRRFYAGCRNVDTVESLAAEHARELFGARHAYVQPHSGIDANLVAFWAVLGARVEVPFLEKTGARQVNDLTDADWAELRQAFGNQRMLGMSLDAGGHLTHGFRPNISGKMFDQRSYGTDPATGLIDYEALRASAREFKPLIIVAGYSAYPRLVNFRIMREIADEVGATLMVDMAHFAGLVAGKVLTGDFDPVPHAQIVTTTTHKSLRGPRGGMVLCDDSLKDQVDRGCPMVLGGPLPHVMAAKAVALAEARRPAFQDYAQRIVDNARALAEGLTKRGATLVTGGTDNHLNLIDVASSYGLTGRQAEAALLDSGIVTNRNAIPADPNGAWYTSGIRIGTPALTTRGLGTAEMDEVAGLIDRVLTATEPGTTKSGAPSKASHVLDAKVADEISHRATDLVAGFPLYPEIDLG

SEQ ID NO: 79719 - DNA, 1257 bp, Streptomyces coelicolor A3(2)
  CDS (1)..(1257): transl_table=11
atgtcggtcacccacgagatcatcgaggccgatgacagttcggtcggagtcctgctgcgccaggatcccgagctggccgagatcctgttcgccgaaggccgccgccagtcgacgaccctccagctcatcgccgccgagaacttcacctccccggccgtgctggccgccctcggctcaccgctggccaacaagtacgccgagggctacccgggcgcccgccaccacggcggctgcgagatcgtcgacgtggccgagcggctggccgcccagcgggcccaggcgctcttcggcgccgagcacgccaacgtgcagtcccactccggctcctccgccgtgctggccgcctacgccgccctgctgcgccccggcgacaccgtcctcgccctcggcctgccctacggcggccacctcacccacggctcacccgccaacttctccggccgctggttcgacttcgtcggctacggcgtggacgcggagaccgggctgatcgaccacgaccaggtgcgcaccctggcccgcgcccgccggcccaaggcgatcgtctgcggctccatcgcctacccccgccacctcgactacgccgccttccgcgacatcgccgacgaggtgggcgcctatctcatcgccgacgccgcccacccgatcggactcgtcgccgggggagcggcgcccagtccggtgccgtacgccgacatcgtgtgcgccaccacgcacaaggtgctgcgcggaccccgcggcggcatgatcctgtgcggaagcgaactggcggaacgggtcgaccgggccgtcttcccgttcacccagggcggcgcccagatgcacaccatcgccgccaaggccgtcgccttcggggaggcggcgacccccgccttcgccgcctacgcccaccaggtggtcgccaacgcccgggcgctcgcggcccacctggccgccgagggcctggtcgtcaccaccggcggcaccgacacccacctgctcaccgccgaccccgccccgctcggcgtcgacgggaagaccgcccgggggctgctcgcggcggccgggatcgtcctggactgctgcgcactgccgcacgccgacgcccgcgggctgcgcctgggcaccgccgcggtcaccacacagggcatgggggagcgggagatgcgggcggtggccacactggtcgccggggttctgcgggggacgacggacccggccgcggcacgggcggacgtaagggacctgaccgcggaattccccccgtacccggactga

SEQ ID NO: 79720 - protein, 418 aa, Streptomyces coelicolor A3(2)
MSVTHEIIEADDSSVGVLLRQDPELAEILFAEGRRQSTTLQLIAAENFTSPAVLAALGSPLANKYAEGYPGARHHGGCEIVDVAERLAAQRAQALFGAEHANVQSHSGSSAVLAAYAALLRPGDTVLALGLPYGGHLTHGSPANFSGRWFDFVGYGVDAETGLIDHDQVRTLARARRPKAIVCGSIAYPRHLDYAAFRDIADEVGAYLIADAAHPIGLVAGGAAPSPVPYADIVCATTHKVLRGPRGGMILCGSELAERVDRAVFPFTQGGAQMHTIAAKAVAFGEAATPAFAAYAHQVVANARALAAHLAAEGLVVTTGGTDTHLLTADPAPLGVDGKTARGLLAAAGIVLDCCALPHADARGLRLGTAAVTTQGMGEREMRAVATLVAGVLRGTTDPAAARADVRDLTAEFPPYPD

SEQ ID NO: 79721 - DNA, 1260 bp, Methanosarcina mazei Go1
  CDS (1)..(1260): transl_table=11
atgagttataaggtgacagtgatgtcttatattgaaaaaattgacccggaattgttcgaggctatcaaaaatgaagccgatcgtcaggaacacaagctgaacctgatcgcatcagaaaactatgcgagcagggctgttatggaagcccagggctctattatgaccaacaagtatgccgaaggatattccggtaaacgctattacggaggctgcgatttcgttgacgttgccgaaaatctcgccattgcaagggcaaaggaacttttcggggcaaagtatgtaaacgtccagcctcactcaggttcaggtgccaacatggctgtttatttctctgtgctgcagccgggggatactatcctgtccatggacctctctcacggcggacacctttctcacggcagccctgtaagtttctcaggaaaactctataacatcgtgccctatggggtcagcaaagagaccgaagccctggattacgatgagctccttaaactggcaaaagaatgcaagcccaggatgatagtatgcggagcttcagcctatccccgtgtgattgattttaaaaggttcagggaaattgctgatgaggtcggagcttacctccttgcagatattgcacacatcgcaggacttgtagttgcaggcgtacacccgagccctgttccttatgcggattttgttaccacaaccacccacaagaccctgcgcggtcccaggggcggaatgattatctcgaagactgaagagcttgcaataggcgtgaacaaagcggttttcccgggtatccagggcggccccctcatgcatatcatagctgcaaaagctgttgccttcaaagaagccatgagcgaagagttcaggcaggaccaggatcagaccgtaaagaacgcaaaggtcctgtgttcatgtctgaagcagaaaggttttgatattgtttcaggcggcaccgacaaccaccttatgcttgtaaatctcaataatatgaatattacaggaaaggacgctgaagctgcactgagcaaagccgggatcatcgccaacaaaaacacagttcctttcgagacccgcagcccattcgtaaccagcggggtaaggctcgggaccccttcctgcaccacaaggggcatgaaagaaaaggaaatggaactggttgcagactacatcgaggctgcaataaagaattcggaaaacgatgctcttctgtcggaaatcaatattaaggtaagggatctctgtttaaagttccctgtttacgaataa

SEQ ID NO: 79722 - protein, 419 aa, Methanosarcina mazei Go1
MSYKVTVMSYIEKIDPELFEAIKNEADRQEHKLNLIASENYASRAVMEAQGSIMTNKYAEGYSGKRYYGGCDFVDVAENLAIARAKELFGAKYVNVQPHSGSGANMAVYFSVLQPGDTILSMDLSHGGHLSHGSPVSFSGKLYNIVPYGVSKETEALDYDELLKLAKECKPRMIVCGASAYPRVIDFKRFREIADEVGAYLLADIAHIAGLVVAGVHPSPVPYADFVTTTTHKTLRGPRGGMIISKTEELAIGVNKAVFPGIQGGPLMHIIAAKAVAFKEAMSEEFRQDQDQTVKNAKVLCSCLKQKGFDIVSGGTDNHLMLVNLNNMNITGKDAEAALSKAGIIANKNTVPFETRSPFVTSGVRLGTPSCTTRGMKEKEMELVADYIEAAIKNSENDALLSEINIKVRDLCLKFPVYE

SEQ ID NO: 79723 - DNA, 1548 bp, Corynebacterium efficiens YS-314
  CDS (1)..(1548): transl_table=11
ttgagcggagctgccatagatcctattgtgccccctgacccccggcaccgtgctgtcggggttgtgattggggcaacagaggcggggatgtggggggcggtcgcacacccgcagaacgcaggggaattaacctggcccccgcactttctcatctggggggtggggggctatgctgaatttgtacctgtcccgcgcgtgaggtcttacacgcgggattcgtcttgtgaaaggttagctgacctgatgaccgatgcccaccatgcggatgatgtccgttaccagccactgagcgagatcgatccggaggtggcccaggccatcgctggcgagctcagccgacagcgcgacacccttgagatgatcgcctccgagaactttgtgccccgttctgttctgcaggcccagggttccgttctcaccaataaatatgcagagggttaccccggccgccgttactacggtggttgcgagcaggtcgacatcatcgaggacctggcccgtgaccgtgccaaggccctgttcgatgccgagttcgccaatgtccagccgcactccggtgcccaggccaatgcagcggtcctgatgaccctggccgacccgggtgacaagatcatgggtctgtccctggcccacggtggtcacctgacccacggcatgaaactgaacttctccggcaagctctatgaagtcgccgcctacggcgtggaccccgacaccatgctcgttgacatggatcaggttcgtgagcaggccatcaaggagcagccgaaggtgatcatcgccggttggtccgcctacccccgtcacctggatttcgcggccttccgtgagatcgccgatgaggtcggagccaccctgtgggtggacatggcgcacttcgccggcctggttgccgccggtctgcaccccagcccggtgccgtacgccgatgtggtgtcctccaccgtccacaagaccctgggtggtccccgctccggcatcatcctggccaagcaggactacgccaagaagctgaactcctcggtgttcccgggccagcagggtggtccgctcatgcacgcgatcgccgccaaggccaccgccctgaagatcgccggcaccgaccagttcgccgagcgtcaggcccgcaccatcgagggtgcccgcatcctcgcggagcgtctcaccgcctccgacgccaaggccgcaggcattgatgtcctcaccggtggcaccgatgtgcacctggtcctggctgatctgcgcaactccgagatggacggccagcaggccgaggatctcctgcacgaggtcggcatcaccgtcaaccgcaacgcggttcccttcgacccgcgtccgccgatggtcacctccggtctgcgtatcggcaccccggcgctggccacccgtggtttcgatgccaccgccttcaccgaggtcgccgacatcatcggaaccgccctggcacagggcaagtccgcggatctggagtcactgcaggcccgcgtgaccaagctggctgagcagtacccgctgtacgagggtctcgaggactggaccatcgtctaa

SEQ ID NO: 79724 - protein, 515 aa, Corynebacterium efficiens YS-314
MSGAAIDPIVPPDPRHRAVGVVIGATEAGMWGAVAHPQNAGELTWPPHFLIWGVGGYAEFVPVPRVRSYTRDSSCERLADLMTDAHHADDVRYQPLSEIDPEVAQAIAGELSRQRDTLEMIASENFVPRSVLQAQGSVLTNKYAEGYPGRRYYGGCEQVDIIEDLARDRAKALFDAEFANVQPHSGAQANAAVLMTLADPGDKIMGLSLAHGGHLTHGMKLNFSGKLYEVAAYGVDPDTMLVDMDQVREQAIKEQPKVIIAGWSAYPRHLDFAAFREIADEVGATLWVDMAHFAGLVAAGLHPSPVPYADVVSSTVHKTLGGPRSGIILAKQDYAKKLNSSVFPGQQGGPLMHAIAAKATALKIAGTDQFAERQARTIEGARILAERLTASDAKAAGIDVLTGGTDVHLVLADLRNSEMDGQQAEDLLHEVGITVNRNAVPFDPRPPMVTSGLRIGTPALATRGFDATAFTEVADIIGTALAQGKSADLESLQARVTKLAEQYPLYEGLEDWTIV

SEQ ID NO: 79725 - DNA, 1332 bp, Mycoplasma penetrans HF-2
  CDS (1)..(1332): transl_table=4
atgcataaggtttttttaatttatttttattacttaaatattaaatatattatttatatagtgtttttaataaaacaatcaaatgggggaaatatgaaaaatctaatactaaaagaaatattgaataatgaacttaaaagacaacagggctacattgaactaatagcttctgaaaattatgttagtgaacaaattttagaagctacaggaagtgtgtttacaaataagtattgtgaaggatatccaaacagaagatactatggagggtgtgaatatgcagaccaaattgagcaattagcaattgataaagcaaaagaaatctttaacgctaaatttgcaaatgttcaaccacactctggaactcaagcaaatgttgcagcttatttatctgtattaaaaccaaatgataaaattcttgctatgggtttaaatgaaggcggacatttatcacatggttctaaagttaatatttcaggtaaaacatatgaagcagatcactatggtgtagataaagaaactcaatgtttagactatgatgcaattttaaaacaagcacaagaagttaaacctaaattaatagtttgtggagcatcaaactattcaagagttgtagattttaaaaaatttggagaaatagcaaaatcagttggtgcttatttattagcagatgttgctcatatttctggattaatagttgcaggatatcatcctaatccattaccatatgcagatattgtaacaacaaccactcacaagactttaagaggtcctagaagtggattaatactaacaaataatgaagagttaattaaaaagattaatagtgcagtattccctggaagtcaaggtggacctttaatgcatgtaatagctgctaaatatttatgttttgatgaagctagtaaacctgaatttaaaacatatataaaaaatgtaattgataacattgcaatcctatctcaaacactaaaagaactagggtataagattattgcagatggaagtgataatcatttattaagtgttgatttatattcatctaaacaaatcacaggagacttagtagaacaatgattagaacaagcaaaaattgttgttaataaaaatctaattccatatgatattaattctgccaaatcaccatctggtattagaattggctctgctgctatgactacaagaggatttactactaaagaatttaaacaaattggtttatgaattcatgaaattatagaatcaaaaggtaatcctaatacaattaataaaattagaaatgaagtagatttattagttaaaaaattccctatttaccaagatattaaatattag

SEQ ID NO: 79726 - protein, 443 aa, Mycoplasma penetrans HF-2
MHKVFLIYFYYLNIKYIIYIVFLIKQSNGGNMKNLILKEILNNELKRQQGYIELIASENYVSEQILEATGSVFTNKYCEGYPNRRYYGGCEYADQIEQLAIDKAKEIFNAKFANVQPHSGTQANVAAYLSVLKPNDKILAMGLNEGGHLSHGSKVNISGKTYEADHYGVDKETQCLDYDAILKQAQEVKPKLIVCGASNYSRVVDFKKFGEIAKSVGAYLLADVAHISGLIVAGYHPNPLPYADIVTTTTHKTLRGPRSGLILTNNEELIKKINSAVFPGSQGGPLMHVIAAKYLCFDEASKPEFKTYIKNVIDNIAILSQTLKELGYKIIADGSDNHLLSVDLYSSKQITGDLVEQWLEQAKIVVNKNLIPYDINSAKSPSGIRIGSAAMTTRGFTTKEFKQIGLWIHEIIESKGNPNTINKIRNEVDLLVKKFPIYQDIKY

SEQ ID NO: 79727 - DNA, 1383 bp, Bradyrhizobium japonicum USDA 110
  CDS (1)..(1383): transl_table=11
gtggaatcgaccacggtgaagcgcgaagggttccgacgccgatcgcctgggcaaccaatctgctggaaaaacagcgtgttgaggagcccgagcatgccgtcatttcgcaacgaactgtccatcaacgatcaagagatcgccgctgcccttgtgggggaagagcgccgccaacaggacggcgtcgagctgattccgtccgagaattacacctacccggaggtgcttgagctgctcggatcggtcttcaccaataaatattccgagggatatccgggacgcagatactacggcggccagcagtatacggacgaaatcgagcgcctcgcacgcgagcgggcttgctcgctttttcgtgccgagcacgccaacgttcagcctctttccggatcaccgatgaatcaggccgtctatctcggcctgttggagcccggcgacaccattctcgccatggacctgtcccatggcggtcatctcacccacggcgcgccggtgtcccacatggggcgtttgttcaacttcattcgctacaagacggctccgtcaaacggcggcgcgatagatttcgacgaattgcgcgcgattgcgcgtgaagcgcgtccgaagatggtgttgtgcggttacagctcctatccgcgcgacctggactatgcggcattcaagagtattgccgacgaagttggcgcgctcacgatggctgacgtgagccactatggcggattggttgccgcgaatgtcatgcgcaatccgcttgatgccggcttcgacgtcatgacgacgacatcccacaagacgctgcgcggcccccgtggcgggatcatcctatgccggaaagaaaatgccggtcggatcgatgcttccgtatttcccggtttgcagggcggacctcacatgaacgtcgtggccgggattgccgtgacgctcaagaaggcggcgacctcggatttccaggtctacgcgcggcaggtcttgcgcaacgcgaaggttcttgccggcgcgctgatggagcgcgggatgaagctggtcacggacggaacggacaatcacatgatggtcgtcgatacggcagcgtccgtcggactggacgggcgggcagccgaggatgtgcttgatgccatagccatcaccacaaacaagcaagtgattccggacgatccgcgcccgccgctcaggccgagcggtattcgccttgggacaccggcggcgaccacgcgtggcatgggagagcccgaaatgcgtcgtatcggcgagttcattgcggcggctctgcaggcgaacggcaacgatgtggtcgtcgcgcgcctcaggtcagagtgcgtcgagatgtgccgggcttttcctgttccaggcgtgatgtccagagctaattctgttgccaagacctga

SEQ ID NO: 79728 - protein, 460 aa, Bradyrhizobium japonicum USDA 110
MESTTVKREGFRRRSPGQPICWKNSVLRSPSMPSFRNELSINDQEIAAALVGEERRQQDGVELIPSENYTYPEVLELLGSVFTNKYSEGYPGRRYYGGQQYTDEIERLARERACSLFRAEHANVQPLSGSPMNQAVYLGLLEPGDTILAMDLSHGGHLTHGAPVSHMGRLFNFIRYKTAPSNGGAIDFDELRAIAREARPKMVLCGYSSYPRDLDYAAFKSIADEVGALTMADVSHYGGLVAANVMRNPLDAGFDVMTTTSHKTLRGPRGGIILCRKENAGRIDASVFPGLQGGPHMNVVAGIAVTLKKAATSDFQVYARQVLRNAKVLAGALMERGMKLVTDGTDNHMMVVDTAASVGLDGRAAEDVLDAIAITTNKQVIPDDPRPPLRPSGIRLGTPAATTRGMGEPEMRRIGEFIAAALQANGNDVVVARLRSECVEMCRAFPVPGVMSRANSVAKT

SEQ ID NO: 79729 - DNA, 1287 bp, Tropheryma whipplei TW08/27
  CDS (1)..(1287): transl_table=11
gtgaatcacggggtgtatcagaatcttttcatcgattctttggattctgttgatccacaaatcgccgaagtgcttgatctcgaactcaggcgacagagggattttctggagatgatcgcgagtgaaaattttgttccacgcgcaattctgcaggcacagggctctgttctaactaataaatacgctgaaggatatccgcaaaaccgctattatgggggatgcgaatgcgttgaccttgctgaggatctggcaatcagtcgcgtgcgcgacctatttggttctgagtttgcaaatgtccagccacactctggatctacggcaaatgctgccgcactgatggcccttacagaagttggtagcacgattatgggtcttgaattggatcatgggggccatttaacccatggcatgcctttgagcttctccggtaaacactacaaggccgtgacttataggcttgacccaaaaacatgtttaatcgatatggactcagtccgcgaccttgccctgaggcataggcccagtgttattatcgccggatggtcagcctatgtacgtcatcttgattttgaagctttcagaagcatagctgatgaagttggtgccaggctgtgggttgatatggcacactttgctggccttgtagcggcaggactttatccttcccccataccgtgggcggatgttgttaccagtactacacacaaaacccttgccggcccccgaggtggctttatactcgccaaaaaagagtttggtaaagcgatcaacacggctgtttttccggggcagcaaggtgggccattaatgcatgttatcgcagcaaaggcagttgccttcaagattgccgcatcagaagaatttcgtgagagacaaaggattactattgaagctgctcgaaccgtagccaagcgaataggggaggattacaggctacgagatagaggtatcgatattttgacaggaggaactgatgtccatatggtccttattgacatgagaaagtctgacatggatggcctgacaggacaaaaccttcttcacgaggttggtgtaacggttaatcggaattcgatgccttatgacaaaaggccaccaagaataaccagtggtattaggataggaacacccgcccttgtaacacgtgggctttccctggatgaattcgatgaggttgccgatattatctctaatgctttgctcacgattgatcttccgaagcaaaaacagagggcactcaggatagctcgggcacatcccgtttacgaaggcctaaggcaatattga

SEQ ID NO: 79730 - protein, 428 aa, Tropheryma whipplei TW08/27
MNHGVYQNLFIDSLDSVDPQIAEVLDLELRRQRDFLEMIASENFVPRAILQAQGSVLTNKYAEGYPQNRYYGGCECVDLAEDLAISRVRDLFGSEFANVQPHSGSTANAAALMALTEVGSTIMGLELDHGGHLTHGMPLSFSGKHYKAVTYRLDPKTCLIDMDSVRDLALRHRPSVIIAGWSAYVRHLDFEAFRSIADEVGARLWVDMAHFAGLVAAGLYPSPIPWADVVTSTTHKTLAGPRGGFILAKKEFGKAINTAVFPGQQGGPLMHVIAAKAVAFKIAASEEFRERQRITIEAARTVAKRIGEDYRLRDRGIDILTGGTDVHMVLIDMRKSDMDGLTGQNLLHEVGVTVNRNSMPYDKRPPRITSGIRIGTPALVTRGLSLDEFDEVADIISNALLTIDLPKQKQRALRIARAHPVYEGLRQY

SEQ ID NO: 79731 - DNA, 1335 bp, Streptococcus pyogenes SSI-1
  CDS (1)..(1335): transl_table=11
atgctttttaccgaaacctcgactatgcagatgataaaacacaattacgattcatcaaaaacttacaaggagatgacaatgatttttgataaaggtaatgttgaagactttgataaagagctttgggatgccattcatgctgaagaagaaagacaagaacatcatatcgaattgattgcatctgaaaacatggtttcaaaagctgtcatggcagctcaaggttctgttttaaccaataagtatgcagaaggctatccaggtaatcgctattatggtggaacagaatgtgtggatattgtcgaaacgcttgctattgaacgtgctaagaaacttttcggtgccgcatttgccaatgttcaagcccattccggaagtcaagccaatgcagcagcttatatggccttaattgaggctggtgataccgtattaggaatggatttggctgcaggtggtcatctcacgcatggctctccagtaaatttttctggaaaaacttaccattttgtgggttattcagtagatgctgatactgaaatgttaaattatgaggcgattttagaacaagcaaaggcggtccagccaaagcttatcgttgcaggggcttcggcctactctagaaacattgattttgaaaagtttcgtgccattgctgatcacgtaggtgcttacttaatggtggacatggctcacatcgctggccttgtagcagcaggtgtgcacccgagtcctgtcccttatgcgcatattgtgacatcaacaacccataaaaccttacgtggtcctcgtggaggcttgatattaaccaatgacgaagctcttgctaaaaagattaattcggccgttttccctggtttacaaggaggacctctggaacacgtgattgctgccaaagcggttgccttcaaagaagccttggatccagcctttaaagactatgcacaagctattattgataatactgcggctatggcagcagtttttgcacaagatgatcgtttccgtctgatctcaggtggtacagataatcatgtctttttagtagatgtcactaaggttattgctaatggtaaactagcgcaaaatcttctggatgaggttaatattacccttaataaaaatgccattccttttgaaaccttgtcgccatttaatacctcaggtattcgcattggttgtgctgccataaccagccgtggtatgggtgttaaagagagtcagaccattgcccgtcttatcatcaaagccttggttaatcatgatcaagaaactattcttgaagaagtccgtcaggaagtgcgtcagttaaccgatgccttcccactctataaaaagtaa

SEQ ID NO: 79732 - protein, 444 aa, Streptococcus pyogenes SSI-1
MLFTETSTMQMIKHNYDSSKTYKEMTMIFDKGNVEDFDKELWDAIHAEEERQEHHIELIASENMVSKAVMAAQGSVLTNKYAEGYPGNRYYGGTECVDIVETLAIERAKKLFGAAFANVQAHSGSQANAAAYMALIEAGDTVLGMDLAAGGHLTHGSPVNFSGKTYHFVGYSVDADTEMLNYEAILEQAKAVQPKLIVAGASAYSRNIDFEKFRAIADHVGAYLMVDMAHIAGLVAAGVHPSPVPYAHIVTSTTHKTLRGPRGGLILTNDEALAKKINSAVFPGLQGGPLEHVIAAKAVAFKEALDPAFKDYAQAIIDNTAAMAAVFAQDDRFRLISGGTDNHVFLVDVTKVIANGKLAQNLLDEVNITLNKNAIPFETLSPFNTSGIRIGCAAITSRGMGVKESQTIARLIIKALVNHDQETILEEVRQEVRQLTDAFPLYKK

SEQ ID NO: 79733 - DNA, 1272 bp, Streptomyces avermitilis MA-4680
  CDS (1)..(1272): transl_table=11
atgtcggtcacgcatgtaccggaagccgtacggcccgccgtcgccggggccgacttcgaggcccttcgtcggcaggatcccgagctggccgagatcctcatcggggagctcgaccggcagtcgaccacgttgcagctgatcgccgccgagaacttcacctcgccggccgtgctcgccgccctcggctcaccgctcgccaacaagtacgccgaggggtaccccggtgcccggtaccacggcggctgcgagttcgtcgatgtcgccgagcgcctggccgtcgaccgggcgacggccctgttcggcgccgcgcacgccaatgtgcagtcgcactccggctcgtccgcggtgctcgccgcgtacgccgcgctgctgcggcccggggacaccgtcctcgcgatgggcctgccgttcggcggccatctcacgcacggctcgcccgccaacttctccggccgctggttcgacttcgtcggctacggggtggacgccgagaccgggctcatcgactacgagcaggtgcgcaccctcgcacggtcgcaccgcccgaaggccatcgtctgcggatccatctcctatccccggcacatcgactacgcggcgttccgcgagatcgccgatgaggtgggcgcccatctcatcgccgacgccgcccaccccatcgggctcgtcgccgggggagcggcgcccaatccggtgccgtacgccgatgtcgtctgcgccaccacccacaaggtgctgcgcggcccccgcggcggcatgatcctctgcggcggtgaactggccgagcgcatcgaccgggccgtcttcccgttcacgcagggcggcgcgcagatgcacaccatcgccgccaaggccgtcgcgttcggcgaggcggcgaccccggctttcgccgcgtacgcccgtcaggtggtcgccaacgcgcgcgtgctcgccgagaggctggccgccgaggggctcgcgatcaccaccggcggcacggacacccacctgctgaccgtcgatcccgcgccgctcggcgtggagggccgcaccgcccgcggccggttggccgccgcgggcatggtcctcgacacctgtgcccttcctcacggcgacgcccgcggtctgcgcctcggcacggccgcgctgaccacccaggggatgggcgagaccgagatggcccgcgtcgccaagctgttcgcgggcgtgctgcgggacgagaccgacagcaagacggcacgtgaagaagtgcgggagctggctggtggatttccgccgtatcccggccggtga

SEQ ID NO: 79734 - protein, 423 aa, Streptomyces avermitilis MA-4680
MSVTHVPEAVRPAVAGADFEALRRQDPELAEILIGELDRQSTTLQLIAAENFTSPAVLAALGSPLANKYAEGYPGARYHGGCEFVDVAERLAVDRATALFGAAHANVQSHSGSSAVLAAYAALLRPGDTVLAMGLPFGGHLTHGSPANFSGRWFDFVGYGVDAETGLIDYEQVRTLARSHRPKAIVCGSISYPRHIDYAAFREIADEVGAHLIADAAHPIGLVAGGAAPNPVPYADVVCATTHKVLRGPRGGMILCGGELAERIDRAVFPFTQGGAQMHTIAAKAVAFGEAATPAFAAYARQVVANARVLAERLAAEGLAITTGGTDTHLLTVDPAPLGVEGRTARGRLAAAGMVLDTCALPHGDARGLRLGTAALTTQGMGETEMARVAKLFAGVLRDETDSKTAREEVRELAGGFPPYPGR

SEQ ID NO: 79735 - DNA, 1449 bp, Streptomyces avermitilis MA-4680
  CDS (1)..(1449): transl_table=11
atgcccgagcagcccctttccaccgagtccaccgccttccgcagcgccctcgacgtgatccgggccgtggagccccgcgtcgccgacgccatcgggcaggagatcgccgaccagcgcgagatgctcaagctgatcgcctccgagaactacgcctctccggccaccctcctggccatgggcaactggttcagcgacaagtacgccgagggcacggtcggccgccgcttctacgccggctgccgcaacgtcgacaccgtcgaggcactcgccgccgagcacgcccgcgagctcttcggcgcccagcacgcctacgcccagccgcactccggcatcgacgccaacctcgtcgccttctgggccgtcctcgcggaccgggtggaggcccccgccctcgcgaaggcgggcgtccgcaacgtcaacgacctctccgacgccgactgggccgagctgcgccgcgccttcggcaaccagcgcatgctcggcatgtccctggacgccggcggccacctcacccacggcttccgcccgaacatctccggcaagatgttcgaccagcgctcctacggcaccgaccccgccaccggcctcatcgactacgaggccctgcgcacctccgcccgcgagttcaagccgctgatcatcgtcgccggctactccgcctacccccgcctcgtgaacttccggatcatgcgggagatcgccgacgaggtcggcgcgaccctgatggtcgacatggcgcacttcgccggcctcgtcgcgggcaaggtcctcaccggcgacttcgacccggtcccgcacgcccagatcgtgacgaccaccacgcacaagtcgctgcgcggcccgcgcggcggcatggtgctgtgcgacgactcgctcaaggaccaggtcgaccgcggctgcccgatggtcctcggtggcccccttccgcacgtcatggccgccaaggccgtcgcgctcgccgaggcccgccgccccgagttccgcgactacgcccaggccgtcgtcgacaactcccgcgccctcgccgagggcctggtgcgccgcggcgccaccctggtcaccggcggcaccgacaaccacctcaacctgatcgacgtcgcctcctcctacggcctcaccggccgccaggccgagaccgcgctgctcgactcgggcatcgtcaccaaccgcaacgcgatccccgccgaccccaacggcgcctggtacacctccggcatccgcatcggcacgcccgccctgaccacgcgcggcctcggcacggccgagatggacgagatcgcgggcctcatcgaccgcgtcctcaccaccaccgagcccggcaccaccgccaagggcgccccctccaaggcccagcacgtcctggacccgaagatcgcggacgagatcgcccaccgcgccggagacctgctgaccggcttcccgctctacccggagatcgacctcggctga

SEQ ID NO: 79736 - protein, 482 aa, Streptomyces avermitilis MA-4680
MPEQPLSTESTAFRSALDVIRAVEPRVADAIGQEIADQREMLKLIASENYASPATLLAMGNWFSDKYAEGTVGRRFYAGCRNVDTVEALAAEHARELFGAQHAYAQPHSGIDANLVAFWAVLADRVEAPALAKAGVRNVNDLSDADWAELRRAFGNQRMLGMSLDAGGHLTHGFRPNISGKMFDQRSYGTDPATGLIDYEALRTSAREFKPLIIVAGYSAYPRLVNFRIMREIADEVGATLMVDMAHFAGLVAGKVLTGDFDPVPHAQIVTTTTHKSLRGPRGGMVLCDDSLKDQVDRGCPMVLGGPLPHVMAAKAVALAEARRPEFRDYAQAVVDNSRALAEGLVRRGATLVTGGTDNHLNLIDVASSYGLTGRQAETALLDSGIVTNRNAIPADPNGAWYTSGIRIGTPALTTRGLGTAEMDEIAGLIDRVLTTTEPGTTAKGAPSKAQHVLDPKIADEIAHRAGDLLTGFPLYPEIDLG

SEQ ID NO: 79737 - DNA, 1554 bp, Arabidopsis thaliana
  CDS (1)..(1554)
atggcgttggctcttcgtagactctcctcttccgttaagaaaccgatctcgcttctctcctctaatggcggttcactccgtttcatgtcgtctttatcaaccgcagctatggcggaatcggagaaatctcgttctagttggattaagcaattgaatgcatctctagatgaaatcgatcctgaagttgcggatattatcgaattagagaaggctagacaatggaagggatttgaacttataccgtcagagaatttcacttctctatctgtgatgcaagccgttggttctgttatgactaataagtatagtgaaggataccctggagctagatactatggaggaaatgagtacattgacatggctgagacattatgtcaaaaacgcgcattagaagcttttcagttagatccttctaaatggggagtcaatgtgcagtctttatcaggatcaccagctaatttccaagtttacactgcattgttgaagcctcatgaaagaatcatggcacttgatttacctcatggtggacatctttctcatggttatcagactgacacgaagaaaatatcggctgtatccatcttttttgagacaatgccatacagattggatgagaacactggttacattgattatgaccagctagaaaagagtgccgtgcttttcagaccgaaacttattgttgcgggtgcaagtgcttatgctcgtctatatgactatgcacgtattcgtaaggtctgtaacaagcaaaaggcagttatgttggctgatatggctcatattagtgggttggttgctgctggcgttattccttctccttttgagtatgcagatgttgttacgactacaactcacaaatcgcttcgcggtcctagaggggctatgatattctttaggaaggggttaaaagagattaacaaacaagggaaagaggtcatgtatgactatgaggacagaattaatcaagctgtttttcctggactgcaaggtggtccacataatcacactataacgggtctagcagttgctctgaagcaggcaagaactcctgagtacaaggcctaccaggatcaagttctccgtaattgctcaaagtttgctgagactttgcttgcgaaaggatatgatttagtgtctggaggcactgataatcatttagttttggtgaatctgaaaaacaagggaatagatggatcaagagtggaaaaagtattagaattagtacatattgcagcaaacaagaatactgttcctggtgatgtttctgccatggttcccggtggcatccgtatgggaacaccagccctcacatcaagaggattcattgaggaagattttgcaaaagtggcggagtattttgatttagccgtcaagatagccttaaagatcaaagcagagtctcaaggaacaaagttgaaagactttgtagcaacaatgcaatcaaatgagaaattacagtcagagatgtcaaagctccgtgagatggtagaagaatatgctaagcaattcccaacgattgggttcgagaaagagacgatgagatacaaagagtag

SEQ ID NO: 79738 - protein, 517 aa, Arabidopsis thaliana
MALALRRLSSSVKKPISLLSSNGGSLRFMSSLSTAAMAESEKSRSSWIKQLNASLDEIDPEVADIIELEKARQWKGFELIPSENFTSLSVMQAVGSVMTNKYSEGYPGARYYGGNEYIDMAETLCQKRALEAFQLDPSKWGVNVQSLSGSPANFQVYTALLKPHERIMALDLPHGGHLSHGYQTDTKKISAVSIFFETMPYRLDENTGYIDYDQLEKSAVLFRPKLIVAGASAYARLYDYARIRKVCNKQKAVMLADMAHISGLVAAGVIPSPFEYADVVTTTTHKSLRGPRGAMIFFRKGLKEINKQGKEVMYDYEDRINQAVFPGLQGGPHNHTITGLAVALKQARTPEYKAYQDQVLRNCSKFAETLLAKGYDLVSGGTDNHLVLVNLKNKGIDGSRVEKVLELVHIAANKNTVPGDVSAMVPGGIRMGTPALTSRGFIEEDFAKVAEYFDLAVKIALKIKAESQGTKLKDFVATMQSNEKLQSEMSKLREMVEEYAKQFPTIGFEKETMRYKE

SEQ ID NO: 79739 - DNA, 1602 bp, Arabidopsis thaliana
  CDS (1)..(1602)
atggcgttggctcttcgtagactctcctcttccgttaagaaaccgatctcgcttctctcctctaatggcggttcactccgtttcatgtcgtctttatcaaccgcagctatggcggaatcggagaaatctcgttctagttggattaagcaattgaatgcatctctagatgaaatcgatcctgaagttgcggatattatcgaattagagaaggctagacaatggaagggatttgaacttataccgtcagagaatttcacttctctatctgtgatgcaagccgttggttctgttatgactaataagtatagtgaaggataccctggagctagatactatggaggaaatgagtacattgacatggctgagacattatgtcaaaaacgcgcattagaagcttttcagttagatccttctaaatggggagtcaatgtgcagtctttatcaggatcaccagctaatttccaagtttacactgcattgttgaagcctcatgaaagaatcatggcacttgatttacctcatggtggacatctttctcatggttatcagactgacacgaagaaaatatcggctgtatccatcttttttgagacaatgccatacagattggatgagaacactggttacattgattatgaccagctagaaaagagtgccgtgcttttcagaccgaaacttattgttgcgggtgcaagtgcttatgctcgtctatatgactatgcacgtattcgtaaggtctgtaacaagcaaaaggcagttatgttggctgatatggctcatattagtgggttggttgctgctggcgttattccttctccttttgagtatgcagatgttgttacgactacaactcacaaatcgcttcgcggtcctagaggggctatgatattctttaggaaggggttaaaagagattaacaaacaagggaaagaggtcatgtatgactatgaggacagaattaatcaagctgtttttcctggactgcaaggtggtccacataatcacactataacgggtctagcagttgctctgaagcaggcaagaactcctgagtacaaggcctaccaggatcaagttctccgtaattgctcaaagtttgctgagttggatataagacctactgtaatcatctcatatggcttgtcaatgcagactttgcttgcgaaaggatatgatttagtgtctggaggcactgataatcatttagttttggtgaatctgaaaaacaagggaatagatggatcaagagtggaaaaagtattagaattagtacatattgcagcaaacaagaatactgttcctggtgatgtttctgccatggttcccggtggcatccgtatgggaacaccagccctcacatcaagaggattcattgaggaagattttgcaaaagtggcggagtattttgatttagccgtcaagatagccttaaagatcaaagcagagtctcaaggaacaaagttgaaagactttgtagcaacaatgcaatcaaatgagaaattacagtcagagatgtcaaagctccgtgagatggtagaagaatatgctaagcaattcccaacgattgggttcgagaaagagacgatgagatacaaagagtag

SEQ ID NO: 79740 - protein, 533 aa, Arabidopsis thaliana
MALALRRLSSSVKKPISLLSSNGGSLRFMSSLSTAAMAESEKSRSSWIKQLNASLDEIDPEVADIIELEKARQWKGFELIPSENFTSLSVMQAVGSVMTNKYSEGYPGARYYGGNEYIDMAETLCQKRALEAFQLDPSKWGVNVQSLSGSPANFQVYTALLKPHERIMALDLPHGGHLSHGYQTDTKKISAVSIFFETMPYRLDENTGYIDYDQLEKSAVLFRPKLIVAGASAYARLYDYARIRKVCNKQKAVMLADMAHISGLVAAGVIPSPFEYADVVTTTTHKSLRGPRGAMIFFRKGLKEINKQGKEVMYDYEDRINQAVFPGLQGGPHNHTITGLAVALKQARTPEYKAYQDQVLRNCSKFAELDIRPTVIISYGLSMQTLLAKGYDLVSGGTDNHLVLVNLKNKGIDGSRVEKVLELVHIAANKNTVPGDVSAMVPGGIRMGTPALTSRGFIEEDFAKVAEYFDLAVKIALKIKAESQGTKLKDFVATMQSNEKLQSEMSKLREMVEEYAKQFPTIGFEKETMRYKE

SEQ ID NO: 79741 - DNA, 1317 bp, Vibrio vulnificus YJ016
  CDS (1)..(1317): transl_table=11
atgattgaaaggttatctaccatgaatagtcattaccaaaatcacagcttggaaaactttttctcgactaacttgtctgcaacggatgatgccgtttttgctggtattcaagccgaatttactcgtcaaaatgaacaaatcgaattgatcgcttctgagaacatcgtgtcgaaagcggtcatgcaagcgcaaggcacctgcctcaccaataaatatgcagaaggttacccaggccgtcgttactacggtggttgtgaacacgttgataccgtggaagccatcgctatcgaacgcgcgaaaaaactttttaattgcgaatacgcaaacgttcaaccgcactctggcgctcaagccaacggcgcggtgaaactggcgctattgcaacctggcgacaccattatgggcatgtcgctcgatgcaggtggccacttaactcacggtgcgcgccctgctctttcgggcaaatggtttaacgccgttcaatacggtgttgataaagagacgctcgaaatcaactacgatgatgttcgcgcactggcggtagaacacaaaccaaaaatgattattgctggtggtagcgcgattcctcgcgtgattgattttgccaagttccgtgaaatcgctgacgaagttggcgcgattttaatggttgatatggcgcacatcgcgggtttgatcgctacaggcgcacaccctagcccactgcctcatgcacacgtggtgaccaccaccacacacaaaacgctacgcggaccacgcggcggcatgatcctcaccaatcacgaagaaatcattaagaaaatcaactctgcggtattccctggcctacaaggcggcccgctgatgcacgtgattgcagcgaaagcggtggcgtttggcgaagcactcggccctgagttcaaaacttatatcgattcggtgatcaataacgcaaaagttcttgctgaagtgttgcaaactcgcggttgtgacattgtgactggcggaacggacacgcacctaatgctggttgatcttcgtcctaagggattgaaaggcaacaaagcagaagaggcactagagcgtgcggggatcacatgtaacaaaaatggcatcccattcgacacagaaaaacctatgattacatcgggtgttcgtttgggcacgccagcgggtacaagccgaggctttggcgcagaagaattcaaattaataggtcactggattggtgatgttctcgacgggttagttgaaaaccctgagggcaacgcggaagtagaacaacgcgtgcgtaaagaagtaaaagcactctgttcacgcttcccactttaccagtaa

SEQ ID NO: 79742 - protein, 438 aa, Vibrio vulnificus YJ016
MIERLSTMNSHYQNHSLENFFSTNLSATDDAVFAGIQAEFTRQNEQIELIASENIVSKAVMQAQGTCLTNKYAEGYPGRRYYGGCEHVDTVEAIAIERAKKLFNCEYANVQPHSGAQANGAVKLALLQPGDTIMGMSLDAGGHLTHGARPALSGKWFNAVQYGVDKETLEINYDDVRALAVEHKPKMIIAGGSAIPRVIDFAKFREIADEVGAILMVDMAHIAGLIATGAHPSPLPHAHVVTTTTHKTLRGPRGGMILTNHEEIIKKINSAVFPGLQGGPLMHVIAAKAVAFGEALGPEFKTYIDSVINNAKVLAEVLQTRGCDIVTGGTDTHLMLVDLRPKGLKGNKAEEALERAGITCNKNGIPFDTEKPMITSGVRLGTPAGTSRGFGAEEFKLIGHWIGDVLDGLVENPEGNAEVEQRVRKEVKALCSRFPLYQ

SEQ ID NO: 79743 - DNA, 1521 bp, Treponema denticola ATCC 35405
  CDS (1)..(1521): transl_table=11
atgaaagaaggtttaaagaaataccttgagagagaaggctcaaatgcaaagttagctatggttgcatatttggccaatttggatcaggttgcctccgtgtaccctgaagttgcatcaagcattgtaaaagaaatagaaaatcagcgaagtcacttaaaacttatcgccagcgaaaactattcttcattggcagttcaagctgctatggggaacctgcttaccgataagtatgcagaaggttttcctgagcatagatattacggaggatgcgaaaacgtcgatgccgttgaaatggctgcttgcgaagaagcatgtaaaatatttggagccgaacatgcctatgttcagcctcactccggagctgatgcaaatatcgtagcttattgggctatcttaaatgccaaggttgaggagcccttcttaaagaaatttgagacggttgtagacggaaaggttaaaaagatgagccttgaaggtttgagccatgaggagtgggaagaattacgccatgctcttggaaatcaaaaacttatgggcttggattactattcgggcggacaccttacccacggctatgttcaaaacgtttcttcaaaaatgtttagaacatgctcatatacggtaaataaagaaaccggtgagcttgattatgccgaaatcgaaaaaagagcaatggaagaaaagcccttgattcttttggccggatacagtgcctatccccgaaagattaactttaagaaatttagagaaattgcggataaatgcggagccgttttaatggttgatatggcccactttgccggtcttgttgcaggaaaggtttttgaaggtgaatataaccctgttctttgggctgatgtggtaacaactacaacccacaaaactcttcgaggcccccgcggtgctatgattctttgtaaaaaagaatttgccgaattcgttgataagggatgcccccttgtaatcggcggacctcttcctcatgttatggctgcaaaggccgttgccttccgcgaagcaagcagcaaggaatatcaagactatgcccacaaggtaagagacaatgctgtcgccctcgctgaagaatgtatgaagctcggtatgaagctccagacaaacggaacagacaatcacttaatgctgattaatgtaacaaaatacggcttaaacggccgccaagcagaaactgcaatgtccgagtgcggtgtaacccttaacagaaacagcttgccctttgatccgaacggcccctggtggacaagcggtctacgcgtaggaactcctgccgtaacaagtcttggaatgggaaaacccgaaatgaagcagattgcttcaattatagacagggtattaaaagcttcaaagccgggtgtaacaaagagcggagctcccagcaaggctaatgtagttgtagaccctgccgtaaaagcagagatacaaaaagaagtagatgctcttttacataaatttgttctttatcccgaattggatttggactatttaaagagcgtttattgctaa

SEQ ID NO: 79744 - protein, 506 aa, Treponema denticola ATCC 35405
MKEGLKKYLEREGSNAKLAMVAYLANLDQVASVYPEVASSIVKEIENQRSHLKLIASENYSSLAVQAAMGNLLTDKYAEGFPEHRYYGGCENVDAVEMAACEEACKIFGAEHAYVQPHSGADANIVAYWAILNAKVEEPFLKKFETVVDGKVKKMSLEGLSHEEWEELRHALGNQKLMGLDYYSGGHLTHGYVQNVSSKMFRTCSYTVNKETGELDYAEIEKRAMEEKPLILLAGYSAYPRKINFKKFREIADKCGAVLMVDMAHFAGLVAGKVFEGEYNPVLWADVVTTTTHKTLRGPRGAMILCKKEFAEFVDKGCPLVIGGPLPHVMAAKAVAFREASSKEYQDYAHKVRDNAVALAEECMKLGMKLQTNGTDNHLMLINVTKYGLNGRQAETAMSECGVTLNRNSLPFDPNGPWWTSGLRVGTPAVTSLGMGKPEMKQIASIIDRVLKASKPGVTKSGAPSKANVVVDPAVKAEIQKEVDALLHKFVLYPELDLDYLKSVYC

SEQ ID NO: 79745 - DNA, 1443 bp, Strongylocentrotus purpuratus
  CDS (1)..(1443)
atggctactgttaacggaaccaagacagtgatcaagacagcgatgaatggtgatgggagtctaaagacagtcaccaatggcaatggtgatgggagtctcaagaaagttagcaatggcaatggcgatgggagtctcaagacagtcactaatagtgatgggagtccttggtttggacaccagtcgttggaagagaatgacccggagatgtatgctatcatcttaaaggagaaggatcgtcaaaggaaaggcttagaactgattgcatcagagaacttcccaagcagggctgttctagaggctctcggctcctgtctgcaaaataaatactgcgagggataccctggaaatagatactatggcggtacgcagttctttgatgaaatggaacttctgactcagaagagagccttagcagcatttggtttgaaggaggaggaatggggcgtcaatgtccagccgtattcaggctctccagcaaactttgccgtctacactggagtgattggcccccatggtcgtatcatgggtctggatctaccggacggtggtcaccttacacatggattcatgacggctaagaagaagatctctgcaacgtccttgttctttgagtcaatgccttacagggtgaatcctaaaacaggcctcattgattatgaagctctagctgtaaacgccagattgttccgtccacaaatgatcattgcaggtatgagctgttatcctaggaatctagactacaaacgtttcaaggagatagcagtagagaatgatgcttatcttctagctgatatggctcacgtgagtggattagttgctgctggagttgtagctaatccttttgagtactgtgacatcgttacaagcacaacacacaagacacttagaggacctcgatcaggcatcatcttcttccgtagaggcgttggtgtagccttattgcaggcttcacaaccggagtttaagctgtatgcccgggatgtcgtcacaaacgcacaagccatggctgaagaacttatgaagagaggttatactatttcttcaggtggaacggacactcatcttctactccttgacctccgacccctgggactggatggagctcgtggagagttcgtgcttgagcgtgtaggaatcgttctcaataagaacacatgtcctggggacaagagcgcactcaagcctggcggtctaaggatcggtacaccagctctcacgtcaagaaacttcaaggttactgatttcatgatggtggttgactacattgatagaggtctgaagttgactgcagaggcaaacaagaagtgttcaagtacaacccttcgtgacttcaaggcttacgtcacaagtgattcagacttccaatccaaacttgctgcccttgaaaaggaggtcgaatcttttgctgtaaggttcccattacctggtcatgaagttctgtaa

SEQ ID NO: 79746 - protein, 480 aa, Strongylocentrotus purpuratus
MATVNGTKTVIKTAMNGDGSLKTVTNGNGDGSLKKVSNGNGDGSLKTVTNSDGSPWFGHQSLEENDPEMYAIILKEKDRQRKGLELIASENFPSRAVLEALGSCLQNKYCEGYPGNRYYGGTQFFDEMELLTQKRALAAFGLKEEEWGVNVQPYSGSPANFAVYTGVIGPHGRIMGLDLPDGGHLTHGFMTAKKKISATSLFFESMPYRVNPKTGLIDYEALAVNARLFRPQMIIAGMSCYPRNLDYKRFKEIAVENDAYLLADMAHVSGLVAAGVVANPFEYCDIVTSTTHKTLRGPRSGIIFFRRGVGVALLQASQPEFKLYARDVVTNAQAMAEELMKRGYTISSGGTDTHLLLLDLRPLGLDGARGEFVLERVGIVLNKNTCPGDKSALKPGGLRIGTPALTSRNFKVTDFMMVVDYIDRGLKLTAEANKKCSSTTLRDFKAYVTSDSDFQSKLAALEKEVESFAVRFPLPGHEVL

SEQ ID NO: 79747 - DNA, 1491 bp, Strongylocentrotus purpuratus
  CDS (1)..(1491)
atggagtcgccagtagaaaagaaggcaaagctgaataacggagacgaaatggctactgttaacggaaccaagacagtgatcaagacagcgatgaatggtgatgggagtctaaagacagtcaccaatggcaatggtgatgggagtctcaagaaagttagcaatggcaatggcgatgggagtctcaagacagtcactaatagtgatgggagtccttggtttggacaccagtcgttggaagagaatgacccggagatgtatgctatcatcttaaaggagaaggatcgtcaaaggaaaggcttagaactgattgcatcagagaacttcccaagcagggctgttctagaggctctcggctcctgtctgcaaaataaatactgcgagggataccctggaaatagatactatggcggtacgcagttctttgatgaaatggaacttctgactcagaagagagccttagcagcatttggtttgaaggaggaggaatggggcgtcaatgtccagccgtattcaggctctccagcaaactttgccgtctacactggagtgattggcccccatggtcgtatcatgggtctggatctaccggacggtggtcaccttacacatggattcatgacggctaagaagaagatctctgcaacgtccttgttctttgagtcaatgccttacagggtgaatcctaaaacaggcctcattgattatgaagctctagctgtaaacgccagattgttccgtccacaaatgatcattgcaggtatgagctgttatcctaggaatctagactacaaacgtttcaaggagatagcagtagagaatgatgcttatcttctagctgatatggctcacgtgagtggattagttgctgctggagttgtagctaatccttttgagtactgtgacatcgttacaagcacaacacacaagacacttagaggacctcgatcaggcatcatcttcttccgtagaggcgttggtgtagccttattgcaggcttcacaaccggagtttaagctgtatgcccgggatgtcgtcacaaacgcacaagccatggctgaagaacttatgaagagaggttatactatttcttcaggtggaacggacactcatcttctactccttgacctccgacccctgggactggatggagctcgtggagagttcgtgcttgagcgtgtaggaatcgttctcaataagaacacatgtcctggggacaagagcgcactcaagcctggcggtctaaggatcggtacaccagctctcacgtcaagaaacttcaaggttactgatttcatgatggtggttgactacattgatagaggtctgaagttgactgcagaggcaaacaagaagtgttcaagtacaacccttcgtgacttcaaggcttacgtcacaagtgattcagacttccaatccaaacttgctgcccttgaaaaggaggtcgaatcttttgctgtaaggttcccattacctggtcatgaagttctgtaa

SEQ ID NO: 79748 - protein, 496 aa, Strongylocentrotus purpuratus
MESPVEKKAKLNNGDEMATVNGTKTVIKTAMNGDGSLKTVTNGNGDGSLKKVSNGNGDGSLKTVTNSDGSPWFGHQSLEENDPEMYAIILKEKDRQRKGLELIASENFPSRAVLEALGSCLQNKYCEGYPGNRYYGGTQFFDEMELLTQKRALAAFGLKEEEWGVNVQPYSGSPANFAVYTGVIGPHGRIMGLDLPDGGHLTHGFMTAKKKISATSLFFESMPYRVNPKTGLIDYEALAVNARLFRPQMIIAGMSCYPRNLDYKRFKEIAVENDAYLLADMAHVSGLVAAGVVANPFEYCDIVTSTTHKTLRGPRSGIIFFRRGVGVALLQASQPEFKLYARDVVTNAQAMAEELMKRGYTISSGGTDTHLLLLDLRPLGLDGARGEFVLERVGIVLNKNTCPGDKSALKPGGLRIGTPALTSRNFKVTDFMMVVDYIDRGLKLTAEANKKCSSTTLRDFKAYVTSDSDFQSKLAALEKEVESFAVRFPLPGHEVL

SEQ ID NO: 79749 - DNA, 1605 bp, Strongylocentrotus purpuratus
  CDS (1)..(1605)
atggagtcgccagtagaaaagaaggcaaagctgaataacggagacgaaatggctactgttaacggaaccaagacagtgatcaagacagcgatgaatggtgatgggagtctaaagacagtcaccaatggcaatggtgatgggagtctcaagaaagttagcaatggcaatggcgatgggagtctcaagacagtcactaatagtgatgggagtccttggtttggacaccagtcgttggaagagaatgacccggagatgtatgctatcatcttaaaggagaaggatcgtcaaaggaaaggcttagaactgattgcatcagagaacttcccaagcagggctgttctagaggctctcggctcctgtctgcaaaataaatactgcgagggataccctggaaatagatactatggcggtacgcagttctttgatgaaatggaacttctgactcagaagagagccttagcagcatttggtttgaaggaggaggaatggggcgtcaatgtccagccgtattcaggctctccagcaaactttgccgtctacactggagtgattggcccccatggtcgtatcatgggtctggatctaccggacggtggtcaccttacacatggattcatgacggctaagaagaagatctctgcaacgtccttgttctttgagtcaatgccttacagggtgaatcctaaaacaggcctcattgattatgaagctctagctgtaaacgccagattgttccgtccacaaatgatcattgcaggtatgagctgttatcctaggaatctagactacaaacgtttcaaggagatagcagtagagaatgatgcttatcttctagctgatatggctcacgtgagtggattagttgctgctggagttgtagctaatccttttgagtactgtgacatcgttacaagcacaacacacaagacacttagaggacctcgatcaggcatcatcttcttccgtagaggtgtccgtaaggttctcaagaatggcactgaggtgatgtatgaccttgagaaaccgatcaacgaagccgtcttccctggtcttcaaggtggaccccatatgcatgctgtaggaggcgttggtgtagccttattgcaggcttcacaaccggagtttaagctgtatgcccgggatgtcgtcacaaacgcacaagccatggctgaagaacttatgaagagaggttatactatttcttcaggtggaacggacactcatcttctactccttgacctccgacccctgggactggatggagctcgtggagagttcgtgcttgagcgtgtaggaatcgttctcaataagaacacatgtcctggggacaagagcgcactcaagcctggcggtctaaggatcggtacaccagctctcacgtcaagaaacttcaaggttactgatttcatgatggtggttgactacattgatagaggtctgaagttgactgcagaggcaaacaagaagtgttcaagtacaacccttcgtgacttcaaggcttacgtcacaagtgattcagacttccaatccaaacttgctgcccttgaaaaggaggtcgaatcttttgctgtaaggttcccattacctggtcatgaagttctgtaa

SEQ ID NO: 79750 - protein, 534 aa, Strongylocentrotus purpuratus
MESPVEKKAKLNNGDEMATVNGTKTVIKTAMNGDGSLKTVTNGNGDGSLKKVSNGNGDGSLKTVTNSDGSPWFGHQSLEENDPEMYAIILKEKDRQRKGLELIASENFPSRAVLEALGSCLQNKYCEGYPGNRYYGGTQFFDEMELLTQKRALAAFGLKEEEWGVNVQPYSGSPANFAVYTGVIGPHGRIMGLDLPDGGHLTHGFMTAKKKISATSLFFESMPYRVNPKTGLIDYEALAVNARLFRPQMIIAGMSCYPRNLDYKRFKEIAVENDAYLLADMAHVSGLVAAGVVANPFEYCDIVTSTTHKTLRGPRSGIIFFRRGVRKVLKNGTEVMYDLEKPINEAVFPGLQGGPHMHAVGGVGVALLQASQPEFKLYARDVVTNAQAMAEELMKRGYTISSGGTDTHLLLLDLRPLGLDGARGEFVLERVGIVLNKNTCPGDKSALKPGGLRIGTPALTSRNFKVTDFMMVVDYIDRGLKLTAEANKKCSSTTLRDFKAYVTSDSDFQSKLAALEKEVESFAVRFPLPGHEVL

SEQ ID NO: 79751 - DNA, 1404 bp, Anopheles gambiae str. PEST
  CDS (1)..(1404)
atggctggaaatgcaaaactattgcatgagaccttgtgggatcaagatccggagcttatggatttgataagaaaggaaaagacgcgtcagatcagaggtttagagatgattgcaagcgaaaactttacttctctctctgtgctgcagtgtctcagctcctgtttgcataacaaatattcagaaggtttgcctggccaacgttactatggaggtaatgaatttattgaccaaatagagcttttggctcaaaagcgtgccctcgaagcttatcggttaagccccgaggaatggggttgcaacgttcaaccgtattctggttcaccagcaaattttgctgtgtacactgctcttattgaaccgcacggacgtatcatgggccttgatctacccgacggtggtcatttaacccacggtttcatgactcaaacgaaaaaaatatctgctacatcaatcttcttcgaaagcatgccatataaagtcgatccagttactgggttgatcgattacgacaagatggaggagacagcgcgcctcttcaaaccgaaagttattattgctggtatttcgtgctactcgcgttgtctggactacaaaaggttccgggaaattgccaaccaaaatggtgcatatttgttcgcagatatggcacatatttctgggctagttgcggccggagtgattccgtcaccattcgaatatgcggatgttgttagtaccacaacgcataagacattacgtggcccccgtgcaggagtaatcttcttccggaaaggcgtgcgcacagtgaaggcaaacggcgaaaaggtaatgtatgatttggaatcacgtatcaatcaggccgtgttccctggcctgcaaggtggtccgcacaatcatgctatcgcaggtatcgccacctgcatgttgcaagcgcaaagcccagaattccgcgcctaccaggaacaggtgataaaaaacgcacgcgccctttgtgccggactgcttgagaaaggatattctgtagcgacgggtggtacagatgtgcatttggtgttggtagatttacgcccagttgctattacgggtgcccgtgccgagtacatcttagaggaaatctccatagcatgcaacaaaaatactgttccaggtgataaatctgccttaaatccatctggcattcggctaggaactccggcacttacgacgcgcggtctacttgagaaagatatgcaacaggtagtggaatttatcgatcgtggattacgtctatcgaaggaaattgccaacgtctctggtccgaaactgtctgactttaagcgtatattacacgaagactccacgtttagtgaaaaagtgaacaatctgcgcaaggaagtggaacagtacagtgaacaattccttctgcctggttatgcagacttctaa

SEQ ID NO: 79752 - protein, 467 aa, Anopheles gambiae str. PEST
MAGNAKLLHETLWDQDPELMDLIRKEKTRQIRGLEMIASENFTSLSVLQCLSSCLHNKYSEGLPGQRYYGGNEFIDQIELLAQKRALEAYRLSPEEWGCNVQPYSGSPANFAVYTALIEPHGRIMGLDLPDGGHLTHGFMTQTKKISATSIFFESMPYKVDPVTGLIDYDKMEETARLFKPKVIIAGISCYSRCLDYKRFREIANQNGAYLFADMAHISGLVAAGVIPSPFEYADVVSTTTHKTLRGPRAGVIFFRKGVRTVKANGEKVMYDLESRINQAVFPGLQGGPHNHAIAGIATCMLQAQSPEFRAYQEQVIKNARALCAGLLEKGYSVATGGTDVHLVLVDLRPVAITGARAEYILEEISIACNKNTVPGDKSALNPSGIRLGTPALTTRGLLEKDMQQVVEFIDRGLRLSKEIANVSGPKLSDFKRILHEDSTFSEKVNNLRKEVEQYSEQFLLPGYADF

SEQ ID NO: 79753 - DNA, 1449 bp, Magnaporthe grisea 70-15
  CDS (1)..(1449)
atggccgaggctacttacgcattgtcggctactcataaggagatgcttgagaagtctcttctcgactccgaccctgaggtcgctgagatcatgaaacacgagatccagcgtcagcgcgagtccatcatccttatcgcctccgagaatgttacgtctcgggctgtcttcgatgcccttggttcgcctatgtcgaacaagtactccgagggctacccaggcaagcgctactacggtggcaaccagcacattgacgagattgagctcctctgccagcgccgtgctcttgctgccttcaacgtcactgaggacaagtggggtgtcaacgttcagtgcttgagtggcagccctgccaaccttcaggtttaccaggccattatgcctccccatggcaggctcatgggtctggacctccctcacggtggccacttgagccacggctaccagaccccccagcgaaagatttcggctgtttcgacctacttcgagaccatgccctaccgtgttgaccttgagactggcatcattgactacgaccagctcgagaagaacgtggtcctgtacaggcccaagattttggtggccggtacctctgcctactgccgcctgatcgattacgcgcggatgcgcaagatcgctgatctcgttggcgcttacttggtcgtcgacattgctcacatttctggcctcgtcgcttcgggtgtgatcccctccccgttcctccacgccgatgttgttactaccactacccacaagtctctccgtggtcctcgtggcgcgatgatcttcttccgcaggggtgttcgttccgtcgaccccaagactggcaaggagaccatgtacgacctcgaggagcccatcaacttctcggtcttccccggtcaccagggtggtccccacaaccacaccatcactgctctggctgtcgccctcaagcaggcatccacgcccgagttcaaggcctaccagcagcaggttgtcgacaacgccaaggcgttggagaacagcttcaaggagcttggccacaagctcgtctcggacggcaccgactcccacatggtcctggttgacctgcgtgcccactccctggatggtgctcgtgttgaggctgtacttgagcagatcaacatcgcctgcaacaagaacagcattcctggcgacaagagcgctcttaccccgtgcggtatccgtatcggtacccctgccatgaccagccgtggctttggtgtcgagcacttccagcgcgtcgccaaatacattgacgagagcatcaagatttgcaaggacgtccaggctgctctgcccaaggaggccaacaagctcaaggacttcaaggccaaggttgcttcgggcgaggtttccaggatcaacgagctcaagaaggagattgcgtcctggtgccaaaccttccctctccctgttgagggctggcgcaccgacgccggtatttaa

SEQ ID NO: 79754 - protein, 482 aa, Magnaporthe grisea 70-15
MAEATYALSATHKEMLEKSLLDSDPEVAEIMKHEIQRQRESIILIASENVTSRAVFDALGSPMSNKYSEGYPGKRYYGGNQHIDEIELLCQRRALAAFNVTEDKWGVNVQCLSGSPANLQVYQAIMPPHGRLMGLDLPHGGHLSHGYQTPQRKISAVSTYFETMPYRVDLETGIIDYDQLEKNVVLYRPKILVAGTSAYCRLIDYARMRKIADLVGAYLVVDIAHISGLVASGVIPSPFLHADVVTTTTHKSLRGPRGAMIFFRRGVRSVDPKTGKETMYDLEEPINFSVFPGHQGGPHNHTITALAVALKQASTPEFKAYQQQVVDNAKALENSFKELGHKLVSDGTDSHMVLVDLRAHSLDGARVEAVLEQINIACNKNSIPGDKSALTPCGIRIGTPAMTSRGFGVEHFQRVAKYIDESIKICKDVQAALPKEANKLKDFKAKVASGEVSRINELKKEIASWCQTFPLPVEGWRTDAGI

SEQ ID NO: 79755 - DNA, 1476 bp, Gibberella zeae PH-1
  CDS (1)..(1476)
atgtctcccacaaacgccgagtatgcgctctccgagtcgcacaaggagatgctcgagaagtctctcctcgactccgaccccgaggttgcctccatcatgaaggatgagatccagcgccagcgcgagtccatcgtcctcatcgcctccgagaacatcacctcccgtgccgtcttcgacgcccttggttctcccatgtccaacaagtactctgagggttaccccggtgctcgttactatggtggcaaccagcacatcgatcagatcgagcttctctgccagcgtcgtgccctcgaggccttccacctcgactctgagaagtggggtgtcaacgtccagtgcctttctggatctcccgccaacctccaggtctaccaggctatcatgcctcctcacggtcgtctcatgggtcttgacctcccccacggtggccatcttagccacggttaccagacccccgccaggaatatgctaacaattgacaacaggatctctgctgtctctacttacttcgagaccatgccctaccgtgtcgaccttgacaccggtatcattgactacgacaccctccagaagaacgctatcctctaccgccccaaggtcctggtcgccggtacctctgcctattgccgtctcatcgactacgagcgcatgcgcaagatcgccgactccgtcggtgcttacctcgttgtcgatatggcccacatctctggtcttatcgccgctgaggtcatccccacccccttcaagtacgccgatatcgttaccaccaccacccacaagtccctccgtggtccccgtggtgccatgatcttcttccgcaagggtgtccgctccgtcgatgccaagactggcaaggagactctctacgaccttgagaaccccatcaacttctccgttttccctggtcaccagggtggtcctcacaaccacaccatcactgccctggctgttgccctgaagcaggctgccagccccgacttcaaggcctaccaggagaaggttgtctccaacgccaagaccctggagaacaccttcaaggctctcggccacaagctcgtctctgacggaactgacagtcacatggtcctcattgacctccgccagcacaaccttgacggtgcccgcgttgaagccgttctcgagcagatcaacattgcttgcaacaagaactccatccccggtgacaagtctgcccttactccttgcggtatccgtatcggtacccccgccatgacttctcgtggtttcggcgagaaggagttcgagcgtgtcggcaagttcatcgacgaggccatcaagatctgcaaggaggagcaggctgccctccccaaggaagcaaacaagctcaaggacttcaaggcccgcgttgccagtggtgaggtccagaagatcaacgatttccgaaaggagattgcttcttggtgcagcgccttccccctccccgttgagggttggcgcctggacgccagcatctaa

SEQ ID NO: 79756 - protein, 491 aa, Gibberella zeae PH-1
MSPTNAEYALSESHKEMLEKSLLDSDPEVASIMKDEIQRQRESIVLIASENITSRAVFDALGSPMSNKYSEGYPGARYYGGNQHIDQIELLCQRRALEAFHLDSEKWGVNVQCLSGSPANLQVYQAIMPPHGRLMGLDLPHGGHLSHGYQTPARNMLTIDNRISAVSTYFETMPYRVDLDTGIIDYDTLQKNAILYRPKVLVAGTSAYCRLIDYERMRKIADSVGAYLVVDMAHISGLIAAEVIPTPFKYADIVTTTTHKSLRGPRGAMIFFRKGVRSVDAKTGKETLYDLENPINFSVFPGHQGGPHNHTITALAVALKQAASPDFKAYQEKVVSNAKTLENTFKALGHKLVSDGTDSHMVLIDLRQHNLDGARVEAVLEQINIACNKNSIPGDKSALTPCGIRIGTPAMTSRGFGEKEFERVGKFIDEAIKICKEEQAALPKEANKLKDFKARVASGEVQKINDFRKEIASWCSAFPLPVEGWRLDASI

SEQ ID NO: 79757 - DNA, 1395 bp, Apis mellifera
  CDS (1)..(1395)
atgcctgaattaatttataaaaatatctgggaaacagacccagagctttttgaattaatgaaaaaagaaaaaaaaagacaagaatctggtcttgaaatgattgctagtgaaaattttacatctcttagcgttcttcaatgtttaagttcttgccttcataataaatatagcgaaggtcttcctggtcaaagatattatggaggaaatgaatatattgatgaaattgaattattagcacaaaaacgtgctttagaagcatttaatttaaatcctgaagaatggggttgtaatgttcaaccatattcaggaagtccagctaattttgctgtttatacaggtataattgaacctcatggtcgtataatgggtttagatcttccagatggagggcatcttacacatggtttttttactccaaataaaaaagtttctgcaacatcattattttttgaatcaaaaccatacaaagttaatattaatactggtttaattgattatgataaattagctgaagaagcaagattatttaagcctaaaattataatagcaggagtatcttgttatagtagatgtttagattacaaacgattcaaagaaatagcagaagaaaataatgcttatctatttagtgatatggctcatgtagcaggattagttgctgctgaattaattcctagcccattcaaatatagtgatgttgtatctactacaacacataaaactttaagaggacctcgagcaggtgttatcttctttcgcaaaggaattagaaaaattggaaaagatggtcaaaaaattatgtatgatttagaagataaaattaatcaagctgtatttccaggactgcaaggtggacctcacaatcatgcaattgcaggcatagctacaacaatgaaacaagtcaaatcaccagaatttcttcaataccagaaacaaattatagctaatgcaaaaagattatgtacaaaattacaagagtatggttataaaattaatacagatggaactgatgttcatatgttacttgtagatttacgatctacaggtattactggagctaaagcagaaaaaattttggagagtatttctattgcttgcaataaaaatacagtgcctggtgataaaagtgcattgaattgtagtggtatcagacttggtacacctgcattaactactcgtggtttagttgaaaaagatattgataaagttgtaaactttatacacaaaggattattactttctaaagaagtatctaatatttctggtcctaaacttgttgactataaaagagtattaaatactgatgcttatataaaggcaaaagttgcagctttaagaaaagaagttgaaacattttctaaacaatttcctattcctggttttgaaatatattaa

SEQ ID NO: 79758 - protein, 464 aa, Apis mellifera
MPELIYKNIWETDPELFELMKKEKKRQESGLEMIASENFTSLSVLQCLSSCLHNKYSEGLPGQRYYGGNEYIDEIELLAQKRALEAFNLNPEEWGCNVQPYSGSPANFAVYTGIIEPHGRIMGLDLPDGGHLTHGFFTPNKKVSATSLFFESKPYKVNINTGLIDYDKLAEEARLFKPKIIIAGVSCYSRCLDYKRFKEIAEENNAYLFSDMAHVAGLVAAELIPSPFKYSDVVSTTTHKTLRGPRAGVIFFRKGIRKIGKDGQKIMYDLEDKINQAVFPGLQGGPHNHAIAGIATTMKQVKSPEFLQYQKQIIANAKRLCTKLQEYGYKINTDGTDVHMLLVDLRSTGITGAKAEKILESISIACNKNTVPGDKSALNCSGIRLGTPALTTRGLVEKDIDKVVNFIHKGLLLSKEVSNISGPKLVDYKRVLNTDAYIKAKVAALRKEVETFSKQFPIPGFEIY

SEQ ID NO: 79759 - DNA, 1410 bp, Kluyveromyces lactis NRRL Y-1140
  CDS (1)..(1410)
atgccatacgctctatctgactctcacaagaacttggtttctgctcacttgtctgaaagtgatccagaagtcgaacaaatcatcaaggatgaaattgacagacaaaagcactctattgtcttgattgcttctgaaaacttcacctctacctctgttttcgatgctttgggaactccaatgtgtaacaagtattctgaaggttatccaggtgctagatactatggtggtaacgaacacattgaccgtatggaattgttgtgtcaaaagagagctctagaagctttcaacttgactgctgacaaatggggtgttaacgtccaaactttgtctggttctccagctaacttgcaagtctaccaagccttgatgagacctcatgaaagattgatgggtttgttcttgccagatggtggtcatttgtctcacggttaccaaactgaaaacagaaagatttctgctgtctccacttacttcgaatctttcccatacagagttgatccaaagactggtatcatcgactatgacactttggaaaagaatgccatcttgtacagaccaaagatcttggttgctggtacttctgcatactgtcgtttgatcgactacaagagaatgagagaaatcgccgacaaggttggtgcttacttgatggttgacatggctcacatctctggtttgatcgctgctggtgttattccatctccattcgaatacgctgacattgtcactaccactactcacaagtccttgcgtggtccaagaggtgctatgatcttcttcagaagaggtatcagatctgttaacccaaagactggtaaggaaatcccatacgatttggaaggtccaatcaacttctccgtcttcccaggtcaccaaggtggtccacacaaccataccatctctgccttggctactgctttgaagcaagccaacactccagaattcaaggagtaccaaactcaagtcttgaagaacgctaaggttctagaagagtccttcaagaagttgggttacagattagtgtccgatggtactgactcccatatggtcttagtctccttgagagaaaagggtgtcgatggtgctcgtgtcgaatacgtttgtgaaaacatcaacatcgctttgaacaagaactctatcccaggtgacaaatctgctttggtcccaggtggtgtccgtatcggtgctccagctatgactactagaggtttcggtgaaccagaattcgctagaatcgtcgactacattgacaaggccgttcaatttgctgctaagactcaacaatctttgccaaaggaagccaacaaattgaaggacttcaaggctaaggtcaacgaaggttctgaagaattgacccaattgaagaacgaaatctaccaatgggccggtgaattcccattgccagtgtaa

SEQ ID NO: 79760 - protein, 469 aa, Kluyveromyces lactis NRRL Y-1140
MPYALSDSHKNLVSAHLSESDPEVEQIIKDEIDRQKHSIVLIASENFTSTSVFDALGTPMCNKYSEGYPGARYYGGNEHIDRMELLCQKRALEAFNLTADKWGVNVQTLSGSPANLQVYQALMRPHERLMGLFLPDGGHLSHGYQTENRKISAVSTYFESFPYRVDPKTGIIDYDTLEKNAILYRPKILVAGTSAYCRLIDYKRMREIADKVGAYLMVDMAHISGLIAAGVIPSPFEYADIVTTTTHKSLRGPRGAMIFFRRGIRSVNPKTGKEIPYDLEGPINFSVFPGHQGGPHNHTISALATALKQANTPEFKEYQTQVLKNAKVLEESFKKLGYRLVSDGTDSHMVLVSLREKGVDGARVEYVCENINIALNKNSIPGDKSALVPGGVRIGAPAMTTRGFGEPEFARIVDYIDKAVQFAAKTQQSLPKEANKLKDFKAKVNEGSEELTQLKNEIYQWAGEFPLPV

SEQ ID NO: 79761 - DNA, 1413 bp, Debaryomyces hansenii CBS767
  CDS (1)..(1413)
atgccatacgcattatctgaatctcacaagcaattggtcgaaggacacttgaaggacattgatcctgaagttgatcaaattatcaaggatgaagtcgatagacaaaaacattccatcgttttaattgcctctgaaaattttacttcaactgctgttttcgatgccttgggaactccaatgtgtaacaagtactctgaaggttaccctggtgctagatactacggtggtaatgagcaaatcgacaagatggaaattttgtgccaagaaagagctttgaagaccttcaatgctacttctgataaatggggtgttaatgtccaaaccttatctggttcccctgctaatttgcaagtgtaccaagctttgatgaagcctcatgaaagattaatgggattggatttacctcatggaggtcacttatctcacggttatcaaaccgactctagaaagatttcagctgtttcaacctactttgaaactatgccttacagagttaacttagataccggtttaattgactacgatatgttagaaaaaactgctgttttattcagaccaaaaattttagttgcaggtacttcagcttactgtcgtcttatcgattacaagaagatgagggaaattgccgacaaggttggtgcttatcttgttgttgatatggcgcatatttccggtttagttgctgccggtgtaattccttcaccattcgaatatgctgatgttgtcactaccactacccataagtctttaagaggtccaagaggtgctatgatcttcttcagaagaggtgttaggtctatcaacccaaagaccggtcaagagatcttatacgacttagaaaacccaattaacttctctgtcttcccaggtcaccaaggtggtcctcacaaccacaccatcgcagctttagccactgctttgaagcaagcggccactcctgaattcaagcaatatcaagagcaagtattgaagaattcgaaggtcttagaagaagaattcacgaaaaagggttataccttggtttccaatggtaccgattcccatatggttttagtttccttaaaggataaacaaattgatggtgccagagtcgagactatttgtgaaaagatcaacattgctttaaataagaattctattccaggtgataagtcagcattagtcccaggtggtgttagaattggtgctccagctatgaccaccagaggtttaggtgaagaagacttcaagaagattgtttcttatattgattttgctgtcaattacgctaaggaaatacaagctaatttaccaaaggatgctaacaagttgaaagatttcaaaaacaaggtcttgaatactgaagatgagaaattacaagctgctaagaaggaaatttcccaatgggctggtgaattcccattatcagtctaa

SEQ ID NO: 79762 - protein, 470 aa, Debaryomyces hansenii CBS767
MPYALSESHKQLVEGHLKDIDPEVDQIIKDEVDRQKHSIVLIASENFTSTAVFDALGTPMCNKYSEGYPGARYYGGNEQIDKMEILCQERALKTFNATSDKWGVNVQTLSGSPANLQVYQALMKPHERLMGLDLPHGGHLSHGYQTDSRKISAVSTYFETMPYRVNLDTGLIDYDMLEKTAVLFRPKILVAGTSAYCRLIDYKKMREIADKVGAYLVVDMAHISGLVAAGVIPSPFEYADVVTTTTHKSLRGPRGAMIFFRRGVRSINPKTGQEILYDLENPINFSVFPGHQGGPHNHTIAALATALKQAATPEFKQYQEQVLKNSKVLEEEFTKKGYTLVSNGTDSHMVLVSLKDKQIDGARVETICEKINIALNKNSIPGDKSALVPGGVRIGAPAMTTRGLGEEDFKKIVSYIDFAVNYAKEIQANLPKDANKLKDFKNKVLNTEDEKLQAAKKEISQWAGEFPLSV

SEQ ID NO: 79763 - DNA, 1416 bp, Yarrowia lipolytica CLIB122
  CDS (1)..(1416)
atgtcttcgtacgccctttccaacaaccataaggatctcattgaagcctccctccacgacctcgaccccgaggtcgagggcatcatgaaggacgagattgaccgacagaagcactccatcgtcctcattgcctccgaaaacttcacctccaagtctgttttcgacgcccttggatctcccatgtgcaacaagtactccgagggataccccggcgcccgatactacggtggtaaccagcacattgaccgaatcgagactctgtgccagaaccgagccctcaaggccttcggcgtcacccccgacaagtggggcgtcaacgtccagaccctgtctggctctcccgcaaacctccaggtctatcaggccatcatgaagccccacgatcgactcatgggtcttgatctgccccacggaggccatctttctcacggttaccagaccgacaaccgaaagatctccgccgtctccacctacttcgagaccatgccctaccgagtcgacctcgagaccggcatcatcgactacgacatgctcgagaagaccgccatcctctatcgacccaaggttctggttgccggaacctccgcttactgccgactcattgactacaagcgaatgcgagagattgccgacaaggttggcgcttacctcgttgtcgacatggcccatatttccggcctgatcgccgccggtgtcatcccctctccctttgagtacgctgacattgtcaccaccaccacccacaagtctctgcgaggcccccgaggtgccatgatctttttccgacgaggtgtccgatccgtcgaccccaagactggtaaggagattctctacgaccttgagaaccccatcaacttttccgtcttccccggccaccagggaggtccccacaaccacaccatcaccgctctggccgttgccctgaagcaggctgctgaccccactttccgggagtaccaggagcaggttctcaagaacgccaaggctctggagaccgagttcaacaagctcggttacaacctcgtgtccggcggaaccgactcccacatggttctggtttccctgcgagacaagggcattgacggtgctcgagtcgagactgtttgcgagcagatcaacattgctctcaacaagaactccatccccggtgacaagtctgcccttgtccccggtggtgtccgaatcggtgctcccgccatgtccacccgaggcttcggcgaggaggacttcaagaagattgccaactacatctcgcaagccgtcgatctcgccattgagatccagcagggactgcccaaggaggccaacaagctcaaggacttcaaggctgctgcccaggctggtggcaaccccaagatcgaggctctcaagaccgagatctccaactgggccggccagttccctctgcccgtttaa

SEQ ID NO: 79764 - protein, 471 aa, Yarrowia lipolytica CLIB122
MSSYALSNNHKDLIEASLHDLDPEVEGIMKDEIDRQKHSIVLIASENFTSKSVFDALGSPMCNKYSEGYPGARYYGGNQHIDRIETLCQNRALKAFGVTPDKWGVNVQTLSGSPANLQVYQAIMKPHDRLMGLDLPHGGHLSHGYQTDNRKISAVSTYFETMPYRVDLETGIIDYDMLEKTAILYRPKVLVAGTSAYCRLIDYKRMREIADKVGAYLVVDMAHISGLIAAGVIPSPFEYADIVTTTTHKSLRGPRGAMIFFRRGVRSVDPKTGKEILYDLENPINFSVFPGHQGGPHNHTITALAVALKQAADPTFREYQEQVLKNAKALETEFNKLGYNLVSGGTDSHMVLVSLRDKGIDGARVETVCEQINIALNKNSIPGDKSALVPGGVRIGAPAMSTRGFGEEDFKKIANYISQAVDLAIEIQQGLPKEANKLKDFKAAAQAGGNPKIEALKTEISNWAGQFPLPV

SEQ ID NO: 79765 - DNA, 1377 bp, Aspergillus nidulans FGSC A4
  CDS (1)..(1377)
atggaggaccgcctcgtcgacactgaccccgaggtcgctaagatcatggagaatgagatccaacgtcagcgtgaatctgttgtcttgattgcttcggagaacttcacttcccgcgctgtcttcgatgctcttggttctcccatgtgcaacaagtattccgagggttaccccggtgctcgttactatggtggaaaccagcacattgacgctatcgagctgctctgccagtcccgtgcccttaaggcattcaacctcgacgccgataagtggggtgtcaacgttcagtgccttagtggcagcccggccaatttgcaggtctaccaggctctcatgcgcccccatgaccgtctcatgggtctcgaccttccccacggtggtcacctgagccacggttatcagactccttccaggaagatctctgctgtgtctacttacttcgagaccttcccttaccgcgttaacctcgagaccggtattattgactacgacacccttgaagccaacgctgagctgtaccgccccaagattttggttgccggtacctctgcctactgccgtctgatcgactatgcccgcatgcgcaagatcgctgacaaggttggcgcctaccttgttgttgacatggcccacatctccggtctgattgctgctggtgtcatcccctctcctttcgagtacgccgatgtagtcaccactaccactcacaagtctctccgcggtccccgtggtgccatgattttcttccgcaagggcgtccgcagcactgaccccaagactggtaaggacatcatgtatgacctcgagggtcccatcaacttctccgtcttccctggtcaccagggtggtccccacaaccacaccatcactgctctctctgtcgccctcaagtacgccgctaccaccgagttcaagcagtaccaggagcaggtgatcaagaacgccaaggcccttgagaacgaattcaaggccattggccacaagctcgtctccgacggtaccgacagccacatggtactcgtggatctccgccccaagtctctcgacggtgcccgtgtcgaagccgtcctcgagcagatcaacattgcttgcaacaagaactccatccctggtgacaagtctgctctcactccctgcggtatccgcattggtgctcccgccatgaccagccgtggtatgggcgaggaggacttcaagcgcatcgctcgctacattgaccaggccatcaacatctgcaagtccgtgcaggccgcacttcccacggatgccaacaagctcaaggacttcaaggccaaggttgcttccggcaccgtccctgagatcaacgacctgcgcaaggagatcgctgcgtgggccagcaccttccctctccctgtctaa

SEQ ID NO: 79766 - protein, 458 aa, Aspergillus nidulans FGSC A4
MEDRLVDTDPEVAKIMENEIQRQRESVVLIASENFTSRAVFDALGSPMCNKYSEGYPGARYYGGNQHIDAIELLCQSRALKAFNLDADKWGVNVQCLSGSPANLQVYQALMRPHDRLMGLDLPHGGHLSHGYQTPSRKISAVSTYFETFPYRVNLETGIIDYDTLEANAELYRPKILVAGTSAYCRLIDYARMRKIADKVGAYLVVDMAHISGLIAAGVIPSPFEYADVVTTTTHKSLRGPRGAMIFFRKGVRSTDPKTGKDIMYDLEGPINFSVFPGHQGGPHNHTITALSVALKYAATTEFKQYQEQVIKNAKALENEFKAIGHKLVSDGTDSHMVLVDLRPKSLDGARVEAVLEQINIACNKNSIPGDKSALTPCGIRIGAPAMTSRGMGEEDFKRIARYIDQAINICKSVQAALPTDANKLKDFKAKVASGTVPEINDLRKEIAAWASTFPLPV

SEQ ID NO: 79767 - DNA, 1482 bp, Candida albicans SC5314
  CDS (1)..(1482): transl_table=12
atgctttcatctacgttacgtcgttctgtgagagctcaatccaagaatttgccagcttttgcaagaagagcctatgccgtttctccatctgctcaagcattaatttccaaatccgttcaagatgttgaccctgagatggcggatattttgaatcaagaaagaaccagacaaaagaactcaattactttgattccatcagagaattttacctctaaagcagttatggatttgttgggttcagaaatgcaaaacaaatattctgaagggtaccctggagagagatattatgggggtaatgaaataatcgataaagctgaagcattatgtcaaaaaagagctttagaagcatttggattggacccatctcaatggggggttaatgtacagccattatctggtgctccagccaatttgtatgcttatagtgcaattttagaagttggtgacagaattatgggtttagatttacctcatggtggtcatttgtctcatggatatcaaaccaacactaccaagatttcctacatttccaaatacttccaaaccatgccatatagattaaatgaagaaactggtataattgattacgatactttagaaaaaaacgctcaattgtttagacctaaagtaattgttgctggtgcttcagcttattctcgtgtcattgactacaaaagaatgagacaaattgctgataaggttggagcttacttattgtccgatatggcccacatctctgggttagtttctgctggtgttactgattcaccattcccatattctgatattgtcaccactactacccataaatcgttgagaggaccaagaggagccatgattttctttagaaaaggaatcagaaaggttaccaaaaagggtaaagaaattccttatgaattggaaagaaagatcaatttctcggttttcccagggcatcaaggtggtccacataatcatactatttctgctttagcagttgctttaaaacaatgtactgaaccagaatatgttaaataccaacaagaagttgtttctaatgccaaacattttgctgatgcattagtctccaagggtttcaaattggtttccgatggtactgatactcatttgatcttggttgatttaagatcaagaaatattgatggtgctagagttgaagctgttttggaaagagccaacatagctgccaataaaaacaccgttcctggtgatgtatcagctcttttcccatcaggtttaagagttggtactccagctatgaccactagaggatttgggccagaagagtttgataaagttgctgaattcattgatcaagccgttaacattgccattgaattaaaagctcaagaacaaggtaaagtaccaaaagaattattggcatcatttaaaaaattagctgatgaaagtgataaagttaaacaattagataaagaagttgtcagttgggtcagtaaatatcctgtcccaggtgaattgtaa

SEQ ID NO: 79768 - protein, 493 aa, Candida albicans SC5314
MLSSTLRRSVRAQSKNLPAFARRAYAVSPSAQALISKSVQDVDPEMADILNQERTRQKNSITLIPSENFTSKAVMDLLGSEMQNKYSEGYPGERYYGGNEIIDKAEALCQKRALEAFGLDPSQWGVNVQPLSGAPANLYAYSAILEVGDRIMGLDLPHGGHLSHGYQTNTTKISYISKYFQTMPYRLNEETGIIDYDTLEKNAQLFRPKVIVAGASAYSRVIDYKRMRQIADKVGAYLLSDMAHISGLVSAGVTDSPFPYSDIVTTTTHKSLRGPRGAMIFFRKGIRKVTKKGKEIPYELERKINFSVFPGHQGGPHNHTISALAVALKQCTEPEYVKYQQEVVSNAKHFADALVSKGFKLVSDGTDTHLILVDLRSRNIDGARVEAVLERANIAANKNTVPGDVSALFPSGLRVGTPAMTTRGFGPEEFDKVAEFIDQAVNIAIELKAQEQGKVPKELLASFKKLADESDKVKQLDKEVVSWVSKYPVPGEL

SEQ ID NO: 79769 - DNA, 1533 bp, Ustilago maydis 521
  CDS (1)..(1533)
atggcttcccgtcgttcttacgcaacactcgttcaaagcttcctgaagcactcttccctccctgtcgtccgaggtcctgcttctcctgcctccatccttcctcgcacctttgccacctctgttctcaagatgtccattgccgtccccaccgatttcaacaaggttctctaccagcctctggccgaggctgaccccgaggtccagcagattatcgagaatgagacttaccgtcaattctccggtctcgagctcatcgcttccgagaatctgacctcactcgccaccatggaagctaacggctccatccttactaacaagtattctgagggtcttcccggtgcccgatactacggcggtaacgagtacatcgaccagctagaggttctctgccagcagcgtgccttgaaggccttcaacctcgaccccaaggtctggggcgtcaacgttcagccttactctggctccaccgccaactttgctaccttcaccgccctcctccagccccaggaccgtatcatgggtctcggccttccttccggtggccacttgacccatggttactacaccgccaagaagaagatctcggcttcttcgatctacttccagtcgttcccttacaacgttgaccccgccaccggctacatcaactacgacgagctcaagaagaacgctgatcttttcaagccccgcatggtcatctgcggtggttccgcctacccccgtgactgggactacgccaagcttgccgagattgccaagactcagtccgcttacctcatggccgacattgcccacatctctggtctcgttgccgcccaggtgcagaacaaccccttcgagtactgtgacattgtcaccaccactactcacaagaccctccgcggtccccgtgctggtatgatcttcttccgcaaggatcgtgatgccgagattgagggtcgtgtcaatgcggccgtcttccctgcctgccagggcggcccccacaacaacaccattgccggtatcgctgttgcgctcaagcaggtcgccgaccccgctttcaagcagtacgccacccaagtcatcaagaactcgcaggccattgccaaggtcctctctggcaagggctacaagctccagactgacggctcggagaaccacctgattctttgggacttgcgtcctcttggcctcaccggctccaaggtcgagaacatttgcgaccttgcgcacatcacgctcaacaagaacgccgtcagcggtgacacttcggcccttgtgcccggtggtgttcgtatcggcactggtgcccttacctcgcgatccatgggcgagaaggacatggagaaggtggctgagttccttgaccgcgtcgtccagatctcgcttgagattcaaaagacgtcgggcaagaaactcgttgacttcatgaacgctgcccgccagtcggaggccgtcaagcagctcaacaaggacgtcgaggcctttgccaccagcttcccccttcctggtgttcccgacacctcgatcatcaagaagcccgccgctcactaa

SEQ ID NO: 79770 - protein, 510 aa, Ustilago maydis 521
MASRRSYATLVQSFLKHSSLPVVRGPASPASILPRTFATSVLKMSIAVPTDFNKVLYQPLAEADPEVQQIIENETYRQFSGLELIASENLTSLATMEANGSILTNKYSEGLPGARYYGGNEYIDQLEVLCQQRALKAFNLDPKVWGVNVQPYSGSTANFATFTALLQPQDRIMGLGLPSGGHLTHGYYTAKKKISASSIYFQSFPYNVDPATGYINYDELKKNADLFKPRMVICGGSAYPRDWDYAKLAEIAKTQSAYLMADIAHISGLVAAQVQNNPFEYCDIVTTTTHKTLRGPRAGMIFFRKDRDAEIEGRVNAAVFPACQGGPHNNTIAGIAVALKQVADPAFKQYATQVIKNSQAIAKVLSGKGYKLQTDGSENHLILWDLRPLGLTGSKVENICDLAHITLNKNAVSGDTSALVPGGVRIGTGALTSRSMGEKDMEKVAEFLDRVVQISLEIQKTSGKKLVDFMNAARQSEAVKQLNKDVEAFATSFPLPGVPDTSIIKKPAAH

SEQ ID NO: 79771 - DNA, 1557 bp, Strongylocentrotus purpuratus
  CDS (1)..(1557)
atggctactgttaacggaaccaagacagtgatcaagacagcgatgaatggtgatgggagtctaaagacagtcaccaatggcaatggtgatgggagtctcaagaaagttagcaatggcaatggcgatgggagtctcaagacagtcactaatagtgatgggagtccttggtttggacaccagtcgttggaagagaatgacccggagatgtatgctatcatcttaaaggagaaggatcgtcaaaggaaaggcttagaactgattgcatcagagaacttcccaagcagggctgttctagaggctctcggctcctgtctgcaaaataaatactgcgagggataccctggaaatagatactatggcggtacgcagttctttgatgaaatggaacttctgactcagaagagagccttagcagcatttggtttgaaggaggaggaatggggcgtcaatgtccagccgtattcaggctctccagcaaactttgccgtctacactggagtgattggcccccatggtcgtatcatgggtctggatctaccggacggtggtcaccttacacatggattcatgacggctaagaagaagatctctgcaacgtccttgttctttgagtcaatgccttacagggtgaatcctaaaacaggcctcattgattatgaagctctagctgtaaacgccagattgttccgtccacaaatgatcattgcaggtatgagctgttatcctaggaatctagactacaaacgtttcaaggagatagcagtagagaatgatgcttatcttctagctgatatggctcacgtgagtggattagttgctgctggagttgtagctaatccttttgagtactgtgacatcgttacaagcacaacacacaagacacttagaggacctcgatcaggcatcatcttcttccgtagaggtgtccgtaaggttctcaagaatggcactgaggtgatgtatgaccttgagaaaccgatcaacgaagccgtcttccctggtcttcaaggtggaccccatatgcatgctgtaggaggcgttggtgtagccttattgcaggcttcacaaccggagtttaagctgtatgcccgggatgtcgtcacaaacgcacaagccatggctgaagaacttatgaagagaggttatactatttcttcaggtggaacggacactcatcttctactccttgacctccgacccctgggactggatggagctcgtggagagttcgtgcttgagcgtgtaggaatcgttctcaataagaacacatgtcctggggacaagagcgcactcaagcctggcggtctaaggatcggtacaccagctctcacgtcaagaaacttcaaggttactgatttcatgatggtggttgactacattgatagaggtctgaagttgactgcagaggcaaacaagaagtgttcaagtacaacccttcgtgacttcaaggcttacgtcacaagtgattcagacttccaatccaaacttgctgcccttgaaaaggaggtcgaatcttttgctgtaaggttcccattacctggtcatgaagttctgtaa

SEQ ID NO: 79772 - protein, 518 aa, Strongylocentrotus purpuratus
MATVNGTKTVIKTAMNGDGSLKTVTNGNGDGSLKKVSNGNGDGSLKTVTNSDGSPWFGHQSLEENDPEMYAIILKEKDRQRKGLELIASENFPSRAVLEALGSCLQNKYCEGYPGNRYYGGTQFFDEMELLTQKRALAAFGLKEEEWGVNVQPYSGSPANFAVYTGVIGPHGRIMGLDLPDGGHLTHGFMTAKKKISATSLFFESMPYRVNPKTGLIDYEALAVNARLFRPQMIIAGMSCYPRNLDYKRFKEIAVENDAYLLADMAHVSGLVAAGVVANPFEYCDIVTSTTHKTLRGPRSGIIFFRRGVRKVLKNGTEVMYDLEKPINEAVFPGLQGGPHMHAVGGVGVALLQASQPEFKLYARDVVTNAQAMAEELMKRGYTISSGGTDTHLLLLDLRPLGLDGARGEFVLERVGIVLNKNTCPGDKSALKPGGLRIGTPALTSRNFKVTDFMMVVDYIDRGLKLTAEANKKCSSTTLRDFKAYVTSDSDFQSKLAALEKEVESFAVRFPLPGHEVL

SEQ ID NO: 79773 - DNA, 1398 bp, Tribolium castaneum
  CDS (1)..(1398)
atgagtcaacaagtgctgcattcaaacgtttgggactccgatcccgaactttttgccctcattcaggaggaaaaaaagcgacaattgaccggtttggaaatgattgcgtcggaaaatttcacctcactgcctgtattacaatgtttgagcacttgcctgcataataagtattcggaaggtttgcctggacaaaggtattatgggggcaaccaatttatcgatcagatcgaacgtttagctcaaaagcgggccttggaagcttacagactaaatccagaagaatggggtgtgaatgtgcagccctattctgggtcacctgccaattttgccgtctacacaggattggttgaggcgcacggacgtattatggggttggatttgcctgatgggggccatttgactcatggattcttcactgcgactaagaaaatctcagctacctccatattcttcgaatcgctgccatataaggtcgatgtcgaaaccggcctcatcgactacgagcagctcgccaaaactgcccgtctattcaaaccccgtattattatcgccggtatcagttgctactcccgtcctctggactacaaacgtttccgcgagatttgcaacgaagtcggtgcctacctcatggccgacatggcccacatttccggtttagttgctgccggcgtcaccccaagtcccttcgaatacgccgacgtcgtcagcaccaccacgcacaagagtttgcgaggacctcgagccggtgtcatcttcttccgaaaaggcgtgcggtcgcataacgctaaaggcgaacccattatgtatgatcttgaatcgaagatcaaccaagctgtctttcccggtctccaagggggcccccacaataacaccatcgctgccattgccaccaccatgaaacaggccaccacgccagaatttgttgagtatcagaagcagattattgcgaatgcgaaacgactctgtaaggggttgcaggacaagggatacaagattgccaccggtggaaccgatgtgcacctgttgctggtcgatttgagaaatgtaggacttacgggggccaaggctgagtttatccttgaagaagtttcaattgcgtgtaataaaaatacagttcctggagataaaagcgcattgaatccatcagggattaggttgggaacgccggctttgaccacaagagggcttgtggagaaagatatggatcaagttgtggagtttattgataaagcgttgaaattggcaaaagaaattggaaccaaatcagggcctaaattggtggatttcaaaaagacgattgaatgtgacgaggaaactaaaaagaaggtggcggatttgagagctcaagttgaagagtatagctgtaaattccccatgcctggatatcccgaatattga

SEQ ID NO: 79774 - protein, 465 aa, Tribolium castaneum
MSQQVLHSNVWDSDPELFALIQEEKKRQLTGLEMIASENFTSLPVLQCLSTCLHNKYSEGLPGQRYYGGNQFIDQIERLAQKRALEAYRLNPEEWGVNVQPYSGSPANFAVYTGLVEAHGRIMGLDLPDGGHLTHGFFTATKKISATSIFFESLPYKVDVETGLIDYEQLAKTARLFKPRIIIAGISCYSRPLDYKRFREICNEVGAYLMADMAHISGLVAAGVTPSPFEYADVVSTTTHKSLRGPRAGVIFFRKGVRSHNAKGEPIMYDLESKINQAVFPGLQGGPHNNTIAAIATTMKQATTPEFVEYQKQIIANAKRLCKGLQDKGYKIATGGTDVHLLLVDLRNVGLTGAKAEFILEEVSIACNKNTVPGDKSALNPSGIRLGTPALTTRGLVEKDMDQVVEFIDKALKLAKEIGTKSGPKLVDFKKTIECDEETKKKVADLRAQVEEYSCKFPMPGYPEY

SEQ ID NO: 79775 - DNA, 1368 bp, Tribolium castaneum
  CDS (1)..(1368)
atgttttcgcgcgctttttcaaccgccaaccacctgttgaacaaccggaatctgcaaagactcgctgtgacccagttaaggaaaatgagtcaacaagtgctgcattcaaacgtttgggactccgatcccgaactttttgccctcattcaggaggaaaaaaagcgacaattgaccggtttggaaatgattgcgtcggaaaatttcacctcactgcctgtattacaatgtttgagcacttgcctgcataataagtattcggaaggtttgcctggacaaaggtattatgggggcaaccaatttatcgatcagatcgaacgtttagctcaaaagcgggccttggaagcttacagactaaatccagaagaatggggtgtgaatgtgcagccctattctgggtcacctgccaattttgccgtctacacaggattggttgaggcgcacggacgtattatggggttggatttgcctgatgggggccatttgactcatggattcttcactgcgactaagaaaatctcagctacctccatattcttcgaatcgctgccatataaggtcgatgtcgaaaccggcctcatcgactacgagcagctcgccaaaactgcccgtctattcaaaccccgtattattatcgccggtatcagttgctactcccgtcctctggactacaaacgtttccgcgagatttgcaacgaagtcggtgcctacctcatggccgacatggcccacatttccggtttagttgctgccggcgtcaccccaagtcccttcgaatacgccgacgtcgtcagcaccaccacgcacaagagtttgcgaggacctcgagccggtgtcatcttcttccgaaaaggcgttgccaccaccatgaaacaggccaccacgccagaatttgttgagtatcagaagcagattattgcgaatgcgaaacgactctgtaaggggttgcaggacaagggatacaagattgccaccggtggaaccgatgtgcacctgttgctggtcgatttgagaaatgtaggacttacgggggccaaggctgagtttatccttgaagaagtttcaattgcgtgtaataaaaatacagttcctggagataaaagcgcattgaatccatcagggattaggttgggaacgccggctttgaccacaagagggcttgtggagaaagatatggatcaagttgtggagtttattgataaagcgttgaaattggcaaaagaaattggaaccaaatcagggcctaaattggtggatttcaaaaagacgattgaatgtgacgaggaaactaaaaagaaggtggcggatttgagagctcaagttgaagagtatagctgtaaattccccatgcctggatatcccgaatattga

SEQ ID NO: 79776 - protein, 455 aa, Tribolium castaneum
MFSRAFSTANHLLNNRNLQRLAVTQLRKMSQQVLHSNVWDSDPELFALIQEEKKRQLTGLEMIASENFTSLPVLQCLSTCLHNKYSEGLPGQRYYGGNQFIDQIERLAQKRALEAYRLNPEEWGVNVQPYSGSPANFAVYTGLVEAHGRIMGLDLPDGGHLTHGFFTATKKISATSIFFESLPYKVDVETGLIDYEQLAKTARLFKPRIIIAGISCYSRPLDYKRFREICNEVGAYLMADMAHISGLVAAGVTPSPFEYADVVSTTTHKSLRGPRAGVIFFRKGVATTMKQATTPEFVEYQKQIIANAKRLCKGLQDKGYKIATGGTDVHLLLVDLRNVGLTGAKAEFILEEVSIACNKNTVPGDKSALNPSGIRLGTPALTTRGLVEKDMDQVVEFIDKALKLAKEIGTKSGPKLVDFKKTIECDEETKKKVADLRAQVEEYSCKFPMPGYPEY

SEQ ID NO: 79777 - DNA, 1482 bp, Tribolium castaneum
  CDS (1)..(1482)
atgttttcgcgcgctttttcaaccgccaaccacctgttgaacaaccggaatctgcaaagactcgctgtgacccagttaaggaaaatgagtcaacaagtgctgcattcaaacgtttgggactccgatcccgaactttttgccctcattcaggaggaaaaaaagcgacaattgaccggtttggaaatgattgcgtcggaaaatttcacctcactgcctgtattacaatgtttgagcacttgcctgcataataagtattcggaaggtttgcctggacaaaggtattatgggggcaaccaatttatcgatcagatcgaacgtttagctcaaaagcgggccttggaagcttacagactaaatccagaagaatggggtgtgaatgtgcagccctattctgggtcacctgccaattttgccgtctacacaggattggttgaggcgcacggacgtattatggggttggatttgcctgatgggggccatttgactcatggattcttcactgcgactaagaaaatctcagctacctccatattcttcgaatcgctgccatataaggtcgatgtcgaaaccggcctcatcgactacgagcagctcgccaaaactgcccgtctattcaaaccccgtattattatcgccggtatcagttgctactcccgtcctctggactacaaacgtttccgcgagatttgcaacgaagtcggtgcctacctcatggccgacatggcccacatttccggtttagttgctgccggcgtcaccccaagtcccttcgaatacgccgacgtcgtcagcaccaccacgcacaagagtttgcgaggacctcgagccggtgtcatcttcttccgaaaaggcgtgcggtcgcataacgctaaaggcgaacccattatgtatgatcttgaatcgaagatcaaccaagctgtctttcccggtctccaagggggcccccacaataacaccatcgctgccattgccaccaccatgaaacaggccaccacgccagaatttgttgagtatcagaagcagattattgcgaatgcgaaacgactctgtaaggggttgcaggacaagggatacaagattgccaccggtggaaccgatgtgcacctgttgctggtcgatttgagaaatgtaggacttacgggggccaaggctgagtttatccttgaagaagtttcaattgcgtgtaataaaaatacagttcctggagataaaagcgcattgaatccatcagggattaggttgggaacgccggctttgaccacaagagggcttgtggagaaagatatggatcaagttgtggagtttattgataaagcgttgaaattggcaaaagaaattggaaccaaatcagggcctaaattggtggatttcaaaaagacgattgaatgtgacgaggaaactaaaaagaaggtggcggatttgagagctcaagttgaagagtatagctgtaaattccccatgcctggatatcccgaatattga

SEQ ID NO: 79778 - protein, 493 aa, Tribolium castaneum
MFSRAFSTANHLLNNRNLQRLAVTQLRKMSQQVLHSNVWDSDPELFALIQEEKKRQLTGLEMIASENFTSLPVLQCLSTCLHNKYSEGLPGQRYYGGNQFIDQIERLAQKRALEAYRLNPEEWGVNVQPYSGSPANFAVYTGLVEAHGRIMGLDLPDGGHLTHGFFTATKKISATSIFFESLPYKVDVETGLIDYEQLAKTARLFKPRIIIAGISCYSRPLDYKRFREICNEVGAYLMADMAHISGLVAAGVTPSPFEYADVVSTTTHKSLRGPRAGVIFFRKGVRSHNAKGEPIMYDLESKINQAVFPGLQGGPHNNTIAAIATTMKQATTPEFVEYQKQIIANAKRLCKGLQDKGYKIATGGTDVHLLLVDLRNVGLTGAKAEFILEEVSIACNKNTVPGDKSALNPSGIRLGTPALTTRGLVEKDMDQVVEFIDKALKLAKEIGTKSGPKLVDFKKTIECDEETKKKVADLRAQVEEYSCKFPMPGYPEY

SEQ ID NO: 79779 - DNA, 1272 bp, Prochlorococcus marinus str. AS9601
  CDS (1)..(1272): transl_table=11
atgaatatccttcaaaatcttaaagaaagtgatccagtaatatcaaattttatcaactctgaaaaaaataggcaggaaactcatcttgagttaatcgcaagcgaaaatttcgcatcaattgctgttatgcaggctcaaggttcagtccttacaaataaatacgccgaggggttacctcaaaaaagatattacgggggatgtgaatttgttgatgaaatcgaagaattagctattcagagagcgaaaaaattatttaatgcaaattgggctaatgttcaaccccatagtggagcacaggcaaatgctgctgttttcctaagtctacttaaacctggcgacacaatcatggggatggatttatctcatggtggacacttaacacatgggtctccagtaaatatgagtggtaagtggttcaatgcagttcactatggtgtaaataaagaaactagtgaattaaattttgatgaaataagagagatagcacttgaaaaaaaaccaaaattgatcatatgcggatattctgcttatccaagaacaatcgattttgaatcgtttagaaatattgcagatgaagttggggcttttttaatggctgatattgcacatattgccggtcttgtagcaagtaaacttcatccaaatccaatacctcattgtgatgtagtaactacaactactcataaaacattaagagggcctagagggggacttatcttatgtaaagatgcagaatttggaaagaaatttgataaatctgtttttcctggcactcagggcgggcccctcgaacatataatagccgctaaagcagtcgcatttagagaagccttacagccagatttcgttaattattcccaacaagtaataaaaaatgcaaaagttctagcttcaactttaataaatagaggtatcaatatcgttagtggaggcactgataatcatattgttttactcgatttaaggagtatcaatatgactggtaaaattgctgacttgcttgtaagtgaagttaatatcactgcaaataaaaatactgttccatttgatcctgaatcaccttttgtaaccagcggactaaggttaggaactgctgctttaactactagaggctttaatgagaatgcttttgctgaagttggcgaaattattgctgatagattacttaacccagacaattcactgattgaaagtcaatgtaaagaaagagtattaaccttatgtaatcgttttcctctttatgaaggcaaacttgaagcatcaattaaatga

SEQ ID NO: 79780 - protein, 423 aa, Prochlorococcus marinus str. AS9601
MNILQNLKESDPVISNFINSEKNRQETHLELIASENFASIAVMQAQGSVLTNKYAEGLPQKRYYGGCEFVDEIEELAIQRAKKLFNANWANVQPHSGAQANAAVFLSLLKPGDTIMGMDLSHGGHLTHGSPVNMSGKWFNAVHYGVNKETSELNFDEIREIALEKKPKLIICGYSAYPRTIDFESFRNIADEVGAFLMADIAHIAGLVASKLHPNPIPHCDVVTTTTHKTLRGPRGGLILCKDAEFGKKFDKSVFPGTQGGPLEHIIAAKAVAFREALQPDFVNYSQQVIKNAKVLASTLINRGINIVSGGTDNHIVLLDLRSINMTGKIADLLVSEVNITANKNTVPFDPESPFVTSGLRLGTAALTTRGFNENAFAEVGEIIADRLLNPDNSLIESQCKERVLTLCNRFPLYEGKLEASIK

SEQ ID NO: 79781 - DNA, 1272 bp, Prochlorococcus marinus str. MIT 9515
  CDS (1)..(1272): transl_table=11
atgaatattcttcaaaatctcaaaaaaagtgatccaatcatatcaaacttaattaattccgaaaaaaatagacaagaaactcatcttgaattaatagctagtgagaatttcgcatcaatggccgtaatgcaagctcagggatcagtcttaacaaataaatacgctgaaggtcttcctcaaaaaagatattacggtggttgtgaatttgttgatgaaatcgaagaactagcaatcgagagagccaagcaactttttgatgcagactgggcgaatgttcaaccccatagtggagcacaagcaaatgcagctgtgtttttaagtttacttaatccaggagacacaattttaggaatggatttatctcatggtggacatttaacccacggatctcctgtgaatatgagtggaaagtggttcaatgctgtgcactatggagttgataaagaaactaataaattaaattttaatgtaataagagatattgctttagctacaaaaccgaaactcattatctgtggatattctgcttatccaagaacaattgatttcaaatctttcagaagtattgctgatgaagttggagcttttttaatggctgacatcgctcatattgcaggactagtagctagtaaacttcatccgaatccaattccatattgcgatgtggtaactactacaactcataagaccttgagaggtccaagaggaggattgattttatgtaaagataaagaatttgggaaaaagtttgataaatctgttttcccaggaactcaaggtgggcctttagaacatattatcgcagctaaggcagttgcctttggagaagctttacagcccaactttgttaattactcaaaacaggttatcaaaaatgcaaaagttctttcttcaaccttaatcaacagaggaatagatattgttagtggaggtacggataatcatattgttttgcttgacttaagaagtattaatatgacaggaaaagttgctgatttacttgtaagtgaagtaaatattacagcaaataaaaatactgttccgtttgatcctgaatctccttttgtcacaagtgggttgagattaggaactgcagcattaactactcgaggttttaatgatgaagcttttattgaagttggtgaaattattgctgatagattactaaatccagatgatttattaattgaaaaagaatgtaaggaaagggtattaagtttatgtaatagttttcctctttatgaagccaaacttgaatcatcgatcaaatga

SEQ ID NO: 79782 - protein, 423 aa, Prochlorococcus marinus str. MIT 9515
MNILQNLKKSDPIISNLINSEKNRQETHLELIASENFASMAVMQAQGSVLTNKYAEGLPQKRYYGGCEFVDEIEELAIERAKQLFDADWANVQPHSGAQANAAVFLSLLNPGDTILGMDLSHGGHLTHGSPVNMSGKWFNAVHYGVDKETNKLNFNVIRDIALATKPKLIICGYSAYPRTIDFKSFRSIADEVGAFLMADIAHIAGLVASKLHPNPIPYCDVVTTTTHKTLRGPRGGLILCKDKEFGKKFDKSVFPGTQGGPLEHIIAAKAVAFGEALQPNFVNYSKQVIKNAKVLSSTLINRGIDIVSGGTDNHIVLLDLRSINMTGKVADLLVSEVNITANKNTVPFDPESPFVTSGLRLGTAALTTRGFNDEAFIEVGEIIADRLLNPDDLLIEKECKERVLSLCNSFPLYEAKLESSIK

SEQ ID NO: 79783 - DNA, 1275 bp, Prochlorococcus marinus str. MIT 9303
  CDS (1)..(1275): transl_table=11
atgacggatcgctgcttggcttctattaatgctgccctgacggattccgacccggcgattgcaggcttgatcgatcaggagaggcaacgtcaggagacccatctagagctgatagccagtgagaacttcacttctcaagctgtgatgcaggctcagggttctgtgctcactaacaagtacgccgaaggtcttccccataagcgctattacggcggttgtgagcatgtcgatgcgattgaggagttggcgatcgagcgtgctcggcggctctttggtgcggcttgggccaacgtgcaacctcatagtggcgcgcaggccaacttcgctgtcttcctggcgcttttgcagcctggtgacaccatcatggggatggatctatcccatggggggcatctcactcatggttctcctgtcaatgtcagcggcaagtggttcaaggtcgttcattacggcgtggagcctgatagtcagcagctcgacatggaggctgtgcgtcagctggccctgaaagagcgtcctcaactgattatctgcggctactcggcctatccccgcacgatcgattttgctgcttttcgcagcatcgctgatgaggtgggcgcttacttgttggcggacatggcacacattgccggccttgttgcggccggggtccatccgagtcctatcgcccactgtgatgtggtgacgacgaccacccacaagacattgcgtggccccagaggcggcttaatcctttgtcgtgatgcggactttggccgtaagtttgacaaggcagtgtttcctggcagtcagggcggccctttggaacatgtgatcgcagccaaggctgtggccttaggagaagctcttcagccagagttccatgcttatagctgccaggtggtggcgaatgcccaggttcttgctggtcgcattcaggagcgcgggattgcggttgtgagtggaggaacagataatcaccttgtcttgctggatctgcgcagcattgggatgaccgggaaggttgctgatttgcttgtcagtgacgtaaacatcaccgccaataagaacacagtgccctttgatcctgagtcgccttttgtgaccagtggtctgcgcttgggcacggcggctctaacaactcgtggctttgatgaggaggcattccgtgaggttgctgatgtgattgcagatcgtttgcttaaaccgcaagatgaatcgattaaggcgcagtgcttggaacgggtgagacaactttgtggccgtttccctctctacaggggttccctctag

SEQ ID NO: 79784 - protein, 424 aa, Prochlorococcus marinus str. MIT 9303
MTDRCLASINAALTDSDPAIAGLIDQERQRQETHLELIASENFTSQAVMQAQGSVLTNKYAEGLPHKRYYGGCEHVDAIEELAIERARRLFGAAWANVQPHSGAQANFAVFLALLQPGDTIMGMDLSHGGHLTHGSPVNVSGKWFKVVHYGVEPDSQQLDMEAVRQLALKERPQLIICGYSAYPRTIDFAAFRSIADEVGAYLLADMAHIAGLVAAGVHPSPIAHCDVVTTTTHKTLRGPRGGLILCRDADFGRKFDKAVFPGSQGGPLEHVIAAKAVALGEALQPEFHAYSCQVVANAQVLAGRIQERGIAVVSGGTDNHLVLLDLRSIGMTGKVADLLVSDVNITANKNTVPFDPESPFVTSGLRLGTAALTTRGFDEEAFREVADVIADRLLKPQDESIKAQCLERVRQLCGRFPLYRGSL

SEQ ID NO: 79785 - DNA, 1239 bp, Clostridium thermocellum ATCC 27405
  CDS (1)..(1239): transl_table=11
atgtttaatttgaatgaaatatcaaaaatcgatcccgaagttgcgaaggcaattgaattggaggttaatcgtcagagaaacaagatagagcttattgcatctgaaaattttgtcagtaaagccgtaatagaagcaatgggtacacctctgaccaacaagtatgctgaaggatatccgggaaaaaggtattacggaggctgtgagtttgttgacataattgaaaatcttgcgattgaacgggcaaagaaaatattcggagctgagcatgcgaatgtgcagccgcattcaggggctcaggcaaatatggctgtgttttttgcagtgttaaatcccggagatacgattcttggaatgaatctttcccatggagggcatttgagccatggaagccctgtcaacatgtccggaaaatattataatgtcatatcctacggagtaaggaaggaagactgcagaatagactatgacgaagtgagaaagcttgcaaaggaacacaggccgaaacttatagtggcgggagccagtgcatatccaagaataatagattttaaggctttcagagatattgcggatgaagtcggagcatatttgatggtggatattgcacatatagcaggtcttgttgcagcaggactgcacccgaatcctgttccttatgcacattttgttaccaccaccactcacaagactttgagaggtccgagaggcggactgatattgtgcggcaatgagcatgcaaaaatgattgacaaggctgttttcccgggaatacagggcggtcctctgatgcatgttattgcggcaaaagcggtaagctttgccgaagtattgaccgatgaattcaagcagtatcagcagcagatagtaaaaaatgcgaaaactcttgccaacgctttgatggagaaaggcattgaccttgtttccggtggaacggacaaccatctcatgctggttgatttaagaaataaaggtcttacgggtaaatacgttcagcatattcttgatgaggtttgcattaccgtaaataaaaacggaattccttttgaccctgaaagtccgtttgttaccagcggtatcagaataggaacacctgcggtgacggcacggggtatgaaagaagaggatatggttgagatagcggatcttatcaatctcaccattacggattatgagaattcgaaagagaaagtaaaggaaagagtaagaatgctatgcgaaaaatatcctttgtatcagtaa

SEQ ID NO: 79786 - protein, 412 aa, Clostridium thermocellum ATCC 27405
MFNLNEISKIDPEVAKAIELEVNRQRNKIELIASENFVSKAVIEAMGTPLTNKYAEGYPGKRYYGGCEFVDIIENLAIERAKKIFGAEHANVQPHSGAQANMAVFFAVLNPGDTILGMNLSHGGHLSHGSPVNMSGKYYNVISYGVRKEDCRIDYDEVRKLAKEHRPKLIVAGASAYPRIIDFKAFRDIADEVGAYLMVDIAHIAGLVAAGLHPNPVPYAHFVTTTTHKTLRGPRGGLILCGNEHAKMIDKAVFPGIQGGPLMHVIAAKAVSFAEVLTDEFKQYQQQIVKNAKTLANALMEKGIDLVSGGTDNHLMLVDLRNKGLTGKYVQHILDEVCITVNKNGIPFDPESPFVTSGIRIGTPAVTARGMKEEDMVEIADLINLTITDYENSKEKVKERVRMLCEKYPLYQ

SEQ ID NO: 79787 - DNA, 1245 bp, Clostridium difficile 630
  CDS (1)..(1245): transl_table=11
atgtttgagaacttgaaaaaagcggaccctgagatttatgaaagtatgaaaagagagttaaaaagacaacaaagaaatattgaattaatagcatctgaaaacatagtatcagttccagtaatggaaactatgggaagtcatcttacaaataagtatgcagaaggttactcaggcaaaagatattatggtggatgtgaatacatagatgaagttgaaactcttgcaatagatagaatcaaaaaaatatttggagcagaacatgctaatgttcaacctcactctggagcaaatgcaaatattggtgtatattttgctatgttaaaaccaggtgatgttgttatgggaatgaatttatctcaaggtggacatttaactcatggtgctccagttaatatttctggtcaatattataaattttatgaatatggtatagataaagacagtggacttatagattttgatgaagttagaaagatagcacatgaagtaaaacctaaaatgatagttgcaggagcaagtgcatatcctagagaaatagattttaaaaagtttagagagatagctgatgaggttggagcattgcttatggtagatatggctcatatagcaggtcttgtggctgctggtcttcaccaaaatccatgtgaagtggctgattttgttacaacaacaactcacaaaactttaagaggacctcgtgggggtgttattctttgtaaagaaaaatatgctaaagacatagacaaagcaatattccctggtattcaaggtggacctcttgaacatataattgcttctaaggcagtttgctttaaagaagctttaagtgatgagtttaaagaatatcaggtacaagttgctaaaaatgcaaaagccttagctgaagaacttattaaaagagattttaaattgatttctggaggtacagataatcatttaatactattagatttgactaataaaaatataactggtaaagcagcagaaaagagattggatgatgcttatataacagctaataaaaatacaattccatttgacccaaatggtgctcttgttacaagtggaataagacttggtactccagctgtaactactagaggtatgaaagaagaagatatggcaataatcgctgaggctatagacctatgtttaacttatgatgaagaatctaaggctagaacattggttgttggtttaactgaaaaatatcctttatatgaagaatataatgttatggattaa

SEQ ID NO: 79788 - protein, 414 aa, Clostridium difficile 630
MFENLKKADPEIYESMKRELKRQQRNIELIASENIVSVPVMETMGSHLTNKYAEGYSGKRYYGGCEYIDEVETLAIDRIKKIFGAEHANVQPHSGANANIGVYFAMLKPGDVVMGMNLSQGGHLTHGAPVNISGQYYKFYEYGIDKDSGLIDFDEVRKIAHEVKPKMIVAGASAYPREIDFKKFREIADEVGALLMVDMAHIAGLVAAGLHQNPCEVADFVTTTTHKTLRGPRGGVILCKEKYAKDIDKAIFPGIQGGPLEHIIASKAVCFKEALSDEFKEYQVQVAKNAKALAEELIKRDFKLISGGTDNHLILLDLTNKNITGKAAEKRLDDAYITANKNTIPFDPNGALVTSGIRLGTPAVTTRGMKEEDMAIIAEAIDLCLTYDEESKARTLVVGLTEKYPLYEEYNVMD

SEQ ID NO: 79789 - DNA, 1257 bp, Clostridium difficile 630
  CDS (1)..(1257): transl_table=11
atgttaaaaacaacaaaaatttcagacccagagttatacaagattgtagctgatgagttggttagacaagaacacaatattgagatgatagcttctgaaagtacagcaccaacagaagtacttgaattaagtggatgtgtatttacaaataaaacagaagaaggctatccaggggctcgttttcaagcaggttctgaagaagcagataaacttgaaaccctagcaataaaacgtgcaaaagaagtatttggagcagaacatgtaaacgtacaaccgtattcaggttctacagctaactattgtgtatattcatcaatattaaaaccaaatgacactgttttaagtatgcgtcttgaccaaggtggacacttgacacatggtagcgcagttaattttttacatgacatttataaatatgaattttatggggtagacccaaatactggacgtatagattatgatgctcttgaagcaaaggcaaaagaatgtagaccaaaacttataattgcaggggcaagttcatatccaagattaatagattatgaaagaatatcaaaggttgcaaaagaagtaggagcttactttatggtagatatggcacatgttgcaggattagtcgcagcgaaagtaatacctagtcctgtaccttatgcagattttgtttcttcatctacgacaaagactttctgtggaccaagaagtggtattgtactttgtaaagcagaacatgcaaagaaactcgataaaggtgtttttccaggaacattagggtctatacatcttaatacagttgcagcaaaagccttttcactattatatttaagtacagataaatttaaaaagataatggagcaagttgtagtaaatgctcagactctagcttctgaactgatttcacatggttttagtattgtaagtggaggtactgataatcatatagtaatggttgacttaagaagtaagaatcttacaggaaaacaatttgaaaaagctcttgaatatgtaggaataacagttaataaaaatgttatacctgacgacccacaatcaccatttgtaactagtggtgttcgtataggtcttacatcaatatctcaaagaggtctgaaagaaaaagaagttatacagatagcagggataatgaataaggtagcagaaaatattgataataaagaagtattagatgaatgtaaagcagaggcacaagaacttatatctaagtttccattatatccagaagggtattttgaagattaa

SEQ ID NO: 79790 - protein, 418 aa, Clostridium difficile 630
MLKTTKISDPELYKIVADELVRQEHNIEMIASESTAPTEVLELSGCVFTNKTEEGYPGARFQAGSEEADKLETLAIKRAKEVFGAEHVNVQPYSGSTANYCVYSSILKPNDTVLSMRLDQGGHLTHGSAVNFLHDIYKYEFYGVDPNTGRIDYDALEAKAKECRPKLIIAGASSYPRLIDYERISKVAKEVGAYFMVDMAHVAGLVAAKVIPSPVPYADFVSSSTTKTFCGPRSGIVLCKAEHAKKLDKGVFPGTLGSIHLNTVAAKAFSLLYLSTDKFKKIMEQVVVNAQTLASELISHGFSIVSGGTDNHIVMVDLRSKNLTGKQFEKALEYVGITVNKNVIPDDPQSPFVTSGVRIGLTSISQRGLKEKEVIQIAGIMNKVAENIDNKEVLDECKAEAQELISKFPLYPEGYFED

SEQ ID NO: 79791 - DNA, 1272 bp, Prochlorococcus marinus str. MIT 9301
  CDS (1)..(1272): transl_table=11
atgaatatccttcaaaatcttaaagaaagtgatccagtaatatcaaattttatcaaatctgaaaaaaataggcaggaaactcatcttgagttaatcgcaagcgaaaatttcgcatcaattgccgttatggaggctcaaggttctgtccttacaaataaatacgccgagggattaccccaaaaaagatactacgggggatgtgaatttgttgatcagatcgaagaattagctattcagagagcgaaaaaattgtttaatgcaaattgggctaatgttcaaccccatagtggagcacaggcaaatgctgctgttttcttaagtctacttaaacctggcgacacaatcatggggatggatttatctcatggtggacacttaactcatgggtctccagtaaatatgagtggtaagtggttcaatgcagttcactatggtgtaaataaagaaactagtgaattaaattttgatgaaataagagagatagcacttgaaacaaaaccaaaattgatcatatgcggatattctgcttatccaagaacaatcgattttgaatcatttagaaatattgcagatgaagttggtgctttcttaatggctgatattgcacatattgccggtcttgtagcaagtaaacttcacccaaatccaataccttattgtgatgtagtaactacaactactcataaaacattaagagggcctagaggtggacttatcttatgtaaagatgcagaatttggaaagaaatttgataaatctgttttcccaggaactcagggtggtcccctcgaacatataattgccgcaaaagcagttgcatttggagaagccttacagccagatttcgttaattattcccaacaagtaattaaaaatgcaaaagttctagcttcaactctaataaatagaggtattgatatcgtgagtggcggcactgataaccatattgttttactcgatttaagaagtatcaatatgactggtaaaattgctgacttgcttgtaagtgaagttaatatcactgcaaataaaaataccgttccatttgaccctgaatcaccttttgtaaccagcggactaaggttgggaactgctgctttaactactagaggctttaatgagaatgcttttgctgaagttggtgaaattattgctgatagattacttaacccagacgattcactgattgaaagtcaatgtaaagaaagagtattaaccctatgtaatcgttttcctctttatgaaagcaaacttgaagcatcaattaaatga

SEQ ID NO: 79792 - protein, 423 aa, Prochlorococcus marinus str. MIT 9301
MNILQNLKESDPVISNFIKSEKNRQETHLELIASENFASIAVMEAQGSVLTNKYAEGLPQKRYYGGCEFVDQIEELAIQRAKKLFNANWANVQPHSGAQANAAVFLSLLKPGDTIMGMDLSHGGHLTHGSPVNMSGKWFNAVHYGVNKETSELNFDEIREIALETKPKLIICGYSAYPRTIDFESFRNIADEVGAFLMADIAHIAGLVASKLHPNPIPYCDVVTTTTHKTLRGPRGGLILCKDAEFGKKFDKSVFPGTQGGPLEHIIAAKAVAFGEALQPDFVNYSQQVIKNAKVLASTLINRGIDIVSGGTDNHIVLLDLRSINMTGKIADLLVSEVNITANKNTVPFDPESPFVTSGLRLGTAALTTRGFNENAFAEVGEIIADRLLNPDDSLIESQCKERVLTLCNRFPLYESKLEASIK

SEQ ID NO: 79793 - DNA, 1245 bp, Herminiimonas arsenicoxydans
  CDS (1)..(1245): transl_table=11
atgttttcaaaagaccagaccctcgcaaaaacagatactgaactgtggtcggcgatccagcaggaaaatacgcgtcagcaggatcatatcgagctgatcgcatccgagaattacacttcgcctgccgtgatggaagcgcaaggttcgcaactgacaaataagtatgccgaaggttatccgggcaagcgttattacggcggttgcgagtacgtcgatatcgtcgaacagctggcgatcgatcgcgtcaagaaattgttcggcgccgaagcagccaacgtacagccgaattccggctcgcaggcgaaccagggcgtgttctttgccgtcctcaagccgggcgacaccatcatgggcatgtcgctggcagaaggcggccacctgacacacggcatggcattgaacatgtcgggcaaatggttcaatgtggtttcctacggtctgaacgacaaggaagaaatcgattacgaacagatggaacgtctggcgcgtgaacacaagcctaagatgatcattgccggcgcatcggcgtatgcactgcgcatcgactttgaacgctttgcaaaaattgcgaaggaaatcggcgcctacttcatggtggacatggcgcattacgccggtctgatcgctgcaggcgaatatccgaatccggtaccgtacgccgatttcgttacctctacgacccataaatcactgcgcggcccgcgcggcggcttcatcctgatgaaagccgaacacgagaaaatcatcaactcggcaattttccccggcatccagggcggcccattgatgcatgtcatcgccggcaaggcagtggcattcaaggaagcgctggcacccgagttcaaggtctatcagcaacaagtcctcaagaatgcagatgcattggccaaggccttgatcgcacgcggcttgcgcatcgtttccaatcgcaccgaatcgcacgtgatgctggtcgatctgcgcgccaaaaaaatcaccggcaaggatgcagaagcattgctgggttccgcgcacatcacgaccaacaagaacggcattcccaacgatccggaaaaaccgtttgtttcttccggtattcgtctcggcagccctgcgatgaccacccgtggtttcaaggaagcggaagcgaccaaggtcggcaatctgatcgccgacgtgctggataatccgaacgatgcagcaaccatcgaacgcgtgaaagccgaagtcaagaaactgactgatgctttcccggtttacggctga

SEQ ID NO: 79794 - protein, 414 aa, Herminiimonas arsenicoxydans
MFSKDQTLAKTDTELWSAIQQENTRQQDHIELIASENYTSPAVMEAQGSQLTNKYAEGYPGKRYYGGCEYVDIVEQLAIDRVKKLFGAEAANVQPNSGSQANQGVFFAVLKPGDTIMGMSLAEGGHLTHGMALNMSGKWFNVVSYGLNDKEEIDYEQMERLAREHKPKMIIAGASAYALRIDFERFAKIAKEIGAYFMVDMAHYAGLIAAGEYPNPVPYADFVTSTTHKSLRGPRGGFILMKAEHEKIINSAIFPGIQGGPLMHVIAGKAVAFKEALAPEFKVYQQQVLKNADALAKALIARGLRIVSNRTESHVMLVDLRAKKITGKDAEALLGSAHITTNKNGIPNDPEKPFVSSGIRLGSPAMTTRGFKEAEATKVGNLIADVLDNPNDAATIERVKAEVKKLTDAFPVYG

SEQ ID NO: 79795 - DNA, 1260 bp, Burkholderia vietnamiensis G4
  CDS (1)..(1260): transl_table=11
atgttttccaaagaacaaaccattgccggtttcgatccggatctgcatgaggccatgcgtctcgagcgacagcgccaggaggcgcacatcgagctgatcgcttcggaaaactatacgagcccgcgcgtgctcgaggcacagggatcggtgctgaccaacaaatacgccgaaggctacccgggcaagcgctactacggcggctgcgaacacgtcgacgtggtcgaacagctggcgatcagccgcgcgaaggcgctgttcaatgccgatttcgcgaacgtgcagccgcatagcggctcgcaggcgaacgcggccgtctatctggcgctgctcacgcccggcgacacgatcctcggcatgagcctcgcgcacggcggccatctgacgcacggtgcgaaggtgtcgttttcggggaaggtgttcaatgcggtccagtacggcgtcgatgcgacaaccgggctgatcgattacgacgagatcgaacgtctcgcgctcgagcatcggccgaagatgatcgtcgccggcttttccgcgtattcgcgggttctcgatttcgcacgcttccgcgcgatcgctgacaaggtcggcgcctatctgttcgtcgacatggcgcacgtcgccgggcttgtcgcggcgggcctgtatccgaacccggtgccgtttgccgacgtcgtgacgaccacgacgcacaagacgctgcgcgggcctcgtggcggcctgattctggcccgcgccaacgaggagatcgagaaaaagctgaactcgatggtgtttccgggcacgcaaggcggcccgctgatgcatgtcgttgccgcgaaggcggtcgcgttcaaggaagcactggggccggagttcgtcacgtatcagaagcagacgctcgcgaacgcgcgggcgatggtcgaggtgttcaacgcgcgcggctacgacgtcgtgtcgggcggcaccgacgatcacctgttcctcgtcagcctcgtcaagaagggcatcaccggcaaggatgccgatgcggcgctggggcgcgcgcacatcacggtgaacaagaacacggtgccgaacgatccccaatcgccgttcgtgacgagcggcatccgcatcggcacgccggcgatcacgacgcgcggctttctcgaggcggacgccgcacataccgcgcaattgatgtgcgacgcgctcgaccggctcggcgacgcgcaggtcgaagctgctgtgcgcacccaggtggcgcagctctgcgcgcgcttcccggtttatctcggactgtga

SEQ ID NO: 79796 - protein, 419 aa, Burkholderia vietnamiensis G4
MFSKEQTIAGFDPDLHEAMRLERQRQEAHIELIASENYTSPRVLEAQGSVLTNKYAEGYPGKRYYGGCEHVDVVEQLAISRAKALFNADFANVQPHSGSQANAAVYLALLTPGDTILGMSLAHGGHLTHGAKVSFSGKVFNAVQYGVDATTGLIDYDEIERLALEHRPKMIVAGFSAYSRVLDFARFRAIADKVGAYLFVDMAHVAGLVAAGLYPNPVPFADVVTTTTHKTLRGPRGGLILARANEEIEKKLNSMVFPGTQGGPLMHVVAAKAVAFKEALGPEFVTYQKQTLANARAMVEVFNARGYDVVSGGTDDHLFLVSLVKKGITGKDADAALGRAHITVNKNTVPNDPQSPFVTSGIRIGTPAITTRGFLEADAAHTAQLMCDALDRLGDAQVEAAVRTQVAQLCARFPVYLGL

SEQ ID NO: 79797 - DNA, 1275 bp, Burkholderia vietnamiensis G4
  CDS (1)..(1275): transl_table=11
atgtcgaacacccagcctttcttctcgcagcccctcgccgagcgcgacgccccggtgcgcagcgccatcctgaaggagctcgagcgccagcagtcgcaggtcgagctgatcgcgtcggaaaacatcgtgtcgcgcgccgtgctggaagcgcagggttcggtgctgaccaacaagtatgcggaaggctatccgggcaagcgctattacggcggctgcgaatttgccgatgaaatcgaggcgctcgcgatcgagcgtgtgaagcagatcttcaacgccggctatgcgaacgtgcagccgcattcgggtgcgcaggcgaacggctcggtgatgctcgcgctcgcgaagccgggcgacacggtgctcggcatgtcgctcgacgccggcggccacctcacgcacggcgcgaagccggcgctgtcgggcaagtggttcaacgcggtgcagtacggcgtgaaccgcgacacgatgcgcatcgactacgaccaggtcgaggagctcgcccaccagcacaagccgacgctgctcatcgccggcttctccgcttatccgcgcgcgctcgacttcgcgcgcttccgcgcgatcgccgacagcgtcggcgcgaagctgatggtcgacatggcgcacatcgcgggcgtgatcgcggccggtcgccatgcgaacccggtcgagcacgcgcacgtcgtcacgtcgaccacgcacaagacgctgcgcggcccgcgcggcggcttcgtgctgaccaacgacgaagagatcgcgaagaagatcaactcggccgtgttccccggcctgcagggcggcccgctgatgcacgtgatcgccggcaaggccgtcgcgttcggcgaagtgctgcatgccgacttcaagacctacatcgaccgcgtgctcgcgaacgcgcaggcgctcggcgaagtgctcaaggcgggcggcgtcgatctcgtcaccggcggcaccgacaaccacctgctgctggtcgacctgcgcccgaaggggctgaagggtgcgccggtcgagcaggcgctcgagcgcgcgggcatcacctgcaacaagaacggcattccgttcgacaccgagaagccgaccgtcacgtcgggcatccgcctcggcacgccggccggcacgacgcgcggcttcggcgtggccgagttccgcgagatcggccgcctgattctcgaagtgttcgacgcgctgcgcgcgaatccggacggcgaccacgcgaccgagcaacgcgtgcgccgcgagattttcgcgctttgcgagcgcttcccgatttactga

SEQ ID NO: 79798 - protein, 424 aa, Burkholderia vietnamiensis G4
MSNTQPFFSQPLAERDAPVRSAILKELERQQSQVELIASENIVSRAVLEAQGSVLTNKYAEGYPGKRYYGGCEFADEIEALAIERVKQIFNAGYANVQPHSGAQANGSVMLALAKPGDTVLGMSLDAGGHLTHGAKPALSGKWFNAVQYGVNRDTMRIDYDQVEELAHQHKPTLLIAGFSAYPRALDFARFRAIADSVGAKLMVDMAHIAGVIAAGRHANPVEHAHVVTSTTHKTLRGPRGGFVLTNDEEIAKKINSAVFPGLQGGPLMHVIAGKAVAFGEVLHADFKTYIDRVLANAQALGEVLKAGGVDLVTGGTDNHLLLVDLRPKGLKGAPVEQALERAGITCNKNGIPFDTEKPTVTSGIRLGTPAGTTRGFGVAEFREIGRLILEVFDALRANPDGDHATEQRVRREIFALCERFPIY

SEQ ID NO: 79799 - DNA, 1296 bp, Burkholderia vietnamiensis G4
  CDS (1)..(1296): transl_table=11
atgtactcggccgcaccggtcaacctgtacacacttaacggaaaccgtatgtttgacagagcccaaagcaccatcgcgaacgtcgatcccgagatctttgctgcgatcgagcaggaaaaccgccgccaggaagaccacatcgagttgatcgcgtcggaaaactacacgagcccggccgtgatggccgcacagggctcgcagctcacgaacaagtacgcggaaggttatccgggcaagcgctactacggcggctgcgagtacgtcgacgtggtcgagcagctggcgatcgatcgcgtgaagcagctgttcggcgcggaagcggcgaacgtgcagccgaactcgggctcgcaggcgaaccagggcgtgttcttcgcgatgctcaagccgggcgacacgatcatggggatgagcctcgcgcacggcgggcacctgacgcacggctcgccggtgaacatgtcgggcaagtggttcaacgtggtgagctacgggctgaacgaaaacgaagacatcgattacgacgcggcggaaaagctcgcgcaggagcacaagccgaagctgatcgtcgcgggcgcctcggcgttcgcgctgaagatcgacttcgcgcgtatggcgcagatcgcgaagtcggtcggtgcgtacctgatggtggacatggcgcactacgctgggctgatcgcggcgggcgtgtatccgaacccggtgccgcacgctgatttcgtgacgacgaccacgcacaagagcctgcgcggcccgcgcggcggcgtgatcctgatgaaggcggagtacgagaagcagatcaactcggcgattttcccgggcatccagggcggcccgctgatgcacgtgatcgcggcgaaggcggtggcgttcaaggaagcgctgtcgccggagttcaaggcgtatcagcaaaaggtggtggagaacgcgcgcgtgctggccgagacgctggtgaaacgcgggctgcggatcgtgtcgggccgcacggaaagccacgtgatgctggtggacctgcgcgcgaagcacatcacgggcaaggcggcggaagcggcgctgggtgcggcgcacattacggtgaacaagaacgcgattccgaacgatccggaaaagccgttcgtgacgagtggcgtgcggctgggctcgccggcgatgacgacgcgcggcttcgggccggcggaagcggagcaggtgggcaacctgatcgcggacgtgctggagaacccggaagatgcggcgacgctcgagcgcgtgcgcgcgcaagtggccgagctgaccaagcgtttcccggtctatcgctga

SEQ ID NO: 79800 - protein, 431 aa, Burkholderia vietnamiensis G4
MYSAAPVNLYTLNGNRMFDRAQSTIANVDPEIFAAIEQENRRQEDHIELIASENYTSPAVMAAQGSQLTNKYAEGYPGKRYYGGCEYVDVVEQLAIDRVKQLFGAEAANVQPNSGSQANQGVFFAMLKPGDTIMGMSLAHGGHLTHGSPVNMSGKWFNVVSYGLNENEDIDYDAAEKLAQEHKPKLIVAGASAFALKIDFARMAQIAKSVGAYLMVDMAHYAGLIAAGVYPNPVPHADFVTTTTHKSLRGPRGGVILMKAEYEKQINSAIFPGIQGGPLMHVIAAKAVAFKEALSPEFKAYQQKVVENARVLAETLVKRGLRIVSGRTESHVMLVDLRAKHITGKAAEAALGAAHITVNKNAIPNDPEKPFVTSGVRLGSPAMTTRGFGPAEAEQVGNLIADVLENPEDAATLERVRAQVAELTKRFPVYR

SEQ ID NO: 79801 - DNA, 1257 bp, Streptococcus pyogenes str. Manfredo
  CDS (1)..(1257): transl_table=11
atgatttttgataaaggtaatgttgaagactttgataaagagctttgggatgccattcatgctgaagaagaaagacaagaacatcatatcgaattgattgcatctgaaaacatggtttcaaaagctgtcatggcagctcaaggttctgttttaaccaataagtatgcagaaggctatccaggtaatcgctattatggtggaacagaatgtgtggatattgtcgaaacgcttgctattgaacgtgctaagaaacttttcggtgccgcatttgccaatgtccaagcccattccggaagtcaagccaatgcagcagcttatatggccttgattgaggctggtgacaccgtattaggaatggatttggctgcaggtggtcatctcacgcatggctctccagtaaatttttctggaaaaacctaccattttgtgggttactcagtagatgctgatactgaaatgttaaattatgaggcgattttagaacaagcaaaggcggtccagccaaagcttatcgttgcaggggcttcggcctactctagaagcattgattttgaaaagtttcgtgccattgctgatcacgtaggtgcttacttaatggtggacatggctcacatcgctggccttgtagcagcaggtgtgcacccgagtcctgtcccttatgcgcatattgtgacgtcaacaacccataaaaccttacgtggtcctcgtggaggcttgatattaaccaatgacgaagctcttgctaaaaagattaattcggccattttccctggtttacaaggaggacctctggaacacgtgattgctgccaaagcggttgccttcaaagaagccttggatccagcctttaaagactatgcacaagctattattgataatactgcggctatggcagcagtttttgcacaagatgatcgtttccgtctgatctcaggtggtacagataatcatgtctttttagtagatgtcactaaggttattgctaatggtaaactagcgcaaaatcttctggatgaggttaatattacccttaataaaaatgccattccttttgaaaccttgtcgccatttaaaacctcaggtattcgcattggttgtgctgccataaccagccgtggtatgggtgttaaagagagtcagaccattgcccgtcttatcatcaaagccttggttaatcatgatcaagaaactattcttgaagaagtccgtcaggaagtgcgtcagttaaccgatgctttcccactctataaaaagtaa

SEQ ID NO: 79802 - protein, 418 aa, Streptococcus pyogenes str. Manfredo
MIFDKGNVEDFDKELWDAIHAEEERQEHHIELIASENMVSKAVMAAQGSVLTNKYAEGYPGNRYYGGTECVDIVETLAIERAKKLFGAAFANVQAHSGSQANAAAYMALIEAGDTVLGMDLAAGGHLTHGSPVNFSGKTYHFVGYSVDADTEMLNYEAILEQAKAVQPKLIVAGASAYSRSIDFEKFRAIADHVGAYLMVDMAHIAGLVAAGVHPSPVPYAHIVTSTTHKTLRGPRGGLILTNDEALAKKINSAIFPGLQGGPLEHVIAAKAVAFKEALDPAFKDYAQAIIDNTAAMAAVFAQDDRFRLISGGTDNHVFLVDVTKVIANGKLAQNLLDEVNITLNKNAIPFETLSPFKTSGIRIGCAAITSRGMGVKESQTIARLIIKALVNHDQETILEEVRQEVRQLTDAFPLYKK

SEQ ID NO: 79803 - DNA, 1302 bp, Bradyrhizobium sp. ORS278
  CDS (1)..(1302): transl_table=11
atgaccgcttctgccaagcccgtatcgtcagtcgattccttcttttccgccaccctggccgaggctgatcccgagatcgccgccgccatcaggggcgaactcggtcggcaacggcacgaaatcgagctgatcgcttcggaaaacatcgtcagccgggcggtcctggaggcccagggctcggtgatgaccaacaagtatgccgagggctatccgggcgctcggtattacggcggctgcgaatgggtcgacgtcgccgagaacctcgcgatcgaccgcgccaagaagctgttcggcgccaatttcgccaacgtccagccgaactcgggcagccagatgaatcaggccgtgttcctggcgctgctgcagccgggcgacaccttcatgggcctcgacctcgccgcgggcggtcatctcacccacggttcgccggtcaatatgtccggcaagtggttcaaggccgcgcattacaccgtgcgccgcgacgaccacctcatcgacatggatgcggtggccaagcaggccgaagaggtgaagccgaagctgatcatcgccggcggcagtgcctattcgcgcccgtgggacttcaagcgcttccgcgagatcgcggacagcgtcggcgcctatctgctggtcgacatggcccacttcgccggcctcgtcgctggtggcgtgcatgcctcgccggtgccttacgctcacatcaccaccaccacgacccataagtcgctgcgcggtccgcgcggcggcctgatgctctggaatgacgagcagttcaccaagaagttcaactcggcgatcttcccgggacttcagggcggtccgctcatgcacgtgatcgcggccaaggcggtggcgttcgccgaggcgctgcggccggagttcaaggcctacgcgaagaacgtcgtggagaatgcgaaggcgctggcggaatcgctgcgcgcgcaaggcttcgacatcgtctccggcggcaccgacaaccacctgatgctggtcgatcttcggcccaagggcctgaagggcaacgtgtccgagaaggcgctcgtccgcgccgccatcacctgcaacaagaacggcattccgttcgaccccgagaagccgttcgtcacctccggcctgcgcctgggcacgccggcagcgaccacccgcggcttcggcgtcgctgaattccagcaggtcggcagtctgatcgccgaggtgctgaacgcgatcgcgcagggccctgacggcagcgcgccgctggtcgaagccgcggtcaaggagaaggtgaaggcgctgaccgaccggttcccgatctatcagtaa

SEQ ID NO: 79804 - protein, 433 aa, Bradyrhizobium sp. ORS278
MTASAKPVSSVDSFFSATLAEADPEIAAAIRGELGRQRHEIELIASENIVSRAVLEAQGSVMTNKYAEGYPGARYYGGCEWVDVAENLAIDRAKKLFGANFANVQPNSGSQMNQAVFLALLQPGDTFMGLDLAAGGHLTHGSPVNMSGKWFKAAHYTVRRDDHLIDMDAVAKQAEEVKPKLIIAGGSAYSRPWDFKRFREIADSVGAYLLVDMAHFAGLVAGGVHASPVPYAHITTTTTHKSLRGPRGGLMLWNDEQFTKKFNSAIFPGLQGGPLMHVIAAKAVAFAEALRPEFKAYAKNVVENAKALAESLRAQGFDIVSGGTDNHLMLVDLRPKGLKGNVSEKALVRAAITCNKNGIPFDPEKPFVTSGLRLGTPAATTRGFGVAEFQQVGSLIAEVLNAIAQGPDGSAPLVEAAVKEKVKALTDRFPIYQ

SEQ ID NO: 79805 - DNA, 1254 bp, Dichelobacter nodosus VCS1703A
  CDS (1)..(1254): transl_table=11
atgtttacaaaagcaatgaacatcgctgattttgataatgaattagcccaagcaatcgctgatgaagccactcgtcaggaagatcatattgaattgatcgcttctgaaaactattgcagtccgcgcgtcatggaagcacaaggcagttgtttaaccaataaatatgccgaaggttatccgcggaaacgttattatggtggctgtgaatacgttgatatcgttgaagaattagcaattgcgcgcgttaaaatgttatttgctgctgattatgccaacgtacaaccccacagcggttctcaagccaatgctgccgtatttttagctttattagaaccaggtgataccgttttaggtatggatttggatcacggcggacatttaacccacggttcaaaagtcagcttttctggaaaaacttataattccatcggctacggcattgatgataaaggcttaattgattatgacgctgtggcgcaattagccgaaaaacatcgtcctaaaatgattattgccggcttttctgcttattcacaagttcttgatttccaacggttccgcgaaattgccgacagcgttggcgcttatttaatggtcgatatggcgcacgttgctggattagtagcagcaggtttatatcccaatcctgttcctttcgctgatgtggtcacttcaaccacgcataaaacattgcgcggcccgcgcggcggcatcattttagccaaagccaatcccaccattgaaaagaaattaaattctgccattttcccaggatctcaaggtggcccgttaatgcatgtgattgcggcaaaagccgttgcgtttaaagaagcgctggaaccgtctttccaaaaatatcaagaacaagttgtggaaaacgcgaaaaccatggcaaaagtatttatcgcgcgcggttacgatatcgtctccggcggcacgcaaaaccacttaatgctggtgagtttgatcaataaaggattaaccggtaaagcggcaaacgatgcattatctcgcgctcatattacggtaaacaaaaactccgtgcccaacgatccgcaatcgcctttcgtcaccagcggaatccgcattggtacaccggcaattaccacacgcggttttggcgttaatgaagtgaaaaaagttgccaactggatttgcgacgttttagatgacattgacaatgaagaagtcattcttaacgtgcgcaataaagtagcggaattgtgcgctgaatttccagtttatggtcaataa

SEQ ID NO: 79806 - protein, 417 aa, Dichelobacter nodosus VCS1703A
MFTKAMNIADFDNELAQAIADEATRQEDHIELIASENYCSPRVMEAQGSCLTNKYAEGYPRKRYYGGCEYVDIVEELAIARVKMLFAADYANVQPHSGSQANAAVFLALLEPGDTVLGMDLDHGGHLTHGSKVSFSGKTYNSIGYGIDDKGLIDYDAVAQLAEKHRPKMIIAGFSAYSQVLDFQRFREIADSVGAYLMVDMAHVAGLVAAGLYPNPVPFADVVTSTTHKTLRGPRGGIILAKANPTIEKKLNSAIFPGSQGGPLMHVIAAKAVAFKEALEPSFQKYQEQVVENAKTMAKVFIARGYDIVSGGTQNHLMLVSLINKGLTGKAANDALSRAHITVNKNSVPNDPQSPFVTSGIRIGTPAITTRGFGVNEVKKVANWICDVLDDIDNEEVILNVRNKVAELCAEFPVYGQ

SEQ ID NO: 79807 - DNA, 1248 bp, Dehalococcoides sp. BAV1
  CDS (1)..(1248): transl_table=11
atgagctttttaaagacctcggatccggcagtttataatgccataatgcaggaaaccacccgcctgaaagaaacaattgacctcatagcttcagaaaactataccagcaaggctgttttggaagctcaaggttcagttttcaccaataaatacgccgaaggataccccggcaaacgatattacgcaggctgtgaatacgcagacgccgtagaggaactggctatagacagggcaaagaccctgttccatgccgaacatgccaacgttcagccccattctggggctcaggctaatatggccgcctatttcgccatggtaaaacccggtgataccataatgggacttaccctttcccacggcggacacctgacccatggttcaaaggtcaattttaccggcaagctttaccatgtaattgagtacgggctgaatgccgaaaccgagcggattgactatgataatctggaaaaactggctatggaacatcgcccccgcatgattgtgaccggtgcttcagcctatccccgaatactggattttgaacgttttagggctatctgtgacaaggtggacgccaaactgatggtggatatcgcccatattgccggtctggtagccgccgggcttcatccttcaccagtgccatacgctgatgtggttacctctaccagccataaaaccctgcgcggcccgcgcggcggctttatactctgcaaagagcaatatgccaaggctattgaccaggcagtattcccggtaatgcagggcggacctcttatgcaggtagttgccgctaaagcagtggcttttcaggaagccatgcagcccggttttgtcacttaccagaaaaaaactcttgagaatacccaggtaatggctgaggaactacgcaagctgggactccgcctggtttcaggcggtaccgacaaccatctggtattggtagacttaagcccaataggggtaaacggttatgacgcccagctggcactgcgcagagccggcattgtaatcaaccgcaataccgtaccctttgccgaaaaccaaactgccaacgtaccggcaggcatacgcctgggctgcccggcagcaaccagccgcggatttggtccggctgaaatccgccagactgttggctggattggcaagatacttaaaaacataggtaacgaagacgtagaaaaacaggtactggccgaggtaattcacctctgccgcaaattccctgtacccggcatagatatataa

SEQ ID NO: 79808 - protein, 415 aa, Dehalococcoides sp. BAV1
MSFLKTSDPAVYNAIMQETTRLKETIDLIASENYTSKAVLEAQGSVFTNKYAEGYPGKRYYAGCEYADAVEELAIDRAKTLFHAEHANVQPHSGAQANMAAYFAMVKPGDTIMGLTLSHGGHLTHGSKVNFTGKLYHVIEYGLNAETERIDYDNLEKLAMEHRPRMIVTGASAYPRILDFERFRAICDKVDAKLMVDIAHIAGLVAAGLHPSPVPYADVVTSTSHKTLRGPRGGFILCKEQYAKAIDQAVFPVMQGGPLMQVVAAKAVAFQEAMQPGFVTYQKKTLENTQVMAEELRKLGLRLVSGGTDNHLVLVDLSPIGVNGYDAQLALRRAGIVINRNTVPFAENQTANVPAGIRLGCPAATSRGFGPAEIRQTVGWIGKILKNIGNEDVEKQVLAEVIHLCRKFPVPGIDI

SEQ ID NO: 79809 - DNA, 1290 bp, Synechococcus sp. WH 7803
  CDS (1)..(1290): transl_table=11
atggtggatttcgaaaccgctccgatcaatgcaccactggcagagtctgatccagcgattgcccgtttgatcgatcaggagcgcgatcgccaggaaacccatctcgagctgattgcctcggaaaacttcgcatcgagcgccgtgatggctgctcagggctcggtgttgaccaataaatacgcggaaggcctgccgaacaagcgctactacggcggttgtgagcacgtggatgccattgaagacctggcgattgagcgggccaaggaactcttcggtgctgcctgggccaacgttcagccgcacagtggtgctcaggccaatttcgctgtcttcctggccctgctgcagcccggcgacacgatcatgggtctggacctgtcccatgggggccacctgacccatggctcaccggtgaatgtgagcggcaaatggttcaacgttgtccagtacggggtcgacaaagagacccagcgcttggatatggaggcgatccgtcagctcgccctcgagcacaagcccaagctgatcgtttgcggtttttcggcttacccccgcaccatcgattttgcggcgttccgtgcgattgctgatgaggttggggcttacctcctggctgatatggcccatatcgcaggcctggtggcagccggcgtccatcccagcccggtcccccattgcgatgtggtcaccaccaccacgcacaaaaccctgcgcggtccccgcggtggtctgatcctttgccgggatgccgagttcgccaaaaagttcgacaaggccgttttccccggttcgcaaggtggaccccttgagcatgtgatcgcagccaaagccgtggcctttggcgaggcactccgtcctgcgttcaaggcttacagccaacaggtggtggccaatgcccaggccctggccgaccgcctgatggcccgtggcatcgatgtggtgagcggagggaccgataaccatgtggtgctgcttgatctgcgcagcatcggcatgaccgggaaggtggccgacctgctggtcagcgatgtgcacatcaccgcgaacaagaacacggttccgtttgatccagaatcacccttcgtcaccagcggtctgcgcttaggaaccgctgcgctcacgacccgtggcttcgatgctgacgcgttcgctgaagtggccgaggtgattgctgatcgtttgctcaatccagaagacgatgccattcaggcccgttgcctggagcgggtggccagtctctgtcggcgttttcccctctacgcgatggcaacggaaccggcgcttgtctga

SEQ ID NO: 79810 - protein, 429 aa, Synechococcus sp. WH 7803
MVDFETAPINAPLAESDPAIARLIDQERDRQETHLELIASENFASSAVMAAQGSVLTNKYAEGLPNKRYYGGCEHVDAIEDLAIERAKELFGAAWANVQPHSGAQANFAVFLALLQPGDTIMGLDLSHGGHLTHGSPVNVSGKWFNVVQYGVDKETQRLDMEAIRQLALEHKPKLIVCGFSAYPRTIDFAAFRAIADEVGAYLLADMAHIAGLVAAGVHPSPVPHCDVVTTTTHKTLRGPRGGLILCRDAEFAKKFDKAVFPGSQGGPLEHVIAAKAVAFGEALRPAFKAYSQQVVANAQALADRLMARGIDVVSGGTDNHVVLLDLRSIGMTGKVADLLVSDVHITANKNTVPFDPESPFVTSGLRLGTAALTTRGFDADAFAEVAEVIADRLLNPEDDAIQARCLERVASLCRRFPLYAMATEPALV

SEQ ID NO: 79811 - DNA, 1272 bp, Thermus thermophilus HB27
  CDS (1)..(1272): transl_table=11
ttgcgccttctccctcatgccgcgattttacccggctataatcgccctatggtgagcaccctcaagcgggacgaggccctctttgagctcatcgccttagaggagaaaaggcagcgggaaggcctggagctcatcgccagcgaaaacttcgtctccaagcaggtgcgggaggcggtggggagcgtcctcaccaacaagtacgccgagggctaccccggggcccggtactacggggggtgcgaggccattgaccgggtggagtccctggccatagagcgggccaaggccctcttcggagcggcctgggccaacgtccagccccactccggctcccaggccaacatggcggtctacatggccctgatggagccgggggacaccctcatgggcatggacctcgcggccggcggccacctcacccacggctcccgcgtgaacttctccgggaagctttacaaggtggtctcctacggggtccgtcccgacacggagctcatagacctggaggaggtccgccgcctcgccctcgagcaccgccccaaggtgatcgtggccggggccagcgcctacccccgcttctgggactttaaggcctttcgggagatcgccgacgaggtgggggcctacctcgtggtggacatggcccacttcgccgggctcgtggccgcgggcctccacccgaaccccctgccttacgcccacgtggtgacgagcaccacccacaaaaccctccggggcccgaggggcggcctcatcctctccaacgaccctgagctcggcaagaggattgacaagctcatcttccccgggatccagggggggcccttggagcacgtgatcgccgggaaggccgtggccttctttgaggccctacagcccgagttcaaggagtacagccgcctggtggtggaaaacgccaagcgcctggcggaggcgcttgcccgccggggctaccgcatcgtcaccggggggacggacaaccacctcttcctcgtggacctgcgccccaagggcctcaccgggaaggaggcagaggagaggctggacgccgtggggatcacggtgaacaagaacgccatcccctttgaccccaagcccccccgggtcacctcggggatccgcatcggcaccccggccatcaccacccggggcttcacccccgaggagatgcccctcgtcgccgagctcatagaccgggcccttctggagggcccctcggaggccctgcgggaagaggtgcgcaggctcgccctggcccaccccatgccctga

SEQ ID NO: 79812 - protein, 423 aa, Thermus thermophilus HB27
MRLLPHAAILPGYNRPMVSTLKRDEALFELIALEEKRQREGLELIASENFVSKQVREAVGSVLTNKYAEGYPGARYYGGCEAIDRVESLAIERAKALFGAAWANVQPHSGSQANMAVYMALMEPGDTLMGMDLAAGGHLTHGSRVNFSGKLYKVVSYGVRPDTELIDLEEVRRLALEHRPKVIVAGASAYPRFWDFKAFREIADEVGAYLVVDMAHFAGLVAAGLHPNPLPYAHVVTSTTHKTLRGPRGGLILSNDPELGKRIDKLIFPGIQGGPLEHVIAGKAVAFFEALQPEFKEYSRLVVENAKRLAEALARRGYRIVTGGTDNHLFLVDLRPKGLTGKEAEERLDAVGITVNKNAIPFDPKPPRVTSGIRIGTPAITTRGFTPEEMPLVAELIDRALLEGPSEALREEVRRLALAHPMP

SEQ ID NO: 79813 - DNA, 1476 bp, Candidatus Protochlamydia amoebophila UWE25
  CDS (1)..(1476): transl_table=11
atgtcaagacttaaaaaatatctctcttctaaaacaagcaatcaacaaaattcagcagcgattgcttatttagccgctcttgatcatattgaaactgtctcccctactatttcttctagtattattcaagaattacaagatgaacgctctcatctaaaacttattgcatctgaaaacttttcgtctttggctgttcagttagcaatgggtaaccttttaactgacaagtatgctgaaggatatgcacatcaccgattttatgcgggatgcgataacatagatagcattgaagaaacagctagtcaagaattgattcaattatttggatgtgagcatgcctatgttcaaccccattcaggagctgacgcaaatttagtggcactatgggccatcttaatccataaaattcaaaatccggaaattgaaaaatttggaaaaaaaactttagatgagttaactcccgaagaatatgaaaaaattcggcaacttctcgttaatcaaaaactcatgggcatgtccttaaattccggggggcatttaacgcatggatatcgccataatatctcatctaaaatgatgcgttctgtcttatatgatgttgatcccaaaaccgaaattcttgattactctgtacttgcaaaacaagtgcaacaagaaagaccgacaattcttattgctggttattcggctcatccaaggcgacttaatttcgctaaaatgcgtgaaattgcagatagtgtaggagctactttgatggtagatatggcccactttgccggtctggtagccggaaaagttttccaaggcgaattcgatcctattccttatgcagatattgtgacttctactacgcataaaacattgagaggcccaagaggaggttttgttttatgtaaacagtcctttagcgaagccattaataaaggttgtccgtcagttcttggagggccacttcccaacgttatggcagcaaaagccgtcgcttttaaagaagcaaactcccttaattttaaacagtactcacaaaaaattgttgataatgctcaatccttagccaattgctttcttcaaaatgacattcgtcttgttaccggtggaacagaaaaccatttaatgattctcgatttatctaaatttggattaaccggtcgtcaagcagaaactgcattaagagaagcccatatcacagttaacagaaatgcaattccaaatgatcttcaagggccttggtacacatctggaattcgtttaggaacagcagctttaacaaccttgggaatgggtaaagatgaaatgaatgaaattgcttctgttattttctctgtcctatcaaactctaaacctggcattgttcaaaaaactggacaaccaagcaaggcttcagtcatcacagattccacaattatcaatgaagcaaaggcacgagtaaaaaatttattaattcatttccctctctatcctgaaatagaaatttaa

SEQ ID NO: 79814 - protein, 491 aa, Candidatus Protochlamydia amoebophila UWE25
MSRLKKYLSSKTSNQQNSAAIAYLAALDHIETVSPTISSSIIQELQDERSHLKLIASENFSSLAVQLAMGNLLTDKYAEGYAHHRFYAGCDNIDSIEETASQELIQLFGCEHAYVQPHSGADANLVALWAILIHKIQNPEIEKFGKKTLDELTPEEYEKIRQLLVNQKLMGMSLNSGGHLTHGYRHNISSKMMRSVLYDVDPKTEILDYSVLAKQVQQERPTILIAGYSAHPRRLNFAKMREIADSVGATLMVDMAHFAGLVAGKVFQGEFDPIPYADIVTSTTHKTLRGPRGGFVLCKQSFSEAINKGCPSVLGGPLPNVMAAKAVAFKEANSLNFKQYSQKIVDNAQSLANCFLQNDIRLVTGGTENHLMILDLSKFGLTGRQAETALREAHITVNRNAIPNDLQGPWYTSGIRLGTAALTTLGMGKDEMNEIASVIFSVLSNSKPGIVQKTGQPSKASVITDSTIINEAKARVKNLLIHFPLYPEIEI

SEQ ID NO: 79815 - DNA, 1245 bp, Bacillus anthracis str. Sterne
  CDS (1)..(1245): transl_table=11
ttggtggatcatttaaaacgtcaagatgaaaaggtatttgctgcaattgaggcagaactaggaagacagcgttcgaagattgagttaattgcttcggaaaacttcgtaagtgaagcggtaatggaggcgcaaggttctgttttaacgaataagtatgctgaaggatatcctgggaaacgttactatggtggttgtgaacacgtagacgtagtagaagatatcgcacgtgatcgcgtaaaagaaattttcggcgcagagcacgtaaatgttcaaccgcattctggtgcacaagcgaacatggcagtatacttcacgattttagagcaaggcgatacagtacttggtatgaatttatctcatggtggtcacttaacacacggaagccctgttaacttcagtggagtacaatataatttcgtagaatatggcgtggatgctgaatctcactgtattaattacgatgatgtattagcaaaagcgaaagaacataaaccaaaattaatcgttgcaggtgcaagtgcataccctcgtgttatcgatttcaaacgattccgtgagattgcagatgaagtgggcgcatacttaatggttgatatggcacatatcgctggtttagtagctgctggtttacatccaaacccagtaccacatgcacatttcgttacaacgacaacacataaaacgttacgtggcccacgtggtggtatgattttatgtgaagaacaatttgcaaaacaaattgataaatcaatcttccctggtattcaaggtggtccacttatgcacgtaatcgctgcaaaagctgttgcgtttggtgaggcacttcaagatgatttcaaaacatatgcacaaaatatcattaacaatgcgaaccgcttagctgaaggtcttcaaaaagaaggacttacacttgtttctggtggaacagacaatcacttaatcttaattgatgttcgtaacttagaaatcacaggtaaagtagcagagcacgtattagacgaagttggtattactgtgaacaaaaatacaattccatttgaaacagcaagcccatttgtaacaagtggtgtacgtatcggtacagcagctgtaacatctcgcggtttcggtttagaagacatggatgaaattgcttcacttattgcttacacattaaaaaatcatgaaaatgaagctgcattagaagaagcacgtaagcgtgtagaagcgttaacgagcaaattcccaatgtacacagatctataa

SEQ ID NO: 79816 - protein, 414 aa, Bacillus anthracis str. Sterne
MVDHLKRQDEKVFAAIEAELGRQRSKIELIASENFVSEAVMEAQGSVLTNKYAEGYPGKRYYGGCEHVDVVEDIARDRVKEIFGAEHVNVQPHSGAQANMAVYFTILEQGDTVLGMNLSHGGHLTHGSPVNFSGVQYNFVEYGVDAESHCINYDDVLAKAKEHKPKLIVAGASAYPRVIDFKRFREIADEVGAYLMVDMAHIAGLVAAGLHPNPVPHAHFVTTTTHKTLRGPRGGMILCEEQFAKQIDKSIFPGIQGGPLMHVIAAKAVAFGEALQDDFKTYAQNIINNANRLAEGLQKEGLTLVSGGTDNHLILIDVRNLEITGKVAEHVLDEVGITVNKNTIPFETASPFVTSGVRIGTAAVTSRGFGLEDMDEIASLIAYTLKNHENEAALEEARKRVEALTSKFPMYTDL

SEQ ID NO: 79817 - DNA, 1263 bp, Streptococcus pyogenes MGAS10394
  CDS (1)..(1263): transl_table=11
atgacaatgatttttgataaaggtaatgttgaagactttgataaagagctttgggatgccattcatgctgaagaagaaagacaagaacatcatatcgaattgattgcatctgaaaacatggtttcaaaagctgtcatggcagctcaaggttctgttttaaccaataagtatgcagaaggctatccaggtaatcgctattatggtggaacagaatgtgtggatattgtcgaaacgcttgctattgaacgtgctaagaaacttttcggtgccgcatttgccaatgttcaagcccattccggaagtcaagccaatgcagcagcttatatggccttgattgaggctggtgacaccgtattaggaatggatttggctgcaggtggtcatctcacgcatggctctccagtaaatttttctggaaaaacctaccattttgtgggttactcagtagatgctgatactgaaatgttaaattatgaggcgattttagaacaagcaaaggcggtccaaccaaagcttatcgttgcaggggcttcggcctactctagaagcattgattttgaaaagtttcgtgccattgctgatcacgtaggtgcttacttaatggtggacatggctcacatcgctggccttgtagcagcaggtgtgcacccgagtcctgtcccttatgcgcatattgtgacgtcaacaacccataaaaccttacgtggtcctcgtggaggcttgatattaaccaatgacgaagctcttgctaaaaagattaattcggccgttttccctggtttacaaggaggacctctggaacacgtgattgctgccaaggcggttgccttcaaagaagccttggatccagcctttaaagactatgcacaagctattattgataatactgcggctatggcagcagtttttgcacaagatgatcgtttccgtctgatctcaggtggtacagataatcatgtctttttagtagatgtcactaaggttattgctaatggtaaactagcgcaaattcttctggatgaggttaatattactctaaataaaaatgccattccttttgaaaccttatctccttttaaaacatcaggcattcgtattggttgtgcagctataaccagtcgtggcatgggagttaaagaaagccaaactatcgctcacctcatcatcaaagccttggttaatcataatcagactgttattcttgaagaagtccgtcaggaagtgcgtcagttaaccgatgccttcccactctataaaaagtaa

SEQ ID NO: 79818 - protein, 420 aa, Streptococcus pyogenes MGAS10394
MTMIFDKGNVEDFDKELWDAIHAEEERQEHHIELIASENMVSKAVMAAQGSVLTNKYAEGYPGNRYYGGTECVDIVETLAIERAKKLFGAAFANVQAHSGSQANAAAYMALIEAGDTVLGMDLAAGGHLTHGSPVNFSGKTYHFVGYSVDADTEMLNYEAILEQAKAVQPKLIVAGASAYSRSIDFEKFRAIADHVGAYLMVDMAHIAGLVAAGVHPSPVPYAHIVTSTTHKTLRGPRGGLILTNDEALAKKINSAVFPGLQGGPLEHVIAAKAVAFKEALDPAFKDYAQAIIDNTAAMAAVFAQDDRFRLISGGTDNHVFLVDVTKVIANGKLAQILLDEVNITLNKNAIPFETLSPFKTSGIRIGCAAITSRGMGVKESQTIAHLIIKALVNHNQTVILEEVRQEVRQLTDAFPLYKK

SEQ ID NO: 79819 - DNA, 1290 bp, Burkholderia pseudomallei K96243
  CDS (1)..(1290): transl_table=11
gtgacgagacgcctcatgtcgaacgccaatcccttcttctcgcaatcgctcgccgagcgcgacgcgtccgtgcgcggcgcgatcctcaaggaactcgaacgccagcagtcgcaagtcgagctgatcgcgtcggagaacatcgtgtcgcgcgcggtgctcgatgcgcagggctcggtgctgaccaacaagtatgcggaaggctatccgggcaagcgctattacggcggttgcgaattcgccgacgaagtcgaggcgctcgcgatcgagcgcgtgaagcggctcttcaacgccggccatgcgaacgtgcagccgcactcgggcgcccaggcgaacggcgcggtgatgctcgcgctcgcgaagccgggcgacacggtgctcggaatgtcgctcgacgcgggcggacacctcacgcacggcgcgaagccggcgctgtccggcaagtggttcaacgcgctccagtacggcgtgagccgcgacacgatgctgatcgattacgaccaggtcgaggcgctcgcgcagcagcacaagccgagcctcatcatcgccggcttctccgcctatccgcgcaagctcgacttcgcgcggtttcgcgcgatcgccgattcggtcggcgcgaagctgatggtcgacatggcgcatatcgccggcgtgatcgccgcgggccgccatgcgaacccggtcgaacacgcgcacgtcgtcacgtcgacgacgcacaagacgctgcgcggcccgcgcggcggcttcgtgctgaccaacgacgaggagatcgcgaagaagatcaactcggcggtgttccccggcctgcagggcggcccgctgatgcacgtgatcgccggcaaggcggtggcgttcggcgaggcgctgacagacgatttcaagacctacatcgatcgcgtgctcgcgaacgcgcaggcgctcggcgacgtgctgaaggcgggcggcgtcgatctcgtgacgggcggcaccgacaaccatctgctgctcgtcgatctgcgcccgaagggcctgaagggcgcgcaggtcgagcaggcgctcgagcgcgcgggcatcacgtgcaacaagaacggcattccgttcgatccggagaagccgacgatcacgtcgggcatccgcctcggcacgccggcgggcacgacgcgcggcttcggcgcagcggagttccgcgaggtcggccggctgattctcgaggtgttcgaggccctgcgcacgaacccggaaggcgatcacgcgaccgaacagcgcgtgcggcgcgagatcttcgcgctttgcgaacgcttcccgatctactga

SEQ ID NO: 79820 - protein, 429 aa, Burkholderia pseudomallei K96243
MTRRLMSNANPFFSQSLAERDASVRGAILKELERQQSQVELIASENIVSRAVLDAQGSVLTNKYAEGYPGKRYYGGCEFADEVEALAIERVKRLFNAGHANVQPHSGAQANGAVMLALAKPGDTVLGMSLDAGGHLTHGAKPALSGKWFNALQYGVSRDTMLIDYDQVEALAQQHKPSLIIAGFSAYPRKLDFARFRAIADSVGAKLMVDMAHIAGVIAAGRHANPVEHAHVVTSTTHKTLRGPRGGFVLTNDEEIAKKINSAVFPGLQGGPLMHVIAGKAVAFGEALTDDFKTYIDRVLANAQALGDVLKAGGVDLVTGGTDNHLLLVDLRPKGLKGAQVEQALERAGITCNKNGIPFDPEKPTITSGIRLGTPAGTTRGFGAAEFREVGRLILEVFEALRTNPEGDHATEQRVRREIFALCERFPIY

SEQ ID NO: 79821 - DNA, 1503 bp, Burkholderia thailandensis E264
  CDS (1)..(1503): transl_table=11
gtgctcaataccccctgcgtgactggcgatacgacctttcggggtcaaggtggagcatcccaccgtgaagcgcggggcgtcgcttttgccgttcgcctgggcagccgttgtgcgcgccgcgttgcgtgctttgccggtggctgtcccgcctcgcgttcctcggaattcctccgccgcgtcgagccggttgcgctgccggctgcgcgacgttacttggccacttcggtcaacctgtacacacttaacggaaaccgtatgtttgacagagcccaaagcaccattgcgaacgtcgatcccgagatctggcaagcgatccagcaggaaaacgtccgccaggaagagcacatcgagctgatcgcgtcggagaactacacgagcccggccgtgatggcggcgcaaggctcgcagctcacgaacaagtacgcggaaggctacccgggcaagcgctattacggcggctgcgaatacgtcgacatcgtcgagcagcttgcgatcgaccgcgtgaaggcgctgttcggctccgaagccgcgaacgtgcagccgaactccggctcgcaggcgaaccagggcgtgttcttcgcgatgctcaagccgggcgatacgatcatgggcatgagcctcgcgcatggcggccacctgacgcacggctcgcccgtcaacatgtcgggcaaatggttcaacgtcgtgagctacggcttgaacgagaacgaagacatcgactacgaagccgccgataagcttgcgcacgagcacaagccgaagctgatcgtcgccggcgcttcggcgtttgcgctgaagatcgatttcgagcgtctcgcgaagatcgcgaaggcggtcggcgcgtacctgatggtcgacatggcgcactacgcgggcctcatcgccgctggcgtctacccgaacccggtgccgcacgccgatttcgtcacgacgacgacgcacaagagcctgcgcggcccgcgcggcggcgtgatcctgatgaaggccgagtacgagaagcagatcaactcggcgatcttcccgggcatccagggcggtccgctgatgcacgtgattgcggcgaaggccgtcgcgttcaaggaagcgctgtcgccggaattcaaggaataccagcagaaggtgatcgagaacgcgcgcgtgctggccgagacgctcgtcaagcgcggcctgcgcatcgtgtcgggccgcaccgaaagccacgtgatgctcgttgacctgcgcgcgaagaacattaccggcaaggccgcggaagcggcgctcggcaatgcgcacatcacggtcaacaagaacgcgatcccgaacgatccggagaagccgttcgtgacgagcggcgtgcgtctcggctcgcccgcgatgacgacgcgcggcttcggtccgcaggaagccgaactggtcggcaacctgatcgccgacgtgctcgagcatccggaagacgcggcgacgatcgagcgcgtgcgcgcgcaggtcgccgacctgaccaagcgtttcccggtctatcgctga

SEQ ID NO: 79822 - protein, 500 aa, Burkholderia thailandensis E264
MLNTPCVTGDTTFRGQGGASHREARGVAFAVRLGSRCARRVACFAGGCPASRSSEFLRRVEPVALPAARRYLATSVNLYTLNGNRMFDRAQSTIANVDPEIWQAIQQENVRQEEHIELIASENYTSPAVMAAQGSQLTNKYAEGYPGKRYYGGCEYVDIVEQLAIDRVKALFGSEAANVQPNSGSQANQGVFFAMLKPGDTIMGMSLAHGGHLTHGSPVNMSGKWFNVVSYGLNENEDIDYEAADKLAHEHKPKLIVAGASAFALKIDFERLAKIAKAVGAYLMVDMAHYAGLIAAGVYPNPVPHADFVTTTTHKSLRGPRGGVILMKAEYEKQINSAIFPGIQGGPLMHVIAAKAVAFKEALSPEFKEYQQKVIENARVLAETLVKRGLRIVSGRTESHVMLVDLRAKNITGKAAEAALGNAHITVNKNAIPNDPEKPFVTSGVRLGSPAMTTRGFGPQEAELVGNLIADVLEHPEDAATIERVRAQVADLTKRFPVYR

SEQ ID NO: 79823 - DNA, 1263 bp, Frankia sp. CcI3
  CDS (1)..(1263): transl_table=11
gtgcatcaaccaccgattccccacctcgccgtcgccgatcccgaactcgccggtctcgtcgaggccgaagccacgcgccagttctcgtcgatcaggctgatcgcgtcggagaactacgtctctaccgcggtgctggaggcgtccggctccgtgctgaccaacaagtactccgagggctacgtcggtcggcgttactacgagggccagcaggtcatcgatccgatcgagacgcttgcggtcgaccgtgccaaggcgctgttcggggtcgagcacgccaacgtccagccgtactcgggttccccggcgaacctcgccgtctatctggccttcgccgagccgggggacaccgtgatgggcctgtcgctgccgatgggcggccatctgacccacggctggagcgtctccgcgaccggcacgtggttccgcagtgtccggtacggcgtgcgcgccgacaccggccgcatcgacctggacgaggtgcgcgacctcgctctggccgagcgtcccaggattattttctgcggcggtacggcgatccctcggacgatcgacttcccggggttcgccgcgatcgcgcgggaggtcggggcggtgctcgtcgcggacatcgcgcacatcgccgggctgatcgcgggtggggcacacccctcgccggtggggcacgccccggtgatctccaccaccacgcacaagacgttgcgcggcccgcgtggggcgatgctcctctccgacgccgagcacgccaccgcgatcgacaaggcggtgttcccgggcctgcagggcgggccgcacaaccacaccaccgcggcgatcgccgtcgcactgcgcgaggcggcggcacccgcgttccgcgactacgcgcacgcggtcgtggcgaacgcccgcgcgctggccgaggccctggtggagcggggcttcgacctggtcaccggcggtaccgacaaccatctgatcctgatcgacctgaccagcagggacatcggtggcaagcccgcggcccgggcgctcgaccaggccgggatcgagctgaactacaacgcggtgcccttcgaccagcgcaggcccttcgacccgtccggtatccggctgggaaccgccgccatcaccacccgcggtctgggggtcggtcacatgccggtgctcgccggctggatcgacgatgtcgtcaaggccgccgtggtcggcgacaccgcgaccatcacccgggtccgggagcaggtcaccgagctgaccgcagccttcccgatgccgggcttcgcctga

SEQ ID NO: 79824 - protein, 420 aa, Frankia sp. CcI3
MHQPPIPHLAVADPELAGLVEAEATRQFSSIRLIASENYVSTAVLEASGSVLTNKYSEGYVGRRYYEGQQVIDPIETLAVDRAKALFGVEHANVQPYSGSPANLAVYLAFAEPGDTVMGLSLPMGGHLTHGWSVSATGTWFRSVRYGVRADTGRIDLDEVRDLALAERPRIIFCGGTAIPRTIDFPGFAAIAREVGAVLVADIAHIAGLIAGGAHPSPVGHAPVISTTTHKTLRGPRGAMLLSDAEHATAIDKAVFPGLQGGPHNHTTAAIAVALREAAAPAFRDYAHAVVANARALAEALVERGFDLVTGGTDNHLILIDLTSRDIGGKPAARALDQAGIELNYNAVPFDQRRPFDPSGIRLGTAAITTRGLGVGHMPVLAGWIDDVVKAAVVGDTATITRVREQVTELTAAFPMPGFA

SEQ ID NO: 79825 - DNA, 1257 bp, Frankia sp. CcI3
  CDS (1)..(1257): transl_table=11
atgagcaccccgttctggggcccggacttcgaccagctgagcgcgacggatccgcagatcgcggaggtggtcctcgatgagctggaccggctgcgcggcggcctgcaactcatcgcgagcgagaacttcacgtccccggcggtgctggcggcgctgggctcgacgttgtcgaacaagtatgccgaagggtatccgggtcggcgttactacggcggttgccaggtggtcgaccgggccgaggagatcggcatcgcccgggcgaagcagctcttcggcgcggagcacgccaacctgcaaccgcattcgggctcgtcggcgaacttcgccgtgtacgcggcgctactcacgccaggtgacacggtcctggcgatgtcgttgccgcatggcggtcacctcacccacggcagcaaggtgagcttctccggtaagtggttcaacgtggtggcctacggcgtgcgggaggacaccgagctgatcgactacgaccaggtgcgggagctcgcccgccagcaccggcccaagatgatcatctgtggggcgacggcctacccacgtctgatcgacttcgccgcgttccgctcgatcgccgacgaggtcggttcgtggctgatggtggacgcggcgcacttcatcggtctggtcgccgggggcgcgatcccgagccccgttccctacgccgacgttgtcagcttcaccacccacaaggtgttgcgcggcccgcgagggggcatgatcctcgcgcgtgaggagctggcttcccgcatcgacaaggccgtgttcccgttcagccagggtggcccgctgatgcacgcggtcgcggcgaaggccgtcgcgttgcgggaggcggcctcgcccgcttacgcgcagtacgctcgccaggtggtggccaacgcgcagcggctcgccgacgagcttgccgccgagggcatccggcccgtcgccggtggcaccgacacccatctcgccctgctcgacctgcgggaactcggggtcagcggcaaggaagccgaggcgcgttgcgacgcggccggcatcaccctgaacaagaacgccattccctatgacccgcagccgcccgcgatctcctccggcatccgggtgggaaccccggcggtcaccacccaggggatgggcgagggggagatgaaggagatcgcggggctgatcgcccacgcggtgcgtgagccggaagccgccgccgacgtcgctgcggcggtgtccgcgctcgtcgcccggcatccggcctatccgcggtag

SEQ ID NO: 79826 - protein, 418 aa, Frankia sp. CcI3
MSTPFWGPDFDQLSATDPQIAEVVLDELDRLRGGLQLIASENFTSPAVLAALGSTLSNKYAEGYPGRRYYGGCQVVDRAEEIGIARAKQLFGAEHANLQPHSGSSANFAVYAALLTPGDTVLAMSLPHGGHLTHGSKVSFSGKWFNVVAYGVREDTELIDYDQVRELARQHRPKMIICGATAYPRLIDFAAFRSIADEVGSWLMVDAAHFIGLVAGGAIPSPVPYADVVSFTTHKVLRGPRGGMILAREELASRIDKAVFPFSQGGPLMHAVAAKAVALREAASPAYAQYARQVVANAQRLADELAAEGIRPVAGGTDTHLALLDLRELGVSGKEAEARCDAAGITLNKNAIPYDPQPPAISSGIRVGTPAVTTQGMGEGEMKEIAGLIAHAVREPEAAADVAAAVSALVARHPAYPR

SEQ ID NO: 79827 - DNA, 1278 bp, Anaplasma phagocytophilum HZ
  CDS (1)..(1278): transl_table=11
atggttgggtacattggggacatccatataagtgagagtgatgctgaggttgctgagtgtttatctgctgagtataagcggcagaatacgtctctgcagatgatagcttcggagaattttgttagccgtgctgttctgcaggctcaaggatcggtcctaaccaacaaatatgcggagggttatcccggtagtaggtattactgtggttgttctgaggtagacgttgcggagactttggctgtggagcgtctatgtaagttatttggctgtaagtacgctaatgttcagccgcactcagggtcgcaggcgaatcagcaagtgtacatggcgttattaaagcccggagacaccgtgctagggatgtcattggactcgggagggcacttaacgcatggagcggggcctaatgtatcggggaagtggtttaatgctgtgccctataatgttaggcgtgacacaaaccttctggatatgggtgagatagaagagattgctttgagggtgaagcctaatttgatcatagcaggtgcttcctcgtatcctagacgaatagacttcaaggccttcagggctatagctgataaggtgggggcatatttcctagcggatatagcgcattactcagggttaatagcaggaggtcagtatccgacgccatttggctatgcgcatgtagtgacgtcgactacgcacaagacgctacgtggtcctcgcggaggcgtgataatgacagatgatgaggaaatacacaaaaagttaaggtcggcggtatttcctggcatgcagggaggggctctgatgcatgtaatagcggcgaaagcggttgcttttcgtgaggcaatgagtccggattttaaggtatatgttagccagattcttgataattctcgtgctttagcagcagttttagctactggagggttggatgtagtaactggtgggactgatagccatatggtggttgttgatttgcgctccaaggggctcactggcagggatgtttcgtcttcgttggagagagctgggattgtatgtaataaaaatgctgttccatttgatactgaaaagccgtgggtaacctctggtattaggttaggtgctgctgctgaaacttctagagggttggtggtcaaggattttgagaagatagggcagcttgtattgaagattgtggactctatgagggctggagcggatatgtccgtagtggagtcgggggttagagaagaggttgctactcttgttagggtagtgccgtacgatactttggcttgctag

SEQ ID NO: 79828 - protein, 425 aa, Anaplasma phagocytophilum HZ
MVGYIGDIHISESDAEVAECLSAEYKRQNTSLQMIASENFVSRAVLQAQGSVLTNKYAEGYPGSRYYCGCSEVDVAETLAVERLCKLFGCKYANVQPHSGSQANQQVYMALLKPGDTVLGMSLDSGGHLTHGAGPNVSGKWFNAVPYNVRRDTNLLDMGEIEEIALRVKPNLIIAGASSYPRRIDFKAFRAIADKVGAYFLADIAHYSGLIAGGQYPTPFGYAHVVTSTTHKTLRGPRGGVIMTDDEEIHKKLRSAVFPGMQGGALMHVIAAKAVAFREAMSPDFKVYVSQILDNSRALAAVLATGGLDVVTGGTDSHMVVVDLRSKGLTGRDVSSSLERAGIVCNKNAVPFDTEKPWVTSGIRLGAAAETSRGLVVKDFEKIGQLVLKIVDSMRAGADMSVVESGVREEVATLVRVVPYDTLAC

SEQ ID NO: 79829 - DNA, 1260 bp, Neorickettsia sennetsu str. Miyayama
  CDS (1)..(1260): transl_table=11
atgaggggggggggaatagtgttttttaaatctaggatttctgcggttgatccggctgttgctaggattattgatggtgaagttagtagacagcgtaaacatctgcagttgattgcttccgagaactttgctagtgctgcagtcctggaggcgcaggggtccgtgtttacaaataaatatgcggagggttatccaggcaagcgctactattgcggatgtgaatatgcagatcagatcgagcgtcttgcaatagaaagggtctgtaagttatttgggtgttcttatgctaatgttcagccgcactctggttcccaggcaaatcaggccgtatttttagcgctcctaaaccctggtgatacggttcttggtttttctctcgcgtcagggggacatcttactcatggtgcaagtgtcaacctttccggaaaatggtttaatgcggttcactacaacgtcagaagagataatttcgagatagacatggatgaggtccgtgatttggcaaagaagcattccccaagaatgatcattgcgggcgcgtcagcatactcgaagtatatagattttaagagctttcgtgaaatagcagacgaggttggtgcttatttattaggtgatgtggcacactacgctggtttgatagctgcaggcgagtatccgtctcccttcccttatgtagacgttatgacctctacaacacataaaactttgcgtggtccgcgtggtgcaatcgttcttacaaatagtgaagaactcataaggaaaataaattctgctatatttccaggattgcagggtggtcctcagatgcatgcaatagctgctagggctgttgcttttggtgaagctcttactacggagttcaaagagtacatcaggtctgtcataaggaatgcaaaaactcttgcaaacgttttaagagagagaggttttgatgtcctctctggcggtactgatacccacatcgttatgattgacttgaggaagcttaatctgaaaggtaatgtgagcgccttaaaacttgagagtgctgggataatctgcaacaagaatgctattccatttgatgaggagaagccatttgtgacgtctggcttacgattcggtagtcccgctgaaaccacccgtggaatgcgcgaattggaattcgcgcacatcggagggctaattgctgacttacttgaggaaaaaatcagcacagataatgcagctgaaatggtcttggacctcacaagcaagttcaacttttacaacgtgtaa

SEQ ID NO: 79830 - protein, 419 aa, Neorickettsia sennetsu str. Miyayama
MRGGGIVFFKSRISAVDPAVARIIDGEVSRQRKHLQLIASENFASAAVLEAQGSVFTNKYAEGYPGKRYYCGCEYADQIERLAIERVCKLFGCSYANVQPHSGSQANQAVFLALLNPGDTVLGFSLASGGHLTHGASVNLSGKWFNAVHYNVRRDNFEIDMDEVRDLAKKHSPRMIIAGASAYSKYIDFKSFREIADEVGAYLLGDVAHYAGLIAAGEYPSPFPYVDVMTSTTHKTLRGPRGAIVLTNSEELIRKINSAIFPGLQGGPQMHAIAARAVAFGEALTTEFKEYIRSVIRNAKTLANVLRERGFDVLSGGTDTHIVMIDLRKLNLKGNVSALKLESAGIICNKNAIPFDEEKPFVTSGLRFGSPAETTRGMRELEFAHIGGLIADLLEEKISTDNAAEMVLDLTSKFNFYNV

SEQ ID NO: 79831 - DNA, 1263 bp, Ehrlichia chaffeensis str. Arkansas
  CDS (1)..(1263): transl_table=11
atggttgggtatatcttagatgatgatttacaggaagttgatgctgaggtttttaattgtatttctggagagttaaatcgacaaaattctggactacagttaatagcgtcagaaaattttgtgagtaaggcagtattgcaagctcagggttctatatttacaaataagtatgctgaaggttatccaggaaaaagatattattgtggatgtcattttgcagatattgtagaaaatttggcaatagaacgtttatgtcgattgtttggatgtaaatttgcaaatgttcaaccgcattctggttcacaagctaatcaaggagtatttgctgcattgttaaagccaggtgacactgtcattggtatgtcacttgattgtggtggtcatttaactcatggttctgctcctagtatttctggaaagtggtttaatgctgtgcagtatcaagttgatcgtgatactggtttaatagatatggatgaaatagagaagttagctgttgaacataatccatcattaattattgctggttcatcttcttatcctcgtgtaatagattttaaaaggtttagggaaatagctgataaagtgggagcatatcttctagctgatatagcgcattatgctgggttaattgctgctggagaatttccttcgcctgttgaatatgctcatgttattacgtctactactcacaagacattgcgtggccctaggggagcagtgataatgactaattatgaagatatccataagaaaattcaatcttctatttttcctggtatgcagggtggtccgttaatgcatgttattgctgctaaagctgtagcatttgcagaagcattgaaacctgagtttaaagattatgcgaaacaaataataaaaaattctaaggctttgggtgaagtatttaaagaaagagggcttgatcttgtgacaggtggtacagattctcatatggttgttcttgatttacgttcaaaaagtgttacaggtaaagatgcagttcttgctttagaaaaactaggaattatttgtaataaaaatgctattccttttgatccagaaaagccttttgtaacttctggtttacgttttggtagtgctgctgagacttccagagggttacaagaatcagaatttagggaaattggcagtatggtttgtgatgttattgatagtttaaaagctagtgatagtgttagattatctgttgaaagagatataataaaaagagttaaggaattaacttctaattttatttag

SEQ ID NO: 79832 - protein, 420 aa, Ehrlichia chaffeensis str. Arkansas
MVGYILDDDLQEVDAEVFNCISGELNRQNSGLQLIASENFVSKAVLQAQGSIFTNKYAEGYPGKRYYCGCHFADIVENLAIERLCRLFGCKFANVQPHSGSQANQGVFAALLKPGDTVIGMSLDCGGHLTHGSAPSISGKWFNAVQYQVDRDTGLIDMDEIEKLAVEHNPSLIIAGSSSYPRVIDFKRFREIADKVGAYLLADIAHYAGLIAAGEFPSPVEYAHVITSTTHKTLRGPRGAVIMTNYEDIHKKIQSSIFPGMQGGPLMHVIAAKAVAFAEALKPEFKDYAKQIIKNSKALGEVFKERGLDLVTGGTDSHMVVLDLRSKSVTGKDAVLALEKLGIICNKNAIPFDPEKPFVTSGLRFGSAAETSRGLQESEFREIGSMVCDVIDSLKASDSVRLSVERDIIKRVKELTSNFI

SEQ ID NO: 79833 - DNA, 1263 bp, Desulfitobacterium hafniense Y51
  CDS (1)..(1263): transl_table=11
gtgggtaatatggattatattaaggaatggattctccctcaggatcccgaagtggcggaggctattgcccaggaggaacaaaggcagcgctataaaatcgagctgattgcctcagagaattttgtgagccgagcggtcatggccgcccagggttccgttcttaccaataagtatgcggaaggatatccgggaaaacgctattatggcggctgcgagtatgtggatatcgttgaggatctggcccgggagcgggtgaaaaagctttttggtgcggaacatgccaatgtccagcctcattccggcgcccaggctaataccgctgtatattttgccatgcttaaacccggggatacggttctcggcatgaatctttcccatggagggcatttaacccacggcagcccggtgaatatttccgggatgtattataactttgtcgcctatggggtggatcaagccaccgagcgcattgattatgatgtggtacgccaattggcccttgagcatcgccctaagctgattgtagcgggagccagtgcctatcccagacaaatcgactttgcccgcttaagagaaattgccgatgaggcaggctcttacttcatggtggatatggcccatattgcgggcctggtggcagccgggcttcatcaaaaccctgtcccctacgcacattttgtaaccaccaccactcataaaaccctgcggggcccccgggggggactgattctatgccaagaagaatttgccaaagctatcgataaagccatcttccccggcattcagggcggccctctgatgcatgtgatcgcggctaaggctgttgccttcggtgaggctttaaaaccggaattcgtggaatatcaaaaacgcattgtggaaaatgctaaagtattatcggaaactctggcggaaaaaggtttccgcatcgtttccggaggtacggacaaccatttgatgcttgtggatgtacggtctaaaggcttgacagggaaagaagcagagtatattttagatgaggtcggtattacggtgaataagaacaccatcccctatgatccggccagccctatggtaaccagcggcatccgcatcggcacccctgccgtgaccagccgcggtatggataccctggcgatgaaaaagattgccgcagccatcgacattgctttatcagaacccaatgaagcgggggctgccaaagcccgggatatggttgcagcactctgcgcggaatacccgctctacccaaatctagattag

SEQ ID NO: 79834 - protein, 420 aa, Desulfitobacterium hafniense Y51
MGNMDYIKEWILPQDPEVAEAIAQEEQRQRYKIELIASENFVSRAVMAAQGSVLTNKYAEGYPGKRYYGGCEYVDIVEDLARERVKKLFGAEHANVQPHSGAQANTAVYFAMLKPGDTVLGMNLSHGGHLTHGSPVNISGMYYNFVAYGVDQATERIDYDVVRQLALEHRPKLIVAGASAYPRQIDFARLREIADEAGSYFMVDMAHIAGLVAAGLHQNPVPYAHFVTTTTHKTLRGPRGGLILCQEEFAKAIDKAIFPGIQGGPLMHVIAAKAVAFGEALKPEFVEYQKRIVENAKVLSETLAEKGFRIVSGGTDNHLMLVDVRSKGLTGKEAEYILDEVGITVNKNTIPYDPASPMVTSGIRIGTPAVTSRGMDTLAMKKIAAAIDIALSEPNEAGAAKARDMVAALCAEYPLYPNLD

SEQ ID NO: 79835 - DNA, 1263 bp, Saccharophagus degradans 2-40
  CDS (1)..(1263): transl_table=11
atgtttgataccaagcaaacactcgacgcattcgacccagaaatttggcaatccatccaagatgaagcccagcgtcaagaagagcatattgagttaattgcttcagaaaactacaccagcccaatggtgatggaagcccaaggcaccaagcttactaacaaatatgcagaagggtacccaggcaagcgctactacggtggttgtgagtatgtagacaaagccgaagcattggctattgagcgtgcaaaaaccttgtttggtgcagattacgccaacgtacagccgcactctggttcgcaagctaactcggctgtttacgccgcattgtgttcacctggcgataccgtattaggcatgagcttggcgcacggtggtcacttaacgcacggtgcttccgttagcttctctggcaaaatgtacaacgcggtacagtacggcattaacccagatactggtttagtcgattacgaagaaattgctaacttggcgcgtgagcacaagccaaaaatgattgttgctggtttctcggcctatagccaagtactagattggcagaaattccgcgatatcgccgacgaagtaggcgcttacttaatggttgatatggctcacgttgctggtcttgttgccgctggtgtatacccatcacctgtgcaaattgccgatgtaactacctccactacccacaaaacattacgtggtccacgcggtggtattatccttgccaaagccaacccagagatagaaaagaaattaaactctgcggtattccctggcggtcaaggtggcccattgatgcacgtcattgcggctaaagcgattagctttaaagaggccatgaccgacgagtacaaagcgtatcaaaaacaagttgttgctaacgcaaaagccatggctgcaacattcaatgagcgcggcattaaaattgtatctggcggaaccgaaaaccaccttatgttggtagacttaatcggtaaagaatacaccggtaaagatgccgatgccgctttgggtgcagcgtacattaccgtaaacaaaaatgcggtacctaacgacccacgctcaccgtttgtaaccagcggtttacgcgttggtaccccggctgtaactacccgtggttttaaagagaagcagtgtatagaccttactaactggatttgcgacgtactagaaagcttagaaaacggcaattcagagcaagtaattgcagatgtaaaagcaaaagtattggctgtttgtgctgagttcccagtttacaaataa

SEQ ID NO: 79836 - protein, 420 aa, Saccharophagus degradans 2-40
MFDTKQTLDAFDPEIWQSIQDEAQRQEEHIELIASENYTSPMVMEAQGTKLTNKYAEGYPGKRYYGGCEYVDKAEALAIERAKTLFGADYANVQPHSGSQANSAVYAALCSPGDTVLGMSLAHGGHLTHGASVSFSGKMYNAVQYGINPDTGLVDYEEIANLAREHKPKMIVAGFSAYSQVLDWQKFRDIADEVGAYLMVDMAHVAGLVAAGVYPSPVQIADVTTSTTHKTLRGPRGGIILAKANPEIEKKLNSAVFPGGQGGPLMHVIAAKAISFKEAMTDEYKAYQKQVVANAKAMAATFNERGIKIVSGGTENHLMLVDLIGKEYTGKDADAALGAAYITVNKNAVPNDPRSPFVTSGLRVGTPAVTTRGFKEKQCIDLTNWICDVLESLENGNSEQVIADVKAKVLAVCAEFPVYK

SEQ ID NO: 79837 - DNA, 1293 bp, Methylobacillus flagellatus KT
  CDS (1)..(1293): transl_table=11
atgctaaaatcccgcctattcatttcatacccgagatatcgaaccatgtttagcacggccaaaaacctgagcgttgttgatcctgatctttggaaatatgtggaagcagagcgccatcgccaggacgaacacattgaactgattgcctccgagaattacaccagtcctgccgtgatgcaggcgcaaggttcgcaactgaccaacaagtatgcagagggctatccaggcaagcgattctatggcggctgtgaattcgttgatggtgtcgagcagctggcgatcgaccgcctgaagaagctgtttggcgccgagtatgccaacgtacagccacactccggctcccaggccaatcaggccgtatatttctccgtcctcaagcccggcgacaccgtcatggggatgaatctgggccatggcgggcacttgacccacggctcaccagccaacctgtccggcaagctgttcaacatcgtgccttacggcctgaatgacaaggaagagatcgactacgacgagatggaacgcattgcgctggaatgcaaacctaagctgctgatcggcggggcttctgcttacgccttgcgtttcgactgggcgcgcatggcagacatcgccaagaaagtaggcgcctatttcatggtcgatatggcgcattatgccggcctcatcgcggctggcgtctatcccaaccccgtgccgcatgccgattttgtcacctccacgacgcacaagaccttgcgtggcccgcgcggcggcctgatcatggccaaggcagagttcgagaagtcgctgaactccagcgtattccccagcctgcaaggtggtccattgatgcatgtcatcgctgctaaggcggttgccttcctcgaggccgcccagccagaattcaaggcctaccaggaacaagtattaaagaacgccgacaccatggccaagaccttggcttctcgaggcttgcgcatcatctccggcggcacgcagtcgcatgtgttcctggtcgacctgcgtcccaaggggctgactggcaaggcggctgacgcctatcttgggcaggcgcatatcaccgtgaacaagaacgccatcccaaacgaccccgagagcccattcgtcacttccggcatacgcatcggttcgcccgcgattaccacgcgcgggttcaaggaggccgaagctgcagaagtggccaacttgattgccgacatccttgataacccgactgacgagtccgtcatcgctgcgaccaaggccaaggtgcatgccttgacctcgcgcttcccggtgtacggcgcttag

SEQ ID NO: 79838 - protein, 430 aa, Methylobacillus flagellatus KT
MLKSRLFISYPRYRTMFSTAKNLSVVDPDLWKYVEAERHRQDEHIELIASENYTSPAVMQAQGSQLTNKYAEGYPGKRFYGGCEFVDGVEQLAIDRLKKLFGAEYANVQPHSGSQANQAVYFSVLKPGDTVMGMNLGHGGHLTHGSPANLSGKLFNIVPYGLNDKEEIDYDEMERIALECKPKLLIGGASAYALRFDWARMADIAKKVGAYFMVDMAHYAGLIAAGVYPNPVPHADFVTSTTHKTLRGPRGGLIMAKAEFEKSLNSSVFPSLQGGPLMHVIAAKAVAFLEAAQPEFKAYQEQVLKNADTMAKTLASRGLRIISGGTQSHVFLVDLRPKGLTGKAADAYLGQAHITVNKNAIPNDPESPFVTSGIRIGSPAITTRGFKEAEAAEVANLIADILDNPTDESVIAATKAKVHALTSRFPVYGA

SEQ ID NO: 79839 - DNA, 1275 bp, Burkholderia xenovorans LB400
  CDS (1)..(1275): transl_table=11
atgtcgaacccgaatcctttcttcgaagaatcgctggccacgcgcgatacggcggtgcgcggcgctattttgaaagagctcgagcgccagcagtcgcaagtcgaactgatcgcgtcggaaaacatcgtgtcgcgcgcggtgctcgaagcgcagggctcggtgttgaccaacaagtatgcggaaggttatccgggcaagcgttactacggcggttgcgaatatgcggacgtgatcgaaacgctggcgctcgatcgcatcaagcagctcttcaacgcgaagtttgccaacgtgcagccgcattccggcgcgcaggcgaatggcgccgtgatgctcgcgctggtcaagccgggcgacacggtgctcggcatgtcgctcgacgcgggcggccacctcacgcacggcgcgaagccggccatgtcgggcaaatggttcaacgcggtgcagtacggcgtcaatcgcgacacgatgctgatcgactatgagcagatcgaggaactcgcgcagcagcataaacccgcgctgctgatcgccggcttctcggcttatccgcgtgcgctggatttcgcgaggctgcgggcgattgccgacagcgtcggcgccaaactgatggtggatatggcgcatatcgccggcgtgatcgcggcggggcgtcatcagaatccggtcgaacatgcgcatgtggtcacgtcgaccacgcacaagacgctgcgcggcccgcgcggcggcttcgtgctgacgaatgacgaggacatcgcgaagaagatcaactcggcggtatttcccggcttgcagggcggcccgctgatgcatgtgattgccggcaaggcggtcgcgttcggcgaggcgctgcaacccggtttcaagacttatatcgatagcgtgctcgccaatgcgcaagcgctcggcgaggtgctgaaggccggcggcgtggatctggtgacgggcggtacggacaaccatctgctgctggtcgatctgcggcctaaaagcctcaagggcaatcaggtcgagcaggcgctggaacgcgcgggcattacctgcaacaagaacggcattccattcgacaccgaaaagcccacaatcacctccggcattcgcctcggcacacccgcgggtacgacgcgcggcttcggcatgagcgaattccgcgaagtcggccggctgatcgtcgaggtgctcgacgcgctgcgcgaccacccggaaggccacgccgccaccgaacaacgcgtgcgccgcgagattttcgcgctgtgcgaacgctttcccatctactga

SEQ ID NO: 79840 - protein, 424 aa, Burkholderia xenovorans LB400
MSNPNPFFEESLATRDTAVRGAILKELERQQSQVELIASENIVSRAVLEAQGSVLTNKYAEGYPGKRYYGGCEYADVIETLALDRIKQLFNAKFANVQPHSGAQANGAVMLALVKPGDTVLGMSLDAGGHLTHGAKPAMSGKWFNAVQYGVNRDTMLIDYEQIEELAQQHKPALLIAGFSAYPRALDFARLRAIADSVGAKLMVDMAHIAGVIAAGRHQNPVEHAHVVTSTTHKTLRGPRGGFVLTNDEDIAKKINSAVFPGLQGGPLMHVIAGKAVAFGEALQPGFKTYIDSVLANAQALGEVLKAGGVDLVTGGTDNHLLLVDLRPKSLKGNQVEQALERAGITCNKNGIPFDTEKPTITSGIRLGTPAGTTRGFGMSEFREVGRLIVEVLDALRDHPEGHAATEQRVRREIFALCERFPIY

SEQ ID NO: 79841 - DNA, 1248 bp, Burkholderia xenovorans LB400
  CDS (1)..(1248): transl_table=11
atgtttgacagagcccaaagcaccatcgccaacgtcgatcctgaactctggaaggtcatcgagcaggaaaaccgccgtcaggaagagcacatcgaactgatcgcgtcggaaaactacacgagcccggctgtcatggctgcgcaaggctcgcaactcacgaacaagtacgccgaagggtatccgggcaagcgctattacggcggttgcgagtacgtggacatcgccgagcagctggcgatcgaccgtgtgaagcaactgttcggcgccgaagccgccaacgtgcagccgaactccggctcgcaggccaaccagggcgtgttcttcgccgtgctcaagccgggcgatacgatcatgggcatgagcctcgcgcacggaggccacctgactcacggttcgccggtcaacatgtcgggcaagtggttcaacgtggtgagctacggcctgaacgaagccgaagacatcgactacgaagccgcggagaagctcgctcaggaacacaagccgaagctgatcgtggcgggcgcctccgcgttctcgctgcgtatcgatttcgaacgcatgtcgaagatcgccaggtcggtcggcgcgtatttcatggtcgacatggcgcattacgccggtctgatcgccgcgggcgtctatccgaatccggtgccgcacgccgatttcgtcaccaccaccacgcacaagagcctgcgcggcccgcgcggcggcgtgatcctgatgaaggcggagttcgaaaagcagatcaactcggccatcttcccgggcattcaaggtggaccgttgatgcacgtgatcgccggcaaggccgtcgcgttcaaggaagcgctctcgccggagttcaaggcgtatcagcagcaggtcgtcgaaaacgcgcgtgtgctggcggaaacgctggtcaagcgcggtctgcgcatcgtgtcgggccgcactgaaagccatgtgatgctcgtcgacctgcgtgcaaagaagattaccggcaaggctgcggaagcagcgctgggcacggctcacatcacggtcaacaagaacgcgattccgaacgatccggaaaagccgttcgtgacgagcggcgtgcgtctcggctcgccggccatgaccacgcgcggcttcggcgtcaaggaagccgagcaggtgggtaacctgatcgccgacgtgctggacaacccggaagacgccgccacgatcgaacgtgtgcgcgcgcaggtcgccgagctgacccagcgcttcccggtttaccgttaa

SEQ ID NO: 79842 - protein, 415 aa, Burkholderia xenovorans LB400
MFDRAQSTIANVDPELWKVIEQENRRQEEHIELIASENYTSPAVMAAQGSQLTNKYAEGYPGKRYYGGCEYVDIAEQLAIDRVKQLFGAEAANVQPNSGSQANQGVFFAVLKPGDTIMGMSLAHGGHLTHGSPVNMSGKWFNVVSYGLNEAEDIDYEAAEKLAQEHKPKLIVAGASAFSLRIDFERMSKIARSVGAYFMVDMAHYAGLIAAGVYPNPVPHADFVTTTTHKSLRGPRGGVILMKAEFEKQINSAIFPGIQGGPLMHVIAGKAVAFKEALSPEFKAYQQQVVENARVLAETLVKRGLRIVSGRTESHVMLVDLRAKKITGKAAEAALGTAHITVNKNAIPNDPEKPFVTSGVRLGSPAMTTRGFGVKEAEQVGNLIADVLDNPEDAATIERVRAQVAELTQRFPVYR

SEQ ID NO: 79843 - DNA, 1245 bp, Methanococcoides burtonii DSM 6242
  CDS (1)..(1245): transl_table=11
atgtcttacatttcagagattgacccggaaattgccaatgcattgtcattggaggcacagcgtcaggatttcaagttgaacttgatcgcttcagagaactacaccagccgcgctgttatggaagcacagggttccataatgaccaacaagtacgcagaaggctattccggaaagcgttattatggtggttgcgaatttgtcgatatggcagaggaccttgctatctcaagagcaaagcagatcttcggtgcagagcatgttaatgtccagcctcattcaggctcaggagctaacatggctgtctatttttctgttatcaagccaggcgacaagatcatgtcaatggacctttcccacggtggtcatctttcccacggaagtcctgtgagcttttcaggtcagttgtacaacatcgttccatacggtgtttcccaggataccgagatgcttgattataacgagctcatggaaatagcaaagaaagagaagccacagatgatcgttgtcggagcatctgcatattcccgtattatcgatttcaaggcattcagggaaattgctgacgaggttggagcataccttctcgcagatgttgcacacattgccggacttattgctgccggtgtacacccaaatccattcccatatgctgactttgtgacaacaaccactcataagacacttcgtggtccaaggggtggaatggtaatgtgcaaggaagagtacgcaaaagctatcaacaagtctgtattccccggaattcagggcggtcctcttatgcacataatcgctgcaaaggcagttgcattcaaggaagcattgagtgacagtttcaaaaaggatcaggaacaaaccgtcaagaacgcaaaagcactttgtgcagcgcttcaggacagggaattcgatatagtctctgatggaactgacaaccatcttatgcttatcaaccttaacaaatacgaccttacaggaaaggatgctgaggtcattatgagcaaagctggtattgttatcaacaagaataccattccattcgagacaagaggacctttcattacaagtggtctcagggcaggtacacctgcttgtactacacgtggtatgaaggaatcagcaatggatgagattgcagactttttcaagaccattattgacaacagggagaacaatgcagtccttgagactgtcaatgcagatgttcaggaactttgcagtcgcttccctatctatgagcatcttagataa

SEQ ID NO: 79844 - protein, 414 aa, Methanococcoides burtonii DSM 6242
MSYISEIDPEIANALSLEAQRQDFKLNLIASENYTSRAVMEAQGSIMTNKYAEGYSGKRYYGGCEFVDMAEDLAISRAKQIFGAEHVNVQPHSGSGANMAVYFSVIKPGDKIMSMDLSHGGHLSHGSPVSFSGQLYNIVPYGVSQDTEMLDYNELMEIAKKEKPQMIVVGASAYSRIIDFKAFREIADEVGAYLLADVAHIAGLIAAGVHPNPFPYADFVTTTTHKTLRGPRGGMVMCKEEYAKAINKSVFPGIQGGPLMHIIAAKAVAFKEALSDSFKKDQEQTVKNAKALCAALQDREFDIVSDGTDNHLMLINLNKYDLTGKDAEVIMSKAGIVINKNTIPFETRGPFITSGLRAGTPACTTRGMKESAMDEIADFFKTIIDNRENNAVLETVNADVQELCSRFPIYEHLR

SEQ ID NO: 79845 - DNA, 1527 bp, Ralstonia metallidurans CH34
  CDS (1)..(1527): transl_table=11
ttgcgcgactggcgaagtcagtgggtactaccacgaggaagcgcaagttcattgggcgtgatattcgatgcgcctgccgctcgcctgggcagcgaatgggaagcagggtgcgccctgcaccggctggtcgcgttttcgcgcccccggtgctggacgccagtgccttccccgcgcgccctaatacgcgaaaatcccgcaatacagagtagcgtcgacaggcatccggttttcgtaccggccgtgccatccgctctcccttttaaacagacgagtcacgccatgtttgaacgtagccgcttcacgatcgagcagatcgaccccgaagtctttgccgcgatccagaaggaaaaccagcgtcaggaagaccacatcgaactgatcgcttccgagaactacacctcgccggccgtgatggccgcccagggttcgcagctcaccaacaagtacgccgaaggctatcccggcaagcgctactacggcggttgcgagtacgtggacgtggtggagcagctcgccatcgaccgcgtgaagcaactgtttggcgccgaagccgccaacgtgcagccgaactcgggctcgcaggccaaccagggcgtgttcttcgccatgctcaagccgggcgacacgatcatgggcatgagcctggccgaaggcggtcacctgacccacggcatggcgctgaacatgagcggcaagtggttcaacgtggtcagctacggcctgaacgcgcaggaagacatcgactacgacgcgcttgaaaagctggcccacgagaagaagccgaagctgatcatcgccggcgcatcggctttcgcgctgcgcatcgacttcgaacgcatcgccaaggttgccaaggctgttggtgcctacttcatggtggacatggcccactatgccggcctgatcgccgccggtgtgtacccgaacccggtgccgcacgccgacttcgtgaccaccaccacccacaagagcctgcgtggcccgcgcggtggcgtgatcctgatgaaggccgagcatgagaaggccatcaactcggccatcttcccgggcatccagggtggtccgctgatgcacgtgattgccggcaaggccgtggccttcaaggaagcgctgcagccggacttcaaggcgtatcaggaacaggtggtcaagaacgccgccgcactggccgaaacgctgatcgcccgcggtctgcgcatcgtatcgggccgtacggaaagccacgtgatgctggtggacctgcgcgccaagaagatcaccggcaaggaagccgagaagatcctcggcgacgcccatatcacggtgaacaagaacgcgatcccgaacgatccggaaaagccgttcgtcacctcgggcatccgcctgggctcgccggccatgaccacgcgcggcttcaaggaagaagaagcccgccaggtggccaacctgatcgccgacgtgctggacaacccgcacgatgaggccaacatcgccgccgtgcgcgaacaggttgccgcactgacccgtcgcttcccggtctacggctga

SEQ ID NO: 79846 - protein, 508 aa, Ralstonia metallidurans CH34
MRDWRSQWVLPRGSASSLGVIFDAPAARLGSEWEAGCALHRLVAFSRPRCWTPVPSPRALIRENPAIQSSVDRHPVFVPAVPSALPFKQTSHAMFERSRFTIEQIDPEVFAAIQKENQRQEDHIELIASENYTSPAVMAAQGSQLTNKYAEGYPGKRYYGGCEYVDVVEQLAIDRVKQLFGAEAANVQPNSGSQANQGVFFAMLKPGDTIMGMSLAEGGHLTHGMALNMSGKWFNVVSYGLNAQEDIDYDALEKLAHEKKPKLIIAGASAFALRIDFERIAKVAKAVGAYFMVDMAHYAGLIAAGVYPNPVPHADFVTTTTHKSLRGPRGGVILMKAEHEKAINSAIFPGIQGGPLMHVIAGKAVAFKEALQPDFKAYQEQVVKNAAALAETLIARGLRIVSGRTESHVMLVDLRAKKITGKEAEKILGDAHITVNKNAIPNDPEKPFVTSGIRLGSPAMTTRGFKEEEARQVANLIADVLDNPHDEANIAAVREQVAALTRRFPVYG

SEQ ID NO: 79847 - DNA, 1281 bp, Acidobacteria bacterium Ellin345
  CDS (1)..(1281): transl_table=11
atgtcaaatcgcatgtctcaatcgttaaacgaagaagatccgcagatcgcagaggcgatcgcgaatgaggaacgccgtcagcacgagggtctcgagctcatcgccagcgaaaattttgtcagcgaagcagtgcttcaggccgcgggctcagtattcaccaacaagtacgccgaggggtatccgggaaagcgctactacggcggctgcgagtatgccgatgtggttgagaacctggcgcgcgatcgcgcgaaggaactcttcggcgcggagcacgctaacgtgcagccgcactccgggtcatccgccaacatggaagcctatggcgcgatccttcagcccggcgacacaattcttggtctgaaccttgcgcatggtgggcacctcacccacggacatccactgaacttttccggtaagacctacaagatcgtcccgtacggcgtgaccaaagaaaccgagaccatcgattacgacgagctcgagaagcttgcgctggaacaccatccgaaggtgatcgtcggcggaggcagcgcgtatccgcgtattttcgatttcaagcgcatgcgcgaaatcgccgacaaagccggcgcgctcttcatggtagatatggcacacttcgccggactggttgccggcggcgcacatccttcgccggtgccgcatgcgcacgtcgtgacgaccaccacgcacaagacactgcgtggaccgcgcgcgggcatgatcctctccaagcaggaattcgcagcggcgattgataaagtcacattccccggcatgcagggagggccgctggtgcacatcatcgcggccaaggccgtgtgcttcaaagaagccatggagccgagcttcaaggactacgcgaaccaagtggtcgcgaacgcgaaggtgctggcgcagtcactcgccgaccagggcttccgcattatttccggaggcaccgatacgcacctgatgctgatcgatgtcttcgcggccggaatgttgggcagcgaagccgaaaaggcgttgggcgaagctggaatcacggtgaacaagaacgcaattccgtttgacaccaacccgccgatgaagccgagcggcgtccgcattggaacgccggcgcttacgacgcgcgggatgaaggaaccagagatgcggcaggtcggcatctggattgcggagtcgttacggcaccgcacggatccggatttcctcggccgcgtgcggcgacaggtgcacgagctttgcgatgcgtacccgctgtatccggagcggagagcaacccggctggcgacggtatag

SEQ ID NO: 79848 - protein, 426 aa, Acidobacteria bacterium Ellin345
MSNRMSQSLNEEDPQIAEAIANEERRQHEGLELIASENFVSEAVLQAAGSVFTNKYAEGYPGKRYYGGCEYADVVENLARDRAKELFGAEHANVQPHSGSSANMEAYGAILQPGDTILGLNLAHGGHLTHGHPLNFSGKTYKIVPYGVTKETETIDYDELEKLALEHHPKVIVGGGSAYPRIFDFKRMREIADKAGALFMVDMAHFAGLVAGGAHPSPVPHAHVVTTTTHKTLRGPRAGMILSKQEFAAAIDKVTFPGMQGGPLVHIIAAKAVCFKEAMEPSFKDYANQVVANAKVLAQSLADQGFRIISGGTDTHLMLIDVFAAGMLGSEAEKALGEAGITVNKNAIPFDTNPPMKPSGVRIGTPALTTRGMKEPEMRQVGIWIAESLRHRTDPDFLGRVRRQVHELCDAYPLYPERRATRLATV

SEQ ID NO: 79849 - DNA, 1296 bp, Silicibacter sp. TM1040
  CDS (1)..(1296): transl_table=11
atgactgacgcgacccgcgaccccggtttcttcacccaaagcctctctgagcgcgacccagagctttttggcgcaatcaccgatgaactcggtcgtcagcgcgacgagatcgagctgatcgcctccgaaaacatcgtctctgctgccgtcatggaagcgcagggctctgtgctgaccaacaagtatgccgaaggctacccgggccgtcgctattatggcggctgccagtatgtcgacgtggccgaaaacctcgccatcgaccgggccaagcagctgttcaactgcgaatttgccaatgtgcagcccaactccggctcgcaggcgaaccagggcgtgttccaggcgattctgaagcccggcgacaccatcctcggcatggatctcgcgtccggcggtcacctcacccatggtgcagcgccaaaccagtccggcaaatggttcaacgcggtgcactacggcgtgcgcgaatccgactgcctgatcgactatgatcaggttcaggcacttgcgaccgagcaccagcccaagctgatcatcgccggcggctccgcgatcccgcgccagatcgattttgccaagttccgtgaaatcgctgacagcgtcggtgcctatctgctggtggacatggcgcatttcgccggtcttgttgcagcaggcgagcatccttcgcccttcccgcatgctgatgtggccaccaccaccacccacaagaccctgcgcggcccgcgtggcggcatgatcctgaccaacaacccggatctggcaaagaaattcaactctgccatcttcccgggcattcagggcggcccgctgatgcacgtgatcgcaggcaaagccgccgcctttggcgaggcgctgaagcccgagttcaaatcctaccagaaacaagtgcgtgcaaacgcggttgcgctggcggatgagctgatcaaaggcggtctggacatcgtgaccggcggcaccgacacccatgtgatgctggtagacctgcgccccaaaggcgtgacgggcaacatcgtcgacaaagcgctcggccgtgcgcatatcaccaccaacaagaacggcatcccgttcgacccggaaaagcccaccgtgacctccggtatccgcctcggcacgcctgcaggcacgacccgtgggtttggtgaggaagagttccgcgagatcgcccgtctgatcgtcgaggtggtcgacggtctcgcagccaatggcgaggacggcaacgccgcggtcgaagaagccgtgcgtggcaaagtcgcggcgctctgcggccgcttcccgctctatccaaacctctga

SEQ ID NO: 79850 - protein, 431 aa, Silicibacter sp. TM1040
MTDATRDPGFFTQSLSERDPELFGAITDELGRQRDEIELIASENIVSAAVMEAQGSVLTNKYAEGYPGRRYYGGCQYVDVAENLAIDRAKQLFNCEFANVQPNSGSQANQGVFQAILKPGDTILGMDLASGGHLTHGAAPNQSGKWFNAVHYGVRESDCLIDYDQVQALATEHQPKLIIAGGSAIPRQIDFAKFREIADSVGAYLLVDMAHFAGLVAAGEHPSPFPHADVATTTTHKTLRGPRGGMILTNNPDLAKKFNSAIFPGIQGGPLMHVIAGKAAAFGEALKPEFKSYQKQVRANAVALADELIKGGLDIVTGGTDTHVMLVDLRPKGVTGNIVDKALGRAHITTNKNGIPFDPEKPTVTSGIRLGTPAGTTRGFGEEEFREIARLIVEVVDGLAANGEDGNAAVEEAVRGKVAALCGRFPLYPNL

SEQ ID NO: 79851 - DNA, 1257 bp, Myxococcus xanthus DK 1622
  CDS (1)..(1257): transl_table=11
atggagaacatccgtacgctggccgaagtggacccggagattgcccgcgtcctccgcgaggagacccagcgccaggaggaagggctggagctcatcgcttcggagaacttcgtctctccggcggtgatggaggcggtgggctcggtgctcaccaacaagtacgcggaaggctaccccggcaagcgctactacggcggctgcgaggtggtggacgtcgcggagaacctggccatcgcccgcgccaaggacctgttcggcgcggacgcggtcaacgtgcaggcgcactccggcagccaggccaacatgggcgccttcatggcgctgatgaagccgggcgacaccatgctgtcgctggacctcaactccggcggccacctcacccacggcgccacgttcaacttctccggcaagctctacaaggtcgtccactacggcctgacgcgtgacacggagaccatcgacttcgcgcaggtggagtcgctggccaaggagcacaagccgaaggtcatcgtcgtgggcgccagtgcgtacccgcgcacgctggacttcgcgaagttccgcgagatcgccgacgcggtgggcgcggcgatgctggtggacatggcgcacatcgccggcctggtggcggcgggcgtgcacccttcgccggtgccggtggcggacatcgtcaccagcaccacgcacaagacgctgcgcggtccgcgtggcggcctggtgctgagccgcgagccctacgccaaggccatcaacagtcagatcttccccggcatccagggcggcccgctgatgcacgtcatcgccggcaaggcggtggccttcaaggaggcgctgtcgccggagttcaaggcgtaccagcggcagattgtcgccaacgcgaaggcgctggcggaggcgctccagcgcgcgggcctgcggctgacgtccggcggcacggacaaccacctgatgctggtggacctgcgccccaagaagctcacgggcaaggtggccgaagaggtgctggacaaggccggaatcaccgtgaacaagaacatgattccgtttgacccggagaagccgatgaccacgtccggtgtccgggtgggcacgccggccatcaccacgcgcggcatgcgcgaggcggagatggcggtggtggggcggctcatcggcgaggcgctggacgccgcgcaggacgacgccgcgctggcccgcatcaaggggcaggtgaaggagctttcgcaggggttcccgctctacgcctcgcggttgaagtag

SEQ ID NO: 79852 - protein, 418 aa, Myxococcus xanthus DK 1622
MENIRTLAEVDPEIARVLREETQRQEEGLELIASENFVSPAVMEAVGSVLTNKYAEGYPGKRYYGGCEVVDVAENLAIARAKDLFGADAVNVQAHSGSQANMGAFMALMKPGDTMLSLDLNSGGHLTHGATFNFSGKLYKVVHYGLTRDTETIDFAQVESLAKEHKPKVIVVGASAYPRTLDFAKFREIADAVGAAMLVDMAHIAGLVAAGVHPSPVPVADIVTSTTHKTLRGPRGGLVLSREPYAKAINSQIFPGIQGGPLMHVIAGKAVAFKEALSPEFKAYQRQIVANAKALAEALQRAGLRLTSGGTDNHLMLVDLRPKKLTGKVAEEVLDKAGITVNKNMIPFDPEKPMTTSGVRVGTPAITTRGMREAEMAVVGRLIGEALDAAQDDAALARIKGQVKELSQGFPLYASRLK

SEQ ID NO: 79853 - DNA, 1425 bp, Rubrobacter xylanophilus DSM 9941
  CDS (1)..(1425): transl_table=11
atgaggaacgaccaccgcgtctcgcccgcgttgggggacagagggggggcagcggcgaaccggcgagcctccgcggggggagcatccttcgggctccccggcgggtacatgacggcgccgcttgcggaggtggaccccgagatccaggaggtgctggagcgggagctcgagcgccagcgcaacaccttggagatgatcgcctctgagaacttcgtgccccaggcggtgctggaggcggtgggctccgtgctgaccaacaagtacgccgaaggctatccgggcaggcgctattacggcggctgccacgaggtggacgtcgccgagcagctcgccatagaccgggcgaaggagctcttcggggccgagcacgtcaacgtccagccccactccggcgcgcaggcaaacaacgccgcctacatggcgctgctcgagcccggcgacaccttcctggggctggcgctcgaccacggggggcacctctcgcacgggatgaagctcaacgtctccggcaggctctacaaccccgtcccctaccacgtcaggcgcgaggacagcctcgtggacatggaggaggtcgagcgcctggcaaacgagcacaggccaaagctcatcgtcgccggctggtcggcctacccgcgccagctggacttcgccgccttccgcgagatcgccgactcggtgggcgccaagctcatggtggacatggcccactttgcagggctcgtcgcggcgggcatccaccccaaccccgtcgagtacgcagacgtggtgaccaccacggttcacaagaccctcgccggtccccgaagcggcatgatcctctgccgggaggagcacgccaaaaagatagacagcgccgtcttccccggacagcagggcgggccgctcatgcacgtcatcgccgccaaggccgtcgccctgcggatagcccacaccgaaggcttccgcgcccgccagcggcagacggtcgccaacgcaaaagcgctcgccgaggcgctcatgcaaaacggcatagaggtggtctcgggcggcaccgacgtgcacctggtgctggtggacctcacctcgaccggcctcgacgggaagacggccgaagaccggctggagaaggtcggcatcacggtcaaccgcaacaccataccgttcgacccgcgaccgccgatgaacccctccggcctcaggataggcaccccggcgctcaccacgcgcggcctcctcgaggaggacatgcgcgagatcgccgggatcatcgcgggagccctgagcgacaacttcgaggcagagcataaggcgctgctcgagcgtagccgcgccctgatgcagaagtacccgctctacccggactcccagagaccaaccccggcagacggggaggggaaggaagcccccgctccgcctcccccaacgcgcccatcgtggctgtaa

SEQ ID NO: 79854 - protein, 474 aa, Rubrobacter xylanophilus DSM 9941
MRNDHRVSPALGDRGGAAANRRASAGGASFGLPGGYMTAPLAEVDPEIQEVLERELERQRNTLEMIASENFVPQAVLEAVGSVLTNKYAEGYPGRRYYGGCHEVDVAEQLAIDRAKELFGAEHVNVQPHSGAQANNAAYMALLEPGDTFLGLALDHGGHLSHGMKLNVSGRLYNPVPYHVRREDSLVDMEEVERLANEHRPKLIVAGWSAYPRQLDFAAFREIADSVGAKLMVDMAHFAGLVAAGIHPNPVEYADVVTTTVHKTLAGPRSGMILCREEHAKKIDSAVFPGQQGGPLMHVIAAKAVALRIAHTEGFRARQRQTVANAKALAEALMQNGIEVVSGGTDVHLVLVDLTSTGLDGKTAEDRLEKVGITVNRNTIPFDPRPPMNPSGLRIGTPALTTRGLLEEDMREIAGIIAGALSDNFEAEHKALLERSRALMQKYPLYPDSQRPTPADGEGKEAPAPPPPTRPSWL

SEQ ID NO: 79855 - DNA, 1305 bp, Rubrobacter xylanophilus DSM 9941
  CDS (1)..(1305): transl_table=11
atgggggcgcgggcgtcgagttttcggggaggggcggatgcccggcggatcccgcggagcggaggtggagcggagaggatgatgataggaccctacaccgaggtagtagacgccgaggtccaggaggcgctcgacggggagctggagcgccagcggaccaccatagagctcatcgccagcgagaacttcgcctcccccgcggtgctggcggcccagggctcggtgatgaccaacaagtacgccgaggggtatccggggaggcgctactacggcggctgcgagttcatggaccgggtcgagctgcttgcgataaaccgggcgaaggagctcttcggggccgagcacgtcaacgtccagccgcactcgggcagccaggccaacgaggccgcctacgcgaccctcatagagcccggcgacaaggtgctgagcatggaccttgcgcacggcgggcacctcacccacgggatgaagatcaacttcagcggccgcacctacgagttcgtccactacggggtgggggaggacgggttcatagactacgaccgggtgcgcgagatcgcgctgcgcgagcggccccgcctcatcctcgcgggggccagcgcctacccccgcgtcctgcacttcgaccggttccgcgagatcgccgacgaggtgggcgcctacttcatggcggacatggcccacgttgcggggctggtggcgggcggggtgcacccctcgccggtgccccactgcgaggtcgtcaccaccaccacccacaagacgctgcgcggggcccggggcgggatggtcctctgccgcgaggagttcgcctcccggctcggcagccgcgtcttcccgggcttgcagggggggccgctgatgcacgccatcgcgggcaaggcggtggccctcggcgaggcgctgcggccggagttcaaggactacgcccgcaggatcgtggagaacgcgcgggcgctggccgaagggctcatggagggcgggctgaagctcgtctccggcggcaccgacaaccacatgatgctcgtggacctgcggggcagcggcatcaccggcaaggaactggagcagcggctggagtccgtcggggtgacctgcaacaagaacatggtccccggagaccccgagccccccaccgtcaccagcggggtgcggctcggcacccccgccatgaccacccgggggatggggccgggggagatgcgcgagatcgcggacatcatcgtccgggcggcccgcggtgagaccgatggcctgcgcaggcgggtccttgccctcaccgaggccttcccgctgtatgcctga

SEQ ID NO: 79856 - protein, 434 aa, Rubrobacter xylanophilus DSM 9941
MGARASSFRGGADARRIPRSGGGAERMMIGPYTEVVDAEVQEALDGELERQRTTIELIASENFASPAVLAAQGSVMTNKYAEGYPGRRYYGGCEFMDRVELLAINRAKELFGAEHVNVQPHSGSQANEAAYATLIEPGDKVLSMDLAHGGHLTHGMKINFSGRTYEFVHYGVGEDGFIDYDRVREIALRERPRLILAGASAYPRVLHFDRFREIADEVGAYFMADMAHVAGLVAGGVHPSPVPHCEVVTTTTHKTLRGARGGMVLCREEFASRLGSRVFPGLQGGPLMHAIAGKAVALGEALRPEFKDYARRIVENARALAEGLMEGGLKLVSGGTDNHMMLVDLRGSGITGKELEQRLESVGVTCNKNMVPGDPEPPTVTSGVRLGTPAMTTRGMGPGEMREIADIIVRAARGETDGLRRRVLALTEAFPLYA

SEQ ID NO: 79857 - DNA, 1272 bp, Mesorhizobium sp. BNC1
  CDS (1)..(1272): transl_table=11
atgaccaacggcacagctccgctttccgttttcgatccagccctttgggcggccatccaggccgaagggcggcgccaggagggcgaaatcgagctgatcgcgtcggaaaaccatgccagcccaagagtcatggcggcgcagggctcggtgctgaccaataaatatgccgaaggctatcctggaaagcgctactacggcggctgcggcgaggtggacgttgtcgagcagctggcgatcgatcgcgtaaagcagctgttcggcgcgcaatttgccaatgtgcagccccattcaggcgcccaggcgaacggcgcggtgatgctggcgctgctgctgccgggcgacaccattctcggcatgtctctggatgccggcggccatctcacccacggtgcacgcccagcgttgtcaggcaagtggttccgggccatcgcctatgggctgacgccggacggtctgatcgactacgatcaggtagccgcactggcagaagccgagcgcccgaagctgatcatcgccggcgcttcggcctattcgcgggtgatcgacttcgcccggttccgagcaattgccgacggcgtcggcgccacgctgatggtcgacatggcccatatcgcggggctggtcgccacgggccatcacccgagcccgatgccgcatgccgatgtcgtcacctccaccacgcataagacacttcgcggtccgcgcggcggcatcatcctgaccaatgacgaggccatcgccaagaagatcaacgcggcggtatttcccggcctgcagggcggcccgctgatgcatgtgatcgccgccaaggccgtcgccttcgccgaggcgctcgagccggatttcacggagtatgccggacgggtcgtggccagcgccaaggcgctcgccgaggttctggtcgagcgcggcgcggcgattgtgtccggcggcaccgacaaccatctgatgctggtcgatttgcgccccctcggtttgaagggcaacgaggcggccgaggcgctggagcgcgcaggcatcacctgcaacaagaacggcgtgcccgacgaccccgagaagcccaccgtaacctcgggcatccgcctcggcaccgcggccggttgttcacgcggtttcggccccggggaattccggcagatcggccatctgatcggggacgtgctggacagcctgcgcgacggcccgaacgctgtcgtcgaagacgccgtgcaccaaaaggtcgccgctctctgcctcgccttcccgatctatgggggcgaagccgatgtctga

SEQ ID NO: 79858 - protein, 423 aa, Mesorhizobium sp. BNC1
MTNGTAPLSVFDPALWAAIQAEGRRQEGEIELIASENHASPRVMAAQGSVLTNKYAEGYPGKRYYGGCGEVDVVEQLAIDRVKQLFGAQFANVQPHSGAQANGAVMLALLLPGDTILGMSLDAGGHLTHGARPALSGKWFRAIAYGLTPDGLIDYDQVAALAEAERPKLIIAGASAYSRVIDFARFRAIADGVGATLMVDMAHIAGLVATGHHPSPMPHADVVTSTTHKTLRGPRGGIILTNDEAIAKKINAAVFPGLQGGPLMHVIAAKAVAFAEALEPDFTEYAGRVVASAKALAEVLVERGAAIVSGGTDNHLMLVDLRPLGLKGNEAAEALERAGITCNKNGVPDDPEKPTVTSGIRLGTAAGCSRGFGPGEFRQIGHLIGDVLDSLRDGPNAVVEDAVHQKVAALCLAFPIYGGEADV

SEQ ID NO: 79859 - DNA, 1314 bp, Mesorhizobium sp. BNC1
  CDS (1)..(1314): transl_table=11
atggcacaagcatcgaccgtcgcggccgagaccgagacctttttctcccggccgctcgaggaaaccgattccgagatattctcggcaattcgcagcgaactcggccgccagcggcatgagattgagctgatcgcctccgaaaatatcgtctcgcgcgcagtgctcgaggcgcagggtacggtgctcaccaacaaatatgccgagggttatccgggtaagcgttattacggcggctgccagttcgtcgacgtggtggagcagcttgcgatcgaccgcgccaagaagcttttcaattgccagtttgcaaatgtgcagccccattcgggcagccagatgaaccaggcggtgttcctggcgctgctccagccgggcgacaccttcatggggctcgacctgaattcgggcggccaccttacccacggctcccccgtcaacatgtcgggaaagtggttcaacgtcgtttcctatggcgtgcgccgcgacgataacctcctcgatatggacgaggtggagcggctcgccacggagcacaagccgaagctgatcctggccggcggcacggcctattcgcggatttgggactggaagcgcttccgcgaaatcgccgatagcgtcggcgcctatctgatggtcgatatggcgcatatcgcgggcctcgtggcaggcggcgcgcatccttctccgctgccgcatgcgcatgtggtcaccacgacgacgcacaaatcgctgcgcggcccgcgcggcggcatggtcctcaccaatgacgaggatatcgccaaaaaggtgaactccgccgtgttcccgggcctgcagggcgggccgctgatgcatgtgattgccgccaaggcggtggcgctcggcgaggcgttgcagcccgaattcaaagcctatgcgcaccaggtggtggcgaatgcccgcgcgcttgcggcaagccttcaggagacagggctggagatcgtctccggcggcacggacaatcacctgatgctggtggatctcaggcccaaaaacgccacgggcaagcgggcggaggccgcccttggccgcgccaacatcacctgcaacaagaacggcattccctttgatcccgagaagcccttcgtgacctctggcatccggcttggcacgcccgctggcaccacgcgcggcttcggcgtagccgaattcagccagatcggccagcttatcgctgaggtcctggatgggctgcgcgccgtcaactccgacgatggcaatatcgccgtcgaggaggcggtgaagaaaaaggtgattgcccttaccgaacgtttcccgctctattcatatctggactga

SEQ ID NO: 79860 - protein, 437 aa, Mesorhizobium sp. BNC1
MAQASTVAAETETFFSRPLEETDSEIFSAIRSELGRQRHEIELIASENIVSRAVLEAQGTVLTNKYAEGYPGKRYYGGCQFVDVVEQLAIDRAKKLFNCQFANVQPHSGSQMNQAVFLALLQPGDTFMGLDLNSGGHLTHGSPVNMSGKWFNVVSYGVRRDDNLLDMDEVERLATEHKPKLILAGGTAYSRIWDWKRFREIADSVGAYLMVDMAHIAGLVAGGAHPSPLPHAHVVTTTTHKSLRGPRGGMVLTNDEDIAKKVNSAVFPGLQGGPLMHVIAAKAVALGEALQPEFKAYAHQVVANARALAASLQETGLEIVSGGTDNHLMLVDLRPKNATGKRAEAALGRANITCNKNGIPFDPEKPFVTSGIRLGTPAGTTRGFGVAEFSQIGQLIAEVLDGLRAVNSDDGNIAVEEAVKKKVIALTERFPLYSYLD

SEQ ID NO: 79861 - DNA, 1296 bp, Cytophaga hutchinsonii ATCC 33406
  CDS (1)..(1296): transl_table=11
atgattactgcacctattcgcacaacagcaagagatactcaaatttttgatttaatctctaaagaggctcaccgtcaggaagaaggcatcgaattaattgcttcagaaaatttcacttcaaaacaagtgatggaagcaatgggaagtgtacttaccaataaatatgctgaaggccttccgggcaagcgttattacggaggttgccaggttgttgatcaggttgagcagattgctattgatcgtttgaaaaaattattcggtgctgaatgggcaaacgttcagccacactccggtgcacaggcaaacgctgcgatcatgattgcgtgtctgaatccgggagattctattttaggttttgatctttcgcacggtggtcacctttcacatggttcaccggtaaatatgtcgggtaaatatttcaaggcacatttctatggtgtagaaaaagaatccggtctgattaacatggatattgttgaagcaacggctttaaaagtaaaacctaaaatgatcatctgcggagcttcagcctactcacgtgactgggattatgcacgcttccgcaaaatagcagacagcgttggagctatcttattagcagatatttctcacccggccggtttgattgcaaaaggtttattgaacgacccgatcccgcattgccacattgtttctacaacaacgcataaaacattgagaggtccgcgtggtggtgtgatcatgatgggtaaagattttgaaaacccattcggtttaaaaacaccaaaaggtgaaacacgtatgatgtctaatgtattagacatgggcgttttcccgggtacacaaggcggtccgttagagcacgttattgctgctaaagcggtagctttccaggaagcattatctacggattacttacagtatgcaaaacaaattcaaaagaatgcacagatcatggctgaagcatttttgaaaaaaggatacgatatcatttccggtggtacagacaatcacttaatgctgatcgaccttagaagtaaaaacttaaccggtaaagaagctgaaaacgcgctgatccgcgcagatattacgatcaacaaaaacatggttccgtttgacgacaaatctccgtttgttacttcaggtatgcgtgtaggtacagctgctattacaagccgtggtatggttggtgatgacatgatccgtattgttgaaatgatcgataccgttttaatgaaccagactaaagattctgtaattgaaactgtacgtaaagacgtaaacaactggatggcacaatatccattatatatttaa

SEQ ID NO: 79862 - protein, 431 aa, Cytophaga hutchinsonii ATCC 33406
MITAPIRTTARDTQIFDLISKEAHRQEEGIELIASENFTSKQVMEAMGSVLTNKYAEGLPGKRYYGGCQVVDQVEQIAIDRLKKLFGAEWANVQPHSGAQANAAIMIACLNPGDSILGFDLSHGGHLSHGSPVNMSGKYFKAHFYGVEKESGLINMDIVEATALKVKPKMIICGASAYSRDWDYARFRKIADSVGAILLADISHPAGLIAKGLLNDPIPHCHIVSTTTHKTLRGPRGGVIMMGKDFENPFGLKTPKGETRMMSNVLDMGVFPGTQGGPLEHVIAAKAVAFQEALSTDYLQYAKQIQKNAQIMAEAFLKKGYDIISGGTDNHLMLIDLRSKNLTGKEAENALIRADITINKNMVPFDDKSPFVTSGMRVGTAAITSRGMVGDDMIRIVEMIDTVLMNQTKDSVIETVRKDVNNWMAQYPLYI

SEQ ID NO: 79863 - DNA, 1233 bp, Clostridium perfringens ATCC 13124
  CDS (1)..(1233): transl_table=11
atgaattttgacaacttagaaagagaagatgagcaaattgcacatcttgttcaaaaggaaaaggaaagacaagaaaatagtatagagcttatagcttcagaaaactttgttagcaaagctgttatggaagctatgggatcatatttaacaaataaatatgctgagggttacccttcaaaaagatactatggtggatgtcacgtagtagatgaggttgaagatttagcaagagaaagagtaaaaaaattatttggggctgagcatgctaatgtacaaccacattcaggatcacaagctaatatggctgtttatttttcaatattagagccaggtgatactgtattaggaatggatttaagccatggaggacatttaactcatggttcaccagttaacttttcaggtagattatttaatttcgtgtcatatggtgtagataaagagacagaaacaataaattatgaaactgtaagagaattagctcttaaacataaacctaaattaatagttgcaggagctagtgcatattcaagaattatagattttaaaactttaagagagatagcagatgaggtaggagcatacttaatggttgatatagctcacattgcagggcttgtagctacaggcttacatccatcaccagttccttatgctgattttgttacatcaacaactcataaaactttaagaggaccaagaggtggattaatactttgtaaagaaaaatttgcaaaagcattagataagaatatcttcccaggaatacaaggtggtcctttaatgcatataatagctgcaaaggctgtttgttttaaagaagcattagaaccaagttttaaaacatatatggagcaagttgttaaaaatgcacatgttttagcagaagctttagaatcttatggatttaaattagtttcaaatggaactgataaccatttaatacttgttgatttaactaataaagatataactggtaaagatgcagaaattcttttagatagcataggaataactttaaacaaaaatactgtaccaaatgaaacaagaagtccatttgttactagtggtgttagaataggaactcctgctataacaactagaggatttaaagaagaagaaatgaaagaaatagcttctataataaatgatgctattaaagaaaaagatggagatttagagccattaaaagcaagagttaaagctttatgtgctaagtatcctttatattaa

SEQ ID NO: 79864 - protein, 410 aa, Clostridium perfringens ATCC 13124
MNFDNLEREDEQIAHLVQKEKERQENSIELIASENFVSKAVMEAMGSYLTNKYAEGYPSKRYYGGCHVVDEVEDLARERVKKLFGAEHANVQPHSGSQANMAVYFSILEPGDTVLGMDLSHGGHLTHGSPVNFSGRLFNFVSYGVDKETETINYETVRELALKHKPKLIVAGASAYSRIIDFKTLREIADEVGAYLMVDIAHIAGLVATGLHPSPVPYADFVTSTTHKTLRGPRGGLILCKEKFAKALDKNIFPGIQGGPLMHIIAAKAVCFKEALEPSFKTYMEQVVKNAHVLAEALESYGFKLVSNGTDNHLILVDLTNKDITGKDAEILLDSIGITLNKNTVPNETRSPFVTSGVRIGTPAITTRGFKEEEMKEIASIINDAIKEKDGDLEPLKARVKALCAKYPLY

SEQ ID NO: 79865 - DNA, 1326 bp, Rhodococcus sp. RHA1
  CDS (1)..(1326): transl_table=11
atgaccgtggacaccgcacacctcaccgaggcggcagcagcgaacccgacgctgacgcattcgctcgccgatctcgaccccgccgtgcaccaggcgatcgccgccgagctggggcgacagcagggcaccctggaaatgattgccagtgagaacttcgccccgctcgcggtgatgcaggcgcaggggtcggtgctgacgaacaagtacgccgagggctaccccggccgccgctactacggcggttgcgagcacgtcgacgtcatcgagcagctcgccatcgaccgcctcaccgcgctgttcggtgcgaaattcgccaacgtgcaaccgcattcgggagcgcaggccaacgccgccgcgatgtcggcactgctcgagcccggcgacggcatcctcggcctggacctcgcgcacggcggtcacctcacgcacgggatgaagctgaacttctccggcaagctctacgacgtcgccgcgtaccacgtccgcgaggacgaccatctcgtcgacatggacgaggtcgagcatctggcccgtgagcaccgcccgaagctgatcctggccggctggtccgcctacacccgccaactcgacttcgccgcgttccggcgcatcgccgacgaggtcggcgcgtacctcatggtcgacatggcgcacttcgccggactcgtcgccgccggactgcacccctcccccgtcccgcacgcccacgtggtcacgtcgacgacgcacaagaccctcggcggcccccgcggcggcgtcatcctcaccaacgacgaggcactggccaagaagttcaactcctcggtgttccccggacagcagggcggcccgctcgagcacgtgatcgccggcaaggccgtctcgttcaagctcgctgccgagcccgaattccgggagcgccaggagcgcacgctcgccggcgcgaagatcctcgccgaccgcctcctgaaggacgactcccggcaggccggcatcaacgtcgtgtccggcggcaccgacgtgcacctggtgctggtggatctgcgcgagtccgagctcgacggcaagcaggccgaggaccggctgcaccgcgtgggaatcaccgtgaaccgcaacgccgtcccgttcgacccgcgtccgccgatggtcagctccggggtgcggatcggcacccccgcactcgccacccgcggtttcgacctggacgcgttcaccgaggtcgccgacatcatcagctacgcgctccggccggccaccgacgaggccgggctagacgaactccgcggccgcgtcgacgctctcgcactgcgtttcccgctctaccccgacctcacggaggcgaactga

SEQ ID NO: 79866 - protein, 441 aa, Rhodococcus sp. RHA1
MTVDTAHLTEAAAANPTLTHSLADLDPAVHQAIAAELGRQQGTLEMIASENFAPLAVMQAQGSVLTNKYAEGYPGRRYYGGCEHVDVIEQLAIDRLTALFGAKFANVQPHSGAQANAAAMSALLEPGDGILGLDLAHGGHLTHGMKLNFSGKLYDVAAYHVREDDHLVDMDEVEHLAREHRPKLILAGWSAYTRQLDFAAFRRIADEVGAYLMVDMAHFAGLVAAGLHPSPVPHAHVVTSTTHKTLGGPRGGVILTNDEALAKKFNSSVFPGQQGGPLEHVIAGKAVSFKLAAEPEFRERQERTLAGAKILADRLLKDDSRQAGINVVSGGTDVHLVLVDLRESELDGKQAEDRLHRVGITVNRNAVPFDPRPPMVSSGVRIGTPALATRGFDLDAFTEVADIISYALRPATDEAGLDELRGRVDALALRFPLYPDLTEAN

SEQ ID NO: 79867 - DNA, 1269 bp, Rhodococcus sp. RHA1
  CDS (1)..(1269): transl_table=11
atgagtgtcctgaaccgcgacctcgcggatttcgacccggacgtcgccgcactgatcggcaaggagctggagcgccagcgcaccggcctcgagatgatcgcgtcggagaaccacgccccgctttcggtgatgcaggcgcagggttccgtgctgaccaacaaatacgccgagggctaccccgggcggcgctactacggcggctgcgagcacgtcgacacgatcgagcagctcgccatcgatcgcgtcaaggcgctgttcgccgccgaatacgccaacgtgcaaccgcattccggcgccaccgcgaacgcgtcggtgatgcacgcgctgatcgagccgggcgacacgatcctcggaatgtccctcgccgacggcggccacctcacgcacggcatgcgcctcaacttctccggcaagctctacaacgtcgccgcctacggggtgtccgaacaggactacctcatcgacatggacgaggtggcgaaggcagcacgcgagcaccggccgcagctgatcatcgccggctggtcggcctacccccggcacctggacttcgcccgcttccgggaaatcgccgacgaggtcggcgcgtacctgatggtcgacatggcccacttcgcgggtctggtcgccaccggattccacccgtctcccgtcccgcacgcacacgtcgtcacgtcgacgacgcacaagaccctcggcggaccccgcggcggcatcatcctgacgggcgacgccgccatcgcgaagaagatcaactccgcggtgttccccggccagcagggcggcccactggaacacgtgatcgcgggcaaggcaacggcattcaagatggcggccgaacccgaattcgcggagcgtcaggaacgctgcctggacggcgcgaaggtcctcgccgaacggctcagccgacccgacgtcaaggaagccggaatcagcgtcctcaccggcggcacggacgtgcacctcgtcctcgtcgacctgcgggatgccgccatcgacgggcagcaggccgaggaccgcctcgacgcaatcggaatcaccgtcaaccgcaacgccgtcccgttcgatccacggccaccgatggtgacgtccggtctgcgcatcggcaccccggcactcgccgcccgcggcttcggccgggacgacttcgcgaccgtcgccgacctgatcgcccaggccctcgtcgcgcccgccgacgcggacacgtccgggttggccgcccaggtccgggcgctcgcggacaagtaccccctctatccggggctgtaa

SEQ ID NO: 79868 - protein, 422 aa, Rhodococcus sp. RHA1
MSVLNRDLADFDPDVAALIGKELERQRTGLEMIASENHAPLSVMQAQGSVLTNKYAEGYPGRRYYGGCEHVDTIEQLAIDRVKALFAAEYANVQPHSGATANASVMHALIEPGDTILGMSLADGGHLTHGMRLNFSGKLYNVAAYGVSEQDYLIDMDEVAKAAREHRPQLIIAGWSAYPRHLDFARFREIADEVGAYLMVDMAHFAGLVATGFHPSPVPHAHVVTSTTHKTLGGPRGGIILTGDAAIAKKINSAVFPGQQGGPLEHVIAGKATAFKMAAEPEFAERQERCLDGAKVLAERLSRPDVKEAGISVLTGGTDVHLVLVDLRDAAIDGQQAEDRLDAIGITVNRNAVPFDPRPPMVTSGLRIGTPALAARGFGRDDFATVADLIAQALVAPADADTSGLAAQVRALADKYPLYPGL

SEQ ID NO: 79869 - DNA, 1296 bp, Rhodococcus sp. RHA1
  CDS (1)..(1296): transl_table=11
atgaccgctgtgcccggtaccgacgtcaacacggcccccctcgccgaactcgaccccgaagtcgcccaggccatggcaggtgagctggcccgtcagcgcgacacgctggagatgatcgcgtcggagaacttcgttccccgcgcggtcctccaggcgcagggcagcgtcctcaccaacaagtacgccgagggatacccgggacgccgctactacggcggctgcgagcacgtcgacgtcgtcgaggatctcgcccgtaaccgcgccaaggaactgttcggcgccgacttcgcgaacgtccagccgcactccggcgcgcaggccaacgcggcggtcctgatggccctgatgaacccgggtgagaagctcctcggcctcgacctggcgcacggcggtcacctcacgcacggcatgaagctgaacttctccggcaagctctacgacgtcgagtcgtacggggtcagcaaggaagaccaccgcatcgacatggacgaggtccgcaagatcgccgtcgccgcgcagccgaaggtcatcgtcgccggctggtccgcctacccgcgtcacgaggacttcgccgcgttccggtcgatcgccgacgaggtcggcgcgtacctgtgggtcgacatggcgcacttcgccggcctggtcgcggccggcctgcacccgtcgcccgtgccctacgccgacgtcgtgtccagcaccgtccacaagacgctcggcgggccgcgctccggcctgatcctcgccaagcaggaatgggcgaagaagctcaactccgccgtcttccccggccagcagggcgggccgctgatgcacgccatcgccgccaaggccgtctccctgaagatcgcgggcaccgaggagttcaaggaccgtcagcagcgcaccctgaccggcgcgaagatcctcgccgagcgtctgaccggcgcggatgtcgccgacaagggcgtcagcgtcctcaccggcggcaccgacgtccacctcgtgctcgtcgacctgcgcaactcgcagctcgacggccagcagggtgaggaccttcttcacgaggtcggcatcaccgtcaaccgcaacgcggtgccgttcgacccgcgcccgccgatggtcacgtccggcctccggatcggtaccgcggcgctcgcatcgcgtggattcggggacgagcagttcaccgaggtcgccgacatcatcggcaccgcactcgccggatcgtccgacgtcgagacgctgaagtcccgcgtgtcgaagctcgccgccgacttcccgctgtacgagggtctcgaggactggcgcctgatctag

SEQ ID NO: 79870 - protein, 431 aa, Rhodococcus sp. RHA1
MTAVPGTDVNTAPLAELDPEVAQAMAGELARQRDTLEMIASENFVPRAVLQAQGSVLTNKYAEGYPGRRYYGGCEHVDVVEDLARNRAKELFGADFANVQPHSGAQANAAVLMALMNPGEKLLGLDLAHGGHLTHGMKLNFSGKLYDVESYGVSKEDHRIDMDEVRKIAVAAQPKVIVAGWSAYPRHEDFAAFRSIADEVGAYLWVDMAHFAGLVAAGLHPSPVPYADVVSSTVHKTLGGPRSGLILAKQEWAKKLNSAVFPGQQGGPLMHAIAAKAVSLKIAGTEEFKDRQQRTLTGAKILAERLTGADVADKGVSVLTGGTDVHLVLVDLRNSQLDGQQGEDLLHEVGITVNRNAVPFDPRPPMVTSGLRIGTAALASRGFGDEQFTEVADIIGTALAGSSDVETLKSRVSKLAADFPLYEGLEDWRLI

SEQ ID NO: 79871 - DNA, 1260 bp, Haemophilus somnus 129PT
  CDS (1)..(1260): transl_table=11
atgttaaaaagaagtatgaatattgccgattacgatccggttttatggcaagccattcaagatgaaaatcttcgtcaagaagagcatattgagctaattgcctcagaaaactatgccagcccacgagtaatggaagcacaaggttgtcaattcaccaataaatatgcagaaggctatccgggtaaacgttattatggcggttgtgaatatgcagatattgttgaacaattagcgattgatcgggcaaaagcgttgttcggtgcagattatgctaacgttcaaccgcactccggctcacaagcaaatgcggcggtttatatggcattattaaatccgggggacaccattttaggaatgagccttgctcatgggggacatttaactcacggtgcctcggtcagtttctccggtaaaatttataaagcggagcaatacggtattacatccgaaggactgattgactatgatgcgttgcgtaaacaggctcatgaagtgaaaccaaaaatgatcgtcggcggattttctgcctattctcaaatcgttgactgggcaaaaatgcgtgaaattgccgatgaagtaggtgcatatttatttgttgatatggcacatgttgcagggcttattgccgctggtgtatatccaagcccaatgccacatgctcatgtagttaccaccacaacacacaaaaccttagcggggcctcgtggagggttaattcttgccaacggcaatgaagaactttacaaaaaattaaatagtgcggtatttccggcaggacaaggcggaccgttagttcatgttattgcagcgaaagccgtttgttttaaagaagctttggaacctgagttcaaaacttatcaagcacaagtagtaaaaaatgcaaaagctatggtagaagtttttaaacaacgtggttacaacgtggtatctaacggtacagaaaaccatttattcttagttgatttagtcagtcatggtttaaccggtaaagcggccgatgcggcgttaagtcgtgccaatattactgttaataaaaatgcggttcctaatgatccgcaaaaaccgttcgttacttcaggtattcgtgtgggaacgcctgctgtaactcgtcgaggcttcaacgaagaagatgtggcggaacttgccggttggatgtgcgatattttagacagtatgaataaagataaccatgaacaagtcattgctgatactaaagaaaaagtgttagcaatttgcaaacgtcttcctgtttatccataa

SEQ ID NO: 79872 - protein, 419 aa, Haemophilus somnus 129PT
MLKRSMNIADYDPVLWQAIQDENLRQEEHIELIASENYASPRVMEAQGCQFTNKYAEGYPGKRYYGGCEYADIVEQLAIDRAKALFGADYANVQPHSGSQANAAVYMALLNPGDTILGMSLAHGGHLTHGASVSFSGKIYKAEQYGITSEGLIDYDALRKQAHEVKPKMIVGGFSAYSQIVDWAKMREIADEVGAYLFVDMAHVAGLIAAGVYPSPMPHAHVVTTTTHKTLAGPRGGLILANGNEELYKKLNSAVFPAGQGGPLVHVIAAKAVCFKEALEPEFKTYQAQVVKNAKAMVEVFKQRGYNVVSNGTENHLFLVDLVSHGLTGKAADAALSRANITVNKNAVPNDPQKPFVTSGIRVGTPAVTRRGFNEEDVAELAGWMCDILDSMNKDNHEQVIADTKEKVLAICKRLPVYP

SEQ ID NO: 79873 - DNA, 1278 bp, Trichodesmium erythraeum IMS101
  CDS (1)..(1278): transl_table=11
atgattaacgctaactttctcgctgatactgaccccctagtagcagaaataattcaaaaagaatatggacggcaacaagaccacctagaattaattgctagtgaaaactttacctcacctgcagttatggcagcccaaggatccgtactcaccaacaaatatgctgaaggtctcccaagtaaacgttactatggtggctgtgaatttatagacgaagtcgaacaaatagctatagatcgcgccaaacaattatttggagctgcccatgcaaatgtacaaccccatgctggggcacaggccaaccttgccgtgtttctgaccttattaaaaccaggagacactatcatgggtatggacttatcccatggtggacatttaactcatggttccccagttaacatttctggtaaatggttcaaagctcatcattatggggtaaataaagaaacagaagctatagactatgaccaagttcttgagttagcaaagaagcataaacctaaactactgatttgtggttactctgcctattctcagataattaattttgaaaaattccgggcgatcgctgatgaagtaggagcttatttattagcagacattgctcatattgctgggttagtagcaacaggccaccatcctaacccagtccctcactgtgacgtagtaacaactaccacccacaaaactttaaggggaccacgaggcggtctcatccttactcgagactcagaattagggaaaaaactagacaaatcagtatttcctggaactcaaggtggtcctttagaacatgttattgcagctaaagcagtcgcatttggagaagctttaaaaccagaattcaaaacttattccggccaagttatagaaaatgctgcggccttagcaacccaactacaagaacggaaattgaaaatagtttctggtggtacggaaaatcacgttatgctagtggatctaagatcagtaagtatgacaggtaaaaaagcagataaattgatgagtggggtaaatattactgctaataaaaatactgtaccttttgacccagagtctccttttgttaccagtggtctccgactgggttctccagcaatgacaagtcgaggtatgaaagctactgaatttatagaaataggcgatattatagcggaaagattacaaaatccagaagatgaagggatagctcaaaagtgtcgagagagggtagcatcattatgcaaagcttttcctctttaccctcatatgatggctaaagttcctagtctagtttaa

SEQ ID NO: 79874 - protein, 425 aa, Trichodesmium erythraeum IMS101
MINANFLADTDPLVAEIIQKEYGRQQDHLELIASENFTSPAVMAAQGSVLTNKYAEGLPSKRYYGGCEFIDEVEQIAIDRAKQLFGAAHANVQPHAGAQANLAVFLTLLKPGDTIMGMDLSHGGHLTHGSPVNISGKWFKAHHYGVNKETEAIDYDQVLELAKKHKPKLLICGYSAYSQIINFEKFRAIADEVGAYLLADIAHIAGLVATGHHPNPVPHCDVVTTTTHKTLRGPRGGLILTRDSELGKKLDKSVFPGTQGGPLEHVIAAKAVAFGEALKPEFKTYSGQVIENAAALATQLQERKLKIVSGGTENHVMLVDLRSVSMTGKKADKLMSGVNITANKNTVPFDPESPFVTSGLRLGSPAMTSRGMKATEFIEIGDIIAERLQNPEDEGIAQKCRERVASLCKAFPLYPHMMAKVPSLV

SEQ ID NO: 79875 - DNA, 1290 bp, Synechococcus sp. CC9311
  CDS (1)..(1290): transl_table=11
atgacagaccgttccgcagccccaattaatgcatctctgaaggctgcagaccctgccattgctggtttgatcgatcaagagcagatgcgtcaggagacgcatttggagttgatcgcatcggagaacttcacctccaaggcggtgatggaagctcagggttcggttctgacgaataaatacgccgaggggttgcctcacaagcgttactacggcggctgcgagcatgtggatgccattgaagaattggcaatcacacgagccaagcaactcttcggtgcggcttgggcgaatgttcagccccacagcggcgctcaggcgaactttgctgtgtttcttgccttgcttcagcccggtgacacgattcttgggatggacctcagtcatggggggcatctcacccatggctcaccggtgaatgtcagcggcaagtggttcaacgtggtccagtacggcgtggataaagagactcagcgcctcgacatggaggccatccgcaagctggctctcgagcacaagcccaagctgatcatttgcggatactcggcttacccgcgctcgattgactttgccgcgttccgttccattgcggatgaggtgggtgcgtacctgttggcagacatggcccatatcgccggcctcgtggcggctggggttcatgcaagtccagtccctcactgtgatgttgtgaccaccacgacgcataaaactcttcgcgggccccgtggtggcttgatcctgtgtcgcgatgcagagttcgcgcgtcgatttgataaggcggtgttccctggatcgcaaggtggtccgcttgaacacgtgattgcagccaaggctgtggctttcggcgaagcgttgcagcccgacttcaaagcctatagccgtcaggttgttgccaacgctcaggccctcgcagcccgtcttcaggagcgaaagattgatgtggtgagtggtggtacggataaccatgtggtgcttttggatctgcgcagcatcgggatgaccggaaaggtggctgatcttttggtgagtgatgtgcacatcacggccaataagaacacggttccatttgatcctgagtcccccttcgtgacgagtggtttgcgtttggggactgctgcccttaccacccgtggcttcgacgagaaggccttccacgaggttgctgatgtgatcgctgatcgccttcagaaccctgaagatgacgccattcaggcgcgttgcttggagcgagtcagtgatctttgcaagcggtttccgctctatgcccctgctttggaaccggctctcgcttga

SEQ ID NO: 79876 - protein, 429 aa, Synechococcus sp. CC9311
MTDRSAAPINASLKAADPAIAGLIDQEQMRQETHLELIASENFTSKAVMEAQGSVLTNKYAEGLPHKRYYGGCEHVDAIEELAITRAKQLFGAAWANVQPHSGAQANFAVFLALLQPGDTILGMDLSHGGHLTHGSPVNVSGKWFNVVQYGVDKETQRLDMEAIRKLALEHKPKLIICGYSAYPRSIDFAAFRSIADEVGAYLLADMAHIAGLVAAGVHASPVPHCDVVTTTTHKTLRGPRGGLILCRDAEFARRFDKAVFPGSQGGPLEHVIAAKAVAFGEALQPDFKAYSRQVVANAQALAARLQERKIDVVSGGTDNHVVLLDLRSIGMTGKVADLLVSDVHITANKNTVPFDPESPFVTSGLRLGTAALTTRGFDEKAFHEVADVIADRLQNPEDDAIQARCLERVSDLCKRFPLYAPALEPALA

SEQ ID NO: 79877 - DNA, 1254 bp, Shewanella sp. MR-4
  CDS (1)..(1254): transl_table=11
atgctgaaaaaagatatgaatatcgcagattatgatccggaactgttcaacgcaattcagaacgaaactctgcgtcaagaagagcatattgagctgattgcttctgaaaactacaccagtccacgcgtgatgcaagcgcaaggttcacaattaaccaacaagtacgccgaaggttatcctggcaagcgttactacggtggttgtgagtatgtggacgtagttgaaaccttagcaattgagcgtgcaaaacaactgtttggtgcgacttacgcaaacgtgcaacctcactcaggttctcaagcaaacagcgccgtttacatggcattgttaaaaccaggcgataccgttttaggtatgaacctcgctcacggtggtcacttgacccacggttcacctgtaaacttctccggtagactgtacaacatcattccttacggcatcgatgaatcaggcaaaatcgactacgacgaaatggaacgtctggcagttgaacataagcctaagatgatgatcggtggtttctctgcttactcaggcatcgttgactgggcaagaatgcgcgaaatcgcagacaaaatcggtgcttacctgtttgtcgacatggcgcacgttgcgggtcttatcgccgctggtgtgtatccaaaccctgtgccacacgcgcacgttgtgacctcaaccactcacaagaccttagccggtcctcgtggcggtatcattctgtctgcagccgatgatgaagatttatacaaaaagctgaactctgcggtattcccaggcggtcaaggcggtcctttgatgcacgttatcgcaggtaaagcggtagccttcaaagaagctttagagccagagttcaaagcttaccaacaacaagtggttaagaacgctaaagctatggttgaagtgttcttagagcgcggttacaagatcgtttctggcggtactgacaaccacttaatgctggtggacttaatcggtcgcgacctgacgggtaaagaagccgatgccgctttaggtagcgcgaacatcacagtaaacaaaaactctgtgcctaacgatccacgttctccattcgtgacctctggtgtgcgtattggtacgcctgcgatcactcgccgcggctttaaagaagctgaagcgaaagagttaaccggttggatctgtgacatcctcgacgatgcccacaacccagcagtcatcgagcgcgtaaaaggccaagtattggcactgtgcgcccgtttccctgtttacggttaa

SEQ ID NO: 79878 - protein, 417 aa, Shewanella sp. MR-4
MLKKDMNIADYDPELFNAIQNETLRQEEHIELIASENYTSPRVMQAQGSQLTNKYAEGYPGKRYYGGCEYVDVVETLAIERAKQLFGATYANVQPHSGSQANSAVYMALLKPGDTVLGMNLAHGGHLTHGSPVNFSGRLYNIIPYGIDESGKIDYDEMERLAVEHKPKMMIGGFSAYSGIVDWARMREIADKIGAYLFVDMAHVAGLIAAGVYPNPVPHAHVVTSTTHKTLAGPRGGIILSAADDEDLYKKLNSAVFPGGQGGPLMHVIAGKAVAFKEALEPEFKAYQQQVVKNAKAMVEVFLERGYKIVSGGTDNHLMLVDLIGRDLTGKEADAALGSANITVNKNSVPNDPRSPFVTSGVRIGTPAITRRGFKEAEAKELTGWICDILDDAHNPAVIERVKGQVLALCARFPVYG

SEQ ID NO: 79879 - DNA, 1260 bp, Alkalilimnicola ehrlichei MLHE-1
  CDS (1)..(1260): transl_table=11
atgttctcccgtgatatgaccatcgccagctttgacccggaactctccgaggccatggaggccgagcgccgtcggcaggaggatcacatcgagctgatcgcctccgagaactacgccagcccccgggtgctcgaggcccagggcagcgtactcaccaacaagtatgccgagggctacccgggcaagcgctattacgggggctgcgagcatgtggacgaggccgagcgcctggccatcgagcgggccaagcagctctttggcgccgactacgccaatgtgcagccgcactccggctcccaggccaacgcggccgtctatctggcgctgctccagcccggcgacaccatcctgggcatgagcctggaccacggcgggcacctgacccacggcgccaaggtgaacttctccgggcggctgttcaacgccgtgcagtacggcgtctgccccgacaccggcgagctggactacgcccagctcgagcgcctggccaaggagcaccagccgaagatgattatcggcggcttctccgcctactcccgggtggtggactggcagcgcctgcgcgacatcgccgattcggtgggcgcctacctgctggtggatatggcccacgtggcgggcctggtcgccgccggtgtctacccgagcccggtgcagatcgccgatgtcaccaccaccaccacccacaagaccctgcgcggcccgcgcggtggcctgatcctggcccgggccaacgccgaggtggagaaaaagctcaactcgctggtcttccccggcacccagggcgggccgctgatgcacgccatcgccggcaaggccgtggccttcaaagaggccctggagccggagttcaaggcctatcagcagcaggtggtcgcaaacgcccgggcgatggcccaggggctgatcgagcgcggctacaaggtggtctcgggcggcaccgacaatcacctgttcctgatcgacctggtggacaaggggctgaccggcaaggccgccgacgccgccctgggcaaggcgcacatcacggtcaacaagaacaccgtgcccaacgatccgcagtcgccctttgtcacctccggcctgcgcattggcaccccggcgatcaccacccgcggcttcaaggaagaggagtgccgcgagctggctggttggatggccgacgtgctggatgacatcgagaacgaggacgtgattgcgcgggtgcgcgagcaggtcacccaggtctgccgccgcctgccggtctaccaacagggctga

SEQ ID NO: 79880 - protein, 419 aa, Alkalilimnicola ehrlichei MLHE-1
MFSRDMTIASFDPELSEAMEAERRRQEDHIELIASENYASPRVLEAQGSVLTNKYAEGYPGKRYYGGCEHVDEAERLAIERAKQLFGADYANVQPHSGSQANAAVYLALLQPGDTILGMSLDHGGHLTHGAKVNFSGRLFNAVQYGVCPDTGELDYAQLERLAKEHQPKMIIGGFSAYSRVVDWQRLRDIADSVGAYLLVDMAHVAGLVAAGVYPSPVQIADVTTTTTHKTLRGPRGGLILARANAEVEKKLNSLVFPGTQGGPLMHAIAGKAVAFKEALEPEFKAYQQQVVANARAMAQGLIERGYKVVSGGTDNHLFLIDLVDKGLTGKAADAALGKAHITVNKNTVPNDPQSPFVTSGLRIGTPAITTRGFKEEECRELAGWMADVLDDIENEDVIARVREQVTQVCRRLPVYQQG

SEQ ID NO: 79881 - DNA, 1308 bp, Hyphomonas neptunium ATCC 15444
  CDS (1)..(1308): transl_table=11
atggcagattcggcgcatgttccagaaacgctggccgggggctttttctccgttggtcttgcagagcgcgaccccgagctggccgctgcgatcaaccaggaagccacccgccagcagcaccagatcgagctgatcgcctcggagaacatcgtctcccgcgccgtgctcgaagcccaaggctcgatcctcaccaacaaatacgccgaaggctatcccggcaaacgctactatggcggctgcgaattcgtcgacatcgctgaggaactcgcgatcgagcgcgccaagaagctgttcaattgcggctttgccaacgtccagccaaactccggcagccaggccaaccagggcgtcttccaggcggtcctgaagcccggcgacaccatcctcggcatgagcctcgccgccggtggccacctcacccacggcgccaagccaaaccagtccggaaaatggttcaacgctgtccagtatggcgtgcgcccggaagaccacctgatcgactttgatgaggttgagcgccttgcccgcgcccaccgcccgcagatgatcatcgccggtggctctgcctatccgcgccagattgacttcaaacgcttccgcgagattgccgatgatgtcggcgccatcttcctggtcgacatggcccactttgctggtctcgtcgccggcggcgcccatcccaacccgctcgaccattgccacattgccaccaccacgacgcacaagacccttcggggcccgcgcggcggcatgatcctcaccaatgacgaagctctcgccaagaagatcaactcggccatcttccccggcatccagggcggtcccctaatgcatgtcatcgccggcaaggcggtcgcctttggcgaggcgctgatgccggaattcaagacctatgttgagcaggtcgtctccaacgcccgcgccatggccgcagcctgccgcacggcgggcctcgatgtcgtctccgatggcaccgacacccacctcgcgctgattgacctgcgccccaaaggcgtcaccggccgcgacgccgaagccgctctcgagcgcgcctacatcacctgcaataagaacggcatcccgttcgatcccgccccgccgacggtcacctcgggcatccgggtcggctcgcctgcgggcaccacgcgcggcttccgcgaggaagagttcatccagatcggcacctggatcggcgagatcgtagacgctctggccaatggcaacagcgacgcggttgaagcccgcgtccgcgaagaggtgaaggcgctcacggcgcgtttccccatctatgaggggctggggggctga

SEQ ID NO: 79882 - protein, 435 aa, Hyphomonas neptunium ATCC 15444
MADSAHVPETLAGGFFSVGLAERDPELAAAINQEATRQQHQIELIASENIVSRAVLEAQGSILTNKYAEGYPGKRYYGGCEFVDIAEELAIERAKKLFNCGFANVQPNSGSQANQGVFQAVLKPGDTILGMSLAAGGHLTHGAKPNQSGKWFNAVQYGVRPEDHLIDFDEVERLARAHRPQMIIAGGSAYPRQIDFKRFREIADDVGAIFLVDMAHFAGLVAGGAHPNPLDHCHIATTTTHKTLRGPRGGMILTNDEALAKKINSAIFPGIQGGPLMHVIAGKAVAFGEALMPEFKTYVEQVVSNARAMAAACRTAGLDVVSDGTDTHLALIDLRPKGVTGRDAEAALERAYITCNKNGIPFDPAPPTVTSGIRVGSPAGTTRGFREEEFIQIGTWIGEIVDALANGNSDAVEARVREEVKALTARFPIYEGLGG

SEQ ID NO: 79883 - DNA, 1299 bp, Rhizobium leguminosarum bv. viciae 3841
  CDS (1)..(1299): transl_table=11
atgaccaatgcttccaccgaatccttcttcaatcgctcgcttgcggacgtcgatccggatattttcggcgcgatcggaaaggaactcggtcgccaacggcacgagatcgaactgatcgcttctgagaacatcgtctcccgcgccgtgctggaagcccagggctccatcatgaccaacaaatatgccgagggttatcccggcaagcgttattacggcggctgccagttcgtcgatatcgccgaggaactggcgatcgagcgcgccaagaagctgttcggcgtcaatttcgccaacgtccagccgaattccggttcgcagatgaaccaggccgtgttcctggcgctgctgcagcccggcgataccttcatggggctcgacctgaattcaggcggccacctcacgcatggttcgccggtcaacatgtccggcaagtggttcaacgtcgtctcctacggcgtgcgcgaaggcgacaacctgctcgacatggatgaagtcgcccgcaaggccgaggaaaccaagccgaagctcatcatcgccggcggcactgcctattcccgcatctgggactggaagcgcttccgcgagatcgccgacagcgtcggcgcttatctgatggtcgacatggcccacatcgccggcctcgttgccggtggtgttcatccgtcgccattcccgcattgccatgtcgcgacgacgacgacccacaagtcgctgcgcggcccgcgcggcggcgtcatcctcaccaatgacgaggatctggcgaagaagttcaattcggcggtcttccccggtctgcagggcggcccgctgatgcacattatcgccgccaaggctgtggccttcggcgaggcgctgcagcctgagttcaaggattatgccgcccaggtggtcaagaacgccaaggcgcttgccgaaacgctgatatcgggcggcctcgacgtcgtctccggcggcaccgacaaccacctgatgctggtcgacctgcgcaagaagaatgccaccggcaagcgcgccgaggcagccctcggccgcgcttacgtcacctgcaacaagaacggcattcccttcgatccggaaaagcccttcgtcacctcgggtgtgcgcctcggcgcaccggccggcacgacccgcggcttcaaggaagcggaattccgcgagatcggcaatctgatcgtcgaggtcctcgacggtctgaaggtcgccaattccgatgaaggcaacgccgcggtcgaagccgccgtgcgcggcaaggtggtcagcctcaccgaccgcttccccatgtacggctacatgggataa

SEQ ID NO: 79884 - protein, 432 aa, Rhizobium leguminosarum bv. viciae 3841
MTNASTESFFNRSLADVDPDIFGAIGKELGRQRHEIELIASENIVSRAVLEAQGSIMTNKYAEGYPGKRYYGGCQFVDIAEELAIERAKKLFGVNFANVQPNSGSQMNQAVFLALLQPGDTFMGLDLNSGGHLTHGSPVNMSGKWFNVVSYGVREGDNLLDMDEVARKAEETKPKLIIAGGTAYSRIWDWKRFREIADSVGAYLMVDMAHIAGLVAGGVHPSPFPHCHVATTTTHKSLRGPRGGVILTNDEDLAKKFNSAVFPGLQGGPLMHIIAAKAVAFGEALQPEFKDYAAQVVKNAKALAETLISGGLDVVSGGTDNHLMLVDLRKKNATGKRAEAALGRAYVTCNKNGIPFDPEKPFVTSGVRLGAPAGTTRGFKEAEFREIGNLIVEVLDGLKVANSDEGNAAVEAAVRGKVVSLTDRFPMYGYMG

SEQ ID NO: 79885 - DNA, 1254 bp, Pseudomonas aeruginosa UCBPP-PA14
  CDS (1)..(1254): transl_table=11
atgttcagccgtgatttgaccctcgcccgctacgatgccgaactctttgccgcgatggagcaggaagcccagcgccaggaagagcacatcgagctgatcgcctccgagaactacaccagcccggcggtgatggaagcccagggttcggtgctgaccaacaagtacgccgaaggttatccgcacaagcgctactacggcggctgcgagtacgtcgatatcgtcgagcaactggccatcgaccgcgccaagcaactgttcggcgccgattacgccaacgtccagccgcacgccggctcccaggccaacgccgcggtctacctggccctgctgtcggccggcgacaccatcctcggcatgagcctggcccacggcggccacctgacccacggcgccagcgtctcctcctccggcaagctgtacaacgccgtgcagtacggcatcgacgccaatggcctgatcgactacgacgaagtcgagcgcctggccgtggagcacaagccgaagatgatcgtcgccggcttctccgcctattcccaggtcctcgatttcgcccgcttccgcgccatcgccgacaaggtcggcgcctacctgttcgtcgacatggcccacgtcgccggcctggtcgccgctggcgtctacccgaacccggtgccgttcgccgacgtggtcaccaccaccacccacaagaccctgcgcggtccgcgcggtggcctgatcctggcgcgcgccaacgaggagatcgagaagaagctcaactccgcggtattccccggcgcccagggcggtccgctggagcacgtgatcgcggccaaggcggtgtgcttcaaggaagccctgcagccggagttcaagacctaccagcagcaggtcctgaagaacgcccagaccatggcccaggtcttcctcgaccgcggtttcgacgtggtttccggcggcacccagaaccacctgttcctgctctccctgatcaagcaggacatcaccggcaaagacgccgacgccgccctcggccgcgcgttcatcaccgtgaacaagaactcggtcccgaacgacccgcgctcgccgttcgtcacctccggcctgcgcatcggtaccccggccgtgaccacccgcggcttcaaggaagccgagtgccgcgagctggccggctggatctgcgacatcctcgagaacatgggcgacgagtccgtggtcaacggcgtacgcgagaaggtcaaggcgatctgcgccaagttcccggtctacggcaactaa

SEQ ID NO: 79886 - protein, 417 aa, Pseudomonas aeruginosa UCBPP-PA14
MFSRDLTLARYDAELFAAMEQEAQRQEEHIELIASENYTSPAVMEAQGSVLTNKYAEGYPHKRYYGGCEYVDIVEQLAIDRAKQLFGADYANVQPHAGSQANAAVYLALLSAGDTILGMSLAHGGHLTHGASVSSSGKLYNAVQYGIDANGLIDYDEVERLAVEHKPKMIVAGFSAYSQVLDFARFRAIADKVGAYLFVDMAHVAGLVAAGVYPNPVPFADVVTTTTHKTLRGPRGGLILARANEEIEKKLNSAVFPGAQGGPLEHVIAAKAVCFKEALQPEFKTYQQQVLKNAQTMAQVFLDRGFDVVSGGTQNHLFLLSLIKQDITGKDADAALGRAFITVNKNSVPNDPRSPFVTSGLRIGTPAVTTRGFKEAECRELAGWICDILENMGDESVVNGVREKVKAICAKFPVYGN

SEQ ID NO: 79887 - DNA, 1233 bp, Pediococcus pentosaceus ATCC 25745
  CDS (1)..(1233): transl_table=11
atgaattatacaaaacaagatccagaattatggtcagcaattgaacgtgaagaaaagcgtcagcaacataatattgaattaattgcttcggaaaatattgtatctgatagcgtacgcaaggcccaaggtagtgtacttactaataagtatgccgaaggttatcctggcaaacgttactatggtgggtgtgaatttattgaccaagttgaacaattagcaattgatcgggcaaaagccatctttaatgcggaatatgtaaatgttcaaccccattctggttcccaagcgaatgctgcggcttatgccgcgtttattaaacctggggataaaattttagggatggaccttaatgctggtggacatttaacacacggtgctaaagtaagctttagtggaactttttatcaatcagtgagttatggggttgatcctcaaactgaaaaattagattacgatgaaattcgtcgtattgctttaaaagaacagccacaaattattgttgcgggagcttcggcctatagtcgatttattgattggaataaattccgcgaaattgctgatgaagtcggggcttatctgatggtagatatggcccatattgctggtctggtagcagctggtctgcatccttcaccagttggcattgctgatgtggttacaactacgacacataagaccctccgaggtccccgtggtggcatgattctttcgcaggaaaaatatgccaagcaacttaattttgcggtatttcctcaaaatcaaggtggtccattagaacatgttattgctgcgaaggccgttgcctttggtgaagcattgcaaccagaatttaagacttatcaaaaacaagttttaaaaaatgcgaaagcaatggctgaagtctttgaaaatgatacgattttgcacgtagtaacaggggggaccgataatcatctgatgacagtagatttaactgggacccaattaaatggtaaggaagtacagaatctgttagatggcgtcttcattactactaataaagaagctattccagaagaaaaattaagcccatttaaaacctcaggaattcgaattggaacgccagctattacgacacgaggatttaaagaagacgactgtcgtgaagttgctaatttgataattcgagcaatcaaaaatgcggataatgaaacagttctagaagaaattaagcgagatgtgttcaaactaactgaaaagtaccctattgattaa

SEQ ID NO: 79888 - protein, 410 aa, Pediococcus pentosaceus ATCC 25745
MNYTKQDPELWSAIEREEKRQQHNIELIASENIVSDSVRKAQGSVLTNKYAEGYPGKRYYGGCEFIDQVEQLAIDRAKAIFNAEYVNVQPHSGSQANAAAYAAFIKPGDKILGMDLNAGGHLTHGAKVSFSGTFYQSVSYGVDPQTEKLDYDEIRRIALKEQPQIIVAGASAYSRFIDWNKFREIADEVGAYLMVDMAHIAGLVAAGLHPSPVGIADVVTTTTHKTLRGPRGGMILSQEKYAKQLNFAVFPQNQGGPLEHVIAAKAVAFGEALQPEFKTYQKQVLKNAKAMAEVFENDTILHVVTGGTDNHLMTVDLTGTQLNGKEVQNLLDGVFITTNKEAIPEEKLSPFKTSGIRIGTPAITTRGFKEDDCREVANLIIRAIKNADNETVLEEIKRDVFKLTEKYPID

SEQ ID NO: 79889 - DNA, 1245 bp, Oenococcus oeni PSU-1
  CDS (1)..(1245): transl_table=11
atgacaaaaaattttttggatcctcaattggcaaaagctgtttcgggcgaggaagaacggcagcggcataacattgaattggttgcttccgagaattttgtctcaaaagctgtccgccaagcacagggcagtgttttgacgaataaatattctgaaggttatccggggaaacgctattatggcggtaatgaatatatcgatattgccgaaaatttagcgattgaacgagcaaaggaactgtttggtgttagttatgctaatgttcagccgcattccggttccagcgcgaattttgaagcatatatggcttttctgcatcctggcgataaaatccttggaatgaacttggattccgggggccatttaactcatggagccagtgttagtttttcaggcaaaatgtacgaagctcagtcttataaagttgattcagagactgaattacttgattatgatgcgattttaaaacaggcaaaagaatttaagcctaatttaattattgccggcgcttcggcttattcccgaacgatcgattttcaggcttttcgtgatatagctgatgaagtcaatgcttatttgatggttgatattgctcatattgctggtttaattgcggctggattgcatccaagcccggttggattggctgatatcattacaacaactacccataaaactcttcgaggaccttgcggcggtatgattttggctgacgaaaaatatgctaagaggattaattcggccgttttcccgggatcacaaggtggccctttggatcacgtggttgcggccaaggcagcggccttttatgaagatttgcagcctgatttcaagacttattctgctcagatcatcaagaacgcgaaaacaatggccgatgctttttccaaagagccggatgtgcgtgttgtttccggtggtactgacaatcatatgttcactctcgatttaaccaagactggtttaaatggccgacaagttcaagatttgttggattctgtttctattactcttaatcgcgaggcccttccgaacgagaaacgttcgccctttgtcacttccggtgttcgaattggtactccagccatgactaccaagggcttaaaagaaaacgaaatgctgcaaatcgaacacttgattatgcgggctattcacgctcatgatgacaaaaatgaattaacaaagattaagcgggatgtttttgatttgatggataaatttccttttgattccaatcccttctga

SEQ ID NO: 79890 - protein, 414 aa, Oenococcus oeni PSU-1
MTKNFLDPQLAKAVSGEEERQRHNIELVASENFVSKAVRQAQGSVLTNKYSEGYPGKRYYGGNEYIDIAENLAIERAKELFGVSYANVQPHSGSSANFEAYMAFLHPGDKILGMNLDSGGHLTHGASVSFSGKMYEAQSYKVDSETELLDYDAILKQAKEFKPNLIIAGASAYSRTIDFQAFRDIADEVNAYLMVDIAHIAGLIAAGLHPSPVGLADIITTTTHKTLRGPCGGMILADEKYAKRINSAVFPGSQGGPLDHVVAAKAAAFYEDLQPDFKTYSAQIIKNAKTMADAFSKEPDVRVVSGGTDNHMFTLDLTKTGLNGRQVQDLLDSVSITLNREALPNEKRSPFVTSGVRIGTPAMTTKGLKENEMLQIEHLIMRAIHAHDDKNELTKIKRDVFDLMDKFPFDSNPF

SEQ ID NO: 79891 - DNA, 1233 bp, Leuconostoc mesenteroides subsp. mesenteroides ATCC 8293
  CDS (1)..(1233): transl_table=11
atgtcatatcaagaattagaccctattgtctggagtgcgattcaacaagaaagtgcgcgtcaaaaccgtacaattgaattaatcgcttctgagaactttacatcgcaagccgtacgtgccgcacaaggttcggtgttgacaaataagtatgctgaaggatacccttataagcgttattatggtggcacggagtacgtggacgttgttgaacaggtagccatcgatcgtttaaaagaactttttggtgctgaatatgctaacgttcagccgcattctggttcccaagcgaatgctgctgcttacatggcatttttaaagccaggtgacaagatattgggtatgagtcttgacgctggtggacacttgacacatggggccaaggtcagtttctctggaaaagtttatgaatcacatacttatggattaaattcggaaacagaaaccttagattatgaagcaattgccaagcaagcacgtgaagtaaaaccacagatgattgtggccggtgcttctgcatattcacgaatcattgaatttgataagtttcgtgcgattgctgacgaagtgggtgcctatttaatggttgatatggcgcatattgccggacttgtagctgctgggctacatcccaatccagtaggcattgcagatgttgttacatcaacaacacataaaacattgcgaggtccgcgtggtggggttattctatcacaggaaaagtatgctaagcagcttaattcagctattttccctggatcacaaggtggaccattggaacacattattgcaggtaaagcaattgcctttggagaagctttacaacctaaatttaaagactacgcacaacaagttattaaaaatgcgcaagctatggcaaaagttttcaatgatactgaagatattcgtgttgtagctggtggcactgacaaccatttattcaatttggacctaactaaaacagcgttaaatggtaagcaaacacaggaattattagacacagtttcaattactacaaacaaagaagctctgccaaatgaacaattaagtccatttgttacatctggtattcgtattggaactgcagcaatcacaacgcgtggatttgatgaagatgatgccactaacgtagccgaattgattgtgacagccattcatcattatgatgatgaaaaagtactcaagcaagtgaaacgtgaagctgaagcattagcaatgacgcatctatttgaataa

SEQ ID NO: 79892 - protein, 410 aa, Leuconostoc mesenteroides subsp. mesenteroides ATCC 8293
MSYQELDPIVWSAIQQESARQNRTIELIASENFTSQAVRAAQGSVLTNKYAEGYPYKRYYGGTEYVDVVEQVAIDRLKELFGAEYANVQPHSGSQANAAAYMAFLKPGDKILGMSLDAGGHLTHGAKVSFSGKVYESHTYGLNSETETLDYEAIAKQAREVKPQMIVAGASAYSRIIEFDKFRAIADEVGAYLMVDMAHIAGLVAAGLHPNPVGIADVVTSTTHKTLRGPRGGVILSQEKYAKQLNSAIFPGSQGGPLEHIIAGKAIAFGEALQPKFKDYAQQVIKNAQAMAKVFNDTEDIRVVAGGTDNHLFNLDLTKTALNGKQTQELLDTVSITTNKEALPNEQLSPFVTSGIRIGTAAITTRGFDEDDATNVAELIVTAIHHYDDEKVLKQVKREAEALAMTHLFE

SEQ ID NO: 79893 - DNA, 1281 bp, Solibacter usitatus Ellin6076
  CDS (1)..(1281): transl_table=11
atgaccgaatcacaacgcatgtcccgcaccctcgccgaagtagaccctgaaatttaccaggccatccagcacgagacggcgcgccaggacggtcagctcgaactgatcgccagcgagaacttcacctccgaagccgtgctcgaagccaccggcagcgtcttcaccaacaagtacgcggaaggctatcccggcaaacgctactacggcggctgcgagtataccgacgtggtcgaaaacctggcccgcgagcgcgccagcaagctcttcggcgccgagtacgtcaacgtacagccccactccggctcgcaggccaaccaggccgcttacggggccgtggtctcccccggcgataccgtgatgggcctcaacctcgcgcacggcggacacctcacccacggccatgccctcaacttctccggcaagacttacaagatcgtcccctacaacgtccgtaaggaagacgagttgatcgattacgacgaagtcgaaaagctagcccgcgagcaccagcccaagatgatcatcgcgggcgccagcgcctacccgcgcatcatcgatttcgcccgtttccgcaaaatcgccgatgccgtcggcgccgtcttcctcgtcgatatggcgcacatctccggcctggtcgccgccggcgtccatccgaacccttgcgagttcgccgacatcgtcacctccaccacccataagaccctgcgcggaccgcgcgccggcatcatcctcgcccgcgaaaaatacggcaaggagatcgataagaacgtcttccccggcacccagggcggccccctcgtccacgtcatggcggccaaggccgtctgcttcctcgaagccctgcagcccgaattcgccgtctaccagcggcaggtcgtcgccaatgccaaagccctcgcgcagagcctgatcgatgccggcttccgcgtggtctccggcggcaccgatacccacgttgtcctgctcgacgtcttctcgaaagggctccgtggcaaggagagcgaacaggccctcgaccgcgcgcgcatcacggtcaacaagaacgccatcccgttcgataccaatccgcccatgaacccgagcggtatccgcctcggctcgcccgccgtcaccacccgcggcttcaaagaggccgagatgcgcgaagtcggcacgctgatcgccgaggtgctcactaatatcgcaaacgaggatgtcatcgccggcgtacggcagaaggtgcaggcgctcaccacccgcttcccgctctacagttggaaacgcgataccgtccaggcctag

SEQ ID NO: 79894 - protein, 426 aa, Solibacter usitatus Ellin6076
MTESQRMSRTLAEVDPEIYQAIQHETARQDGQLELIASENFTSEAVLEATGSVFTNKYAEGYPGKRYYGGCEYTDVVENLARERASKLFGAEYVNVQPHSGSQANQAAYGAVVSPGDTVMGLNLAHGGHLTHGHALNFSGKTYKIVPYNVRKEDELIDYDEVEKLAREHQPKMIIAGASAYPRIIDFARFRKIADAVGAVFLVDMAHISGLVAAGVHPNPCEFADIVTSTTHKTLRGPRAGIILAREKYGKEIDKNVFPGTQGGPLVHVMAAKAVCFLEALQPEFAVYQRQVVANAKALAQSLIDAGFRVVSGGTDTHVVLLDVFSKGLRGKESEQALDRARITVNKNAIPFDTNPPMNPSGIRLGSPAVTTRGFKEAEMREVGTLIAEVLTNIANEDVIAGVRQKVQALTTRFPLYSWKRDTVQA

SEQ ID NO: 79895 - DNA, 1269 bp, Magnetococcus sp. MC-1
  CDS (1)..(1269): transl_table=11
atgaatactgccgacctgaaaagcttcgatcctgaagtgcaatccgccattgatgaggaactggggcgtcagcgccatcagatcgaactgatcgcttcggaaaatattgtcagcccggcggtgatggccgctcagggcagcgtcatgaccaataagtatgccgaaggctaccccgccaaacgctattatggcggttgtgagtttgtggataaggtggaggtactggccatcgaacgggccaagcagctctttggttgcgcctacgccaacgttcaaccccactccggttcccaggccaacatggcagcctttatggccattgccccggcgggttccaccatcctgggcatgtcgctggcccatggtggacatttgacccacggtgccaaggttaacttttccggccagatctacaatgcggtgcagtatggcttgaatggagagtctgagcgcatcgactttgatcaggtgcaagccttggccatggagcataaacccgccattatcgttgcgggtgcctcggcctacagccgtatcattgattttgccaaatttcgtgaaatctgcgatgccgtgggtgccaaactggtggtggatatggcgcactttgccggtttagtggccaccggcgaacaccccagccccttcccccatgccgatattgtgaccaccaccacccataagaccctgcgcggtccccgtggcggtatgattttaaccaacgatgaagagctggcgaaaaagatcaactccaagatcttccccggtattcagggtggcccgttgatgcatgtgattgccgctaaagcggtggcttttaaagaggcgctctcacctgaatttaagatctacactcaacaggtgcgtaaaaatgctgtcgccttggctgaggtattggtggaggggggactgcgtatcgtctccggcgggacagacaaccatcttatgttggtggatcttaccagccgcgatatcaccggcaaagatacggaacatgcgttggagcgggcaggtctaacctgtaataaaaacgccatccccaacgatccacgcagtcctttcatcacctcgggtgtacgccttggtacccccgctgcgaccacccgtggatttgatgaagaggcctttcgtgcggtgggtcgcctgatcgtgcgggtggtggatgcggtagcagccagcggcggtgcgggagatccggccattgaggctgaggtgcataaagaagtggatgctttgtgccaaaaattcccaatctacgcagacatttaa

SEQ ID NO: 79896 - protein, 422 aa, Magnetococcus sp. MC-1
MNTADLKSFDPEVQSAIDEELGRQRHQIELIASENIVSPAVMAAQGSVMTNKYAEGYPAKRYYGGCEFVDKVEVLAIERAKQLFGCAYANVQPHSGSQANMAAFMAIAPAGSTILGMSLAHGGHLTHGAKVNFSGQIYNAVQYGLNGESERIDFDQVQALAMEHKPAIIVAGASAYSRIIDFAKFREICDAVGAKLVVDMAHFAGLVATGEHPSPFPHADIVTTTTHKTLRGPRGGMILTNDEELAKKINSKIFPGIQGGPLMHVIAAKAVAFKEALSPEFKIYTQQVRKNAVALAEVLVEGGLRIVSGGTDNHLMLVDLTSRDITGKDTEHALERAGLTCNKNAIPNDPRSPFITSGVRLGTPAATTRGFDEEAFRAVGRLIVRVVDAVAASGGAGDPAIEAEVHKEVDALCQKFPIYADI

SEQ ID NO: 79897 - DNA, 1254 bp, Shewanella sp. ANA-3
  CDS (1)..(1254): transl_table=11
atgctgaaaaaagatatgaatatcgcagattatgatccggaactgttcaacgcaattcagaacgaaactctgcgtcaagaagagcatattgagctgattgcttctgaaaactacaccagtccacgcgtgatgcaagcgcaaggttcacaattaaccaacaagtacgccgaaggttatcctggcaagcgttactacggtggttgtgagtatgtggacgtagttgaaaccttagcgattgagcgtgcaaaacaattgtttggtgcgacttacgcaaacgtgcaacctcactcaggttctcaagcaaacagcgccgtttacatggcattgttaaaaccaggcgataccgttttaggtatgaacctcgctcacggtggtcacttgacccacggttcgccagtaaacttctccggtagactgtacaacatcattccttacggcatcgatgaatcaggcaaaatcgactatgacgaaatggaacgtctggcggttgaacataagcctaagatgatgatcggtggtttctctgcttactcaggcatcgttgactgggcaagaatgcgcgaaattgcagacaaaatcggtgcttacctgtttgtcgacatggcgcacgttgcgggtcttatcgccgctggtgtgtatccaaacccagtgccacacgcgcacgttgtgacctcaaccactcacaagaccttagccggtcctcgtggcggtatcattctgtctgctgccgatgatgaagagttatacaagaagctgaactctgcggtattcccaggcggtcaaggcggtcctttgatgcacgttatcgcaggtaaagcggtagccttcaaagaagctttagagccagagttcaaagcttaccaacaacaagtggttaagaatgctaaagccatggttgaagtgttcttagagcgcggttacaagatcgtttctggcggtactgacaaccacttaatgctggtggacttaatcggtcgcgacctgactggtaaagaagccgatgccgctttaggtagcgccaacatcacagtaaacaaaaactctgtgccaaatgacccacgttctccattcgtgacctctggtgtacgtatcggtacgcctgcgatcactcgccgtggctttaaagaagctgaagcgaaagagttaaccggttggatctgtgacatcctcgacgatgcccacaacccagcggtcatcgagcgcgttaaaggccaagtattggcactgtgcgcccgtttccctgtttacggttaa

SEQ ID NO: 79898 - protein, 417 aa, Shewanella sp. ANA-3
MLKKDMNIADYDPELFNAIQNETLRQEEHIELIASENYTSPRVMQAQGSQLTNKYAEGYPGKRYYGGCEYVDVVETLAIERAKQLFGATYANVQPHSGSQANSAVYMALLKPGDTVLGMNLAHGGHLTHGSPVNFSGRLYNIIPYGIDESGKIDYDEMERLAVEHKPKMMIGGFSAYSGIVDWARMREIADKIGAYLFVDMAHVAGLIAAGVYPNPVPHAHVVTSTTHKTLAGPRGGIILSAADDEELYKKLNSAVFPGGQGGPLMHVIAGKAVAFKEALEPEFKAYQQQVVKNAKAMVEVFLERGYKIVSGGTDNHLMLVDLIGRDLTGKEADAALGSANITVNKNSVPNDPRSPFVTSGVRIGTPAITRRGFKEAEAKELTGWICDILDDAHNPAVIERVKGQVLALCARFPVYG

SEQ ID NO: 79899 - DNA, 1332 bp, Mycobacterium avium 104
  CDS (1)..(1332): transl_table=11
gtgactgctgcacctgacgctcgccccaccgcatccgacacggcgtcgctgatgtcggcgccgctcgccgacatcgaccccgacatcgccgggttgctgggtcaggagctgggccgccagcgcgacacgctggagatgatcgcctcggagaacttcgtcccgcgcgcggtgctgcaggcccagggcagcgtgctgacgaacaagtacgccgaggggctgcccggccgccgctactacggcggctgcgagtacgtcgacgtggtggagaacatcgcccgggatcgggccaaggccctcttcggcgccgacttcgccaacgtgcagccgcattcgggtgcccaggccaacgcggccgtgctgcacgcgctgatgacgccgggggagcggctgctgggtctggacctggccaacggcgggcacctgacgcacggcatgaagctgaacttctccggcaagctctacgacgtcggcttctacggcgtcgacccgaccacgcacctgatcgacatggacgcggtgcgggccaaggccctcgagttccgtcccaaggtcatcatcgccggctggtcggcctacccgcgggtgctggacttcgcggcgttcgcgtcgatcgccgacgaggtcggcgccaagctgtgggtcgacatggcacacttcgcgggcctggtcgccgccgggctgcacccgtccccggttccgcacgccgacgtggtgtccaccaccgtgcacaagacgctcggcggcccgcgctccggcctgatcctgggcaagcaggagtacgccaagtcgatcaactccgcggtgttccccggccagcagggcgggccgctcatgcacgtcatcgccgccaaggccgtcgcgctcaagatcgccggcacggaagagttcgccgaccggcagcggcgcaccctgtccggggcgcgcatcctcgccgagcggctgtcgggcgccgacgtggcggccgccggcgtgtcggtcgtcagcggcggcaccgacgtccacctggtgctggtcgacctgcgcaactcggagctcgacggccaggccgccgaggacctgctgcacgagatcggcatcaccgtcaaccgcaacgccgtgcccaacgatccccggccgccgatggtcacctccgggttgcgggtgggcacgccggccctggccacccggggcttcggggacgccgagttcagtgaggtcgccgacgtcatcgccaccgcgctggcgggcggccgcggggccgatctggcggcgctgcgggaccgggtcacccggctggccagggatttcccgctgtacgagggcctcgaagactgggcgctggtcggccggtag

SEQ ID NO: 79900 - protein, 443 aa, Mycobacterium avium 104
MTAAPDARPTASDTASLMSAPLADIDPDIAGLLGQELGRQRDTLEMIASENFVPRAVLQAQGSVLTNKYAEGLPGRRYYGGCEYVDVVENIARDRAKALFGADFANVQPHSGAQANAAVLHALMTPGERLLGLDLANGGHLTHGMKLNFSGKLYDVGFYGVDPTTHLIDMDAVRAKALEFRPKVIIAGWSAYPRVLDFAAFASIADEVGAKLWVDMAHFAGLVAAGLHPSPVPHADVVSTTVHKTLGGPRSGLILGKQEYAKSINSAVFPGQQGGPLMHVIAAKAVALKIAGTEEFADRQRRTLSGARILAERLSGADVAAAGVSVVSGGTDVHLVLVDLRNSELDGQAAEDLLHEIGITVNRNAVPNDPRPPMVTSGLRVGTPALATRGFGDAEFSEVADVIATALAGGRGADLAALRDRVTRLARDFPLYEGLEDWALVGR

SEQ ID NO: 79901 - DNA, 1473 bp, Mycobacterium smegmatis str. MC2 155
  CDS (1)..(1473): transl_table=11
atggctgcagacccgtcgtccaactcctcttcggtgcccgccgctaacggggccgactatgccgatacggccagcgccgcctaccaggccgcgctgcaggtcatcgaatccgtggagccccgggtcgccgcggccacacgcaaagaacttgccgaccaacgcgattcgctgaagctcatcgccagtgagaactacgcgtcgcccgcggtgctgctgaccatgggcacgtggttctccgacaagtacgccgagggcaccatcgggcaccgcttctacgccggctgccagaacgtcgacaccgtcgagagcgtcgcggccgagcacgcacgcgaactgttcggcgccccctacgcgtacgtgcagccgcactcgggcatcgacgccaacctggtcgcgttctgggcgatcctggccacgcgtgtcgaggcccccgagctcgccaacttcggcgccaagcacatcaacgacctgtccgaggccgactgggagacgctgcgcaacaagctgggcaaccagcgtctgctcgggatgtcgctggacgccggtgggcacctcacgcacggcttccggcccaacatctccggcaagatgttccaccagcgcagctacggcaccaacccggagaccgggttcctcgactacgacgcggtcgccgcggccgcgcgcgagttcaagccgctggtgctggtggccggctactcggcctacccgcggcgcgtcaacttcgccaagatgcgcgagatcgccgacgaggtcggcgcgacgctgatggtcgacatggcccacttcgcgggtctggtggcgggcaaggtgttcaccggtgacgaggatccggtgccgcacgcgcacgtcaccaccacgaccacgcacaagtcgctgcgcggaccgcgcggcggcatggtgctcgcgaccgaggagtacgcacccgcggtcgacaagggctgcccgatggtgctcggcggaccgctgagccacgtcatggccgccaaggccgtggcgctggccgaggcgcgccagcccgcgttccagcagtacgcgcagcaggtcgccgacaacgcgcaggccctggccgacggtttcgtcaagcgcgacgccggcctggtgaccggcggcaccgacaaccacatcgtgctgctcgacgtgacgtcgttcggcctcaccggccggcaggccgagtcggcgctgctcgacgcgggcatcgtcaccaaccgcaactcgatccccgcggaccccaacggcgcctggtacaccagcggcgtccgcctcggtacgcccgcgctcaccagccgtggattcggtgccgacgatttcgaccgcgtcgccgaactgatcgtcgaggtgctcgccaacacgcagcccgaggggacgtcgaaggccaagtacaagctggccgacggcaccgccgagcgcgtgcacgcggcgtcgtcggagctgctctcggcaaacccgctgtacccgggtctgacgctctga

SEQ ID NO: 79902 - protein, 490 aa, Mycobacterium smegmatis str. MC2 155
MAADPSSNSSSVPAANGADYADTASAAYQAALQVIESVEPRVAAATRKELADQRDSLKLIASENYASPAVLLTMGTWFSDKYAEGTIGHRFYAGCQNVDTVESVAAEHARELFGAPYAYVQPHSGIDANLVAFWAILATRVEAPELANFGAKHINDLSEADWETLRNKLGNQRLLGMSLDAGGHLTHGFRPNISGKMFHQRSYGTNPETGFLDYDAVAAAAREFKPLVLVAGYSAYPRRVNFAKMREIADEVGATLMVDMAHFAGLVAGKVFTGDEDPVPHAHVTTTTTHKSLRGPRGGMVLATEEYAPAVDKGCPMVLGGPLSHVMAAKAVALAEARQPAFQQYAQQVADNAQALADGFVKRDAGLVTGGTDNHIVLLDVTSFGLTGRQAESALLDAGIVTNRNSIPADPNGAWYTSGVRLGTPALTSRGFGADDFDRVAELIVEVLANTQPEGTSKAKYKLADGTAERVHAASSELLSANPLYPGLTL

SEQ ID NO: 79903 - DNA, 1449 bp, Nocardioides sp. JS614
  CDS (1)..(1449): transl_table=11
atgagcgacgagcgcatcagttccctcaccagcagcgcgtaccagcaggctctcgaggtgatcgcctcggtcgagccgcggatcgcggaggcgacccggcaggagctcgtcgaccagcgaggttcgctgaagctgatcgcgagcgagaactacgcctcgccggcggtgctgctgaccatgggcacctggctgagcgacaagtacgccgagggcaccgtcggccaccgcttctacgcaggctgccagaacgtcgacaccgtcgaggcgctggccgccgagcacgcgcgcgagctcttcggggcgccgtacgcgtatgcccagccgcactccggcatcgacgcgaacctggtggcgttctggtcgatcctggcccaccgggtcgagaccccggcgctcgagcggctcggcgccaagaacgtcaacgagctgaccgaggcggactgggagtcgttgcgccacgagctcggcaaccagcggctgctcgggatggccctggacgccggcggccacctcacccacggcttccgcccgaacatcagcggcaagatgttccaccagcagcagtacggcaccgatccggagaccgggctgctcgactacgccgcggtcgccgccaaggcccgcgagttcaagccgctggtgatcgtcgccggctactccgcctacccgcgccgggtggacttcgcgaagatgcgcgagatcgccgacgaggtcggcgcgacgctgatggtcgacatggcgcacttcgcgggcctggtcgccgggaaggtgttcaccggcgacgaggacccgatcccgcacgcccacatcaccacgaccacgacccacaagtcactgcgtggcccgcgcggcggcctggtgctggcccaggaggacttcgccgccgacgtcgaccgcggctgcccgatggtgctcggcggcccgctggggcacgtgatggcggccaaggccgtggccctcgccgaggcccgccgcccggagttccggacctatgcgcagaacatcgccgacaacgcccagtcgctggccgagggcttcctgtcccgcggtgcccggctcgtcaccggtggcaccgacaaccacctggtgctgctcgacgtctcggcgttcgggctcaccggccggcaggccgagtcggcgctcctcgactccggcgtggtcaccaaccgcaactcgatcccgcaggacccgaacggcgcctggtacacctccggcatccgcctcggcacgccggccctgacgacccggggcttcggccacgacgagttcgaccgggtcgccgagctgatcgtggacgtgctcagcaacaccgagcccggcaccaccaaggacggcaagccgtcgaaggcgtcctaccggctcggtgacggcgtggccgacaaggtccacgccgccgccgcggagctgctcgacaagcacccgctctacccaggcctcgacctggcctga

SEQ ID NO: 79904 - protein, 482 aa, Nocardioides sp. JS614
MSDERISSLTSSAYQQALEVIASVEPRIAEATRQELVDQRGSLKLIASENYASPAVLLTMGTWLSDKYAEGTVGHRFYAGCQNVDTVEALAAEHARELFGAPYAYAQPHSGIDANLVAFWSILAHRVETPALERLGAKNVNELTEADWESLRHELGNQRLLGMALDAGGHLTHGFRPNISGKMFHQQQYGTDPETGLLDYAAVAAKAREFKPLVIVAGYSAYPRRVDFAKMREIADEVGATLMVDMAHFAGLVAGKVFTGDEDPIPHAHITTTTTHKSLRGPRGGLVLAQEDFAADVDRGCPMVLGGPLGHVMAAKAVALAEARRPEFRTYAQNIADNAQSLAEGFLSRGARLVTGGTDNHLVLLDVSAFGLTGRQAESALLDSGVVTNRNSIPQDPNGAWYTSGIRLGTPALTTRGFGHDEFDRVAELIVDVLSNTEPGTTKDGKPSKASYRLGDGVADKVHAAAAELLDKHPLYPGLDLA

SEQ ID NO: 79905 - DNA, 1251 bp, Azoarcus sp. BH72
  CDS (1)..(1251): transl_table=11
atgttctcctcgcaagacactctcgccaaggtcgatcccgaactctggtccgccatccaggcggagaaccgccgccaggaagatcacatcgagctgatcgcctccgaaaactacgtctcccacgcggtgatggaagcccagggctcccagctcaccaacaagtacgcggaaggctatccgggcaagcgctactacggcggctgtgaacatgtggacgtggtcgagcagctcgcgatcgaccgtctgaagaagctcttcggcgccgacgccgccaacgtgcagccgaactccggctcccaggccaaccaggcggtgctgatggccttcgccaagcccggcgacaccatcatgggcatgagcctggccgaaggcggccacctcacccacggcatgccgctcaacatgtcgggcaaatggttcaacgtcgtcgcctacggcctcgacgagaaggaagagatcaactacgcggcgatggaagcgctcgcccgcgagcacaagccgaagatcatcatcgccggcgcctccgcctatgccctgcgcatcgacttcgagcgcttcgcgcgcatcgcgcgtgaagtgggcgccatcttctgggtggacatggcccactacgccggcctgatcgccgcgggctactaccccaacccggtgccgcacgccgacgtggtcacctccaccacccacaagaccctgcgcggcccgcgcggcggcatcatcctgatgaaggccgagcacgagaaggcgatcaactccgcgatcttccccggcctgcagggcggcccgctggagcacgtcatcgccgccaaggcggtggccttcaaggaagccgccaccccggcgttccgcgactaccaggaacaggtcatcgccaacgcccgcgtgatggcgcgcgtgctcggcgaagaacgcggcctgcgcatcgtctccggccgcaccgagtcccacgtcttcctggtcgacctgcgctccaagaacatcaccggcaaggaagccgaagccgtgctgggcagcgcccacatcacggtcaacaagaactcgatccccaacgatccgcagaagcccttcgtcacttccggcatccgcatcggttcgccggcgatgaccacccgcggcttcaccgagatcgaagccgagcagatcgcccacctgatcgctgacgtgctcgacgccccgcaggacgcggcggtcctcgaacgcgtgcgcggcaaggtcggcgagctgtgcgccaagttcccggtctacggtagctaa

SEQ ID NO: 79906 - protein, 416 aa, Azoarcus sp. BH72
MFSSQDTLAKVDPELWSAIQAENRRQEDHIELIASENYVSHAVMEAQGSQLTNKYAEGYPGKRYYGGCEHVDVVEQLAIDRLKKLFGADAANVQPNSGSQANQAVLMAFAKPGDTIMGMSLAEGGHLTHGMPLNMSGKWFNVVAYGLDEKEEINYAAMEALAREHKPKIIIAGASAYALRIDFERFARIAREVGAIFWVDMAHYAGLIAAGYYPNPVPHADVVTSTTHKTLRGPRGGIILMKAEHEKAINSAIFPGLQGGPLEHVIAAKAVAFKEAATPAFRDYQEQVIANARVMARVLGEERGLRIVSGRTESHVFLVDLRSKNITGKEAEAVLGSAHITVNKNSIPNDPQKPFVTSGIRIGSPAMTTRGFTEIEAEQIAHLIADVLDAPQDAAVLERVRGKVGELCAKFPVYGS

SEQ ID NO: 79907 - DNA, 1479 bp, Mycobacterium sp. KMS
  CDS (1)..(1479): transl_table=11
atgactgcagactccgtgacctcttcggcggccgctccgggcgccgagtacgccgccaccgcgagcacggcctaccaggccgcgctccaggtcatcgagtccgtcgaaccccggatcgcggcggccacccgcaaagagctggccgatcaacgggattcactcaagctgatcgccagcgagaactacgcctccccggccgtgctgctgaccatgggcacctggctgagtgacaaatacgccgagggcaccatcggccaccggttctacgcgggctgccagaacgtcgacgtcgtcgagagcgtcgccgccgaacacgcccgcgaactgttcggcgcgccctacgcctacgcccagccgcactccggcatcgacgccaacctggtcgccttctgggccatcctggccacccgcgtcgaggcgcccggactggccgaactcggcgccaaacacgtcaacgacctgtccgaggcggactgggagagcctgcgcaacaagctcggcaaccagcggctgctcggcatgtcgctcgacgccggcgggcacctcacccacggcttccgccccaacatcagcggcaagatgttccaccagcgcagctacggcaccgatccggagaccgggctgctcgactacgacaagctcgccgccgccgcccgcgagttcaaaccgctgatcctcgtcggcggctactccgcctacccgcgccgggtgaacttcgccaagctccgcgagatcgccgacgaggtcggcgccaccctgatggtcgacatggcccacttcgccggtctggtcgccggcaaggtcttcaccggtgacgaggatccggtgccgcacgcccacgtcgtcaccaccaccacgcacaaatcgctgcgcggcccgcgcggcggtctggtgctggcccaacccgagtactccgacgccgtcgacaagggctgcccgatggtgctcggcggtccgctctcgcacgtcatggccgccaaggcggtcgcgctcgccgaggcgcgtcagccgtcgttccaggcctacgcccagcgcgtcgccgacaacgccaaatcgctcgccgagggtttcctcaagcggggcgcccggctggtcaccggcggcaccgacaaccacatcgtgctgctcgacgtgacgagcttcggtctgaccggccggcaggccgagtcggcgctgctcgacgccggcgtcgtgaccaaccgcaactcgatcccggccgaccccaacggcgcctggtacaccagcggcatccgattcggcaccccggcactgaccacccgcggcttcggcgccgcggagttcgaccgggtcgccgaactggtcgtcgacgtgctgaacaacacccagcccaattcgaccggacccactgggttctccaaggccaagtacacgctggccgacggcaccgccgaacgcgtccacgcggcgtcggcggagatgctcgacgccaacccgctgtatccgggtctcacgctctga

SEQ ID NO: 79908 - protein, 492 aa, Mycobacterium sp. KMS
MTADSVTSSAAAPGAEYAATASTAYQAALQVIESVEPRIAAATRKELADQRDSLKLIASENYASPAVLLTMGTWLSDKYAEGTIGHRFYAGCQNVDVVESVAAEHARELFGAPYAYAQPHSGIDANLVAFWAILATRVEAPGLAELGAKHVNDLSEADWESLRNKLGNQRLLGMSLDAGGHLTHGFRPNISGKMFHQRSYGTDPETGLLDYDKLAAAAREFKPLILVGGYSAYPRRVNFAKLREIADEVGATLMVDMAHFAGLVAGKVFTGDEDPVPHAHVVTTTTHKSLRGPRGGLVLAQPEYSDAVDKGCPMVLGGPLSHVMAAKAVALAEARQPSFQAYAQRVADNAKSLAEGFLKRGARLVTGGTDNHIVLLDVTSFGLTGRQAESALLDAGVVTNRNSIPADPNGAWYTSGIRFGTPALTTRGFGAAEFDRVAELVVDVLNNTQPNSTGPTGFSKAKYTLADGTAERVHAASAEMLDANPLYPGLTL

SEQ ID NO: 79909 - DNA, 1245 bp, Acidovorax sp. JS42
  CDS (1)..(1245): transl_table=11
atgtaccaacgcaatattcttgtcgaacaaaccgatcccgaggtgtgggccgccatccaggccgaagaccgccgccaggaagagcatatcgagctgatcgccagcgaaaactacgcctcgcccgccgtgatggccgctcagggctcgcagctcaccaacaagtacgccgaaggctaccctggcaagcgctactacggcggctgcgagaacgtggacgtgatcgagcagttggccatcgaccgcatcaagcaactcttcggcgccgaagcggccaatgtgcagcccaactcgggttcgcaggccaaccaggctgtgctgatggccttcctgaagcccggcgacaccattctgggcatgagcctggccgagggcggccacctcacgcacggcatgccgctgaacatgagcggcaagtggttcaacgtagtctcctacggactgaacgacaaggaagagatcgactacgatgcgctggaagccaaggcccgcgagcacaagcccaagctgatcatcgccggcgcctccgcctacgccctgcgcatcgacttcgagcgcttcgcgaagatcgccaaggaagtcggcgccatcttctgggtggacattgcccactatgccggcctggtcgtcgcgggcgagtaccccaacccggtgccgtttgcggacgtggtgacctccaccacgcacaagagcctgcgaggcccacgcggcggcatcattctgatgaaggcggagcacgagaaggccatcaacagcgccatcttccccggcctgcagggcggcccgctggagcacgtcatcgccgccaaggccgtggccttcaaggaagccctgtcgcccgagttcaagcagtatcagcagcaggtgaccaagaacgccaaggtgttcgcggaaacgctgatccagcgcggactgcgcatcgtgagcggtcgcaccgaaagccacgtgatgctggtggaccttcgcgccaagggcatcaccggcaaggaggccgaggcagccctgggcaaggcccatatcacgatcaacaagaacgcgatccccaacgatcccgaaaagccgatggtcaccagcggcattcgcgtgggcacgcccgccatcacgacacggggtttcaaggaagaggaaacgcgcctcacggccaacctggtggccgacgtgctggacaacccgcatgacgaggcgaacctggaagccgtgcgcgccaaggtgcacgcgctgaccagccgcttcccggtctatcgctga

SEQ ID NO: 79910 - protein, 414 aa, Acidovorax sp. JS42
MYQRNILVEQTDPEVWAAIQAEDRRQEEHIELIASENYASPAVMAAQGSQLTNKYAEGYPGKRYYGGCENVDVIEQLAIDRIKQLFGAEAANVQPNSGSQANQAVLMAFLKPGDTILGMSLAEGGHLTHGMPLNMSGKWFNVVSYGLNDKEEIDYDALEAKAREHKPKLIIAGASAYALRIDFERFAKIAKEVGAIFWVDIAHYAGLVVAGEYPNPVPFADVVTSTTHKSLRGPRGGIILMKAEHEKAINSAIFPGLQGGPLEHVIAAKAVAFKEALSPEFKQYQQQVTKNAKVFAETLIQRGLRIVSGRTESHVMLVDLRAKGITGKEAEAALGKAHITINKNAIPNDPEKPMVTSGIRVGTPAITTRGFKEEETRLTANLVADVLDNPHDEANLEAVRAKVHALTSRFPVYR

SEQ ID NO: 79911 - DNA, 1245 bp, Haemophilus somnus 2336
  CDS (1)..(1245): transl_table=11
atgaatattgccgattacgatccggttttatggcaagccattcaagatgaaaatcttcgtcaagaagagcatattgagctaattgcctcagaaaactatgccagcccacgagtaatggaagcacaaggttgtcaattcaccaataaatatgcagaaggctatccgggtaaacgttattatggcggttgtgaatatgcagatattgttgaacaattagcgattgatcgggctaaagcgttgttcggtgcagattatgctaacgttcaaccgcactccggctcacaagcaaatgcggcggtttatatggcattattaaatccgggggacaccattttaggaatgagccttgctcatgggggacatttaactcacggtgcctcggtcagtttctccggtaaaatttataaagcggagcaatacggtattacatccgaaggactgattgactatgatgcgttgcgtaaacaggctcatgaagtgaaaccaaaaatgatcgtcggcggattttctgcctattctcaaatcgttgactgggcaaaaatgcgtgaaattgccgatgaagtaggtgcatatttatttgttgatatggcacatgttgcagggcttattgccgccggtgtatatccaagcccaatgccacatgctcatgtagttaccaccacaacacacaaaaccttagcgggacctcgtggagggttaattcttgccaacggcaatgaagaactttacaaaaaattaaatagtgcggtatttccggcaggacaaggcggaccgttagttcatgttattgcagcgaaagccgtttgttttaaagaagctttggaacctgagttcaaaacttatcaagcacaagtagtaaaaaatgcaaaagctatggtaaaagtttttaaacaacgtggttacaacgttgtctctgacggtacagaaaaccatttattcttagttgatttagtcaatcatggcttaaccggtaaagcggctgatgcggcgttaagtcgtgccaatattactgttaataaaaatgcggttcctaatgatccgcaaaaaccgttcgttacctcaggtattcgtgtgggaacacctgctgtaactcgtcgaggcttcaacgaagaagatgtggcggaacttgccggttggatgtgcgatattttagacagtatgaataaagataaccatgaacaagtcattgctgatactaaagaaaaagtattagcaatttgcaaacgtcttcctgtttatccataa

SEQ ID NO: 79912 - protein, 414 aa, Haemophilus somnus 2336
MNIADYDPVLWQAIQDENLRQEEHIELIASENYASPRVMEAQGCQFTNKYAEGYPGKRYYGGCEYADIVEQLAIDRAKALFGADYANVQPHSGSQANAAVYMALLNPGDTILGMSLAHGGHLTHGASVSFSGKIYKAEQYGITSEGLIDYDALRKQAHEVKPKMIVGGFSAYSQIVDWAKMREIADEVGAYLFVDMAHVAGLIAAGVYPSPMPHAHVVTTTTHKTLAGPRGGLILANGNEELYKKLNSAVFPAGQGGPLVHVIAAKAVCFKEALEPEFKTYQAQVVKNAKAMVKVFKQRGYNVVSDGTENHLFLVDLVNHGLTGKAADAALSRANITVNKNAVPNDPQKPFVTSGIRVGTPAVTRRGFNEEDVAELAGWMCDILDSMNKDNHEQVIADTKEKVLAICKRLPVYP

SEQ ID NO: 79913 - DNA, 1251 bp, Actinobacillus pleuropneumoniae serovar 1 str. 4074
  CDS (1)..(1251): transl_table=11
atgaacattcaagattacgaccctattttatggcaggcgattgaaaacgaaaatcgccgtcaagaagaacatattgagctgattgcttcggaaaactatgcaagccctcgagtgatgcaggcgcaaggttcgcaatttactaataaatatgccgaaggttatccgggaaaacgctattacggcggttgcgaatatgcggatattgtcgagcaattagcgattgatcgtgcgaaacagttattcggtgcagactatgtaaacgtccaaccgcattcaggctcacaagcgaatgcagctgtttacggcgcattaattcaaccgaacgataccattttaggtatggacttagcacatggaggccatttaacgcacggagcaaaagtgagcttctcaggcaaaatttataattctgtcctctacggcatcacagccgaaggcttaattgattatgaagacgtccgtcaaaaagcgcttgagtgtaagccaaaaatgattgttgccggcttttccgcttattcacaaatcgtagattgggcgaaaatgcgtgaaattgccgatgaagtcggtgcttatttattcgtcgatatggcgcacgttgccggtttaattgcggcaggcgtttacccaagcccgcttccttacgctcacgttgttacaaccacaacccataaaactttaggcggtccgcgcggcggtttaattctttccgcttgtggcgatgaagaaatttataaaaaactgcaatcttcggttttcccggcaaaccaaggagggccattagtgcatattattgcggcgaaagcggtttgctttaaagaagcgcttgagcctgaatataaaatctatcaacaaaatgtagttaaaaatgcgaaagcaatggtagaagtattcaaacaacgcagctatgaagtaatttcaaacggtaccgaaaaccacttattcttagtcagctttgtaaaacaaggcttaaccggtaaagcggcagatgcggcgttaggtcaagcgaatatcaccgtaaataaaaattccgtgccgaatgatccgcaaaaaccgtttattacttccggtattcgcatcggtacgcctgccgttactcgtcgcggtttcaaagaagcggacgttcaagcccttgccggctggatgtgcgacgtattggacagcatcggtaaagacaatcacgaacaagtaattgcggaaaccaaagcgaaagtgcttgatatttgcgctcgcttgccggtatatgccaaataa

SEQ ID NO: 79914 - protein, 416 aa, Actinobacillus pleuropneumoniae serovar 1 str. 4074
MNIQDYDPILWQAIENENRRQEEHIELIASENYASPRVMQAQGSQFTNKYAEGYPGKRYYGGCEYADIVEQLAIDRAKQLFGADYVNVQPHSGSQANAAVYGALIQPNDTILGMDLAHGGHLTHGAKVSFSGKIYNSVLYGITAEGLIDYEDVRQKALECKPKMIVAGFSAYSQIVDWAKMREIADEVGAYLFVDMAHVAGLIAAGVYPSPLPYAHVVTTTTHKTLGGPRGGLILSACGDEEIYKKLQSSVFPANQGGPLVHIIAAKAVCFKEALEPEYKIYQQNVVKNAKAMVEVFKQRSYEVISNGTENHLFLVSFVKQGLTGKAADAALGQANITVNKNSVPNDPQKPFITSGIRIGTPAVTRRGFKEADVQALAGWMCDVLDSIGKDNHEQVIAETKAKVLDICARLPVYAK

SEQ ID NO: 79915 - DNA, 1263 bp, Rickettsia sibirica 246
  CDS (1)..(1263): transl_table=11
atgaatatttttaataataatttacacgaaacggataaagagattaatgaaataataaagcatgaaaagctgcgtcaaagtagcgtaatcgcgcttattgcatcagaaaatttcgtaagtcctgctgtgcttgaagctcaaggggcgcttctgactaacaaatatgccgaaggatacccaagtaagcgattctataacggttgcgaggaagtagataaagctgaaaatttagctatagaacgagtaaaaaaactctttaactgcaaatatgcaaatgtccaacctcattcaggatcacaagcaaatcaggctgtatatcttgctttattacagccgggtgatacggttcttggtatgtccttagatagcggcgggcatctaacgcacggtgcagctcctaatatgtctggtaaatggtttaacgccgtttcttatagcgtaaataaagagacttatttaatcgattatgatgagattgaacgcttagcggatttgcataaaccaaaattacttatagccggtttttctgcttatcctcgtaatattgattttgcaaaatttagagaaatcgtggataaagtaggagcttactttatggcagatattgctcatattgcaggacttgttgccacaggtgagcatcaaagccctattccttatgctcacgctgttacctctactactcataaaacacttagaggtccaagaggcggtttaattttatctaacgatgaagcgataggtcacaaaataaattctgcattatttccaggactacaaggtggtccgttaatgcatataatagctgcaaaagccgtagcttttttagaaaatttgcagcctgaatataaaagttatattcagcaggtaataagtaacgctaaagctttagcaagtagcttgcaagaaagaggatatgatatattaacaggtggtaccgataatcatattgttttagtggatttgcgtaaagacggaatcacgggtaagcttgccgcaaattctttggatagagcagggattatgtgtaataagaatgctatcccgtttgatgaaacttcgccttttatcacttcaggtattcgccttggtactcccgcatgtactactagaggctttaaagaaaaggattttgtattagtcggtcatatggtagcagatattttagacggcttaaaaaataatgaagataatagcgctcttgagcagaaagtattaaatgaagtgacaaaattaattgaattatttccgttttatggctaa

SEQ ID NO: 79916 - protein, 420 aa, Rickettsia sibirica 246
MNIFNNNLHETDKEINEIIKHEKLRQSSVIALIASENFVSPAVLEAQGALLTNKYAEGYPSKRFYNGCEEVDKAENLAIERVKKLFNCKYANVQPHSGSQANQAVYLALLQPGDTVLGMSLDSGGHLTHGAAPNMSGKWFNAVSYSVNKETYLIDYDEIERLADLHKPKLLIAGFSAYPRNIDFAKFREIVDKVGAYFMADIAHIAGLVATGEHQSPIPYAHAVTSTTHKTLRGPRGGLILSNDEAIGHKINSALFPGLQGGPLMHIIAAKAVAFLENLQPEYKSYIQQVISNAKALASSLQERGYDILTGGTDNHIVLVDLRKDGITGKLAANSLDRAGIMCNKNAIPFDETSPFITSGIRLGTPACTTRGFKEKDFVLVGHMVADILDGLKNNEDNSALEQKVLNEVTKLIELFPFYG

SEQ ID NO: 79917 - DNA, 1251 bp, Haemophilus influenzae R2846
  CDS (1)..(1251): transl_table=11
atgactatcgctgattacgatccggtattatggcaagcgatccaagatgaaaatcgtcgtcaagaagaacatatcgaactcattgcatctgaaaactatgcgagtccacgtgtgatggaagcgcaaggttcacaattcacgaataaatacgcagaaggctatccaggtaaacgttattacggtggttgtgagtatgcggacattgtggaacagttagcaattgaccgtgcgaaagaattatttggtgcagattatgtgaatgttcaaccgcactctggatcacaagcgaatgctgcggtgtatggtgcattgattaatgcaggcgatactattttaggtatggatttggctcacggtggtcatttaactcacggtgcaaaagtcagtttctctggcaaaatttataactccgtactttatggaattactgcggatggcttaattgattatgaagatgttcgtcaaaaagcattagaatgtaaaccaaaacttatcgttgctggtttctcggcttattcacaagttgtggattgggcgaaaatgcgtgaaatcgcagatgaagtgggtgcatatttatttgtggatatggcgcatgtagcaggattaattgcagcgggtttatatccaaatccacttccgcacgcacatgttgtaaccactactacccacaaaacattaggcggtccgcgtggcggtttaattctttcatcttgtggtgatgaagaaatctacaaaaaattacaatcatctgtatttcctgcaaatcaaggtggtccattagttcatattattgcggcaaaagcagtttgctttaaagaagcattagagcctcaatataaagaataccaagcaaatgtaatcaaaaatgcgaaagcaatggttgaggtatttaaacaacgtggttatgatgttgtgtcaaatggtactgaaaaccacttgttcttagtaagttttattaaacaaggattaacgggtaaagcagcagatgcggcattaggcaaagcaaatattaccgtgaataaaaatgcagtaccaaatgatccgcaaaaaccattcgtcacttctggtatccgtgtaggtacaccatcggtaactcgccgtggttccaatgaaaatgatgtgcgtgaattagctggctggatgtgtgatgttttagatgctttaggcaaagaaaatgaagaacaagtgattgctgaaactaaagaaaaagtattagcaatttgtaaacgtcttccagtttatccgaaataa

SEQ ID NO: 79918 - protein, 416 aa, Haemophilus influenzae R2846
MTIADYDPVLWQAIQDENRRQEEHIELIASENYASPRVMEAQGSQFTNKYAEGYPGKRYYGGCEYADIVEQLAIDRAKELFGADYVNVQPHSGSQANAAVYGALINAGDTILGMDLAHGGHLTHGAKVSFSGKIYNSVLYGITADGLIDYEDVRQKALECKPKLIVAGFSAYSQVVDWAKMREIADEVGAYLFVDMAHVAGLIAAGLYPNPLPHAHVVTTTTHKTLGGPRGGLILSSCGDEEIYKKLQSSVFPANQGGPLVHIIAAKAVCFKEALEPQYKEYQANVIKNAKAMVEVFKQRGYDVVSNGTENHLFLVSFIKQGLTGKAADAALGKANITVNKNAVPNDPQKPFVTSGIRVGTPSVTRRGSNENDVRELAGWMCDVLDALGKENEEQVIAETKEKVLAICKRLPVYPK

SEQ ID NO: 79919 - DNA, 1251 bp, Haemophilus influenzae R2866
  CDS (1)..(1251): transl_table=11
atgactatcgctgattacgatccggtattgtggcaagcgatccaagatgaaaatcgtcgtcaagaagaacatatcgaactcattgcatctgaaaactatgcgagtccgcgtgtgatggaagctcaaggttcacaattcactaataaatacgcagaaggctatccaggtaaacgttattacggtggttgtgagtatgctgacattgtggaacagttagcaattgaccgtgcgaaagaattatttggtgcagattacgtgaatgttcaaccgcactctggatcacaagcgaatgctgcagtgtatggtgcattgattaatgcgggcgatactattttaggtatggatttggctcacggtgggcacttaactcacggtgcaaaagtcagtttctctggcaagatttataactctgtgctttatggaatcactgcggatggcttaattgattatgaagatgttcgtcaaaaagcattagaatgtaaaccaaaacttatcgttgctggtttctcggcttattcacaagttgtggattgggcgaaaatgcgtgaaatcgcagatgaagtgggtgcatatttatttgtggatatggcacacgtagcaggattaattgcagcgggtttatatccaaatccacttccgcacgcacatgttgtaaccactactacccacaaaacattaggcggtccgcgtggcggtttaattctttcatcttgtggtgatgaagaaatctacaaaaaattacaatcatccgtcttccctgcaaatcaaggtggtccattagttcatattattgcggcaaaagcagtttgctttaaagaagcattagagcctcaatataaagcataccaagcaaatgtaatcaaaaatgcgaaagcaatggttgaggtatttaaacaacgtggttatgatgttgtgtcaaatggtactgaaaaccacttgttcttagtaagttttattaaacaaggattaacgggtaaagcagcagatgcggcattaggcaaagcaaatattaccgtgaataaaaatgcagtaccaaacgatccgcaaaaaccatttgtaacttcaggtatccgtgtaggtacaccatctgtgactcgtcgtggtttcaatgaaaatgatgtgcgtgaattagctggctggatgtgtgatgttttagatgctttaggcaaagaaaatgaagaacaagtgattgctgaaactaaagaaaaagtattagcaatttgtaaacgtcttccagtttatccgaaatga

SEQ ID NO: 79920 - protein, 416 aa, Haemophilus influenzae R2866
MTIADYDPVLWQAIQDENRRQEEHIELIASENYASPRVMEAQGSQFTNKYAEGYPGKRYYGGCEYADIVEQLAIDRAKELFGADYVNVQPHSGSQANAAVYGALINAGDTILGMDLAHGGHLTHGAKVSFSGKIYNSVLYGITADGLIDYEDVRQKALECKPKLIVAGFSAYSQVVDWAKMREIADEVGAYLFVDMAHVAGLIAAGLYPNPLPHAHVVTTTTHKTLGGPRGGLILSSCGDEEIYKKLQSSVFPANQGGPLVHIIAAKAVCFKEALEPQYKAYQANVIKNAKAMVEVFKQRGYDVVSNGTENHLFLVSFIKQGLTGKAADAALGKANITVNKNAVPNDPQKPFVTSGIRVGTPSVTRRGFNENDVRELAGWMCDVLDALGKENEEQVIAETKEKVLAICKRLPVYPK

SEQ ID NO: 79921 - DNA, 1242 bp, Listeria monocytogenes str. 1/2a F6854
  CDS (1)..(1242): transl_table=11
atggtctatttacaaaagcaagataaggaagtttttgatgcaattaagttagaacttggtagacaacgcgcgaatatcgaattaatcgcatctgagaattttgttagtgagcaagtaatggaagcaatgggttctgtattaacgaataaatatgcagaaggttacccaggaaaacgctattacggcggatgtgaattcgtggatatcgtggaagatttagcacgcgaccgcgcgaaaaaattatttggagctgaatatgcgaacgttcaaccacactcaggtgctcaagcgaatatggcggtttatcatacagtgcttgaaccaggcgataccgttcttggtatgaacctttcacatggtgggcatttaacacatggtagcccagttaattttagcggcattttatacaattttgttgaatacggcgttcgtgaagatacaaaagagattgattatgatatcgtccgtgaagctgctttaaaacataaaccaaaaatgattgtagctggcgcaagtgcttatccacgtaaaattgattttgctaaattccgtgaaattgctgatgaagttggcgcatacttaatggtagatatggcgcatatcgccggtcttgttgctgctggtttacaccaaaatccagttccttatgctgattttacaacgacaactacccataaaacgcttcgtggacctcgcggtggaatgattttagccaaagcagaatgggaacaaaaattaaataaatcgattttcccaggaattcaaggtggaccattaatgcacgtaatcgcagcgaaagcagtggcgtttggtgaagcgttacaacctgaattcacaacgtattgcgagcaaattattcgtaattctaagaaattagcagaaactcttcaagcgaatgatgttgctgttttaacaggtggttcggataatcatttattattaattgatttaaaaccacttggcttaacaggaaaagcagctgaaaaagtattagatgaagttggtattaccgtgaataaaaataccattccattcgaaacggaaagcccatttgtaacaagtggtattcgtgtaggtgttgctgcagtgacgactcgtggattcgatgaagttgcgattgaaaaagtcggcgtacttatttcggaagtactgcataacttagaaaatgaagaagttctcgcagatgtaaaagcacgcgtggctactttaacaaatgaatatccgctttatccaagtttataa

SEQ ID NO: 79922 - protein, 413 aa, Listeria monocytogenes str. 1/2a F6854
MVYLQKQDKEVFDAIKLELGRQRANIELIASENFVSEQVMEAMGSVLTNKYAEGYPGKRYYGGCEFVDIVEDLARDRAKKLFGAEYANVQPHSGAQANMAVYHTVLEPGDTVLGMNLSHGGHLTHGSPVNFSGILYNFVEYGVREDTKEIDYDIVREAALKHKPKMIVAGASAYPRKIDFAKFREIADEVGAYLMVDMAHIAGLVAAGLHQNPVPYADFTTTTTHKTLRGPRGGMILAKAEWEQKLNKSIFPGIQGGPLMHVIAAKAVAFGEALQPEFTTYCEQIIRNSKKLAETLQANDVAVLTGGSDNHLLLIDLKPLGLTGKAAEKVLDEVGITVNKNTIPFETESPFVTSGIRVGVAAVTTRGFDEVAIEKVGVLISEVLHNLENEEVLADVKARVATLTNEYPLYPSL

SEQ ID NO: 79923 - DNA, 1263 bp, Rickettsia akari str. Hartford
  CDS (1)..(1263): transl_table=11
atgaatatttttaataataatttgcatgaaacggataaagaaattaatgaaataataaaacatgaaaagttacgtcaaagtagcgtaatcgagcttattgcatcagagaatttcgtaagtcccgcagtacttgaagctcaagggtcgattctgactaataaatatgcagaagggtattccggtaaacgtttttataacggttgtgaggaagtagataaagctgaaaatttagctatagagagagtaaaaaaattatttaactgcaaatatgcaaatgtgcaacctcattcaggctcacaagcaaatcaagctgtatatcttactttattacagccgggcgatacaattcttggtatgtcattagatagcggtgggcatctaacgcacggtgcatcccctaatatgtccggtaaatggtttaacgccgtttcttatggcgtaaataaaaaaacttatttaatcgattatgatgagattgagaggttagcagttttacataagccaaaactacttatagctggcttttctgcttatcctcgtaatattgattttacaagatttagagaaattgcggataaagtcggagcatatttcatggcagatattgctcatattgcagggcttgttgccacaggtgagcatcaaagccctatttcttatgctcatgttgttacctccactactcacaaaacgcttaggggaccaaggggtggtttagtcttatctgacgatgaagagataggcaaaaaaataaattctgcattatttccaggattacaaggtggtccgttaatgcatatagtcgccgcaaaagcagtagcttttttagaaagcttgcagcctgaatataaaagctatattaagcagataataagtaacgctaaagctttagcaagtagcttgcaagaaagaggatatgatatattaacaggcggaacagataatcatattgttttagtggatttgcgtaaaaacggaattaccggaaagcttgctgctaattctttagataacgcagggattacatgtaataagaatgctatcccgtttgatgaaacttcgccttttatcacttcaggtattcgccttggtactcccgcatgtactactagaggctttaaagaacaggatttcgtatcagtcggtcatatggtagcagatattttagatggtctaaagaataataaagataatactaaagctgaacagcaagtgctacataaagtaacaaaactaattaaattatttccgttttatgactaa

SEQ ID NO: 79924 - protein, 420 aa, Rickettsia akari str. Hartford
MNIFNNNLHETDKEINEIIKHEKLRQSSVIELIASENFVSPAVLEAQGSILTNKYAEGYSGKRFYNGCEEVDKAENLAIERVKKLFNCKYANVQPHSGSQANQAVYLTLLQPGDTILGMSLDSGGHLTHGASPNMSGKWFNAVSYGVNKKTYLIDYDEIERLAVLHKPKLLIAGFSAYPRNIDFTRFREIADKVGAYFMADIAHIAGLVATGEHQSPISYAHVVTSTTHKTLRGPRGGLVLSDDEEIGKKINSALFPGLQGGPLMHIVAAKAVAFLESLQPEYKSYIKQIISNAKALASSLQERGYDILTGGTDNHIVLVDLRKNGITGKLAANSLDNAGITCNKNAIPFDETSPFITSGIRLGTPACTTRGFKEQDFVSVGHMVADILDGLKNNKDNTKAEQQVLHKVTKLIKLFPFYD

SEQ ID NO: 79925 - DNA, 1263 bp, Rickettsia rickettsii
  CDS (1)..(1263): transl_table=11
atgaatatttttaataataatttacacgaaacggataaagagattaatgaaataataaagcatgaaaagctacgtcaaagtagtgtaatcgagcttattgcatcagaaaatttcgtaagtcctgctgtgcttgaagctcaaggggcgcttctgactaacaaatatgccgaaggatacccaagtaagcgattctataacggttgcgaggaagtagataaagctgaaaatttagctatagaacgagtaaaaaaactctttaactgcaaatatgcaaatgtccaacctcattcaggatcacaagcaaatcaggctgtatatcttgctttattacagccgggtgatacggttcttggtatgtccttagatagcggcgggcatctaactcacggtgcagcgcctaatatgtctggtaaatggtttaacgccgtttcttatagcgtaaataaagagacttatttaatcgattatgatgagattgaacgcttagcggatttgcataaaccaaaattacttatagccggtttttctgcttatcctcgtaatattgattttgcaaaatttagagaaatcgtggataaagtaggagcttactttatggcagatattgctcatattgcaggacttgttgccacaggtgagcatcaaagccctattccttatgctcacgctgttacctctactactcataaaacacttagaggtccaagaggtggtttaattttatctaacgatgaagagataggtcacaaaataaattctgcattatttccaggactacaaggtggtccgttaatgcatataatagctgcaaaagccgtagcttttttagaaaatttgcagcctgaatataaaagttatattcagcaggtaataagtaacgctaaagctttagcaagtagcttgcaagaaagaggatatgatatattaacaggtggtaccgataatcatattgttttagtggatttgcgtaaagacggaatcactggtaagcttgccgcaaattctttggatagagcagggattacgtgtaataagaatgctatcccgtttgatgaaacttcgccttttatcacttcaggcattcgccttggtactcccgcatgtactactagaggctttaaagaaaaggattttgtattagtcggtcatatggtagcagatattttagacggcttaaaaaataatgaagataatagcgctcttgagcagcaagtattaaatgaagtgacaaaattaattgaattatttccgttttatggctaa

SEQ ID NO: 79926 - protein, 420 aa, Rickettsia rickettsii
MNIFNNNLHETDKEINEIIKHEKLRQSSVIELIASENFVSPAVLEAQGALLTNKYAEGYPSKRFYNGCEEVDKAENLAIERVKKLFNCKYANVQPHSGSQANQAVYLALLQPGDTVLGMSLDSGGHLTHGAAPNMSGKWFNAVSYSVNKETYLIDYDEIERLADLHKPKLLIAGFSAYPRNIDFAKFREIVDKVGAYFMADIAHIAGLVATGEHQSPIPYAHAVTSTTHKTLRGPRGGLILSNDEEIGHKINSALFPGLQGGPLMHIIAAKAVAFLENLQPEYKSYIQQVISNAKALASSLQERGYDILTGGTDNHIVLVDLRKDGITGKLAANSLDRAGITCNKNAIPFDETSPFITSGIRLGTPACTTRGFKEKDFVLVGHMVADILDGLKNNEDNSALEQQVLNEVTKLIELFPFYG

SEQ ID NO: 79927 - DNA, 1284 bp, Crocosphaera watsonii WH 8501
  CDS (1)..(1284): transl_table=11
gtgactgataccaacctagattttttagcccagaccgatccaacccttgctgctatgatacaaggggaattacaacggcaacgggaacatttagaattaatcgccagtgaaaatttcacctctgcggccgtcttagctgctcaaggttcggtgttaaccaacaaatatgcagaaggattacccaagaaacgctactatggtggttgtgaatgggttgatcaagcagagcaattagccatcgatcgcgtcaaagaattatttggagcagcacacgcgaatgtacaaccccattcaggggcccaagccaattttgctgttttcttgaccctcctcaaaccgggggataagattatgggcatggatctctcccacggtggccatttaacccacggctcccctgtcaacgtttcggggaaatggtttgaagtatgccattatggggtgagtgctgagacagaaagattagactacgacgctattttagaactagctaagaaagaaaaacccaaattattgatttgtgggttctctgcttatcccagaattattgagtttgataagtttcgggccatcgccgatgaagtgggagcctatctcatggcagatatcgctcacatcgccggtttagtggccagtggtcatcatcctaaccctttaccctattgtgatgtggtaaccaccactacacacaaaaccttacggggtcccagaggtggtttaattatgaccaatgaccctgagttgggcaaaaagtttgataagtccgtttttcctggcactcaagggggtccattggaacaggtaattgcagctaaagcagtggcctttggagaagcccttaagcctgagtttaaggtgtattctggagaggtaattgcgaatgctcaatccctagctaatcaattgacccaacgaggctttaagctggtttctggtggcacggataaccatttgatgttagtggatctgcgctgcattgacatgactggaaaggaagcagataagttagtgagtgaaatcaatattacagctaataagaatacggttcctttcgatccagagtctccctttgtcaccagtggtctccggttgggatctcctgccatgactaccagagggttaggggtagatgattttgccgaaattggtaacattattgctgattgtttactcaatcgtaacgatgaaggggttaagcaagattgtttaaaccgagtcaaggctttatgcgatcgctttcctctctatcctcatctcaacattcctgtccccgttttagcctag

SEQ ID NO: 79928 - protein, 427 aa, Crocosphaera watsonii WH 8501
MTDTNLDFLAQTDPTLAAMIQGELQRQREHLELIASENFTSAAVLAAQGSVLTNKYAEGLPKKRYYGGCEWVDQAEQLAIDRVKELFGAAHANVQPHSGAQANFAVFLTLLKPGDKIMGMDLSHGGHLTHGSPVNVSGKWFEVCHYGVSAETERLDYDAILELAKKEKPKLLICGFSAYPRIIEFDKFRAIADEVGAYLMADIAHIAGLVASGHHPNPLPYCDVVTTTTHKTLRGPRGGLIMTNDPELGKKFDKSVFPGTQGGPLEQVIAAKAVAFGEALKPEFKVYSGEVIANAQSLANQLTQRGFKLVSGGTDNHLMLVDLRCIDMTGKEADKLVSEINITANKNTVPFDPESPFVTSGLRLGSPAMTTRGLGVDDFAEIGNIIADCLLNRNDEGVKQDCLNRVKALCDRFPLYPHLNIPVPVLA

SEQ ID NO: 79929 - DNA, 1278 bp, Exiguobacterium sibiricum 255-15
  CDS (1)..(1278): transl_table=11
atgaatgggggaattcagatggaacaaacaccactaacgtatctgaaacagcaagatgaggaactcttttcggctatgcgcaaggaactaaaacgtcaacgcgataacatcgagttgattgcgtcagaaaactttgtctcacaagcggtcatggaagctcaaggcagcgtgctgacgaacaaatacgctgaaggttacccgggtcgtcgttattacggcggttgtgagttcgtcgatttagcggaaaacttggcacgtgatcgtgcgaaggccatctttggagcagaacacgttaatgttcagccgcactcaggtgcccaggccaacatggccgtctacttcacaattctcaatcaaggcgacacggtcctcgggatgaacctctcccatggtggtcacctgacacacggcagtcctgtgaatttctccggtgttcaatacaacttcgtcgagtacggcgtcgatccagaaacagagatgatcgattacgatgtcgtcgcgaagcttgcggaagaacacaaaccaaaactgatcgttgcgggagcatcggcttatccgcgcgtgattgacttcaaacgattccgtgaaatcgcggacagtgtcggtgcctacttgatggtcgacatggcccacatcgcgggactcgttgcagcaggtctgcatccgaacccggtcgaacatgcccacttcgtcacgacgacgacgcacaagacgcttcgtggaccgcgcggtggaatgattctttgtaaagaagagcatgccaaagcgatcgataaatcgatcttcccgggtattcaaggcggaccgcttatgcacgtcatcgcagcgaaagccgttgcctttgcggaagcattagcacctgaattcaaggattacatcgagcaagtcgtagcgaatgcgaaagtcctcggtgaagaattgacggcacgcggactgcggattgtctccggcggtaccgacaaccacttgctgctcgtcgacctgcagccgctcggcatcacaggaaaactggcagagcatgcactggacgaagccggtatcacggtcaacaaaaacacgattccatttgatccggcaagtccgttcgtcacgagtggaatccggatcggaacagcggcgatgacatcacgcggtttcaaagaagcagaaatgaaacaaatcgcggaactgatcgaactcgttctgaaaaatccggaagatcaagaaacactgacaagtgcccataagcaagttctcgctttgacaggccgtttcccgctttacccggaacgcggttaa

SEQ ID NO: 79930 - protein, 425 aa, Exiguobacterium sibiricum 255-15
MNGGIQMEQTPLTYLKQQDEELFSAMRKELKRQRDNIELIASENFVSQAVMEAQGSVLTNKYAEGYPGRRYYGGCEFVDLAENLARDRAKAIFGAEHVNVQPHSGAQANMAVYFTILNQGDTVLGMNLSHGGHLTHGSPVNFSGVQYNFVEYGVDPETEMIDYDVVAKLAEEHKPKLIVAGASAYPRVIDFKRFREIADSVGAYLMVDMAHIAGLVAAGLHPNPVEHAHFVTTTTHKTLRGPRGGMILCKEEHAKAIDKSIFPGIQGGPLMHVIAAKAVAFAEALAPEFKDYIEQVVANAKVLGEELTARGLRIVSGGTDNHLLLVDLQPLGITGKLAEHALDEAGITVNKNTIPFDPASPFVTSGIRIGTAAMTSRGFKEAEMKQIAELIELVLKNPEDQETLTSAHKQVLALTGRFPLYPERG

SEQ ID NO: 79931 - DNA, 1323 bp, Prosthecochloris aestuarii DSM 271
  CDS (1)..(1323): transl_table=11
atgagtatagagatccttcagaaacaggataaggagattttcgacgctatatcgaacgaagttcttcgccagaccgaaacgcttgagcttatagcttcggaaaactttgccagcaaggcggttatggaagcctgcgggtccgtgatgaccaacaaatacgcagagggttatcccggaaagcgctattacggcggctgcgagtttgtcgatgttgccgaagaccttgccagagagcgtgcgaaaaaactctttggctgtcagtatgtcaatgttcagcctcattcgggttcaagcgcaaatatgggcgtgcttttttctgtgctgaaacccggggatacaatcatgggcctcgatctttctcacggcggccatttgacccacggtagttcggtgaacttttccggtcagctttttgatgcacactcttacggtgttgatcgtgagacaggactcattgatatggacagggttgaggatatggctctttcggtccgcccgaggctgattatctgcggagcaagcgcttactctcagggatttgatttcaaggcgttccgccagatcgcagacaaagtcggcgcgtttcttatggccgatatcgctcatccggcaggtcttatcgctgcaggtcttctcaacgatcccatgcctcattgccattttgtgacgacgacgacccacaagacgctcagaggtcctcgcggcggcatgatcatgatgggagaggatttcgaaaatcccatggggatcacgatcaagactaaagcgggtcgtaggaccaagatgatgtctgaagttatcgatgccgagatcatgcccggtatccagggtggtccgcttatgcacatcatcgcggcaaaggctgtcgcttttggagaggcgctccagccggagttcaaagaatatgctgttcaggtccgtgcaaatgcagccgcgatggcacagaaatttatcagtctcgattacaatatcgtcagcggaggtacgaaaaatcatctgatgcttatcgatctccgcaataagaatgtcacgggcaaggtagccgaaaaccttctgcatgaggccggtattaccgtcaacaaaaatatggttccgttcgatgacaaatctccttttgtgaccagcggcatccgcatcggcactccggcaatgacgaccagaggtatgacggagtctcatgccgaagccattgtttcgctgatcgaccgtgttatcggagctgccggcagtcctgatgccgggaccgtctgtggtgaagtccgttcggagattaaagccatgtgcggaactctccctctcaatgatttcagcccgactctctga

SEQ ID NO: 79932 - protein, 440 aa, Prosthecochloris aestuarii DSM 271
MSIEILQKQDKEIFDAISNEVLRQTETLELIASENFASKAVMEACGSVMTNKYAEGYPGKRYYGGCEFVDVAEDLARERAKKLFGCQYVNVQPHSGSSANMGVLFSVLKPGDTIMGLDLSHGGHLTHGSSVNFSGQLFDAHSYGVDRETGLIDMDRVEDMALSVRPRLIICGASAYSQGFDFKAFRQIADKVGAFLMADIAHPAGLIAAGLLNDPMPHCHFVTTTTHKTLRGPRGGMIMMGEDFENPMGITIKTKAGRRTKMMSEVIDAEIMPGIQGGPLMHIIAAKAVAFGEALQPEFKEYAVQVRANAAAMAQKFISLDYNIVSGGTKNHLMLIDLRNKNVTGKVAENLLHEAGITVNKNMVPFDDKSPFVTSGIRIGTPAMTTRGMTESHAEAIVSLIDRVIGAAGSPDAGTVCGEVRSEIKAMCGTLPLNDFSPTL

SEQ ID NO: 79933 - DNA, 1305 bp, Kineococcus radiotolerans SRS30216
  CDS (1)..(1305): transl_table=11
gtgaccgacgtcctgcccaccacccccaccgcctccggcgtgaccgaccgcccgctgtccgaggtcgaccccgagatcgcggccgtgctcgacgccgagctcgggcgtcagcgcgacaccctcgagatgatcgccagcgagaacttcgccccgcgctccgtgctggaggcccagggctccgtcctcaccaacaagtacgccgagggctacccgggcaagcgctactacggcggctgcgagcacgtcgacgtcgccgaggagctggcccgcacccgggccaaggagctcttcggcgccgagcacgccaacgtccagccgcactccggcgccagcgccaacgcggccgccatgcacgccttcatccgcggcggcgacggcatcctcggcctggagctcgcccacggcggccacctcacccacggcatgaagatcaacttctcggggcgcatgtacgacgtgtcgtcctacggggtggacccgcagacgttccgcgtcgacatggacgtcgtgcgcgccgtcgcgctggagtcgcgccccaagctcatcatcgccggctggtcggcctacccccgccagctcgacttcgccgccttccgctccatcgccgacgaggtcggggcgcacctcatggtcgacatggcccacttcgccgggctcgtcgccgccgggctgcacccctcgcccgtcccgcacgcccacgtcgtcacctcgacggtccacaagaccctcgccggcccccgctccgggctcatcctcacccggcaggagttcgcgaagaagatcgactccgcggtcttcccgggccagcagggtggcccgctcatgcacgtcgtcgcggccaaggccgtcgccttcaaggtcgccggctccgaggagttcgccgagcgccagcgccgcaccctcgagggcgcgaagatcgtcgccgagcgcctcaccgcacccgacgtcgccgaggccggggtgtccgtcctcaccggcggcaccgacgtccacctcgtgctcgtggacctgcgcgactccaagctcgacggccagcaggccgaggaccgcctccacgaggtcggcatcaccgtgaaccgcaacgccgtccccttcgacccccgcccgccgatggtcacctccgggctgcgcatcggcaccccggcgctggcgacgcgcggtttcggcgcggccgagttcaccgaggtcgccgacgtcatcgccctggccctgaagccggagttcgacgccgacgcgctgcgcgcgcgcgtcgcgaagctgacggcggagttcccgctgtacccgtccgcggggtcgttcgcgtga

SEQ ID NO: 79934 - protein, 434 aa, Kineococcus radiotolerans SRS30216
MTDVLPTTPTASGVTDRPLSEVDPEIAAVLDAELGRQRDTLEMIASENFAPRSVLEAQGSVLTNKYAEGYPGKRYYGGCEHVDVAEELARTRAKELFGAEHANVQPHSGASANAAAMHAFIRGGDGILGLELAHGGHLTHGMKINFSGRMYDVSSYGVDPQTFRVDMDVVRAVALESRPKLIIAGWSAYPRQLDFAAFRSIADEVGAHLMVDMAHFAGLVAAGLHPSPVPHAHVVTSTVHKTLAGPRSGLILTRQEFAKKIDSAVFPGQQGGPLMHVVAAKAVAFKVAGSEEFAERQRRTLEGAKIVAERLTAPDVAEAGVSVLTGGTDVHLVLVDLRDSKLDGQQAEDRLHEVGITVNRNAVPFDPRPPMVTSGLRIGTPALATRGFGAAEFTEVADVIALALKPEFDADALRARVAKLTAEFPLYPSAGSFA

SEQ ID NO: 79935 - DNA, 1293 bp, Xylella fastidiosa Dixon
  CDS (1)..(1293): transl_table=11
atgctgattgcatcccctgtgtttttttccggagttgccatgttcccgcgtgatgctcgtcttgatatgtacgatcccgagttggctaaggccatcgctgctgaagtgaggcgtcaggaggatcacgttgagttgattgccagtgaaaattattgcagtacgttggtgatgcaggtgcaggggagtcaactgactaataagtatgctgaagggtattctggaaagcgttactacggtggttgtgagtatgtcgatatcgctgagcaattggcgattgagcgtgccaaacaactgtttggtgccgactatgccaatgtgcagccccatagcggttcacaagccaatcaagcggtgtactttgccttgttgcagccaggcgatacgatcctcgggatgagcttggcgcatggcggccacttgactcatggcgccaatgtcaatgtgtctggcaagttgttcaatgcggttcagtacggagtgaatgctcaagggttgattgattacgaggctgttgaatcgcttgcgttagagcatcggccgaagatggttgtggcgggcttttcggcgtattcgcagaaaatcgattgggtgcgcttccgtgccattgctgatcaggtgggcgcttacttgcttgtggatatggcacatgtggctggcttggtggcggctggtgtctatccgaatccgctgccgcatgcgcatgttgtgacttcgacgacgcataagacactgcgcggcccacgtggcggcattattgtggcgcaggctccgcaggaggcgttggttaagaagttgcagtcgatagtgtttcctgggatccagggtggtccattgatgcatgtgatcgcggctaaagcggttgcttttaaggaggcgctggagcctgcgtttaaggtgtatcagcagcaggtggtgaagaatgcgaaggcgatggctgagaccctcatgttacgtggctataagattgtctctggtggtacagaaaatcatttgatgctggttgacatgatcggcagggatgtttccgggagggatgctgagggtgcactgggtcaggctcatatcaccgtcaataagaatgccgtgccagatgatccgcgctctccgttcgtaacctccgggttacgcttggggactccggcagtcacgacgcggggttaccaggaacaggattgtgtggacttagcgcactggattgctgatgtgcttgacgcgcctgcggatgcgacggtcattgccgcagtccgtgagaaggttgcggcgcagtgcaagaagtatcctgtgtatcgctga

SEQ ID NO: 79936 - protein, 430 aa, Xylella fastidiosa Dixon
MLIASPVFFSGVAMFPRDARLDMYDPELAKAIAAEVRRQEDHVELIASENYCSTLVMQVQGSQLTNKYAEGYSGKRYYGGCEYVDIAEQLAIERAKQLFGADYANVQPHSGSQANQAVYFALLQPGDTILGMSLAHGGHLTHGANVNVSGKLFNAVQYGVNAQGLIDYEAVESLALEHRPKMVVAGFSAYSQKIDWVRFRAIADQVGAYLLVDMAHVAGLVAAGVYPNPLPHAHVVTSTTHKTLRGPRGGIIVAQAPQEALVKKLQSIVFPGIQGGPLMHVIAAKAVAFKEALEPAFKVYQQQVVKNAKAMAETLMLRGYKIVSGGTENHLMLVDMIGRDVSGRDAEGALGQAHITVNKNAVPDDPRSPFVTSGLRLGTPAVTTRGYQEQDCVDLAHWIADVLDAPADATVIAAVREKVAAQCKKYPVYR

SEQ ID NO: 79937 - DNA, 1293 bp, Xylella fastidiosa Ann-1
  CDS (1)..(1293): transl_table=11
atgctgattgcatcccctgtgtttttttccggagttgccatgttcccgcgtgatgctcgtcttgatatgtacgatcccgagttggctaaggccatcgctgctgaagtgaggcgtcaggaggatcacgttgagttgattgccagtgaaaattattgcagtacgttggtgatgcaggtgcaggggagtcaactgactaataagtatgctgaagggtattgtggaaagcgttactacggtggttgtgagtatgtcgatatcgctgagcaattggcgattgagcgtgccaaacaactgtttggtgccgactatgccaatgtgcagccccatagcggttcacaagccaatcaagcggtgtactttgccttgttgcagccaggcgatacgatcctcgggatgagcttggcgcatggcggccacttgactcacggcgccaatgtcaatgtgtctggcaagttgttcaatgcggttcagtacggagtgaatgctcaagggttgattgattacgaggctgttgaatcgcttgcgttagagcatcggccgaagatggttgtggcgggcttttcggcgtattcgcagaaaatcgattgggcgcgcttccgtgccattgctgatcaggtgggcgcttacttgctagttgatatggcacatgttgctggcttggtggcggctggtgtctatccgaatccgctgccgcatgcgcatgttgtgacttcgacgacgcataagacactgcgcggcccacgtggcggcattattgttgcgcaggctccgcaggaggcgttggttaagaagttgcagtcgatagtgtttcctgggatccagggtggtccattgatgcatgtgatcgcggctaaagcggttgcttttaaggaggcgctggagcctgcgtttaaggtgtatcagcagcaggtggtgaagaatgcgaaggcgatggctgggaccctcatgttacgcggctataagattgtctctggtggtacagaaaatcatttgatgttggttgacatgatcggtagggatgtctctgggaaggacgctgagggcgcattgggtcaggctcatatcactgtcaataagaatgcggtaccggatgatccgcgctctccgttcgtaacctccgggttacgcttggggactccagcagtcacgacacggggttaccaggagcaggattgtgtggacttagcgcactggattgctgatgtgcttgacgcgcctgcagatgtgacggtcattgccgcagtccgtgagaaggttgcggcgcagtgcaagaagtatcctgtgtatcgctga

SEQ ID NO: 79938 - protein, 430 aa, Xylella fastidiosa Ann-1
MLIASPVFFSGVAMFPRDARLDMYDPELAKAIAAEVRRQEDHVELIASENYCSTLVMQVQGSQLTNKYAEGYCGKRYYGGCEYVDIAEQLAIERAKQLFGADYANVQPHSGSQANQAVYFALLQPGDTILGMSLAHGGHLTHGANVNVSGKLFNAVQYGVNAQGLIDYEAVESLALEHRPKMVVAGFSAYSQKIDWARFRAIADQVGAYLLVDMAHVAGLVAAGVYPNPLPHAHVVTSTTHKTLRGPRGGIIVAQAPQEALVKKLQSIVFPGIQGGPLMHVIAAKAVAFKEALEPAFKVYQQQVVKNAKAMAGTLMLRGYKIVSGGTENHLMLVDMIGRDVSGKDAEGALGQAHITVNKNAVPDDPRSPFVTSGLRLGTPAVTTRGYQEQDCVDLAHWIADVLDAPADVTVIAAVREKVAAQCKKYPVYR

SEQ ID NO: 79939 - DNA, 1260 bp, Streptococcus suis 89/1591
  CDS (1)..(1260): transl_table=11
atgatttttgacaaagttaactacaaagaatttgataaagaagtttgggaagctatccaagctgaagaaaaacgccaacaaaataatatcgaattgattgcgtctgaaaacgttgtttctaaagctgttatggcagctcaaggttctattttgaccaataaatacgcagaaggttacccaggtcgtcgttactatggcggtacggaatgcgttgacgtagttgaaagtttagctattgaacgtgctaaagaaatattcggtgcgaaatttgctaacgttcagccacactcaggaagccaggccaattgtgctgcctacatggccttgattgagccaggagacactgttatggggatggacttagctgcaggtggtcacttgactcacggtgcatcagttagcttctcaggacaaacttacaactttgtagcttacaatgttgacgaagaaactggcttgcttgattacgatgcaattttaaaacaagcaaaagaagtacagccaaaattgattgtagcaggtgcttcagcctatgcacgtacaattgactttgctaaattccgcgaaattgcagatgcagtgggtgccaaactgatggtggatatggctcatattgctggtcttgtagcagcaggtcttcatccgaacccagtgccacatgcccatattacaacaactacgactcataaaactcttcgtgggccacgtggtggtttaattttgaccaatgatgaagagcttatcaagaaaatcaactcagccatcttcccaggcatccaaggtggtccattagagcatgttattgctgcaaaagccgtatctttcaaagaagttttggacccagatttcaaagactatgctcaaaaagtgattgaaaacagcaaggccatggctgaggtcttccttgcaaaccctaactttaaagtcatcacaggaggaacagacaaccatctcttcctcgttgacgtgaccaaagttgttgaaaatggtaaagttgctcagcatctcttggatgaagtaaatattactctcaataaaaactcaattccttacgaaaaactctcaccattcaaaacaagcggtatccgtattggctctgcggccattactgctcgcggttttggagtagaggaagctcgcaaagttgcacaactaactatcaaagcacttgaaaatgcagaaaatgaaaaagctcttgaggaagtccgtcaagaagtgcgtgctttgacagatcaattcccactttacgaaggtttataa

SEQ ID NO: 79940 - protein, 419 aa, Streptococcus suis 89/1591
MIFDKVNYKEFDKEVWEAIQAEEKRQQNNIELIASENVVSKAVMAAQGSILTNKYAEGYPGRRYYGGTECVDVVESLAIERAKEIFGAKFANVQPHSGSQANCAAYMALIEPGDTVMGMDLAAGGHLTHGASVSFSGQTYNFVAYNVDEETGLLDYDAILKQAKEVQPKLIVAGASAYARTIDFAKFREIADAVGAKLMVDMAHIAGLVAAGLHPNPVPHAHITTTTTHKTLRGPRGGLILTNDEELIKKINSAIFPGIQGGPLEHVIAAKAVSFKEVLDPDFKDYAQKVIENSKAMAEVFLANPNFKVITGGTDNHLFLVDVTKVVENGKVAQHLLDEVNITLNKNSIPYEKLSPFKTSGIRIGSAAITARGFGVEEARKVAQLTIKALENAENEKALEEVRQEVRALTDQFPLYEGL

SEQ ID NO: 79941 - DNA, 1320 bp, Croceibacter atlanticus HTCC2559
  CDS (1)..(1320): transl_table=11
ttgctttttgttatttttgggctttcaattaaagatttacctcctatgcaacgtgatactgaaatattcgatttaatttctaaagaaaaagaacgccaaacaaatggtttagagcttatagcaagtgaaaattttgttagtgaccaagttatggaagctgttgggtctgtacttacaaataaatatgccgaaggttatcctggtaagcgttactatggtggttgtgaagttgtagatgttgtcgagcaaattgcaatagatagagcaaaggaactttttggagcttcttgggcaaacgtacaacctcattctggatctcaagctaacactgcagtttttgcagcttgcttaaatgcaggtgacaaatttttaggttttgatttatctcatggcggtcacctaacccatggttctccagtaaacttctctggtaaattatacaatcctgttcattatggtgtagaacgtgaaacaggacgattagattatgataatattcagaaaattgcagagcgcgaacagcctaagcttatcattgcaggagcttctgcctattcaagagagatagattataagcgttttagagaaattgcagatagcgtaggcgcacttttaatggcagatattgcgcatcctgctggtttaattgcaaagggcttactatctgatcctattcctcactgtcacgtttgtacaacaactactcataaaacattacgcggtcctcgtggtggtatgattttaatgggtgaagattttgataatccatttggattaacatttaagagtggcaaacctaaaaagatgtcttctttatttgatagcggcattttccctggaaaccaaggtggacctttagagcacgtaattgcaggaaaggctattgcttttggtgaagcgcttacagatgaatttttacattatatggttcaggttaagaagaatgctcacgttatggcagaagcttttgttgaaagaggttatgatgtgatttctggcggaacagacaaccacatgatgcttattgaccttagaaataaaaatgtaacaggtaaacttgctgaagaaactttaggtaaagcagaaattactgtaaataaaaatatggttccttttgatactgagtcgccatttgtaacatcaggaatacgtattggtactgctgcggttactactcgaggtttggttgaagatgatatgaaaactattgtagagtatattgaccgtgtaattaataatattgaaaatgatagtgagttagatgctgttaaaaatagcattcatgatatgatgaacggcaaacctttatttgttgtttaa

SEQ ID NO: 79942 - protein, 439 aa, Croceibacter atlanticus HTCC2559
MLFVIFGLSIKDLPPMQRDTEIFDLISKEKERQTNGLELIASENFVSDQVMEAVGSVLTNKYAEGYPGKRYYGGCEVVDVVEQIAIDRAKELFGASWANVQPHSGSQANTAVFAACLNAGDKFLGFDLSHGGHLTHGSPVNFSGKLYNPVHYGVERETGRLDYDNIQKIAEREQPKLIIAGASAYSREIDYKRFREIADSVGALLMADIAHPAGLIAKGLLSDPIPHCHVCTTTTHKTLRGPRGGMILMGEDFDNPFGLTFKSGKPKKMSSLFDSGIFPGNQGGPLEHVIAGKAIAFGEALTDEFLHYMVQVKKNAHVMAEAFVERGYDVISGGTDNHMMLIDLRNKNVTGKLAEETLGKAEITVNKNMVPFDTESPFVTSGIRIGTAAVTTRGLVEDDMKTIVEYIDRVINNIENDSELDAVKNSIHDMMNGKPLFVV

SEQ ID NO: 79943 - DNA, 1284 bp, Roseovarius nubinhibens ISM
  CDS (1)..(1284): transl_table=11
atgtccgattccggtttcttcaccgaatccctgagccagcgcgaccccgagctgcatgacgccatcacccaagaactgggccgtcagcgcgacgagatcgagctgatcgcgagcgagaacatcgtctcggccgccgtgatggaggcccagggctctgtcatgaccaacaaatacgccgaaggctatccgggccgccgctactatggtggctgccaatatgtcgacgtggccgagaacctcgccatcgaccgcgccaaacagctcttcggctgcgaatttgccaacgtgcaacccaactcgggcagccaggccaaccagggcgtgttccaggcgctgctgcagcccggcgacacgatcctcggcatgaacctcgcctcgggcggtcacctgacccatggcgcggcccccaaccagtcgggcaaatggttcaacgccgtgcaatatggcgtgcgcaaacaggacaatctgatcgactatgacgaggtcgaagcgctggccaaagaacaccagcccaagctgatcatcgccggcggctctgccatcccgcgcgtcatcgactttgccaagatgcgcgagatcgccgacagcgtcggcgcgctgttgcatgtcgacatggcgcatttcgccggtctcgtcgcggcaggcgaacatccctcgcccttcccgcatgcccatgtggccaccaccaccacgcacaagacgctgcgcggcccccgtggcggcatgatcctcaccaatgacgaggcaatcgccaaaaaggtcaactcggccattttcccgggcatccagggcggccccctgatgcatgtgatcgccgccaaggccgtggcctttggcgaggcgctgcgccccgagttcaaacaatacatgaaacaggtgcgcgccaatgccgacgcgctcgccgatcagctgatcaagggcggtctcgacatcgtcaccggcggcacagacacccatgtcatgctcgtcgacctgcgccccaagaaggtgaccggcaacatcaccgacgcggccctcggtcgcgcccatatcaccaccaacaagaacggtatcccgttcgacccggaaaagcccacggtgacctcgggcatccgtctcggcacccccgccggcaccacccgtggcttcaaagaggccgagttccgccagatcgccgactggatcgtcgaagtggtggacgggcttgccgccaacggtcccgatggcaatgacgaggtcgaggccaaggtccgtgcggaagtggccgaattgtgcgcccgcttcccgctctacccgaaccactaa

SEQ ID NO: 79944 - protein, 427 aa, Roseovarius nubinhibens ISM
MSDSGFFTESLSQRDPELHDAITQELGRQRDEIELIASENIVSAAVMEAQGSVMTNKYAEGYPGRRYYGGCQYVDVAENLAIDRAKQLFGCEFANVQPNSGSQANQGVFQALLQPGDTILGMNLASGGHLTHGAAPNQSGKWFNAVQYGVRKQDNLIDYDEVEALAKEHQPKLIIAGGSAIPRVIDFAKMREIADSVGALLHVDMAHFAGLVAAGEHPSPFPHAHVATTTTHKTLRGPRGGMILTNDEAIAKKVNSAIFPGIQGGPLMHVIAAKAVAFGEALRPEFKQYMKQVRANADALADQLIKGGLDIVTGGTDTHVMLVDLRPKKVTGNITDAALGRAHITTNKNGIPFDPEKPTVTSGIRLGTPAGTTRGFKEAEFRQIADWIVEVVDGLAANGPDGNDEVEAKVRAEVAELCARFPLYPNH

SEQ ID NO: 79945 - DNA, 1293 bp, Oceanicola batsensis HTCC2597
  CDS (1)..(1293): transl_table=11
atgaaagacatcaaggacgcaggctttttcaccgaagcgctggaaacccgtgaccccgagatcttcggcgccatccgcaacgaacttggccgccagcgcgacgagatcgaactgatcgcctcggaaaacatcgtctccgccgccgtgctcgaggcgcaggggtccgtgatgacgaacaagtacgccgaaggctatcccggcaaacgctactacggcggctgccagttcgtcgacgtggccgaggaactggccatcgagcgcgccaagcagctcttcggggcgggcttcgccaacgtccagccgaattccggcagccagatgaaccaggcggtgttcctggcgctgctgaggcccggcgacaccttcatggggctcgacctgaattccggcggccatctcacccacggctcgccggtgaacatgtccggcaagtggttcaacgtcgtctcctatggcgtgcgccagcaggacgaactgctcgacatggaagaggtccgcgccaaggcgcgcgagcatcggccgaaactgatcctcgccggcggcaccgcctattcccgcgtctgggactggcaggccttccgcgagatcgcggacgaggtcggcgcctggcttatggtcgacatggcccatatcgccgggctcgtcgccggtggcgcgcatccctctccggtcggcatcgccgatgtggtgaccaccaccacccacaagtcgctccgcgggccccgcggcggcatgatcctgaccaatgacgagagcatcgccaagaaggtcaactcggccgtcttccccggcctgcagggcgggcccctgatgcatgtcgtcgccgccaaggccgtggccttcggcgaggcgctgcgccccgagttcaagggctacgcggcccaggtcgtcgccaacgcccgcgccatggccgatcagctcatgaaaggcgggatcgacgtggtctccggcggcaccgacaaccacctctgccttgccgacctgcgccccaagaaggtcaccggcaaggccgccgaggccgcgctcggccgcgcgcatatcacctgcaacaagaacggcgtccccttcgatccggaaaagcccttcgtgaccagcggcatccgcctcggcacgccggccggcaccacccgcggcttcggcgaagacgagttccgccagatcgccgattggatcgtcgaggtggtggacggactggccgccaacggcgaggacggcaatgcggaggtcgaggccaaggtgaaatccgaggtcgccggcctctgcgcccgcttccccctctacgccggcatatga

SEQ ID NO: 79946 - protein, 430 aa, Oceanicola batsensis HTCC2597
MKDIKDAGFFTEALETRDPEIFGAIRNELGRQRDEIELIASENIVSAAVLEAQGSVMTNKYAEGYPGKRYYGGCQFVDVAEELAIERAKQLFGAGFANVQPNSGSQMNQAVFLALLRPGDTFMGLDLNSGGHLTHGSPVNMSGKWFNVVSYGVRQQDELLDMEEVRAKAREHRPKLILAGGTAYSRVWDWQAFREIADEVGAWLMVDMAHIAGLVAGGAHPSPVGIADVVTTTTHKSLRGPRGGMILTNDESIAKKVNSAVFPGLQGGPLMHVVAAKAVAFGEALRPEFKGYAAQVVANARAMADQLMKGGIDVVSGGTDNHLCLADLRPKKVTGKAAEAALGRAHITCNKNGVPFDPEKPFVTSGIRLGTPAGTTRGFGEDEFRQIADWIVEVVDGLAANGEDGNAEVEAKVKSEVAGLCARFPLYAGI

SEQ ID NO: 79947 - DNA, 1251 bp, Prochlorococcus marinus str. MIT 9211
  CDS (1)..(1251): transl_table=11
ttgactcatattaattccgctctagaggatgctgatccaaatattgcctctctaatacaagaagaaagtaaacggcaagagaatcacttggagcttattgcaagcgagaactttacctccaaagcagtaatggaagctcaggggtctgttttaaccaataaatatgcagaaggtcttccaaataagcgctactacggaggctgtgaacacattgataagattgaaggtttagcaattgaaagagccaagcaattatttaaagccgaatgggcaaatgttcaacctcatagtggagcccaggctaatttctcggtattcctatctctcttggaacctggcgaaaaaattatgggaatggacctttcccatggtggccatttaactcatggttctccagtgaacgttagtggcaaatggtttaaagctattcattacggagtagataaagagacacaaagacttgaaatggagaatgtccgtgaaattgctctaaaaaatcgaccaaaattaataatttgtggatactctgcttatccaagaaatattgattttttagcttttagatcaattgcagatgaagttggagcatatttgttagcagatatggcccatatcgcagggctggttgcaactggaatccatccaagtccaataccccattgcgatgtggttaccacaacgacccataaaacacttcgagggcctagaggcgggttaatactctgcagaaatgcagaatttggcaaaagatttgacaaggccgtatttcctggcagtcaaggaggtccactggagcatgttattgcggcaaaagcagtggcttttggagaagccttgaagccagggtttagttcctattgcgaacaacttgtgaaaaattcaaaagctcttgcaaaacgaatgcaagatagaggcatagcagttgtaagcaatggaactgataaccacattgttcttctagatctaagaagtattgatatgactgggaaagaagctgattcacttgttagtgcaataaatgtcactaccaataagaatacggtcccttttgatccaaaatccccattcgtaactagtgggctcagattaggtactgcagcattaaccactcgaggttttgatgagccagcattcttagaagtcgcagatttgatcgctgatcgcctgttaaacccaacggacttaatattaaaaaacaaatgtcagcaaagggttcttgatttatgcaatcgattcccgctatatgactga

SEQ ID NO: 79948 - protein, 416 aa, Prochlorococcus marinus str. MIT 9211
MTHINSALEDADPNIASLIQEESKRQENHLELIASENFTSKAVMEAQGSVLTNKYAEGLPNKRYYGGCEHIDKIEGLAIERAKQLFKAEWANVQPHSGAQANFSVFLSLLEPGEKIMGMDLSHGGHLTHGSPVNVSGKWFKAIHYGVDKETQRLEMENVREIALKNRPKLIICGYSAYPRNIDFLAFRSIADEVGAYLLADMAHIAGLVATGIHPSPIPHCDVVTTTTHKTLRGPRGGLILCRNAEFGKRFDKAVFPGSQGGPLEHVIAAKAVAFGEALKPGFSSYCEQLVKNSKALAKRMQDRGIAVVSNGTDNHIVLLDLRSIDMTGKEADSLVSAINVTTNKNTVPFDPKSPFVTSGLRLGTAALTTRGFDEPAFLEVADLIADRLLNPTDLILKNKCQQRVLDLCNRFPLYD

SEQ ID NO: 79949 - DNA, 1311 bp, Erythrobacter sp. NAP1
  CDS (1)..(1311): transl_table=11
atgagcacgcagcccaatcacaccaccgacccgatgcacggtttttggcacgacaatcttgcgacttccgatccggagatcgcggatgcaatcgacaaggagctaaagcgccagcaggacaagatcgagctgatcgcgagcgagaacatcgcgtcaaaagcggtgcttgaagcaaccggcagcgtcttcaccaacaagtatgcggaaggctatccgggcaagcgctattatggcggctgcgactatgcggatgtggtcgaaacgctcgcgatcgagcgtgcgaagcaactgttcggatgcaatttcgccaacgtgcagcccaacagcggcagccagatgaaccaggcagtgttcctcggccttctgcagcccggcgacacgttcatggggctcgacctcaattccggtggtcaccttacccatggttcgcccgttaatatgagcggcaaatggttcaatccagtcagctatggagtgactgaaggcgacgaattgatcgacatggacgcggtcgccgcaaccgcgcgcgagcacaagccaaagctcatcatctgcggcggcaccgcctattcgcgcgtctgggactttgcggccttccgcgagatcgccgacgaagtgggcgcggtcctgctgtgcgacatgagccacatttcgggcctcgtcgccggcggcgcccacccctcgcccttcccgcattgcgacatcgtcacctcgactacgcacaagagcctgcgcggcccgcgttcaggcatcatcctgtggaatgacgagaagttcaccaagccgctcaacatggcggtcttccccggcttgcagggcggtccgctgatgcatgtcatcgctgccaaagcagtggcctttcgcgaagctctccagcctgagtttaagacctatgctcaccgcatcgtcgagaacgcccgcgcgctggcggcgagcctcgaagaaaacggccttcgcatcgtctcgggcgggaccgacaaccactcgatgctggtcgatctgacggccaaggacgtgaccggcagggcagccgaggcaggtctcgaccgcgcatggctaacctgcaacaagaacggcatccccttcgacacccgctcgccattcgtcacaagtggcatccgtctgggtacgcctgctggcaccactcgcggtttcgggccggtcgaattccgcaaggtgggcgaattgatcgcgcgcgtcgtcgatggtctttcgaagaacggccctgaaggcgatgcgcagatcgaggagcaggtccgcggcgaagtcgcgaagctctgcgccgatttcccggtttatccgggccagtaa

SEQ ID NO: 79950 - protein, 436 aa, Erythrobacter sp. NAP1
MSTQPNHTTDPMHGFWHDNLATSDPEIADAIDKELKRQQDKIELIASENIASKAVLEATGSVFTNKYAEGYPGKRYYGGCDYADVVETLAIERAKQLFGCNFANVQPNSGSQMNQAVFLGLLQPGDTFMGLDLNSGGHLTHGSPVNMSGKWFNPVSYGVTEGDELIDMDAVAATAREHKPKLIICGGTAYSRVWDFAAFREIADEVGAVLLCDMSHISGLVAGGAHPSPFPHCDIVTSTTHKSLRGPRSGIILWNDEKFTKPLNMAVFPGLQGGPLMHVIAAKAVAFREALQPEFKTYAHRIVENARALAASLEENGLRIVSGGTDNHSMLVDLTAKDVTGRAAEAGLDRAWLTCNKNGIPFDTRSPFVTSGIRLGTPAGTTRGFGPVEFRKVGELIARVVDGLSKNGPEGDAQIEEQVRGEVAKLCADFPVYPGQ

SEQ ID NO: 79951 - DNA, 1287 bp, Synechococcus sp. WH 5701
  CDS (1)..(1287): transl_table=11
gtggattccaccggtacgcccctgaaccagtccctggcggccggtgatcccgccatcgccgccctgatcggccgtgagctggagcgtcagcagactcatctcgagctgatcgccagcgagaacttcgcctccagggccgtgatggaggcccagggatcggtactcaccaacaagtacgccgaaggtctgccccacaagcggtactacggcggctgtgagcatgttgatgcgatcgaggagctggccattgcccgggcccgccagctgttcggggccgcctgggcgaacgtgcagccccacagcggtgcccaggccaacttcgccgtattcctggccctgctccagcccggcgacacgatcctgggcatggacctttcccatggcggacacctcacccatggctcgccggtgaatgtgtcgggcaaatggttcaaggccgtccattacggcgtcgatccccacaccaaccagctcgactacgacgccatccgggccctggccgagcagcaccgcccccggctgatcatctgcggctactccgcctacccccgcacgatcgacttcgaggctttccgctcgattgctgattccgtcgatgccttcctgctggctgacatggcccacatcgccggcctggtggcggcaggggcccatcccagccccatcccccattgccatgtggtcaccaccaccacccacaagaccctgcgtgggccccgtggcgggctgatcctctgcaatgacgccgagttcggcaagcgcttcgacaaggccgtcttccccggtagccagggtggccctctcgagcatgtggtggccgcgaaggcggtggccttcggtgaggccctgcagccctccttccggacctacagccagcaggtgatccgcaatgcccaggccctggccgcccggatccaggagcgcggcatcgccgtggtctccggtggtaccgacaaccacctggtgctgctcgacctgcgctcgatcggcctcaccggcaaggtggccgacctgctggtgagcgaagtgaacatcacggccaacaagaacaccgtgccgttcgatcctgaatcgcccttcgtcaccagtggtctgcgccttggcaccgccgccctcaccacccgcggcttcgatgccgacgacttcgccgaggtggccgatgtgattgcggaccggcttctccattccgatgacagcgtcatcgagctgcgctgccgtgagcgcgtgcgtgccctctgcgagcgccatccgctctacgggccgagccgcattcccctgccggcctga

SEQ ID NO: 79952 - protein, 428 aa, Synechococcus sp. WH 5701
MDSTGTPLNQSLAAGDPAIAALIGRELERQQTHLELIASENFASRAVMEAQGSVLTNKYAEGLPHKRYYGGCEHVDAIEELAIARARQLFGAAWANVQPHSGAQANFAVFLALLQPGDTILGMDLSHGGHLTHGSPVNVSGKWFKAVHYGVDPHTNQLDYDAIRALAEQHRPRLIICGYSAYPRTIDFEAFRSIADSVDAFLLADMAHIAGLVAAGAHPSPIPHCHVVTTTTHKTLRGPRGGLILCNDAEFGKRFDKAVFPGSQGGPLEHVVAAKAVAFGEALQPSFRTYSQQVIRNAQALAARIQERGIAVVSGGTDNHLVLLDLRSIGLTGKVADLLVSEVNITANKNTVPFDPESPFVTSGLRLGTAALTTRGFDADDFAEVADVIADRLLHSDDSVIELRCRERVRALCERHPLYGPSRIPLPA

SEQ ID NO: 79953 - DNA, 1257 bp, Pseudoalteromonas tunicata D2
  CDS (1)..(1257): transl_table=11
atgttagaacgcagcatgaacatcgcagattttgatccagagttattcgaagcaatcaataaagaaacggctcgtcaagaagagcacattgagcttatcgcttcagaaaactactgtagcccacgcgttttagaggctcaaggctcacaattaactaacaaatatgcagaaggatacccaggtaagcgttactacggtgggtgtgagcatgttgatgtagtagagcaattggcaatcgaccgtgcaaatgaattatttggcactgattacgcaaacgtacagccgcatgcgggttctcaagcaaatgctgctgtttttcaagcattacttcaaccacacgatactgtattagggatgagtcttgctcacggtggtcacttaactcacggttcacacgtaaacttttcaggtaaaacatataatgcgattcaatatggtttgaatgaagaaacaggtgaaatcgattatgcacaagttgaggcgttagcccttgaacataaaccaaaaatgattatcgctggtttctctgcatattcaggaattgttgactgggcaaaattccgtgaaatcgcggataaagtaggcgcgtatttattcgtcgatatggctcacgttgcaggcttaattgctgctggcgtttacccaagtccaattccatttgctcacgttgttacaacaacaactcacaaaacattagcaggccctcgtggtggtttaattgtttcggcatgtggcgatcaagaaatttataaaaagttaaacagtgctgtgttccctggtggtcaaggcggtcctttatgtcacattattgcagcaaaagctgtggcatttaaagaagcgttacagcctgagtttaaagtgtatcaagcgcaagttgtaaaaaatgcacaagctatggttgaagttcttcaagagcgtggctataaagttgtatctggtaaaacagacaaccacttatttttacttgatttgattgataaagatatcacaggtaaagatgctgatgcggcactaggtaatgctaacattactgttaacaaaaactcagtacctaacgatccacgttcaccatttgtgacctcaggcttacgtatcggttctcctgcaatcactcgtcgtggttttaaagaagctgaatcaaaagagttagcgggttggatttgtgatgttctagacaacatcaacgatgcatcagtgcaagcgcaagtaaaagaaaaagtaaaagcaatttgtaaaaagcttcctgtttacgcttaa

SEQ ID NO: 79954 - protein, 418 aa, Pseudoalteromonas tunicata D2
MLERSMNIADFDPELFEAINKETARQEEHIELIASENYCSPRVLEAQGSQLTNKYAEGYPGKRYYGGCEHVDVVEQLAIDRANELFGTDYANVQPHAGSQANAAVFQALLQPHDTVLGMSLAHGGHLTHGSHVNFSGKTYNAIQYGLNEETGEIDYAQVEALALEHKPKMIIAGFSAYSGIVDWAKFREIADKVGAYLFVDMAHVAGLIAAGVYPSPIPFAHVVTTTTHKTLAGPRGGLIVSACGDQEIYKKLNSAVFPGGQGGPLCHIIAAKAVAFKEALQPEFKVYQAQVVKNAQAMVEVLQERGYKVVSGKTDNHLFLLDLIDKDITGKDADAALGNANITVNKNSVPNDPRSPFVTSGLRIGSPAITRRGFKEAESKELAGWICDVLDNINDASVQAQVKEKVKAICKKLPVYA

SEQ ID NO: 79955 - DNA, 1251 bp, Photobacterium sp. SKA34
  CDS (1)..(1251): transl_table=11
atgctaaagcgcgatatgaatattgctgattatgatgcggaactatttgcagccattcaggaagaaacagctcgtcaggaagaacacatcgagttgattgcttctgaaaactatacaagcccacgtgtaatggaagcgcaaggatctcagctaactaataaatatgctgaaggttacccaggcaagcgttattacggtggttgtgagtttgttgataaagctgagcaactggctatcaaccgtgcttgtcagctatttggtgcagaatacgcgaacgttcagcctcactcaggctcacaagcgaataatgctgtttacatggcacttttgaatgctggcgataccgtattaggtatgagtcttgctcacggcggtcacttaactcacggttcaccagtaaacttctcgggtaagctttacaacgtgataccatacggtatcgatgaaagcggtcaaattgattacgctgaagttgaagcgttagcgcttgagcataaaccaaagatgatcatcggtggtttttctgcttactctcaaattgttgattggaaacgcatgcgtgaaatcgcagacaaagttggtgcatacttctttgttgatatggcgcacgtagcgggtctgattgctgcaggcgtttatcctaaccctgtgccacatgcacatgttgttacaacaacaacgcacaaaacactagcaggtcctcgtggtggtcttatcctttctaatgaaggtgaagatctttataagaagctgaactctgcagtattccctggtggtcaaggtggtcctctaatgcatgttattgcggcaaaagcagtagcatttaaagaagcaatggagcctgaatttaaaggttaccaagcacgtgttgttgaaaacgcaaaagtaatggtaggtgaattcctagagcgcggttacaagattgtttccggtagcactgaaaaccatttattccttgttgatttgatcgacaaaggtatcacaggtaaagaagcagatgcagcactaggtgcagcaaacatcactgttaataagaacagtgtaccaaatgatccacgtagcccatttgtaacatcaggtatccgtgtaggtacaccgtcaattactcgccgtggctttactgctgatgatgcacgtcaacttgcaggttggatgtgtgatgttttagacaatgttgataacgaagaagttattgcatcaacaaaagcaaaagttttagatatttgtaagcgtctacctgtttacgcttaa

SEQ ID NO: 79956 - protein, 416 aa, Photobacterium sp. SKA34
MLKRDMNIADYDAELFAAIQEETARQEEHIELIASENYTSPRVMEAQGSQLTNKYAEGYPGKRYYGGCEFVDKAEQLAINRACQLFGAEYANVQPHSGSQANNAVYMALLNAGDTVLGMSLAHGGHLTHGSPVNFSGKLYNVIPYGIDESGQIDYAEVEALALEHKPKMIIGGFSAYSQIVDWKRMREIADKVGAYFFVDMAHVAGLIAAGVYPNPVPHAHVVTTTTHKTLAGPRGGLILSNEGEDLYKKLNSAVFPGGQGGPLMHVIAAKAVAFKEAMEPEFKGYQARVVENAKVMVGEFLERGYKIVSGSTENHLFLVDLIDKGITGKEADAALGAANITVNKNSVPNDPRSPFVTSGIRVGTPSITRRGFTADDARQLAGWMCDVLDNVDNEEVIASTKAKVLDICKRLPVYA

SEQ ID NO: 79957 - DNA, 1257 bp, Oceanospirillum sp. MED92
  CDS (1)..(1257): transl_table=11
atgtttagcaaagatatgactatcgctgatttcgacgctgatctgtggtctgctatgcaggctgaagcagtacgtcaggaagagcacatcgaactgatcgcgtctgaaaactacactagcccacgtgtaatggaagctcagggttcagaactgactaacaagtatgctgaaggttaccctagcaagcgctactacggcggttgtgagcacgttgatgtagttgaagatctggcgattgaccgtgctaaagagttgtttggtgctacatacgcaaacgttcagcctcactcaggttcacaggctaacgctgctgtttacatggcgctttgtcagccgggtgatactgttctgggtatgagcctggcacacggtggtcacctgactcatggtgcatcagtatctttctcaggtcgtatctataacgctgtccagtacggtctgaacccagaaacaggtgagatcgattacgcagaagttgagcgcctggctgaagagcacaagccaaaaatgatcgttgccggtttctctgcatactcacgtgttgttgattggcagcgtttccgtgatatcgcagataaagtaggcgcttacctgtttgttgatatggcgcacattgcgggtctggttgcggcgggcgaatacccatcaccaattcagattgctgacgtagtaacgacaacgacacataaaacactgggcggtcctcgcggtggtctgatcctgtctgcgcgcgctgatgaagatctgcagaagaagctaaacttcgcagtattccctgaatctcagggggggccactgatgcacgttatcgctgctaaagcggtttgctttaaagaagcgatggagcctgagtggaaagcgtatcaaggccaggttgttaagaatgctcaggcaatggctgaaacattcaaatcacgtggtattaagatcgtttctgatggtacagatgatcacctgttcctggttgatctgatcggtaaagagtacacaggtaaagatgcggatgcggcgctgggtcgtgcaaacatcactgtgaataaaaactctgtaccaaatgatccacgctctccgtttgtgacgtctggcctgcgtattggtacaccagcggtaacgcgccgtggcttcaaagaagcagaagtgacagagctgactaactggatctgtgacgttcttgataacatcgataacgatgaagtgattgcacgtgttaaaggtcaggtaaaagagatctgcgcacgttaccctgtttacaagtaa

SEQ ID NO: 79958 - protein, 418 aa, Oceanospirillum sp. MED92
MFSKDMTIADFDADLWSAMQAEAVRQEEHIELIASENYTSPRVMEAQGSELTNKYAEGYPSKRYYGGCEHVDVVEDLAIDRAKELFGATYANVQPHSGSQANAAVYMALCQPGDTVLGMSLAHGGHLTHGASVSFSGRIYNAVQYGLNPETGEIDYAEVERLAEEHKPKMIVAGFSAYSRVVDWQRFRDIADKVGAYLFVDMAHIAGLVAAGEYPSPIQIADVVTTTTHKTLGGPRGGLILSARADEDLQKKLNFAVFPESQGGPLMHVIAAKAVCFKEAMEPEWKAYQGQVVKNAQAMAETFKSRGIKIVSDGTDDHLFLVDLIGKEYTGKDADAALGRANITVNKNSVPNDPRSPFVTSGLRIGTPAVTRRGFKEAEVTELTNWICDVLDNIDNDEVIARVKGQVKEICARYPVYK

SEQ ID NO: 79959 - DNA, 1356 bp, Xanthobacter autotrophicus Py2
  CDS (1)..(1356): transl_table=11
atgcgtcccgccggggtgccccgacattaccggagacctgccatggcctcgcaggacgcgaaccgctcctccatttcggaggaaatgaaccgcttcttcactgcccctctcgccgagagcgatcccgagatcgccggcgcggtgaaggcggagctgggtcgccagcgcgacgagatcgagctgatcgcgtccgagaacatcgtctcgcgcgccgtgctcgaggcccagggctccgtgctcaccaacaagtatgccgagggctatccgggcaagcgctactacggcggctgccagttcgtggacgtggcggaaaacctcgccatcgagcgcgccaagaagctgttcggctgcggcttcgccaacgtccagcccaattccggcagccaggccaaccagggcgtgttcttcgccctgctgcagccgggcgatacctttctgggcctcaaccttgccgccggcggtcacctgacccacggctcgccggtcaacatgtccggcaagtggttcaagcccgtgccctacacggtgcgcgaggacgatcagcgcatcgactatgacgaggtggcgcggctcgccgacgagcacaagcccaagctcatcgtggccggcggctcggcctacccgcgcgtcatcgatttcccgaagatgcgcgccatcgccgacagcgtgggcgccaagctcatggtggacatggcgcattttgccggtctcgtcgccggtggcgcccacccgagcccgttcccccacgcccatgtggtgaccaccaccacccacaagaccctgcgtgggccgcgcggcggcatgatcctcaccaatgacgaggacctggccaagaagatcaattcggccatcttccccggcatccagggcgggccgctgatgcatgtcatcgctgccaaggcggtggccttcggcgaggcgctgcgccccgagttcaagctctatgcgaagaacgtggtggagaatgccaaggcgctggccgagaccctgaagggccacggcttcaacatcgtctccggtggcaccgacacccacctgatgctggtggacctgcgccccaagcgcctcaccggcaagacctcggaaggcgcgctgggccgggcgcacatcaccaccaacaagaacggcatcccgttcgatcccgagaagccgttcgtgacctccggcatccgcctcggcacgccggcctgcaccacgcgcggcttcggggtggccgagttccagcaggtgggcgacttcatcgccgaggtgctcgacgtgctctcccagaagggcgtggacgaggattcgctggtggaagccacggtgcgtgagaaggtctcgggcctgctcgcccgcttccccatctatccctga

SEQ ID NO: 79960 - protein, 451 aa, Xanthobacter autotrophicus Py2
MRPAGVPRHYRRPAMASQDANRSSISEEMNRFFTAPLAESDPEIAGAVKAELGRQRDEIELIASENIVSRAVLEAQGSVLTNKYAEGYPGKRYYGGCQFVDVAENLAIERAKKLFGCGFANVQPNSGSQANQGVFFALLQPGDTFLGLNLAAGGHLTHGSPVNMSGKWFKPVPYTVREDDQRIDYDEVARLADEHKPKLIVAGGSAYPRVIDFPKMRAIADSVGAKLMVDMAHFAGLVAGGAHPSPFPHAHVVTTTTHKTLRGPRGGMILTNDEDLAKKINSAIFPGIQGGPLMHVIAAKAVAFGEALRPEFKLYAKNVVENAKALAETLKGHGFNIVSGGTDTHLMLVDLRPKRLTGKTSEGALGRAHITTNKNGIPFDPEKPFVTSGIRLGTPACTTRGFGVAEFQQVGDFIAEVLDVLSQKGVDEDSLVEATVREKVSGLLARFPIYP

SEQ ID NO: 79961 - DNA, 1278 bp, Flavobacteria bacterium BBFL7
  CDS (1)..(1278): transl_table=11
atgagttacaacgataaggagatttttgacttaattcaagaagaacaatcaagacaaaaaacaggattagaattaatagcgagtgagaattatgtaagtgatgatgttcttgcggcggcaggatctatcttgactaataaatatgcagaaggttatcctggaaaaaggtattatggaggttgcgaagttgttgatgagatagaaactatcgcaattgaacgagctaaagaattatttaatgctgaatatgttaatgtccagccccactctggtagtcaggcaaacacagccgtatttcatgcttgtcttaaaccaggtgataaaattttaggatttgatttatcgcatggtggtcatttaactcatgggtcacctgtaaatttttcaggaaagctttacaaaacatcattttatggtgttgaaaaagagacaggcttattaaattatgaaaagatacaatctatagcagaacaagaaaaacctaaattgattattgccggagcttctgcttacagtagagaaattgattataaaaaatttcgtgatatcgcaaatagtgtaaatgctattttattggccgatattgcacatcctgcaggtttaattgctaaaggaattttacaagatgcagttcagttttcacatatttgtacaagtacaacccataaaactttaagaggtcctcgaggcggtattataattatggggaaggattttgaaaatccatttgggcaaaaactcaaaaatggtaatctaaagaaaatgtcatccctacttaatagtggagtattcccaggtaatcaaggtggcccattagaacatattattgccgcaaaggctgtggcatttaaagaagctttatcagaaaacttcttacactacatggtacaagtaaagaaaaatgctaaagctatggctagtgaattcattaaaagagattaccatattatttcaggcggcacagataatcatatgatgctgattgatttaagaaataaaaatattactggtaaacaagctgaagaagcattaggtaaatctcatataactgtaaataaaaacatggtgccatttgatgaccaatctccttttatcacaagtggtatcagaattggtacagctgctataactacacgaggtttagttgaaagtgatatggctgaaattgtcaaacttatagatatggttatatccaatcctgaagatgatgaaacattaaataattgcaaagatttcgtgaataactttatcacagattatccgttatttaagaattaa

SEQ ID NO: 79962 - protein, 425 aa, Flavobacteria bacterium BBFL7
MSYNDKEIFDLIQEEQSRQKTGLELIASENYVSDDVLAAAGSILTNKYAEGYPGKRYYGGCEVVDEIETIAIERAKELFNAEYVNVQPHSGSQANTAVFHACLKPGDKILGFDLSHGGHLTHGSPVNFSGKLYKTSFYGVEKETGLLNYEKIQSIAEQEKPKLIIAGASAYSREIDYKKFRDIANSVNAILLADIAHPAGLIAKGILQDAVQFSHICTSTTHKTLRGPRGGIIIMGKDFENPFGQKLKNGNLKKMSSLLNSGVFPGNQGGPLEHIIAAKAVAFKEALSENFLHYMVQVKKNAKAMASEFIKRDYHIISGGTDNHMMLIDLRNKNITGKQAEEALGKSHITVNKNMVPFDDQSPFITSGIRIGTAAITTRGLVESDMAEIVKLIDMVISNPEDDETLNNCKDFVNNFITDYPLFKN

SEQ ID NO: 79963 - DNA, 1260 bp, gamma proteobacterium HTCC2207
  CDS (1)..(1260): transl_table=11
atgttcgataaaaaccagactattgagaattttgatgccgaggtatggcatgccatgcagcaggaagatcagcgtcaagagcagcatattgagttgattgcctcggagaattacaccagcccagcggttatggcagctcagggtggtcagatgaccaataaatatgcagaaggttatcctggtaagcgttactacggtggttgcgagtatgtcgatatcactgaacagttggcgattgatcgcctgaaaagcctctacggcgcaaagtttgccaatgtgcagccccattcgggttctcaggctaacagcgcagtatttttggcgctgatcaaaggcggcgatactattttgggtatgagcctggccgacggtggtcaccttactcacggcgccaagccaaacttttctggcaagctttacaaccccattcaatatggcctcaacgccgagactggtctgatcgattacgatcaggttgaagcgctggcgatcgagcacaaaccggcaatgattatcgctggtttctctgcctactctggcatcatggactgggcgcgtttccgtgaaatcgccgacaaggtcggtgcctatctgatggttgatatggctcacgtctccggtttgattgctgcgggtgtttatcctaacccagtgccacacgctcacgttgtgacctcaactacgcacaaaacactgcgtggtccccgcggcggaatcattattactaatgatgaagacgtggctaaaaaatgtaactctgcggttttccctggcggacagggtggccctctgtgtcacgtgattgcggccaaggcgattgcctttaaagaagcagccagccaagaatttgtcgattatcaaaagcaggttgtggctaacgccaaagctatggcggcgagctttatcaagcgtggattcaatattgtttccaacggcactgaaaaccacctgatgctggttagcctgatcggcaaagagtacacaggtacagacgctgaccgcgctatgggcgaagcctttattacggtcaacaaaaatgcggtacccaatgacccccgttcaccgtttgtgacctctggcttacgcgtgggtacaccggctattacgactcgcggttttggtatcgaagagactgtgcagttgactgagtggatgtgcgatattctcgatagccttgagaacggtacttctgagcaggtgattgctgatgttaaagccaaggtcctggaaatctgtgcccgattccctgtctatggttag

SEQ ID NO: 79964 - protein, 419 aa, gamma proteobacterium HTCC2207
MFDKNQTIENFDAEVWHAMQQEDQRQEQHIELIASENYTSPAVMAAQGGQMTNKYAEGYPGKRYYGGCEYVDITEQLAIDRLKSLYGAKFANVQPHSGSQANSAVFLALIKGGDTILGMSLADGGHLTHGAKPNFSGKLYNPIQYGLNAETGLIDYDQVEALAIEHKPAMIIAGFSAYSGIMDWARFREIADKVGAYLMVDMAHVSGLIAAGVYPNPVPHAHVVTSTTHKTLRGPRGGIIITNDEDVAKKCNSAVFPGGQGGPLCHVIAAKAIAFKEAASQEFVDYQKQVVANAKAMAASFIKRGFNIVSNGTENHLMLVSLIGKEYTGTDADRAMGEAFITVNKNAVPNDPRSPFVTSGLRVGTPAITTRGFGIEETVQLTEWMCDILDSLENGTSEQVIADVKAKVLEICARFPVYG

SEQ ID NO: 79965 - DNA, 1266 bp, delta proteobacterium MLMS-1
  CDS (1)..(1266): transl_table=11
gtgtcttatctagccagcagtgatccggaagtatatcgtgccattggtggggagtttgatcgccagtaccatcaactggagatgatcgcctcggagaatattgtcagtgaagcggtgctggaagcccagggttcggtcttcaccaacaaatacgccgaaggctatcccggcaaacgttattacggcggctgcgaatacgccgatgtcattgaggagttggcgattaatcgggccctggagctgttcggggccgagtacgccaacgtccaggcccattccggcagccaggccaatatggcggtctattttgcctgtttaaaacccggcgataaagtgctggggatggatctggcccatggcggccatcttacccatggcagcagtgtcaacttctccggccagctctaccagttcgcctcctacggggtggatcggcaaagcgaacggatcgatatggccgaagtggaacggctggccctggagcatcgccccaaaatgatcgtcgccggcgccagcgcctacccccgggagatcgattttgccgccatcggtgagatcgccaggaagatcggggcctattacatggtggatatggcccatatcgccgggctggtggccgccggggtgcatccctcgccggtgccccatgccgattttgttaccaccaccacccataagaccctgcgcggtccccggggcggcctgattctggccaggggggattacggcaagatgctcaacagcaagatcttccccggcatccagggcggccccctggtccatgtgatcgccgccaaagcggtgaccttccgcgaggccatggaagattccttcaaggaatacatgcgccaggtggttaagaacacccgggccctgggtgaagccctggtagcccgcggttttcggctggtctccggcggcagtgacaatcacctgctgctggtggatctgacccccaaacagatcaccggcaaggaggccgatggtctgctggagcaggccgggatcacggttaacaagaacgccatcccctttgataccgccaagcgctttgtcaccagcggcatccgggtcgggactccggcggtgaccacccgcgggctcaaggagccggagatggaacagatcgccgcctggatggatcgggccctggccaccgccgagggggccggccgggaggccgcactggccgccatccgggaagaggtccgcgccctttgcgaccgtttcccgatctatcccgggatgcagaacgggatggtatga

SEQ ID NO: 79966 - protein, 421 aa, delta proteobacterium MLMS-1
MSYLASSDPEVYRAIGGEFDRQYHQLEMIASENIVSEAVLEAQGSVFTNKYAEGYPGKRYYGGCEYADVIEELAINRALELFGAEYANVQAHSGSQANMAVYFACLKPGDKVLGMDLAHGGHLTHGSSVNFSGQLYQFASYGVDRQSERIDMAEVERLALEHRPKMIVAGASAYPREIDFAAIGEIARKIGAYYMVDMAHIAGLVAAGVHPSPVPHADFVTTTTHKTLRGPRGGLILARGDYGKMLNSKIFPGIQGGPLVHVIAAKAVTFREAMEDSFKEYMRQVVKNTRALGEALVARGFRLVSGGSDNHLLLVDLTPKQITGKEADGLLEQAGITVNKNAIPFDTAKRFVTSGIRVGTPAVTTRGLKEPEMEQIAAWMDRALATAEGAGREAALAAIREEVRALCDRFPIYPGMQNGMV

SEQ ID NO: 79967 - DNA, 1296 bp, Rickettsiella grylli
  CDS (1)..(1296): transl_table=11
atgtcgtattcattacaagacacaattaataattttgatcctgatttatggtcatcaatgaataaagaaatgcaacgtcaagaagatcatttggaattaattgcttcggaaaactatgcaagcccccgtgtgctacaagcacaagggtcaggtttaaccaataagtatgcagaaggttatccgggtaaacgttactatggcgggtgtgaatatgttgatgaggtagaacaattagcagtagagagggccaagaaattatttaaagcggattatgcgaacgtacaaccccattcgggttcgcaagcgaatgcggcggcttatatggctttattaaaacccggtgagtcgttgctagggatgagtttagcgcatggtggacatttaacgcatggcgcaaaagtgagtttttcaggaaaaatatatcaatcgtatgcgtatggtgtcacgtccgatacacaacgtattcattacgaagaagtcgaagcgcttgcaaaaaaatacaaaccggcgttaattattgcagggttttcagcgtattcacgtgaagtggattggcaacgattcagagatatcgccgatgaagtcggggcctattttttggttgatatcgcgcatgttgccgggttagttgctgcgggtctttattcttcaccgatttccattgcggatgtggtgaccagtacgacccataaaacattacgtggacctcgtggaggcctcattttagcgcgttctaatcctgagattgaaaaaaaattaaacgcagcagtatttccaggtcaacaaggagggcctttgatgcatgtgattgctgcaaaggcggttgcgttcaaggaagcattagagccccactttaaagcgtatcagaggcaagttattttgaatgcgaaggcgatggttcaggtgatgcaagaaagaggctataacattgtttcgggtggaacggataaccatctttttttaatcgatctgattgacaagaaaatgacagggaaggaagcagaagccttattagaaaaagcctctatcaccttaaataaaaatatgttgcccaatgatccctgtaaaccgtttataacgagtggcttgcgcgtgggaacacccgctgtgaccacccgtggttttaaagaaagtcaggttcgcgaggttgcccattggatgtgcgatctgctggataatcgaaacgattcggctcgtctagaaatgattaaaaaacaagtcgtagcgctgtgccatcaatttccagtatactccgccgagagacgagacgataacccgatggattctattgaataa

SEQ ID NO: 79968 - protein, 431 aa, Rickettsiella grylli
MSYSLQDTINNFDPDLWSSMNKEMQRQEDHLELIASENYASPRVLQAQGSGLTNKYAEGYPGKRYYGGCEYVDEVEQLAVERAKKLFKADYANVQPHSGSQANAAAYMALLKPGESLLGMSLAHGGHLTHGAKVSFSGKIYQSYAYGVTSDTQRIHYEEVEALAKKYKPALIIAGFSAYSREVDWQRFRDIADEVGAYFLVDIAHVAGLVAAGLYSSPISIADVVTSTTHKTLRGPRGGLILARSNPEIEKKLNAAVFPGQQGGPLMHVIAAKAVAFKEALEPHFKAYQRQVILNAKAMVQVMQERGYNIVSGGTDNHLFLIDLIDKKMTGKEAEALLEKASITLNKNMLPNDPCKPFITSGLRVGTPAVTTRGFKESQVREVAHWMCDLLDNRNDSARLEMIKKQVVALCHQFPVYSAERRDDNPMDSIE

SEQ ID NO: 79969 - DNA, 1263 bp, Oceanobacter sp. RED65
  CDS (1)..(1263): transl_table=11
atgtttaaacgagacatgaatattgctgattttgacccagctgtttgggaagcgatgcaggctgaagtaaagcgtcaggaagatcacattgagttgatcgcatctgaaaactataccagcccacgcgtcatggaagcccaaggcagccagcttaccaacaagtacgctgaaggctatccaggcaagcgttattacggcggttgtgagcatgttgacgtcgttgagcagctagcaattgatcgcgctaaagagttgtttggcgcaggctacgctaatgttcagcctcactctggttcgcaggcaaacgccgctgttttcatggcactttgtaagccgggcgacaaagtactaggtatgagtttggctcatggtggtcacttaacccatggtgcgtcggtatccttctctggccgcatttatgatgccgttcagtacggtttacacccagaaacgggtgatattgactatgaagaagtggagcgtcttgcgctagagcacaaacctaaaatgatcattggtggcttctctgcgtttagtcgtattgttgattggcagcgtttccgtgatatcgccgataaagtaggtgcttacttatttgtcgatatggctcatattgcaggtcttgttgcggcaggcgtttatccctctcctgtgggtatcgctgatgttgtgacgactacaacgcacaaaacgttgcgcggtcctcgtggcggtttgattcttgccaaagaagatgaagagttaaacaaaaaacttaattttgctgtcttcccagaatcgcaaggtggtcctttgatgcacgtgatcgccgcgaaagcagtgtgcttcaaagaagctatgtcagaagaatacaagacgtaccaagcgcaagtggttaagaatgctcaggcaatggccgaagtattcattgagcgtggtattaatatcgtttctggtggtaccgatgatcaccttttcctagttgatctgattggcaaggagtacacaggtaaagacgcagatgccgcattaggcgaagctcatattacagtgaacaaaaatgccgtaccgaatgacccacgttctccgtttgttacgtcaggtttgcgtattggtacgccggcaattacctctcgtggcttcaaagaagagcaagctcgtgatttaacatcctggatttgtgatgtgcttgatagtcttgagaatggcaataaagatgaagtagcagctcaggttcgtgctaaagttcaggctttgtgtgcagaatttcctgtatacagctaa

SEQ ID NO: 79970 - protein, 420 aa, Oceanobacter sp. RED65
MFKRDMNIADFDPAVWEAMQAEVKRQEDHIELIASENYTSPRVMEAQGSQLTNKYAEGYPGKRYYGGCEHVDVVEQLAIDRAKELFGAGYANVQPHSGSQANAAVFMALCKPGDKVLGMSLAHGGHLTHGASVSFSGRIYDAVQYGLHPETGDIDYEEVERLALEHKPKMIIGGFSAFSRIVDWQRFRDIADKVGAYLFVDMAHIAGLVAAGVYPSPVGIADVVTTTTHKTLRGPRGGLILAKEDEELNKKLNFAVFPESQGGPLMHVIAAKAVCFKEAMSEEYKTYQAQVVKNAQAMAEVFIERGINIVSGGTDDHLFLVDLIGKEYTGKDADAALGEAHITVNKNAVPNDPRSPFVTSGLRIGTPAITSRGFKEEQARDLTSWICDVLDSLENGNKDEVAAQVRAKVQALCAEFPVYS

SEQ ID NO: 79971 - DNA, 1254 bp, Desulfitobacterium hafniense DCB-2
  CDS (1)..(1254): transl_table=11
atggattatattaaggaatggattctccctcaggatcccgaagtggcggaggctattgcccaggaggaacaaaggcagcgctataaaatcgagctgattgcctcagagaattttgtgagccgagcggtcatggccgcccagggttccgttcttaccaataagtatgcggaaggatatccgggaaaacgctattatggcggctgtgagtatgtggatatcgttgaggatctggcccgggagcgggtgaaaaagctttttggtgcggaacatgccaatgtccagcctcattccggcgcccaggctaataccgctgtatattttgccatgcttaaacccggggatacggttctcggcatgaatctttcccatgggggtcatttaacccacggcagcccggtgaatatctccgggatgtattataactttgtcgcctatggggtggatcaagtcaccgaacgcattgattatgatgtggtgcgccaattagcccttgagcatcgccctaagctgattgtagcgggagccagtgcctatcccagacaaatcgactttgcccgcttaagagaaattgccgatgaggcagactcttacttcatggtggatatggcccatattgcgggcctggtggcagccgggcttcatcaaaaccctgttccctacgcacattttgtaaccaccaccactcataaaaccctgcggggcccccgggggggactgattctatgccaagaagaatttgccaaagctatcgataaagccatcttccccggcattcagggcggcccgctgatgcatgtgatcgcggctaaggctgttgccttcggcgaggctttaaagccggaattcgtggaatatcaaaaacgcattgtggagaatgctaaagtattatcggaaactctggcggaaaaaggcttccgcatcgtttccggaggtacggacaaccatttgatgcttgtggatgtacggtctaaaggcttgacagggaaagaagcagagtatattttagatgaggtcggtattacggtgaataagaacaccatcccctatgatccggccagccctatggtaaccagcggcatccgcatcggcacccctgccgtgaccagccgcggtatggataccctggcgatgaaaaagattgccgcagccatcgacattgctttatcagaacccaatgaagcgggggctgccaaagcccgggatatggttgcagcactctgcgcggaatacccgctctacccaaatctagattag

SEQ ID NO: 79972 - protein, 417 aa, Desulfitobacterium hafniense DCB-2
MDYIKEWILPQDPEVAEAIAQEEQRQRYKIELIASENFVSRAVMAAQGSVLTNKYAEGYPGKRYYGGCEYVDIVEDLARERVKKLFGAEHANVQPHSGAQANTAVYFAMLKPGDTVLGMNLSHGGHLTHGSPVNISGMYYNFVAYGVDQVTERIDYDVVRQLALEHRPKLIVAGASAYPRQIDFARLREIADEADSYFMVDMAHIAGLVAAGLHQNPVPYAHFVTTTTHKTLRGPRGGLILCQEEFAKAIDKAIFPGIQGGPLMHVIAAKAVAFGEALKPEFVEYQKRIVENAKVLSETLAEKGFRIVSGGTDNHLMLVDVRSKGLTGKEAEYILDEVGITVNKNTIPYDPASPMVTSGIRIGTPAVTSRGMDTLAMKKIAAAIDIALSEPNEAGAAKARDMVAALCAEYPLYPNLD

SEQ ID NO: 79973 - DNA, 1293 bp, Synechococcus sp. RS9916
  CDS (1)..(1293): transl_table=11
atgtctgaccgcgcttccgcaccgatcaacgccgctctggccgatgccgatcccgcgatcgctgccctgatcgggcaggagcagaaccgtcaggaaacccatcttgagctgattgcgtccgagaactttgcgtcccgggctgtgatgcaggcccagggctccgtgctcaccaacaaatacgccgaaggccttcctcacaagcgctactacggcggctgtgagcatgtggatgcgatcgaggaactggcgatcgaacgggccaaggagttgtttggtgccgcatgggccaatgtgcagccgcatagcggtgcgcaggccaacttcgctgtgtttctggcgttgctccagcccggcgacacgatcatggggatggacctcagccacggggggcatctcacccacggatctcctgtcaacgtcagcggcaaatggttcaacgtcgtgcaatacggcgtcgatcaggcgacccagcgcctcgacatggaggccatccgcaagctcgcgctcgagcacaagcccaagttgatcgtctgcggttattccgcttacccccgcacgatcgatttcccggccttccgtgccatcgccgatgaggtgggtgcgtatctgttggccgacatggctcacattgctggactggtcgctgcgggtgtccatcccagccctgtgcctcactgcgatgtggtcaccaccaccacccacaagacgctgcgcggtcctcgcggtggcctgatcctctgccgtgacgctgagttcgccaagcgctttgacaaggctgtgttccctggaacacagggtggtccgcttgagcacgtgattgcggccaaagctgtggcctttggagaagcgttgaccgacgacttcaaggcctacagccgtcaggttgtggccaacgcccaggccttggccaagcagattcaggcccgcggcatcgacgtggtcagtggtggcaccgataaccatgtggtgctgctggatctgcgcagcattggcatgaccggcaaggtcgctgacctgctggtgagtgacgtcaacatcacggccaacaaaaacaccgtgcccttcgacccagagtcgccttttgtgaccagtggtctgcgtctcggcactgctgcactcaccacccgtgggtttgataccgcagcgtttgctgaagtggcggatgtgattgctgatcggcttctcaatcccaacgacgatgccgttcaggcccgttgcaaggagcgcgtgctcaccctctgcagtcgcttcccgctctatgcaggcgcagcggctgttccggcgcttgcctga

SEQ ID NO: 79974 - protein, 430 aa, Synechococcus sp. RS9916
MSDRASAPINAALADADPAIAALIGQEQNRQETHLELIASENFASRAVMQAQGSVLTNKYAEGLPHKRYYGGCEHVDAIEELAIERAKELFGAAWANVQPHSGAQANFAVFLALLQPGDTIMGMDLSHGGHLTHGSPVNVSGKWFNVVQYGVDQATQRLDMEAIRKLALEHKPKLIVCGYSAYPRTIDFPAFRAIADEVGAYLLADMAHIAGLVAAGVHPSPVPHCDVVTTTTHKTLRGPRGGLILCRDAEFAKRFDKAVFPGTQGGPLEHVIAAKAVAFGEALTDDFKAYSRQVVANAQALAKQIQARGIDVVSGGTDNHVVLLDLRSIGMTGKVADLLVSDVNITANKNTVPFDPESPFVTSGLRLGTAALTTRGFDTAAFAEVADVIADRLLNPNDDAVQARCKERVLTLCSRFPLYAGAAAVPALA

SEQ ID NO: 79975 - DNA, 1296 bp, Vibrio sp. Ex25
  CDS (1)..(1296): transl_table=11
atgaataagagttaccctaaccacagcttggaaaactttttctctaccaacctctctgcgacagatgatgctgtctttgctggaattcaggcggaatccgctcgccaaaacgaacaaatcgaacttatcgcttctgagaacattgtttctaaagcggtaatgcaagctcaaggcacatgcctaacaaacaaatacgctgaaggttatccaggtcgtcgttactacggtggttgtgagcacgtagatacagtggaagccattgccatcgaacgcgcgaaaaaactttttaattgcgaatacgcaaacgttcaacctcactcaggcgctcaagcaaatggtgcggtgaaactggctcttcttcaaccaggcgacaccattcttggcatgtctttggacgctggtggccacctaacgcacggtgcacgcccagcactttctggtaaatggtttaacgcagttcaatacggcgttgatcgcgaaacactggaaatcaactacgacgacgttcgtgcacttgcagtagaacacaaaccaaagatgatcatcgcgggcggcagtgctattccacgcgttatcgattttgctaagttccgtgaaatcgctgacgaagttggcgcaattcttatggtcgatatggcacacattgctggccttatcgcaacaggtgcacaccctagcccattgccacatgcgcatgttgtgacaaccacaacacacaaaacattgcgtggccctcgcggcggtatgatcctgactaaccacgaagacatcattaagaaaatcaactccgccgtattccctggcctacaaggcggcccactaatgcacgttatcgcagcaaaagcggttgcatttggagaggcgcttggccctgaatttaaaacttatattgattcggtgatcaataacgcaaaagtcctagcggaagtattgcaaactcgcggttgcgacatcgtaactggtggcacagacacgcacctaatgctggttgaccttcgccctaaaggcttgaaaggcaacaaagcagaagaagctctagaacgtgctgggatcacatgtaacaaaaatggcatcccattcgatacagagaagcctatgattacatcgggcatccgtttaggaacgcctgcgggtacaagccgcggctttggcgctgaagaattcaaactcatcggtaattggattggtgacgtactggatggtttggtgaacaacccagaaggtgacgcagacgttgaaaaacgcgtccgcaaagaagtaaaagaactttgcagtcgcttccctctttaccaataa

SEQ ID NO: 79976 - protein, 431 aa, Vibrio sp. Ex25
MNKSYPNHSLENFFSTNLSATDDAVFAGIQAESARQNEQIELIASENIVSKAVMQAQGTCLTNKYAEGYPGRRYYGGCEHVDTVEAIAIERAKKLFNCEYANVQPHSGAQANGAVKLALLQPGDTILGMSLDAGGHLTHGARPALSGKWFNAVQYGVDRETLEINYDDVRALAVEHKPKMIIAGGSAIPRVIDFAKFREIADEVGAILMVDMAHIAGLIATGAHPSPLPHAHVVTTTTHKTLRGPRGGMILTNHEDIIKKINSAVFPGLQGGPLMHVIAAKAVAFGEALGPEFKTYIDSVINNAKVLAEVLQTRGCDIVTGGTDTHLMLVDLRPKGLKGNKAEEALERAGITCNKNGIPFDTEKPMITSGIRLGTPAGTSRGFGAEEFKLIGNWIGDVLDGLVNNPEGDADVEKRVRKEVKELCSRFPLYQ

SEQ ID NO: 79977 - DNA, 1257 bp, Alteromonadales bacterium TW-7
  CDS (1)..(1257): transl_table=11
atgttagaacgtagcatgaatatttcggactttgatccagagttatttgacgcgatgagtaaagaaacatcacgtcaagaagagcacattgagttaattgcatctgaaaactactgtagcccacgcgtacttgaagcacagggttctcaacttactaacaaatatgcggaaggttatcctggcaagcgttactacggtggctgtgagcacgtagacgtggttgagcaattagctattgaccgcgcaaacgaattgtttggtactgactacgcaaacgttcagccgcatgcaggttcgcaagccaatgccgctgttttccaagccttattaagcccgcttgatacagtacttggcatgagcctagcacacggtggccatttaactcatggttcacacgtaaacttttcaggtaaaacatataacgcgattcagtatggcctaaacgaagagactggcgaaattgattacgcacaagttgaagcgttagcactagagcacaagccaaaaatgattatcgcaggtttttctgcttattcaggtattgttgattgggctaagtttcgcgaaattgcagataaagtagatgcttacttgtttgttgatatggcgcatgttgcaggtttaattgctgcgggtgtttacccaagcccagtaccatttgcacatgttgttactacaacaacgcataaaacattagcgggccctcgtggcggtttaataatttctgcatgtggtgacgaagcaatttacaaaaagcttaacagtgctgtattccctggtggccaaggtggtcctttatgtcacgttattgctgcaaaagcagtggcattcaaagaagctttacaaccagagtttaaagaataccaaacacaagttgttaaaaatgcgcaagcaatggttagcgtattacaagagcgtggctacaaagttgtttctggtaaaacagacaatcacttgttcttacttgatttaatcgataaagacattacgggtaaagatgctgatgcagcactaggtaatgcgaacattacggttaacaaaaactcagttcctaatgatccgcgttctccgtttgtaacgtctggcttacgcattggttctcctgcaatcacgcgccgtggtttcaaagaggctgaatctaaagagcttgctggctggatttgtgatgtactagacaacattgctgatgagtctgttcaagcgcaagtaaaagaaaaagtgaaagcaatttgtgcaaaactacctgtttacgcttaa

SEQ ID NO: 79978 - protein, 418 aa, Alteromonadales bacterium TW-7
MLERSMNISDFDPELFDAMSKETSRQEEHIELIASENYCSPRVLEAQGSQLTNKYAEGYPGKRYYGGCEHVDVVEQLAIDRANELFGTDYANVQPHAGSQANAAVFQALLSPLDTVLGMSLAHGGHLTHGSHVNFSGKTYNAIQYGLNEETGEIDYAQVEALALEHKPKMIIAGFSAYSGIVDWAKFREIADKVDAYLFVDMAHVAGLIAAGVYPSPVPFAHVVTTTTHKTLAGPRGGLIISACGDEAIYKKLNSAVFPGGQGGPLCHVIAAKAVAFKEALQPEFKEYQTQVVKNAQAMVSVLQERGYKVVSGKTDNHLFLLDLIDKDITGKDADAALGNANITVNKNSVPNDPRSPFVTSGLRIGSPAITRRGFKEAESKELAGWICDVLDNIADESVQAQVKEKVKAICAKLPVYA

SEQ ID NO: 79979 - DNA, 1263 bp, marine gamma proteobacterium HTCC2143
  CDS (1)..(1263): transl_table=11
atgtttactaaagatatgcaaattgaagattttgataacgaaattttttcagctatccagcaggaaaatcagcgccaagaacagcatattgaactaatcgcgtcagaaaactatgccagtccgcgggtgatggaagctcagggtagctccatgactaataaatacgcagagggctatcctggcaagcgttactacggcggttgcgagtttgttgataaagccgaagtgttagctatcgagcgcgcaaagaccttgtttggagcagattatgccaacgtgcaaccgcattccggttctcaggctaactcggcagtctatctggctttgctggaggcgggtgatacggttttgggtatgagtctcgatgcgggtggccatttaacccacggagccaagcctaatttttccggtaaggtatacaatgctgtccaatatgggctgaacgctgagacgggcattattgactatgagcaagttgaagcattggcgctggagcacaagccaaaaatgattgtagccggcttttccgcttattcgggtattgtcgattgggctaagtttcgcgagatagctgataaagttggtgcttacttgttggtggatatggctcatattgccgggctcgttgccgcgggtttataccctaatccagtgccttttgccgacgtcgttacatcgaccacccataaaacactgcgtggccctcgtggcggtatcattttagctaagcacaatgaagcgttggaaaagaaatttaactcagcggtatttccgggaggccagggcgggccgctgatgcatgtgattgctgctaaagcggtaagttttaaagaggcggccaccgcagagttcaaagagtatcagcagcaggttattactaatgccaaagtgatggctgagacctttatcgcgcgcggtataaaaattgtctcaggtggcacctataaccacttgatgttggttgatctgatcggtaaagaatataccggcaaagatgccgatgccgcactgggtgatgcatttattaccgtcaataaaaatgccgtgcccaacgatcctcgctcaccttttgtcacctctggcctgcgcgttggcacgcccgctattactacccggggctttaaagaagatgaaactcgcgagttgacccactggatgtgtgatgtgctggaatcattggaaagcgggaatagtgaaacggttattcctcaggtaaaagccaaggtgcttgatatttgcagtcgtttccccgtgtataaatag

SEQ ID NO: 79980 - protein, 420 aa, marine gamma proteobacterium HTCC2143
MFTKDMQIEDFDNEIFSAIQQENQRQEQHIELIASENYASPRVMEAQGSSMTNKYAEGYPGKRYYGGCEFVDKAEVLAIERAKTLFGADYANVQPHSGSQANSAVYLALLEAGDTVLGMSLDAGGHLTHGAKPNFSGKVYNAVQYGLNAETGIIDYEQVEALALEHKPKMIVAGFSAYSGIVDWAKFREIADKVGAYLLVDMAHIAGLVAAGLYPNPVPFADVVTSTTHKTLRGPRGGIILAKHNEALEKKFNSAVFPGGQGGPLMHVIAAKAVSFKEAATAEFKEYQQQVITNAKVMAETFIARGIKIVSGGTYNHLMLVDLIGKEYTGKDADAALGDAFITVNKNAVPNDPRSPFVTSGLRVGTPAITTRGFKEDETRELTHWMCDVLESLESGNSETVIPQVKAKVLDICSRFPVYK

SEQ ID NO: 79981 - DNA, 1299 bp, marine gamma proteobacterium HTCC2080
  CDS (1)..(1299): transl_table=11
atgaatcaagcggcatctcagccttcgaactttctggatgatgacgtacagtccatccaggcttttgatccagacctttggaaggctatgcgttcagaggcgcagcgccaggaggaccacgtcgagctgattgcgtcagagaattacgctagcccccgtgtgctcgaggcgcagggttcggttttgaccaacaaatacgcagaaggctacccgggcaaacgttactacggtgggtgcgagtttgttgacgtagcagaggatttggcgattgaacgggctaaaacgctctttggcgctgcctatgccaatgttcaaccgcattcaggatcgagtgccaatattgcggtgtatcacgccttgcttgagcccggcgacactgtaatgggaatgagcttggccgacggtggccacctcacccatggcgcatcggtcaacttctccggaaaaatttataacgcggtgcaatatggcattaatcacgatacgggtctcattgattacgatgccctgatggaattggccaaggctcacaagccgaaactcattattggtggtttctcggcttacagtcgcattatggactggtctaagttccgtgaaattgcagacaccgtaggggcttggctgctggttgatatggctcatgttgcgggtcttgttgcggcaggagtttacccgtcacccatgccttatgctgacgtcgtgacgtcaacgacgcataaaactctccgtgggcctcgcagcggaattattttagcgaaggacgacgaggcactgcacaaaaaattgaacagcgcggtttttccaggtgctcagggtggcccgctaatgcatgtgatcgctgctaaggcggtagctttcaaggaggcaatggagcctgattttgctgactatcagcgtcaggtggttaagaacgcccaggcaatggcagctaccttcattgagcgtgggcacaagattgtgtctggtggtaccgacaatcacctcatgttgctggatttgatcggcaagtcttacaccggtaaagatgccgatgcggctctgggtgacgcttacatcactgtgaataaaaatgcggttcccaatgatccacgctcgccttttgtaacctctggcttacgtttgggaaccccggccatcacaacccgcggtttttctgaggctgacacagccacgttgacgcattggatttgtgacgttttggctgcgcttgaaactggcactggggataaggtgatccctgaggttcgccagaaggtgttagaggtttgtggtcgtttacccgtgtaccgacgttag

SEQ ID NO: 79982 - protein, 432 aa, marine gamma proteobacterium HTCC2080
MNQAASQPSNFLDDDVQSIQAFDPDLWKAMRSEAQRQEDHVELIASENYASPRVLEAQGSVLTNKYAEGYPGKRYYGGCEFVDVAEDLAIERAKTLFGAAYANVQPHSGSSANIAVYHALLEPGDTVMGMSLADGGHLTHGASVNFSGKIYNAVQYGINHDTGLIDYDALMELAKAHKPKLIIGGFSAYSRIMDWSKFREIADTVGAWLLVDMAHVAGLVAAGVYPSPMPYADVVTSTTHKTLRGPRSGIILAKDDEALHKKLNSAVFPGAQGGPLMHVIAAKAVAFKEAMEPDFADYQRQVVKNAQAMAATFIERGHKIVSGGTDNHLMLLDLIGKSYTGKDADAALGDAYITVNKNAVPNDPRSPFVTSGLRLGTPAITTRGFSEADTATLTHWICDVLAALETGTGDKVIPEVRQKVLEVCGRLPVYRR

SEQ ID NO: 79983 - DNA, 1260 bp, Candidatus Desulfococcus oleovorans Hxd3
  CDS (1)..(1260): transl_table=11
atgatcattgactatctggcacagcaggaccccgaggtggccggggccgttgcccgtgaagtggagcggcagcagcacaacctggaactgatcgcatcggaaaacatcgccagccgggccgtaatggcggcccagggaagcgtgctgaccaacaaatatgccgaggggtacccgggcaaacgctattacggcggatgtgaatacgtggaccaggccgagcagatcgccattgaccgggccaaaaccctgttcggcgccgcctacgccaatgtccagccccactccggttcccaggccaacatggcggtctattttgccctgctgtcgcccggcgacacgggactgggcatggacctggcccatggcggccacctgacccacggcagcccggtgagtttttccggccggctgtttgactttaaacactatggcgtaaaaaaagagaccggcaccatcgactatgatcaggtggccgacctggcgaaaacccaccggccgaaaatgatcatcgccggcgccagcgcctatccccgaaccctggattttgaaaagttcgcgcagatcgccgcgtcagtggaggcctgcctggtggtggacatggcccatatcgccggcctggtggcggccggggttcatccgtcgccggttccccacgcggacgtggtcacctccaccacgcacaagacgctgcgcggcccccggggcggcctgattctttcagccagggccgatttcggaaaggccttgaacaaggagatttttcccggcattcagggcgggcccctgatgcacgtgatcgcggcaaaggccgtggcctttggcgaggcccttaccgacggttttgtggcctaccagcagcaggtggtaaaaaacgcccgcgcactggccgcgcacctgatggaacagggcattgagctggtatccggcggcaccgacaatcacatgatgctggccgacctgcgcaacatcagcgtcaccggcaaagccgccgagaccgccctggaacgggccggcctgaccctgaacaaaaacgccgtgccctttgacacggaaaaccccaccgtgaccagcggggtccgcatcggcaccccggtgatgaccacccggggcatgaaggagccggaaatggcggtggtggccgggctgatcgtgaacgtgctgaagaacatttccaacgataccgtgattcaggccacccggaagcgggtcatggagctgtgcgaggcctttccgatttaccgtgacaacgacaatggataa

SEQ ID NO: 79984 - protein, 419 aa, Candidatus Desulfococcus oleovorans Hxd3
MIIDYLAQQDPEVAGAVAREVERQQHNLELIASENIASRAVMAAQGSVLTNKYAEGYPGKRYYGGCEYVDQAEQIAIDRAKTLFGAAYANVQPHSGSQANMAVYFALLSPGDTGLGMDLAHGGHLTHGSPVSFSGRLFDFKHYGVKKETGTIDYDQVADLAKTHRPKMIIAGASAYPRTLDFEKFAQIAASVEACLVVDMAHIAGLVAAGVHPSPVPHADVVTSTTHKTLRGPRGGLILSARADFGKALNKEIFPGIQGGPLMHVIAAKAVAFGEALTDGFVAYQQQVVKNARALAAHLMEQGIELVSGGTDNHMMLADLRNISVTGKAAETALERAGLTLNKNAVPFDTENPTVTSGVRIGTPVMTTRGMKEPEMAVVAGLIVNVLKNISNDTVIQATRKRVMELCEAFPIYRDNDNG

SEQ ID NO: 79985 - DNA, 1254 bp, Pseudomonas putida GB-1
  CDS (1)..(1254): transl_table=11
atgttccataaaagcctgaccctgtctgacttcgaccctgcgctgtccgaggccattcgccgagaagtgcaacgccaggaagaccacatcgagctgatcgcctcggaaaactacaccagcccgcaggtgatgcaggcccaaggtaccgaactgaccaacaagtacgccgaaggctacccaggcaagcgctattacggtggctgcgagcatgtcgacgtggtcgagcaactggccatcgagcgtgccaggcaactgttcggcgcgggttacgccaacgtccagccgcactcaggctcgcaggccaacgccgcggtctacctggccttgctgcaggccggggataccctgctgggcatgagcctggcgcacggcggccacttgacccacggcgccaaggtgtcggcttcgggcaagctgtacaacgctgtgcaatacggcatcgatgccaacggcttgatcgactacgacgaggttgagcgcctggccgtcgagcaccagccgaagatgatcgtggcaggcttctcggcctattcgaaaaccctcgacttcccgcgtttccggcagatcgccgacaaggtcggggcctacctgttcgttgacatggcccacgtcgccggcttggtggcggcaggcctgtaccccaatccgctgccttatgccgatgtggtcaccaccaccacccacaagaccctgcgcgggccacggggtggtttgattctggccaaggcggacccggagcttgagaaaaagctcaattcggcggtgttcccaggcgggcagggtgggccgctgatgcatgtgatcgcagccaaggcggtgtgcttcaaggaggccctggaacctggtttcaaggactaccagcgccaggtcgtcaacaacgcacaggccatggcgcaagtcttcatgcagcggggcttcgacgtggtttccgggggcaccgacaaccacctgttcctgcttagcctgatccgccagggcatcaccggcaaggacgccgacgccgcgctgggccgggcgcacatcacggtgaacaagaacgccgtgcctaatgacccacagtcgccgttcgtgacgtcgggcctgcgcattggcaccccggcggtaacgacccgtggtttcaaggaagcggaatgccgggccctggcgacctggatctgcgacatcctcgaccaccttggtgatgccgatgtcgaggcccatgtggcggggcaggtgggcgaactgtgcaagttgttcccggtttatccggcctga

SEQ ID NO: 79986 - protein, 417 aa, Pseudomonas putida GB-1
MFHKSLTLSDFDPALSEAIRREVQRQEDHIELIASENYTSPQVMQAQGTELTNKYAEGYPGKRYYGGCEHVDVVEQLAIERARQLFGAGYANVQPHSGSQANAAVYLALLQAGDTLLGMSLAHGGHLTHGAKVSASGKLYNAVQYGIDANGLIDYDEVERLAVEHQPKMIVAGFSAYSKTLDFPRFRQIADKVGAYLFVDMAHVAGLVAAGLYPNPLPYADVVTTTTHKTLRGPRGGLILAKADPELEKKLNSAVFPGGQGGPLMHVIAAKAVCFKEALEPGFKDYQRQVVNNAQAMAQVFMQRGFDVVSGGTDNHLFLLSLIRQGITGKDADAALGRAHITVNKNAVPNDPQSPFVTSGLRIGTPAVTTRGFKEAECRALATWICDILDHLGDADVEAHVAGQVGELCKLFPVYPA

SEQ ID NO: 79987 - DNA, 1254 bp, Pseudomonas putida GB-1
  CDS (1)..(1254): transl_table=11
atgttcagccgtgatttgaccattgccaagtacgacgccgagctcttcgaagccatgcagcaagaagccctgcgccaggaagagcatatcgagctgatcgcttcggaaaactacaccagcccggccgtcatggaagctcagggctcggtcctgaccaacaagtacgccgaaggctacccaggcaagcgctactacggtggttgcgagtacgtcgacatcgtcgagcaactggccatcgaccgtgccaaggagctgttcggcgccgactacgccaacgtccagccgcacgctggctcccaggccaacgctgccgtctacctggccctgctgtcggccggtgacaccatcctgggcatgagcctggcccacggtggtcacctgacccacggtgcttcggtaagctcgtcgggcaagctgtacaacgccatccagtacggcatcgacggcaacggcctgatcgactacgacgaagtcgagcgcctggctgtcgagcacaagccaaagatgatcgttgccggcttctcggcctactcgcaggttctggacttcgcccgcttccgcgccatcgccgacaaggtcggtgcctacctgttcgtcgacatggcccacgttgccggcctggttgccgctggcgtgtacccgaacccggtgccgttcgccgacgtggtcaccaccaccacccacaagaccctgcgcggcccacgcggcggcctgatcctggcccgtgccaacgccgacatcgagaagaagctgaactccgctgtcttcccaggcgcccaaggcggcccgctggagcacgtaatcgccgccaaggccatctgcttcaaagaagccctgcaacctgagttcaaggcttaccagcagcaagtcgtgaagaacgcccaggccatggccagcgtgttcatcgagcgtggtttcgacgtggtttccggtggcacccagaaccacctgttcctgctgtcgctgatcaagcaggaaatttccggtaaggacgctgacgctgccctgggcaaagccttcatcaccgtgaacaagaactcggtcccgaacgacccacgttcgccgttcgtcacctcgggcctgcgtttcggcaccccagccgttaccacccgtggtttcaaggaagccgagtgcaaggaactggctggctggatctgcgacatcctggctgacctgaacaacgaagcggtgatcgacgccgtacgtgagaaggtcaaggccatctgcaagaagctgccggtttacggcaactga

SEQ ID NO: 79988 - protein, 417 aa, Pseudomonas putida GB-1
MFSRDLTIAKYDAELFEAMQQEALRQEEHIELIASENYTSPAVMEAQGSVLTNKYAEGYPGKRYYGGCEYVDIVEQLAIDRAKELFGADYANVQPHAGSQANAAVYLALLSAGDTILGMSLAHGGHLTHGASVSSSGKLYNAIQYGIDGNGLIDYDEVERLAVEHKPKMIVAGFSAYSQVLDFARFRAIADKVGAYLFVDMAHVAGLVAAGVYPNPVPFADVVTTTTHKTLRGPRGGLILARANADIEKKLNSAVFPGAQGGPLEHVIAAKAICFKEALQPEFKAYQQQVVKNAQAMASVFIERGFDVVSGGTQNHLFLLSLIKQEISGKDADAALGKAFITVNKNSVPNDPRSPFVTSGLRFGTPAVTTRGFKEAECKELAGWICDILADLNNEAVIDAVREKVKAICKKLPVYGN

SEQ ID NO: 79989 - DNA, 1254 bp, Marinobacter sp. ELB17
  CDS (1)..(1254): transl_table=11
atgtttaatcgtgatatgaaaatcgccggttttgacgacgagctctggaacgccatgcaggcggagagccatcgccaggaagctcatatcgagctgattgcgtcggagaactacactagtccgcgggtgatggaggcgcagggcagtgatttgaccaacaagtacgcggaaggttatcccggcaagcgttactacggcggttgtgagtttgtagatattgccgagcagctggctattgatcgcgccaaagaattgttcggagcggcctacgccaacgtgcagccgcactctggttcacaggccaactcggcggtgtttctagctctgctgaatgcgggcgatacggtactgggcatgagcctggctcacggtggccacctgacccacggcgccagcgtgaatttctccggcaaaatttacaacgctgttcaatatggtatcgacaccgacacaggtctgatcaattacgacgacgtggaagcgttggcggtggagcacaagccgaagatgatcattgccggcttctccgcttattcgcagtatcttgatttcgcccgtttccgcgagattgccgataaagtgggtgcctacctgtttgtcgacatggctcacgtagctggtctggtggcagcgggtgtttaccctgacccagtcccccacgcccacgtgctgaccaccaccacccacaaaaccctgcgcggcccccgcggcgggctgattctggcctgtgatgacgaagctctgcacaagaagctgaactccgcggtattccccggtggccaaggtggcccgctgatgcacgtgattgcggccaaagcgatctgcttcaaagaagccatgagccccgagttcaagacgtatcagcagcaagtggttaaaaacgctgcggccatggccgaagtgtttgttgatcgcggttttgacgtggtgtccggcggcaccaaaaaccatctgttcctgttaagcctgatcaaacaggacatcaccggtaaagacgccgatgcagcactgggccgggctcatattaccgtgaacaaaaacgcggtaccgaacgacccgcgctcgccttttgttacgtcgggtctgcgcattggtacgccagctattaccactcgtggttttgccgaagcggaatgtcgcgaactttccggctggatttgtgacattcttgccgacctgaacgacgaagccgtgattgaccgtgtgcgcgggcaggttgaagccatgtgcgcccgcttcccggtatacgcgtaa

SEQ ID NO: 79990 - protein, 417 aa, Marinobacter sp. ELB17
MFNRDMKIAGFDDELWNAMQAESHRQEAHIELIASENYTSPRVMEAQGSDLTNKYAEGYPGKRYYGGCEFVDIAEQLAIDRAKELFGAAYANVQPHSGSQANSAVFLALLNAGDTVLGMSLAHGGHLTHGASVNFSGKIYNAVQYGIDTDTGLINYDDVEALAVEHKPKMIIAGFSAYSQYLDFARFREIADKVGAYLFVDMAHVAGLVAAGVYPDPVPHAHVLTTTTHKTLRGPRGGLILACDDEALHKKLNSAVFPGGQGGPLMHVIAAKAICFKEAMSPEFKTYQQQVVKNAAAMAEVFVDRGFDVVSGGTKNHLFLLSLIKQDITGKDADAALGRAHITVNKNAVPNDPRSPFVTSGLRIGTPAITTRGFAEAECRELSGWICDILADLNDEAVIDRVRGQVEAMCARFPVYA

SEQ ID NO: 79991 - DNA, 1326 bp, Cenarchaeum symbiosum
  CDS (1)..(1326): transl_table=11
atggccggagccagtaccagcagaaagtcctacgggagaatctttaccctgctccgggaccacaacaagtggtttgagaactcgatcccgctgattgccagcgagaacatacccagccccgcagtgcgcgaggcgctgatctccgactttggcaaccgctatgccgaaggctggcccggcgagagggtatatgcaggctgcacctacatcgacatggtcgagaccgaatgcatgaagctcgccaagaagctcttcaaggcggagtttgccgacgtcaggcccgtctcaggtgtggtggccaacctggcgatatactcggccttctcagatcctggcgatgtaatgatcgccccctcgataccagcaggcgggcacatatcgcacggcagaaaggagcactccggcactgcgggcctcgtccacggactcgaggtcgagttctatccttttgatgccaagagcatgaccatagatgtagacgcgacaaaggccaagattatagatctggagaaggcggggcgcactcccaagatagccatgttcgggggctcgctgttcctgttcccccacccggtaaaggagctagcagagttcatgaagggccgcggcatgcacatcaactacgacggcgcccatgtcgccggcctgatagcgggggggcagttccaggacccgataagggagggcgcagacacgatgaccatgagcacgcacaagacgctctttggcccccagggcggcctggtactcggccggaatgagcacgcagaggggatcaaaaaggcgatgttccccgggcttacgagcagccaccacatacaccacatggcggcaaaggctgtggcattcaccgaggctctcgagtttggcaaaaagtatgcaaaagacgtggtccgtaacgcaaaggccctggcagagtcactaagcgggcttggcttcaaggtgctcggcgaggacgggggctttacaaagtcgcaccaggtggcagtcaacgtgctggagtattccgacgggggcaagatcgaggcccggctggagaaggccaacattatagtaaaccggcagctcatacccggcgatatcaaggctgggcgccactacctgcaccccggcgggatcaggctgggcgtctcggaggtcacaaggctcggcatgggcacaggcgagatggcggagatagccgagcttatgaaacaggcggtaacagaacgcggggacccaaagaggctcgcatcaaaggtaaaatcgttcaggaagccctttcagaaggtgcagtactgctttgacaagaaactgcccgcctacgaatacgtaaagctcaggtag

SEQ ID NO: 79992 - protein, 441 aa, Cenarchaeum symbiosum
MAGASTSRKSYGRIFTLLRDHNKWFENSIPLIASENIPSPAVREALISDFGNRYAEGWPGERVYAGCTYIDMVETECMKLAKKLFKAEFADVRPVSGVVANLAIYSAFSDPGDVMIAPSIPAGGHISHGRKEHSGTAGLVHGLEVEFYPFDAKSMTIDVDATKAKIIDLEKAGRTPKIAMFGGSLFLFPHPVKELAEFMKGRGMHINYDGAHVAGLIAGGQFQDPIREGADTMTMSTHKTLFGPQGGLVLGRNEHAEGIKKAMFPGLTSSHHIHHMAAKAVAFTEALEFGKKYAKDVVRNAKALAESLSGLGFKVLGEDGGFTKSHQVAVNVLEYSDGGKIEARLEKANIIVNRQLIPGDIKAGRHYLHPGGIRLGVSEVTRLGMGTGEMAEIAELMKQAVTERGDPKRLASKVKSFRKPFQKVQYCFDKKLPAYEYVKLR

SEQ ID NO: 79993 - DNA, 1497 bp, Oryza sativa subsp
  CDS (1)..(1497)
atggccatggcgacggcgctccgcaagctctcctccgacgccctccgccgccagccgctctcccgcatcaccccgctctactacatgtggccgaagcagctgaacgcgccgctggaggaggtggatcccgagatcgccgacatcatcgagcacgagaaggcccgccaatggaagggtctggagctcatcccgtcggagaacttcacctcggtgtcagtgatgcaggcggtgggatccgtcatgaccaacaagtacagcgaggggtaccccggcgcgagatactacggtggaaacgaatacattgatatggccgagtcattgtgccagaaacgtgctttggaggccttccgcttggacccagcgaaatggggagtgaatgtgcaacctctatcagggtcacctgccaacttccatgtttacactgccctattgaaaccacatgagagaatcatggctttggatcttcctcatggtggacatctttctcacggctaccagactgatactaagaagatttcagcagtttcgatattctttgagacaatgccctacagattggatgaaagcactggcttgattgattatgatcagatggagaaaagtgccgttctttttaggccaaagttgatcgttgcgggtgcaagtgcatatgcgcgtctttatgactatgaccgcatgcggaaggtttgtgacaagcagaaggcaatacttctagcagatatggcacatatcagtgggcttgtcgcagctggtgttgttccatctccttttgattatgcagatgtagtgactaccactactcacaagtcactccgtggaccacgtggagccatgatcttttacaggaagggggtgaaaggagtaaacaagcaaggcaaagaggttatgtatgactttgaggacaagatcaatgctgctgtcttcccaggtctgcaaggtggaccacataatcataccattactggcttagctgttgcgcttaagcaggcaactactccggagtacagagcttatcaagagcaagttatgagtaactgtgcaaaatttgcacagagcttgacagcaaaaggctacgaacttgtctctggtgggactgacaaccatttagtgttggtaaatctcaagagcaagggcatagatggttcaagagtggagaaggttttagaaaacgtgcacattgcagcaaacaagaacacagttcctggtgatgtttcagctatgctccatgatcatgcaggaaccccagcactgacctcaagaggatttgttgaggaggactttgctaaggttgctgatttcttcgatgcagcagtgaacttggctttgaaggttaaggctgcagcaggtggaacaaaactgaaggactttgttgccactttgcaatctgatagcaacattcaatccgagattgcaaaacttcgccatgatgtggaggaatatgcaaaacagttccccacaattgggtttgagaaagaaaccatgaagtacaagaactaa

SEQ ID NO: 79994 - protein, 498 aa, Oryza sativa subsp
MAMATALRKLSSDALRRQPLSRITPLYYMWPKQLNAPLEEVDPEIADIIEHEKARQWKGLELIPSENFTSVSVMQAVGSVMTNKYSEGYPGARYYGGNEYIDMAESLCQKRALEAFRLDPAKWGVNVQPLSGSPANFHVYTALLKPHERIMALDLPHGGHLSHGYQTDTKKISAVSIFFETMPYRLDESTGLIDYDQMEKSAVLFRPKLIVAGASAYARLYDYDRMRKVCDKQKAILLADMAHISGLVAAGVVPSPFDYADVVTTTTHKSLRGPRGAMIFYRKGVKGVNKQGKEVMYDFEDKINAAVFPGLQGGPHNHTITGLAVALKQATTPEYRAYQEQVMSNCAKFAQSLTAKGYELVSGGTDNHLVLVNLKSKGIDGSRVEKVLENVHIAANKNTVPGDVSAMLHDHAGTPALTSRGFVEEDFAKVADFFDAAVNLALKVKAAAGGTKLKDFVATLQSDSNIQSEIAKLRHDVEEYAKQFPTIGFEKETMKYKN

SEQ ID NO: 79995 - DNA, 2172 bp, Oryza sativa subsp
  CDS (1)..(2172)
atggaccatcggcccgacctgtccctcgccctccacccgccgccgccgcccgagggctcgtccgccgccgccgccgaggaggtgggggaggaggaggccgaaggcggcgaggggcggttctccctcatgggccagccgctcttcctcaagcggccgcggccgcggcccccgcgcccgccccgcgcgcgcggggtgggggacgacgtcgacgtcgacgtcgacgacgactcatccccgtgctgctcctcctcctgcctctcgcccgcggcgaagcggcgggcggcggcgggaggactcgaggcgcgccgcgcggccgtgcgcgcgtggggatgccagccgctcccggaggcggacccggacgtgcacgagctgatggagcgggagcggcgccggcaggcgggcggggtcgagctcatcgcctccgagaactacgcctgccgcgcggtgctcgacgcgctcggcagccacctcaccaacaagtactccgagggcctccccggcgcgcgctactactgcggcaaccagcacatcgacgccatcgagcgcctctgctgcgaccgcgcgctcgccgccttcggcctcgacccgtcgcgctggggcgtcaacgtgcagccctactcctgcacctccgccaacttcgccgtctacacggggctcctcctccccaacgacaggatcatgggcctcgactcgccgtccggcggccacgtcagccacgggtactacacgcccagcggcaagaaggtctccggcgcctccatcttcttcgagaacctctcctacagggtgaacccgcacaccgggtacatcgattacgataaggtagaggagaaggccgtggatttccaccccaagattctcatctgcggcgcgagctcgtatccaagggattgggactatgcacggatgcggcttgttgctgataagtgcggcgcagtactcatgtgtgacatggcacaaatcagtggtcttgtggcagcgaaggaatgtcgaaatccctttgactactgcgatattgttacttcaaccacacacaagagcttgaggggtcctagaggtggtataatatttttcaggaaagggaaaaatctaaggaaacgggtcggatctttaactcaagtggttgaaaatgatcagtatgattttgaggaccgtataaattttgctgttttcccttcaatgcaaggtggaccccacaataaccatattgctgctctggctatagctctaaaacaagtagccatgccagaattcaaagcatacattcaacaagtcaagaaaaatgcccaagctttggcgatggccttgctcaggaggaaatgcagactggttactggtggcacagataatcatttggtgctctgggacctaagaacatttggcttgacagggaagaactttgagaaggtctgtgaggcatgtcatatctctcttaataaaacaccaatatatggagataatggttcgatttctcctggaggaactcctgccatgacaactagaggttgcttggagagtgactttgagataatggcagaattccttttgagggcagcacatatagcaagtattgttttgaaggagcatggaaggcttcagaaggattttctgaaaggtctggagaacaataatgacattattgaactccagaatcagatttgtctcatcttttccatttcaagaaggtatataatctttgtgagtgaagttatcatgactcctgaaccaaaggacggcgaggatatgccaccgtccgctggctcgacgcccagccggccaagtccgtcgtccgtcgtgtacatcgcgctaggcagcgaggtgccactgcgcgtggataaggtccacgagctcgcgctcgggctggacgtcgccgggacgcgcttcctgtgggctctgaggaagcccactggcgtctccgacaccgacctcctccccgctggcttcgaggagcgctcgtgcggccgcggcgtcgtggcgacgagatgggttcctcagatgagcacactggcgcacgccgagaaggcgtcgcggcagcgattcgtgcagtcgcggtggaggtcctggaggaagaaagcagcaaagcgtttcaagccaataccaagaagctgcaggagatcgtcgcggacatggcctgccatgagaggtacatcgacggattcattcagcaattga

SEQ ID NO: 79996 - protein, 723 aa, Oryza sativa subsp
MDHRPDLSLALHPPPPPEGSSAAAAEEVGEEEAEGGEGRFSLMGQPLFLKRPRPRPPRPPRARGVGDDVDVDVDDDSSPCCSSSCLSPAAKRRAAAGGLEARRAAVRAWGCQPLPEADPDVHELMERERRRQAGGVELIASENYACRAVLDALGSHLTNKYSEGLPGARYYCGNQHIDAIERLCCDRALAAFGLDPSRWGVNVQPYSCTSANFAVYTGLLLPNDRIMGLDSPSGGHVSHGYYTPSGKKVSGASIFFENLSYRVNPHTGYIDYDKVEEKAVDFHPKILICGASSYPRDWDYARMRLVADKCGAVLMCDMAQISGLVAAKECRNPFDYCDIVTSTTHKSLRGPRGGIIFFRKGKNLRKRVGSLTQVVENDQYDFEDRINFAVFPSMQGGPHNNHIAALAIALKQVAMPEFKAYIQQVKKNAQALAMALLRRKCRLVTGGTDNHLVLWDLRTFGLTGKNFEKVCEACHISLNKTPIYGDNGSISPGGTPAMTTRGCLESDFEIMAEFLLRAAHIASIVLKEHGRLQKDFLKGLENNNDIIELQNQICLIFSISRRYIIFVSEVIMTPEPKDGEDMPPSAGSTPSRPSPSSVVYIALGSEVPLRVDKVHELALGLDVAGTRFLWALRKPTGVSDTDLLPAGFEERSCGRGVVATRWVPQMSTLAHAEKASRQRFVQSRWRSWRKKAAKRFKPIPRSCRRSSRTWPAMRGTSTDSFSN

SEQ ID NO: 79997 - DNA, 1596 bp, Oryza sativa subsp
  CDS (1)..(1596)
atggcgatggcttcgcaccacctcgcccagccgcccacgcgcgcggctctctcctcgcgccccacctacccgctctccagccatcaccactcctcccgtctccagctcccgctcttcagtggggcgcggcgcagcaggttgtcccccgcggtggcgacgtccccggtcgccgccccagcgatggacgccgtggccgactgggggctgaccacgctggaggaaaccgacccggaggtgtacgacctcgtcgagcgcgagaagcggcggcagcgcgcgggcgtcgagctcatcgcgtcggagaacttcacctcgctcgccgtcatggaggcgctgggctcgccgctcaccaacaagtactccgagggcatgccgggggcccgctactacggcggcaacgaggtcatcgacgaggtggaggagctctgccgcgcccgcgcgctcgccgccttccacctcgaccccgaggcctggggcgtcaacgtgcagccctactccggctcgccggcgaacttcgccgcctacaccgggctgctccaaccccacgagcggatcatggggctcgatttgccgtccggcggccacctcacgcacggctactacaccgccggcggcaaaaagatctccgccacgtccatctacttcgagagcctgccgtacaaggtgagctccgagacaggatacgtcgattatgataagctggaggagaaggccatggattttcggcccaagctcatcatctgcggcgggagcgcgtacccgcgggattgggattacgccaggttcagggccatcgcggataagtgcggcgccatgttgctctgcgacatggctcacatcagtggcctagttgccgctcaggaggctgcaaatccttttcaatattctgatgtggttaccactaccacccacaagagtctccgagggccaagatctggtatgatcttctacaggaagggcccgaagcctcccaagaaaggccagcctgagggcgctctgtatgactacgaggacaggatcaacttcgcagtgtttccgtcgctccaagggggccctcacaaccaccaaattgctgcgctagcggttggtttgaagcagactatgtcacctggattcaagtcttatattaagcaggtcaaggccaatgctgttgcccttggtaaccatttgatgagtaagggctacaaattggttactgacggaacagagaaccatcttgttctctgggatctgcgccctcttggcttgactggtaacaaagttgagaaggtctgtgatttgtgcagcattacactgaataaaaatgctgtctttggggatagcagtgcaatgtcacctggtggtgtccgcattggtacacctgccatgacatcaaggggtttggtagagaaggactttgtacagatcgccgagttccttcaccaggcagtgaccatctgcttggatgttcagaaggagcgtggcaagcttctcaagtacttcaacgagggcctggagaacagcaaggacattgaggacctcagggcggaggtggagaagtttgccacttcattcgagatgcctggcttcagggtatccgacatgaagtacaaggattag

SEQ ID NO: 79998 - protein, 531 aa, Oryza sativa subsp
MAMASHHLAQPPTRAALSSRPTYPLSSHHHSSRLQLPLFSGARRSRLSPAVATSPVAAPAMDAVADWGLTTLEETDPEVYDLVEREKRRQRAGVELIASENFTSLAVMEALGSPLTNKYSEGMPGARYYGGNEVIDEVEELCRARALAAFHLDPEAWGVNVQPYSGSPANFAAYTGLLQPHERIMGLDLPSGGHLTHGYYTAGGKKISATSIYFESLPYKVSSETGYVDYDKLEEKAMDFRPKLIICGGSAYPRDWDYARFRAIADKCGAMLLCDMAHISGLVAAQEAANPFQYSDVVTTTTHKSLRGPRSGMIFYRKGPKPPKKGQPEGALYDYEDRINFAVFPSLQGGPHNHQIAALAVGLKQTMSPGFKSYIKQVKANAVALGNHLMSKGYKLVTDGTENHLVLWDLRPLGLTGNKVEKVCDLCSITLNKNAVFGDSSAMSPGGVRIGTPAMTSRGLVEKDFVQIAEFLHQAVTICLDVQKERGKLLKYFNEGLENSKDIEDLRAEVEKFATSFEMPGFRVSDMKYKD

SEQ ID NO: 79999 - DNA, 1425 bp, Oryza sativa subsp
  CDS (1)..(1425)
atggccatggcgacggcgctccgcaagctctcctccgacgccctccgccgccagccgctctcccgcatcaccccgctctactacatgtggccgaagcagctgaacgcgccgctggaggaggtggatcccgagatcgccgacatcatcgagcacgagaaggcccgccaatggaagggtctggagctcatcccgtcggagaacttcacctcggtgtcagtgatgcaggcggtgggatccgtcatgaccaacaagtacagcgaggggtaccccggcgcgagatactacggtggaaacgagtacgtgaatgtgcaacctctatcagggtcacctgccaacttccatgtttacactgccctattgaaaccacatgagagaatcatggctttggatcttcctcatggtggacatctttctcacggctaccagactgatactaagaagatttcagcagtttcgatattctttgagacaatgccctacagattggatgaaagcactggcttgattgattatgatcagatggagaaaagtgccgttctttttaggccaaagttgatcgttgcgggtgcaagtgcatatgcgcgtctttatgactatgaccgcatgcggaaggtttgtgacaagcagaaggcaatacttctagcagatatggcacatatcagtgggcttgtcgcagctggtgttgttccatctccttttgattatgcagatgtagtgactaccactactcacaagtcactccgtggaccacgtggagccatgatcttttacaggaagggggtgaaaggagtaaacaagcaaggcaaagaggttatgtatgactttgaggacaagatcaatgctgctgtcttcccaggtctgcaaggtggaccacataatcataccattactggcttagctgttgcgcttaagcaggcaactactccggagtacagagcttatcaagagcaagttatgagtaactgtgcaaaatttgcacagagcttgacagcaaaaggctacgaacttgtctctggtgggactgacaaccatttagtgttggtaaatctcaagagcaagggcatagatggttcaagagtggagaaggttttagaaaacgtgcacattgcagcaaacaagaacacagttcctggtgatgtttcagctatgctccatgatcatgcaggaaccccagcactgacctcaagaggatttgttgaggaggactttgctaaggttgctgatttcttcgatgcagcagtgaacttggctttgaaggttaaggctgcagcaggtggaacaaaactgaaggactttgttgccactttgcaatctgatagcaacattcaatccgagattgcaaaacttcgccatgatgtggaggaatatgcaaaacagttccccacaattgggtttgagaaagaaaccatgaagtacaagaactaa

SEQ ID NO: 80000 - protein, 474 aa, Oryza sativa subsp
MAMATALRKLSSDALRRQPLSRITPLYYMWPKQLNAPLEEVDPEIADIIEHEKARQWKGLELIPSENFTSVSVMQAVGSVMTNKYSEGYPGARYYGGNEYVNVQPLSGSPANFHVYTALLKPHERIMALDLPHGGHLSHGYQTDTKKISAVSIFFETMPYRLDESTGLIDYDQMEKSAVLFRPKLIVAGASAYARLYDYDRMRKVCDKQKAILLADMAHISGLVAAGVVPSPFDYADVVTTTTHKSLRGPRGAMIFYRKGVKGVNKQGKEVMYDFEDKINAAVFPGLQGGPHNHTITGLAVALKQATTPEYRAYQEQVMSNCAKFAQSLTAKGYELVSGGTDNHLVLVNLKSKGIDGSRVEKVLENVHIAANKNTVPGDVSAMLHDHAGTPALTSRGFVEEDFAKVADFFDAAVNLALKVKAAAGGTKLKDFVATLQSDSNIQSEIAKLRHDVEEYAKQFPTIGFEKETMKYKN

SEQ ID NO: 80001 - DNA, 2160 bp, Oryza sativa subsp
  CDS (1)..(2160)
atggaccatcggcccgacctgtccctcgccctccacccgccgccgccgcccgagggctcgtccgccgccgccgccgaggaggtgggggaggaggaggccgaaggcggcgaggggcggttctccctcatgggccagccgctcttcctcaagcggccgcggccgcggcccccgcgcccgccccgcgcgcgcggggtgggggacgacgtcgacgtcgacgtcgacgacgactcatccccgtgctgctcctcctcctgcctctcgcccgcggcgaagcggcgggcggcggcgggaggactcgaggcgcgccgcgcggccgtgcgcgcgtggggatgccagccgctcacggaggcggacccggacgtgcacgagctgatggagcgggagcggcgccggcaggcgggcggggtcgagctcatcgcctccgagaactacgcctgccgcgcggtgctcgacgcgctcggcagccacctcaccaacaagtactccgagggcctccccggcgcgcgctactactgcggcaaccagcacatcgacgccatcgagcgcctctgctgcgaccgcgcgctcgccgccttcggcctcgacccgtcgcgctggggcgtcaacgtgcagccctactcctgcacctccgccaacttcgccgtctacacggggctcctcctccccaacgacaggatcatgggcctcgactcgccgtccggcggccacgtcagccacgggtactacacgcccagcggcaagaaggtctccggcgcctccatcttcttcgagaacctctcctacagggtgaacccgcacaccgggtacatcgattacgataaggtagaggagaaggccgtggatttccaccccaagattctcatctgcggcgcgagctcgtatccaagggattgggactatgcacggatgcggcttgttgctgataagtgcggcgcagtactcatgtgtgacatggcacaaatcagtggtcttgtggcagcgaaggaatgtcgaaatccctttgactactgcgatattgttacttcaaccacacacaagagcttgaggggtcctagaggtggtataatatttttcaggaaagggaaaaatctaaggaaacgggtcggatctttaactcaagtggttgaaaatgatcagtatgattttgaggaccgtataaattttgctgttttcccttcaatgcaaggtggaccccacaataaccatattgctgctctggctatagctctaaaacaagtagccatgccagaattcaaagcatacattcaacaagtcaagaaaaatgcccaagctttggcgatggccttgctcaggaggaaatgcagactggttactggtggcacagataatcatttgatgctctgggacctaagaacatttggcttgacagggaagaactttgagaaggtctgtgaggcatgtcatatctctcttaataaaacaccaatatatggagataatggttcgatttctcctggaggaactcctgccatgacaactagaggttgcttggagagtgactttgagataatggcagaattccttttgagggcagcacatatagcaagtattgttttgaaggagcatggaaggcttcagaaggattttctgaaaggtctggagaacaataatgacattattgaactccggaatcagatttgtctcatcttttccatttcaagaaggtatataatctttgtgagtgaagttatcatgactcctgaaccaaagttcttgggcaccgcgaggacggcgaggatatgccaccgtccgtcgtccgtcgtgtacatcgcgctaggcagcgaggtgccactgcgcgtggataaggtccacgagctcgcgctcgggctggacgtcgccgggacgcgcttcctgtgggctctgaggaagcccactggcgtctccgacaccgacctcctccccgctggcttcgaggagcgctcgtgcggccgcggcgtcgtggagacgagatgggttcctcagatgagcatactggcgcacgccgagaaggcgtcgcggcagcgattcgtgcagtcgcggtggaggtcctggaggaagaaagcagcaaagcgtttcaagccaataccaagaagctgcaggagatcgtcgcggacatggcctgccatgagaggtacatcgacggattcattcagcaattga

SEQ ID NO: 80002 - protein, 719 aa, Oryza sativa subsp
MDHRPDLSLALHPPPPPEGSSAAAAEEVGEEEAEGGEGRFSLMGQPLFLKRPRPRPPRPPRARGVGDDVDVDVDDDSSPCCSSSCLSPAAKRRAAAGGLEARRAAVRAWGCQPLTEADPDVHELMERERRRQAGGVELIASENYACRAVLDALGSHLTNKYSEGLPGARYYCGNQHIDAIERLCCDRALAAFGLDPSRWGVNVQPYSCTSANFAVYTGLLLPNDRIMGLDSPSGGHVSHGYYTPSGKKVSGASIFFENLSYRVNPHTGYIDYDKVEEKAVDFHPKILICGASSYPRDWDYARMRLVADKCGAVLMCDMAQISGLVAAKECRNPFDYCDIVTSTTHKSLRGPRGGIIFFRKGKNLRKRVGSLTQVVENDQYDFEDRINFAVFPSMQGGPHNNHIAALAIALKQVAMPEFKAYIQQVKKNAQALAMALLRRKCRLVTGGTDNHLMLWDLRTFGLTGKNFEKVCEACHISLNKTPIYGDNGSISPGGTPAMTTRGCLESDFEIMAEFLLRAAHIASIVLKEHGRLQKDFLKGLENNNDIIELRNQICLIFSISRRYIIFVSEVIMTPEPKFLGTARTARICHRPSSVVYIALGSEVPLRVDKVHELALGLDVAGTRFLWALRKPTGVSDTDLLPAGFEERSCGRGVVETRWVPQMSILAHAEKASRQRFVQSRWRSWRKKAAKRFKPIPRSCRRSSRTWPAMRGTSTDSFSN

SEQ ID NO: 80003 - DNA, 1344 bp, Oryza sativa subsp
  CDS (1)..(1344)
atggactccgtcgcgtcgtgggggctgaccccgctcgccgcggccgacccgctcgtccacgacctcctcgagcgggagaagcggcggcagcggagcggcatcgagctcatcgcctcggagaacttcacctccttcgccgtcatggaggccctcggctccgcgctcaccaacaagtactccgaggggatgcccggggcgcgctactacggcgggaacgacgtcatcgacgagatcgagaacctgtgccgcgaccgcgccctcgccgcgttccgcctcgacgccgcgtcgtggggcgtcaacgtgcagccctactccggctcgccggccaacttcgccgcctacacggcgctcctcaacccgcacgaccgcatcatggggctcgacctccccctccgcctcccctacaaggtgagcgccgccacggggtacatcgactacgagaagctggaggagaaggcgctcgacttccgccccaagctcatcatctgcggcggcagcgcgtacccgagggactgggactacgccaagctcagggccgtcgccgacaaggtcggggcgctgctcctctgcgacatggcgcacatcagcggcctcgtcgccgcgcaggaagctgcaaatccttttgagtactgtgatgtggttaccaccaccacgcacaagtccctccgaggaccaagagctggcatgatcttctacaggaagggccctaagcctcccaagaagggccagcctgagggtgctgtctatgactacgaggacaagatcaacttcgcagtgttcccgtcactgcaaggtggtcctcacaaccaccagattgcagcccttgctgttgctctgcagcaaaccatgacacctggattcaaggcctacgcaaagcaggtcaaggccaacgctgtcgccattggcaagtatcttatgagcaagggctacaaaatggtgactgatggaactgagaaccaccttgttctctgggatcttcgccctcttggcttgactggcaacaaggttgagaagatgtgtgacctttgcagcattacacttaacaagaatgctgtctttggtgacagcagtgcattggctcctggcggtgtccgcattggtactcctgcgatgacatccaggggtcttgtcgagaaggactttgagcagatcggcgagttcctccaccaggccgtgaccatctgcctcaacatccagaaggagcacggcaagctcctcaaggacttctccaagggcctggtgaacaacaaggacatcgagaacctcaagctggaggtcgagaagttcgccacctccttcgacatgcccggcttcaccctcgacagcatgaagtacaaggagtag

SEQ ID NO: 80004 - protein, 447 aa, Oryza sativa subsp
MDSVASWGLTPLAAADPLVHDLLEREKRRQRSGIELIASENFTSFAVMEALGSALTNKYSEGMPGARYYGGNDVIDEIENLCRDRALAAFRLDAASWGVNVQPYSGSPANFAAYTALLNPHDRIMGLDLPLRLPYKVSAATGYIDYEKLEEKALDFRPKLIICGGSAYPRDWDYAKLRAVADKVGALLLCDMAHISGLVAAQEAANPFEYCDVVTTTTHKSLRGPRAGMIFYRKGPKPPKKGQPEGAVYDYEDKINFAVFPSLQGGPHNHQIAALAVALQQTMTPGFKAYAKQVKANAVAIGKYLMSKGYKMVTDGTENHLVLWDLRPLGLTGNKVEKMCDLCSITLNKNAVFGDSSALAPGGVRIGTPAMTSRGLVEKDFEQIGEFLHQAVTICLNIQKEHGKLLKDFSKGLVNNKDIENLKLEVEKFATSFDMPGFTLDSMKYKE

SEQ ID NO: 80005 - DNA, 1596 bp, Oryza sativa subsp
  CDS (1)..(1596)
atggcgatggcttcgcaccacctcgcccagccgcccacgcgcgcggctctctcctcgcgccccacctacccgctctccagccatcaccactcctcccgtctccagctcccgctcgtcagcggggcgcggcgcagcaggctgtcccccgcggtggcgacgtccccggtcgccgccccagcgatggacgccgtggccgactgggggctgaccactctggaggaggctgacccggaggtgtacgacctcgtcgagcgcgagaagcggcggcagcgcgcgggcgtcgagctcatcgcgtcggagaacttcacctcgctcgccgtcatggaggcgctgggctcgccgctcaccaacaagtactccgagggcatgccggggtcccgctactacggaggcaacgaggtcatcgacgaggtggaggagctctgccgcgcccgcgcgctcgccgccttccacctcgaccccgaggcctggggcgtcaacgtgcagccctactccggctcgccggcgaacttcgccgcctacaccgggctgctccaaccccacgagcggatcatggggctcgatttgccgtccggcggccacctcacgcacggctactacaccgccggcggcaaaaagatctccgccacgtccatctacttcgagagcctgccgtacaaggtgagctccgagacaggatacgtcgattatgataagctggaggagaaggccatggattttcggcccaagctcatcatctgcggcgggagcgcgtacccgcgggattgggattacgccaggttcagggccatcgcggataagtgcggcgccatgttgctctgcgacatggctcacatcagtggcctagttgccgcgcaggaggctgcaaatccttttcaatattctgatgtggttaccaccaccacccacaagagtctccgagggccaagatctggtatgatcttctacaggaagggcctgaagcctcccaagaaaggccagcctgagggcgctctgtatgactacgaggacaggatcaacttcgcagtgtttccgtcgctccaagggggccctcacaaccaccaaattgctgcgctagcggttggtttgaagcagactatgtcacctggattcaagtcttatattaagcaggtcaaggccaatgctgttgcccttggtaaccatttgatgagtaagggctacaaattggttactgacggaacagagaaccatcttgttctctgggatctgcgccctcttggcttgactggtaacaaagttgagaaggtctgtgatttgtgcagcattacactgaacaaaaatgctgtctttggggatagcagtgcaatgtcacctggtggtgtccgcattgtaacttgccatgttgcccattattatttgtctccgaattctggttccagatcgccgcagttccttcaccaggcagtgaccatctgcttggatgttcagaaggagcgtggcaagcttctcaagtacttcaacgagggcctggagaacaacaaggacattgaggacctcagggcggaggtggagaagtttgccacttcattcgagatgcctggcttcagggtatccgacatgaagtacaaggattag

SEQ ID NO: 80006 - protein, 531 aa, Oryza sativa subsp
MAMASHHLAQPPTRAALSSRPTYPLSSHHHSSRLQLPLVSGARRSRLSPAVATSPVAAPAMDAVADWGLTTLEEADPEVYDLVEREKRRQRAGVELIASENFTSLAVMEALGSPLTNKYSEGMPGSRYYGGNEVIDEVEELCRARALAAFHLDPEAWGVNVQPYSGSPANFAAYTGLLQPHERIMGLDLPSGGHLTHGYYTAGGKKISATSIYFESLPYKVSSETGYVDYDKLEEKAMDFRPKLIICGGSAYPRDWDYARFRAIADKCGAMLLCDMAHISGLVAAQEAANPFQYSDVVTTTTHKSLRGPRSGMIFYRKGLKPPKKGQPEGALYDYEDRINFAVFPSLQGGPHNHQIAALAVGLKQTMSPGFKSYIKQVKANAVALGNHLMSKGYKLVTDGTENHLVLWDLRPLGLTGNKVEKVCDLCSITLNKNAVFGDSSAMSPGGVRIVTCHVAHYYLSPNSGSRSPQFLHQAVTICLDVQKERGKLLKYFNEGLENNKDIEDLRAEVEKFATSFEMPGFRVSDMKYKD

SEQ ID NO: 80007 - DNA, 1278 bp, Magnetospirillum gryphiswaldense
  CDS (1)..(1278): transl_table=11
atgaccaaaacagacgctttcttccgcacctccttggccgacagcgatgccgacgtgttcgccgccatttccaaggaattgtcgcgccagcaagaccagatcgagctgatcgcgtcggaaaacatcgtgtcgcgggcggttctggaagcccaaggctcggtgctgaccaacaaatatgccgaaggttatccgggcaagcgttattacggtggctgcgagttcgtcgatatcgtcgaaaagctcgccatcgaccgcgcctgtcagctgttcggctgctctttcgccaacgtccagcccagctcgggctcgcaggccaatcagggcgtgttcatggcgctgctgcagcccggcgacaccatcatgggcatgagcctggccgccggcggtcacctgacccatggcgccgctcccaaccagtcgggcaagtggttcaaggccatccagtacggcgtgcgcctgcaagatgcccgcgtcgatttcgacgaagtggaagccctggccaaggaacacaagcccaagctgatcatcgccggcggctcggcctatccgcgtgaattggacttcgcccgcttccgcaagatcgccgacgaggtgggggccctgttcatggtcgatatggcccacttcgccggtctggtcgccggcggggcctatcccagcccgttcccccatgcccatgtggtcaccaccaccacccacaagaccctgcgcggtccccggggcggcatgattctgaccaatgacgaagccatcgccaagaagatcaactcggccattttcccgggtatccagggcggtccgctgatgcatgtcatcgccggcaaggcggtggccttcggcgaggcgctgcgccccgatttcaaggattacgcccatcaggtggtcgccaatgcccgcgccttggccgataccctggtgcgccgtggtctggccatcgtttccggcggcaccgattcgcacctgatgctggtcgatctgcggccgaagaagctgaccggcaaggcggcggaagccagcctggaacatgccggcatgacctgcaacaagaacggcatcccgtttgacccggaaaagccgaccatcacctcgggcgtgcgcctgggcaccccggcggcgaccacccgtggcttcggcgttgccgaattcaccaaggtgggcgagctgatcggcgatgttctcgacggtctggccgccaatccggaagacaattcggcggcggaacaaaaggcccgggccgaagtgaccgagctgtgccgccggttcccgatctaccaataa

SEQ ID NO: 80008 - protein, 425 aa, Magnetospirillum gryphiswaldense
MTKTDAFFRTSLADSDADVFAAISKELSRQQDQIELIASENIVSRAVLEAQGSVLTNKYAEGYPGKRYYGGCEFVDIVEKLAIDRACQLFGCSFANVQPSSGSQANQGVFMALLQPGDTIMGMSLAAGGHLTHGAAPNQSGKWFKAIQYGVRLQDARVDFDEVEALAKEHKPKLIIAGGSAYPRELDFARFRKIADEVGALFMVDMAHFAGLVAGGAYPSPFPHAHVVTTTTHKTLRGPRGGMILTNDEAIAKKINSAIFPGIQGGPLMHVIAGKAVAFGEALRPDFKDYAHQVVANARALADTLVRRGLAIVSGGTDSHLMLVDLRPKKLTGKAAEASLEHAGMTCNKNGIPFDPEKPTITSGVRLGTPAATTRGFGVAEFTKVGELIGDVLDGLAANPEDNSAAEQKARAEVTELCRRFPIYQ

SEQ ID NO: 80009 - DNA, 1629 bp, Ostreococcus tauri
  CDS (1)..(1629)
atgatttcgacggtgtctctcgcgcccgcgcgcgcgcgcgcgaccgctcggagggatgggcgcgcgacggtgtccgcgcggtcgtccgggtcgatgaaagtcgcgaatccgcgctcgagagcggtcgtcgggagggccaagccgcagccgttcgaggacgtctcggtgcgagagctcgacggcgagctgcacgagatcctgctcaaggagaagcgacgacagaggctcgggttggagctgatcgcgagtgaaaacttcacgagcaaggcggtgatggaggtgaacgggtcgtgcctgacgaataagtattcggagggtttgccgggacagcggtactacggcgggaacgagttcatcgacgaggtggagcgattgtgtcaaaaccgtgcgctgagcacctaccgcctcgatccggcggaatggggggtgaacgtacaagtgctctctggttccccggccaactttgcggtgtacaccgcgcttcttcagccgcacgagcgtatcatgggtctcgacttgccgcacggcggtcacctcacgcacggcttctatacgccgaagaagaagatctccgcgacgtccgtgtacttcgagtcgatgccgtatcgcttgaacgaggccacgggtttggtggattacgacaagctcgaggagaacgcgatgcttttccgaccgaagttgatcatcgctggcgcctcggcgtacgctcgtaactttgattacaagcgcatgcgcgagatttgcgacaaggttggcgcatacctgatgtccgacatggcccatatctccggtctcgtcgccgctcagctcgcggacgatcctttcaagtactctgacattgtcaccacgacgacgcacaagtctcttagaggtccgcgcggcggcatggtcttctacaggaaggaacacgagcaagccgtcaactctgccgtctttccgggtctccaaggcggcccgcacaaccacaccatcggtgccctggctgtggcgctcaagcaagcgcaaactcccgggtttgtcaagtaccaagagcaagtcatcaagaactgcgccgcaatggcaaagcgcttgatggaactcggatacacgctcgtctctggcggtaccgacaaccacttggtgctgtgtgatttgcgtccgaagggcgtggacggtgcgcgcgttgagaagatcctcgacctgtgccacatcacgttgaataagaactccgttcctggcgacacctctgcgctcgtcccgggcggcatccgcatcggatctccggcgatgacgacgcgcggcatgacggaggcggatttcattcgcgtcgccgacctcatcgataagggcgtcaatatcgctatcgatatcaagggtaagaccgaaggcggtaagttgaaggatttcaaggcgtatttagaagccaacgacgtgccggccatcgccgagttgagggctgaggttgaggctttcgccgatgagttccacatgcccggcgggatttcgaaaataatgtatgtgtcgaaaaaacctgaattaattaacatgcgcgttttctcgcgccgtcgctcgtcactccgcgtcgcgcgcgcgcccgggcggcgcggagggacatcatctatccgtttctcgcgagatccgaccgtttaa

SEQ ID NO: 80010 - protein, 542 aa, Ostreococcus tauri
MISTVSLAPARARATARRDGRATVSARSSGSMKVANPRSRAVVGRAKPQPFEDVSVRELDGELHEILLKEKRRQRLGLELIASENFTSKAVMEVNGSCLTNKYSEGLPGQRYYGGNEFIDEVERLCQNRALSTYRLDPAEWGVNVQVLSGSPANFAVYTALLQPHERIMGLDLPHGGHLTHGFYTPKKKISATSVYFESMPYRLNEATGLVDYDKLEENAMLFRPKLIIAGASAYARNFDYKRMREICDKVGAYLMSDMAHISGLVAAQLADDPFKYSDIVTTTTHKSLRGPRGGMVFYRKEHEQAVNSAVFPGLQGGPHNHTIGALAVALKQAQTPGFVKYQEQVIKNCAAMAKRLMELGYTLVSGGTDNHLVLCDLRPKGVDGARVEKILDLCHITLNKNSVPGDTSALVPGGIRIGSPAMTTRGMTEADFIRVADLIDKGVNIAIDIKGKTEGGKLKDFKAYLEANDVPAIAELRAEVEAFADEFHMPGGISKIMYVSKKPELINMRVFSRRRSSLRVARAPGRRGGTSSIRFSRDPTV

SEQ ID NO: 80011 - DNA, 1479 bp, Ostreococcus tauri
  CDS (1)..(1479)
atgtcgtttccttcctcgcgatcgcgcgcgcggcacttcgcccacacgtcgtctctcgcgtctcaaaacacgcgggcgcgaaagatggaccgcgtcttccccgaggctttgtctccgctcaaggaggccgacagagaggtgtacgacttgattcaaaatgaaaagaagcgacagatcggcggcatcgagctcatcgcgagcgaaaactttaccagcgcgcccgtgatggaggcgctcggctcggcgctcacgaacaagtactcggaggggcttcccggtgcgcggtactacggtgggaacgagatcatcgataaggtggagacgttgtgccaagagagagcgttgcacgcgtatcgcctggacgcgaaggactggggcgtgaacgtgcagccgtacagcggatcgcccgcgaatctggcggtgtacaccgcgcttttacaaccgcacgaccgtatcatgggtttggatctgccgagtggaggacacctgacgcacggatattacacggcgcacgggaagaagatttcggcgacgagcatcttcttcgagtcgttgccgtacaaggtggatccgaagactggtttgatcgattacgaaaagctcgaggagaaggcgatggatttccgaccgaagatgatcatctgcggcgggtcggcgtacgcgagagattgggattacgcgcgattcagggaaatcgcggataagtgcggggcgatgctcatgatggacatggcgcacatctctggtttggtcgctgcggaggaacaggcgcaaccgttcgagtactgcgatatcgtcaccacaactacgcacaagtcccttcgcggtcctcggtcggggatgatcttcttccgtcgaggcgtgaatgcgaaaactggtaaggactacgactacgagtcgcgcataaacatggcggtgttcccgtcgctccagggcggtcctcacaaccaccaaatcggcgctctgtgcgtcgccctcaagtacgcggcgacgccggcattcaaggagtacatcaagcaagtcaaggctaacgccaaggctcttggtgaacgcctcgtcgagaagggatactccctcgtcaccggcggcacggataaccacttggtgctctgggatctgcgcccgctcggcctcaccgggagcaagatggagtacctgtgcgatctcctgcacatcaccctgaacaagaacgcagtgtttggcgacgcgagcgcgctgtccccgggcggtgtacgcattggcgctcccgcgatgacgtctcgcggcttggtggaaaaggatttcgtccaaatcgctgacttcctctcccgcgccgttgatttgtgcttggaggtgcaacagagccacgggaagatgttgaaggactggaaaaagggcttagacggcaatcccaaggtcgcgtcgatgcgcgccgaggttgaggcattctcgtcggcgttcgacatgcccgccttcacgaaggaaagcatcgacatttag

SEQ ID NO: 80012 - protein, 492 aa, Ostreococcus tauri
MSFPSSRSRARHFAHTSSLASQNTRARKMDRVFPEALSPLKEADREVYDLIQNEKKRQIGGIELIASENFTSAPVMEALGSALTNKYSEGLPGARYYGGNEIIDKVETLCQERALHAYRLDAKDWGVNVQPYSGSPANLAVYTALLQPHDRIMGLDLPSGGHLTHGYYTAHGKKISATSIFFESLPYKVDPKTGLIDYEKLEEKAMDFRPKMIICGGSAYARDWDYARFREIADKCGAMLMMDMAHISGLVAAEEQAQPFEYCDIVTTTTHKSLRGPRSGMIFFRRGVNAKTGKDYDYESRINMAVFPSLQGGPHNHQIGALCVALKYAATPAFKEYIKQVKANAKALGERLVEKGYSLVTGGTDNHLVLWDLRPLGLTGSKMEYLCDLLHITLNKNAVFGDASALSPGGVRIGAPAMTSRGLVEKDFVQIADFLSRAVDLCLEVQQSHGKMLKDWKKGLDGNPKVASMRAEVEAFSSAFDMPAFTKESIDI

SEQ ID NO: 80013 - DNA, 1254 bp, Pseudomonas syringae pv
  CDS (1)..(1254): transl_table=11
atgttcagccgtgatttgactatcgccaagtacgacgccgatctgtttgccgccatggagcaagaagctctgcgtcaggaagaacacatcgagctgatcgcctcggaaaactacaccagtccggccgtcatggaagctcaaggctcggtactgaccaacaagtacgctgaaggctacccaggcaagcgttattacggtggctgcgagtacgtcgacgttgtcgagcaactggccatcgaccgtgccaaggagctgttcggcgccgattacgccaacgtccagccacacgccggttcgcaagccaactcggcggtctacctggctctgctgcaaggcggcgacaccattctgggcatgagcctggcccacggcggtcacttgacccacggtgccagcgtttcgtcctcgggcaagctgtacaacgctgttcagtacggcatcgacggcaatggcatgatcgactacgacgaagtcgagcgcctggctgttgaacacaagccaaaaatgatcgttgccgggttctctgcctactcgcagatcctcgacttcccgcgctttcgcgctatcgccgacaaggtcggtgcctacctgttcgtcgatatggcgcacgtagccggtctggttgccgcaggtgtctacccgaacccggtgccgttcgccgacgtcgtcaccaccaccacgcacaagaccctgcgcggtccacgtggcggcctgatcctggcgcgcgccaacgccgacatcgagaaaaagctgaactccgccgtattccctggctcccagggcggcccgctggagcacgtcatcgcagccaaggccatctgcttcaaggaagcgctgcagcctgagttcaagacctaccagcaacaagtggtcaagaacgccaaggcaatggccggtgtgttcatcgagcgcggtttcgacgtagtgtccggaggtactgaaaaccacctgttcctgctctcgctgatcaagcaggacatctccggtaaagacgccgacgccgctctgggtcgcgccttcatcaccgtcaacaaaaactcggtacccaacgacccacgctccccgttcgtcacctccggcctgcgcttcggcaccccggcggtgaccactcgcggcttcaaggaagcagagtgcaaggaactggccggctggatctgcgacatcctggcagacctgaacaacgaagccgtgattgacgctgtgcgcgagaaggtcaaagccatctgcgcgaagctgccggtttacggcgcttga

SEQ ID NO: 80014 - protein, 417 aa, Pseudomonas syringae pv
MFSRDLTIAKYDADLFAAMEQEALRQEEHIELIASENYTSPAVMEAQGSVLTNKYAEGYPGKRYYGGCEYVDVVEQLAIDRAKELFGADYANVQPHAGSQANSAVYLALLQGGDTILGMSLAHGGHLTHGASVSSSGKLYNAVQYGIDGNGMIDYDEVERLAVEHKPKMIVAGFSAYSQILDFPRFRAIADKVGAYLFVDMAHVAGLVAAGVYPNPVPFADVVTTTTHKTLRGPRGGLILARANADIEKKLNSAVFPGSQGGPLEHVIAAKAICFKEALQPEFKTYQQQVVKNAKAMAGVFIERGFDVVSGGTENHLFLLSLIKQDISGKDADAALGRAFITVNKNSVPNDPRSPFVTSGLRFGTPAVTTRGFKEAECKELAGWICDILADLNNEAVIDAVREKVKAICAKLPVYGA

SEQ ID NO: 80015 - DNA, 1416 bp, Phaeosphaeria nodorum
  CDS (1)..(1416)
atgtctacttacgcgctccccaagtcccaccaggacctcatggagaagtccctggtggacacggacaatgaggttgcccagatcatggagaaggagattcagcgtcagcgcgagtccatcctcctcatcgcgtccgagaatgtcacatcccgcgccgtcttcgatgctctcggctcgcccatgtccaacaagtactccgagggctaccccggtgcccgctactacggcggaaacgagcacatcgacgccattgagctgctgtgccagaagcgcgctctcgaggccttcggtctggatgcagagaagtggggtgtgaacgtccagtgcttgagcggcagcccagccaacctccaggtctaccaggccatcatgcgcccacacgacaggctcatgggtcttgatctgccccacggcggacatttgagccacggataccagacaccgcagaggaagatctctgccgtctccacatacttcgagaccttcccttaccgcgtgaacctcgacaccggcatcatcgactacgaccagctcgagcagaatgccctcatgtaccgccccaaggtcctcgtcgctggaacctctgcctactgccgtgagatcgactacgcccgcatgcgcgagattgccgacaaggtcggatgctacctgatgatggacatggcacacatttctggactcgtcgccgctggcgttaacaagtcgcccttcccatactgcgatattgtcacaaccaccacccacaagtctctccgtggaccccgtggtgccatgatcttcttccgcaagggcgtccgcaagaccgacgcgaagaccggcaaggagaccctgtacgatctcgagggacccatcaacttctccgtgttccctggtcaccagggtggaccccacaaccacaccatcactgcgcttgcagtcgcgctcaagcaggctcagaccgaggacttcaagctttaccagcagcaggtcatcaagaacgccaagcagctcgaggtcaccttcaaggagcttggcttcaagctcgtcaccgacggcacagacaaccacatggtcctcatcgacctcaagcccttcgccctcgacggtgcgcgtgttgaggctgtgctcgagcaggtcaacatcgcctgcaacaagaacaccacacccggcgacaagagcgcgctatcacccatgggtatccgtatcggtgcgcccgccatgacctcaagaggtctcggcgaggacgacttcaagaagattgccggctacatcaacaagtgcgtcgagatgtgcaagaagatccagggcgagttgcccaaggacaacaacaagctcaaggacttcaaggccaaggttgcatctggcgaggttgaggagatcaacagcctgaagaaggaaattgccgcgtgggccgttaccttccctcttcccatctaa

SEQ ID NO: 80016 - protein, 471 aa, Phaeosphaeria nodorum
MSTYALPKSHQDLMEKSLVDTDNEVAQIMEKEIQRQRESILLIASENVTSRAVFDALGSPMSNKYSEGYPGARYYGGNEHIDAIELLCQKRALEAFGLDAEKWGVNVQCLSGSPANLQVYQAIMRPHDRLMGLDLPHGGHLSHGYQTPQRKISAVSTYFETFPYRVNLDTGIIDYDQLEQNALMYRPKVLVAGTSAYCREIDYARMREIADKVGCYLMMDMAHISGLVAAGVNKSPFPYCDIVTTTTHKSLRGPRGAMIFFRKGVRKTDAKTGKETLYDLEGPINFSVFPGHQGGPHNHTITALAVALKQAQTEDFKLYQQQVIKNAKQLEVTFKELGFKLVTDGTDNHMVLIDLKPFALDGARVEAVLEQVNIACNKNTTPGDKSALSPMGIRIGAPAMTSRGLGEDDFKKIAGYINKCVEMCKKIQGELPKDNNKLKDFKAKVASGEVEEINSLKKEIAAWAVTFPLPI

SEQ ID NO: 80017 - DNA, 1242 bp, Spiroplasma citri
  CDS (1)..(1242): transl_table=4
atgaaagtaaattcacaaattaaaaaattaattgatttggaattaaaacgacagcaagatcatgttgagttaattgcgtcagaaaattatgttagtgaggcaattttagctattacaggctcaattttgactaataaatatgctgaagggtatccgtttcaccgatattatggaggatgtgaatatgttgatcaagttgaacaattagcaattgataaggtaaaggagttattccaagctgaacatgctaatgttcaatcacattcgggtagccaagcaaatgctgctgcttattatgctttgctacaaccacgtgataccattttagcaatggatttagcagcaggtggtcacttaactcatggttataatgttaatttttctggtcgattatatgattttcatagttatcaagttgatcctacaaccgaaatgttagattatgatgcaattgaaaaaattgcaattgaagcaaaaccaaaattaattgttgctggggctagtgcttattcacgtgagattgattttaaaaagttccgcgcaattgctgataaagttggagctttattaatggtagatatggcccatattgcaggattaattgcggctggtttacatcagtctccaatcccctatgcagatgttgttacttcaacaacacataaaacattgcgtggacctcgtgggggcttaattttatcaaagcaaaaatgagcaaaaaaaattaatagtgctgtttttccaggcaatcaagggggaccattagagcatgttattgctgcaaaggcacaatgttttttagaggctttgcaaccagattttaaagcatatgaagcagaaattattaataatgcgaaagcattagcagcaacattaaaagcaaataatctgcgtttagtagctgatggcacagataaccatttattaatggttgatgttaaaagtagtttagggatttcggggcaaatggcggaagagattttacaaaaaattggtattatttgtaacaagaatatgattccatttgataaagaatcatcaatggttactagcggaattcgattaggaacagcagctatgacaacacgtggttttggaaacaaagaatttaaacacatcggagaaataatttataatgttttaaaagaaccaactgaaaataatattgttaaatatcaaaaagaagtaaaaaccttattaaatgatttcccaatttactcaacttgaaaattacaagagtaa

SEQ ID NO: 80018 - protein, 413 aa, Spiroplasma citri
MKVNSQIKKLIDLELKRQQDHVELIASENYVSEAILAITGSILTNKYAEGYPFHRYYGGCEYVDQVEQLAIDKVKELFQAEHANVQSHSGSQANAAAYYALLQPRDTILAMDLAAGGHLTHGYNVNFSGRLYDFHSYQVDPTTEMLDYDAIEKIAIEAKPKLIVAGASAYSREIDFKKFRAIADKVGALLMVDMAHIAGLIAAGLHQSPIPYADVVTSTTHKTLRGPRGGLILSKQKWAKKINSAVFPGNQGGPLEHVIAAKAQCFLEALQPDFKAYEAEIINNAKALAATLKANNLRLVADGTDNHLLMVDVKSSLGISGQMAEEILQKIGIICNKNMIPFDKESSMVTSGIRLGTAAMTTRGFGNKEFKHIGEIIYNVLKEPTENNIVKYQKEVKTLLNDFPIYSTWKLQE

SEQ ID NO: 80019 - DNA, 1428 bp, Aedes aegypti
  CDS (1)..(1428)
atgcctctatgtaatcataaaaatatgtccggcaatgccaagctgttgcacgagaacctctgggagtcggacccggagctgatggacctgatccggaaggagaagaaacgccaggtgcacgggctggagatgatcgccagtgagaacttcacctcgctctcggtgctgcagtgcctgggatcctgcctgcacaacaagtactccgagggattgcccggacagagatactacggtggcaacgaattcatcgacgagatcgaattgctggcgcagaaacgtgccctcgaagcataccgcctcaacccggatgaatggggctgcaacgtgcagccgtactccggttcgccggccaactttgccgtctacaccggactgatcgaaccgcacggtcgcatcatgggcctggacctgcctgatggtggccacttgacgcacggattcatgaccgccaccaagaaaatctccgccacgtcgatcttcttcgagagcatgccctacaaggtggatccggtgacgggcctgatcgactacgacaaactggaggagagcgccaagaacttcaagcccaagatcatcatcgccggaatctcgtgctattcccggtgcttagactacaaacgcttccgccagattgccgacgccaacggtgcattcctgtttgccgatatggctcacatctctggattggtcgctgccggtgtcatcccatcgccttttgaatacgccgatgtggtcagcacaaccacacacaaatcgctgcggggaccccgcgccggagtgatcttcttccgcaagggcgttcgcagcgtcaagcccaacggcgacaaggtgatgtacgatctggaggcaaaaatcaatcaggctgtgttccccggaatccagggaggaccacacaaccacgccattgccggtattgccacgtgcatgctgcaggcccggacgcccgagttcaaagactaccagacacagatcatccgtaacgcacaagccctgtgcaagggtctgctcgagcggggctactccatttcgaccgggggaaccgatgttcatctggtgttggtggaccttcgcccggctggcatcaccggagcccgtgcggagtacgtcctggaggagatttccattgcctgcaacaagaataccgttcccggagacaagagtgcactgaacccgtccggaatccggttgggtacgccggcgttgacgacccgaggtttggtggagtctgatatgacccatgtggtggacttcatcgatcggggactgaaactgtcgaaggagattacggccgtctcgggtccgaagctggtggacttcaagcgagtgctgcacgaggatccgacgctgaacgctaaggtgcaagctctaaaggaggaagttcaggcgtacagcgcgaagttccccatgccaggctatgaggagttctag

SEQ ID NO: 80020 - protein, 475 aa, Aedes aegypti
MPLCNHKNMSGNAKLLHENLWESDPELMDLIRKEKKRQVHGLEMIASENFTSLSVLQCLGSCLHNKYSEGLPGQRYYGGNEFIDEIELLAQKRALEAYRLNPDEWGCNVQPYSGSPANFAVYTGLIEPHGRIMGLDLPDGGHLTHGFMTATKKISATSIFFESMPYKVDPVTGLIDYDKLEESAKNFKPKIIIAGISCYSRCLDYKRFRQIADANGAFLFADMAHISGLVAAGVIPSPFEYADVVSTTTHKSLRGPRAGVIFFRKGVRSVKPNGDKVMYDLEAKINQAVFPGIQGGPHNHAIAGIATCMLQARTPEFKDYQTQIIRNAQALCKGLLERGYSISTGGTDVHLVLVDLRPAGITGARAEYVLEEISIACNKNTVPGDKSALNPSGIRLGTPALTTRGLVESDMTHVVDFIDRGLKLSKEITAVSGPKLVDFKRVLHEDPTLNAKVQALKEEVQAYSAKFPMPGYEEF

SEQ ID NO: 80021 - DNA, 1722 bp, Aedes aegypti
  CDS (1)..(1722)
atgtcggccaatatcgtacgtgccggagtggcacctctcgctcgctcccacggggcacctgcgatgatcggcttgcgtctgcgtctggataaacatcaacatcagtgtccagcagtaagtggatccagcaccactaccactgcaatcatctccggaacgaggcactttggaacgacgacgatttcatcatcctgcgcgccatcgccacagtcaacgcttccatcgtccctgaagaatcgatccttttccgatacgaagcggtctatctgttctgtgtccggtgtcctcaacggtgtcagccttccgaaagccacaaagatgtccggcaatgccaagctgttgcacgagaacctctgggagtcggacccggagctgatggacctgatccggaaggagaagaaacgccaggtgcacgggctggagatgatcgccagtgagaacttcacctcgctctcggtgctgcagtgcctgggatcctgcctgcacaacaagtactccgagggattgcccggacagagatactacggtggcaacgaattcatcgacgagatcgaattgctggcgcagaaacgtgccctcgaagcataccgcctcaacccggatgaatggggctgcaacgtgcagccgtactccggttcgccggccaactttgccgtctacaccggactgatcgaaccgcacggtcgcatcatgggcctggacctgcctgatggtggccacttgacgcacggattcatgaccgccaccaagaaaatctccgccacgtcgatcttcttcgagagcatgccctacaaggtggatccggtgacgggcctgatcgactacgacaaactggaggagagcgccaagaacttcaagcccaagatcatcatcgccggaatctcgtgctattcccggtgcttagactacaaacgcttccgccagattgccgacgccaacggtgcattcctgtttgccgatatggctcacatctctggattggtcgctgccggtgtcatcccatcgccttttgaatacgccgatgtggtcagcacaaccacacacaaatcgctgcggggaccccgcgccggagtgatcttcttccgcaagggcgttcgcagcgtcaagcccaacggcgacaaggtgatgtacgatctggaggcaaaaatcaatcaggctgtgttccccggaatccagggaggaccacacaaccacgccattgccggtattgccacgtgcatgctgcaggcccggacgcccgagttcaaagactaccagacacagatcatccgtaacgcacaagccctgtgcaagggtctgctcgagcggggctactccatttcgaccgggggaaccgatgttcatctggtgttggtggaccttcgcccggctggcatcaccggagcccgtgcggagtacgtcctggaggagatttccattgcctgcaacaagaataccgttcccggagacaagagtgcactgaacccgtccggaatccggttgggtacgccggcgttgacgacccgaggtttggtggagtctgatatgacccatgtggtggacttcatcgatcggggactgaaactgtcgaaggagattacggccgtctcgggtccgaagctggtggacttcaagcgagtgctgcacgaggatccgacgctgaacgctaaggtgcaagctctaaaggaggaagttcaggcgtacagcgcgaagttccccatgccaggctatgaggagttctag

SEQ ID NO: 80022 - protein, 573 aa, Aedes aegypti
MSANIVRAGVAPLARSHGAPAMIGLRLRLDKHQHQCPAVSGSSTTTTAIISGTRHFGTTTISSSCAPSPQSTLPSSLKNRSFSDTKRSICSVSGVLNGVSLPKATKMSGNAKLLHENLWESDPELMDLIRKEKKRQVHGLEMIASENFTSLSVLQCLGSCLHNKYSEGLPGQRYYGGNEFIDEIELLAQKRALEAYRLNPDEWGCNVQPYSGSPANFAVYTGLIEPHGRIMGLDLPDGGHLTHGFMTATKKISATSIFFESMPYKVDPVTGLIDYDKLEESAKNFKPKIIIAGISCYSRCLDYKRFRQIADANGAFLFADMAHISGLVAAGVIPSPFEYADVVSTTTHKSLRGPRAGVIFFRKGVRSVKPNGDKVMYDLEAKINQAVFPGIQGGPHNHAIAGIATCMLQARTPEFKDYQTQIIRNAQALCKGLLERGYSISTGGTDVHLVLVDLRPAGITGARAEYVLEEISIACNKNTVPGDKSALNPSGIRLGTPALTTRGLVESDMTHVVDFIDRGLKLSKEITAVSGPKLVDFKRVLHEDPTLNAKVQALKEEVQAYSAKFPMPGYEEF

SEQ ID NO: 80023 - DNA, 1557 bp, Medicago truncatula
  CDS (1)..(1557)
atggcaatggcaatggctcttcgtaggctttcttcttccatcaacaaatcttcacgtcctctcttcagtgcttcttctgtttactacaagtcatctttgcctgatgaagctgtgtatgataaagagaattcacgtgtttcgtggccaaagcaattgaattcttcacttgaggaaattgaccctgaaattgctgatattattgagcttgagaaagctagacaatggaaggggctggaactgattccatcagaaaacttcacttctttatctgttatgcaagctgttggctctatcatgacaaacaaatacagtgaaggttatcccggagcaagatattacggaggaaatgagtatattgacatggcagaaacactatgccaaaagcgtgccttggaagcatttcggttggatccagctaaatggggagtgaacgtgcagcctttgtctggttcaccttcaaattttcatgtttacactgcattgttgaaacctcatgacagaatcatggcacttgatctccctcatggaggacatctttctcatggttaccagaccgacaccaaaaagatatctgcagtctctatattttttgagacaatgccatatagattggatgaaagcacaggatacattgattatgaccagctagagaaatctgctaccctcttcaggccaaaactaattgttgccggtgctagtgcctatgcacgtctgtatgattatgcacgcattcgcaaggtgtgcgataaacaaaaagctgtgatgttagcagatatggcacatatcagtggactggttgcagctggtgttatcccttcaccttttgattatgcagatgtagtgactaccacaactcacaagtcacttcgtggaccacgtggagctatgatctttttccggaagggattaaaagaagtcaacaaacaaggaaaagaggtgttctatgactatgaggataaaatcaatcaagctgtcttccctggactgcaaggtggtcctcacaaccataccatcactggtttagccgttgcattgaaacaggctacaactccagagtataaagcataccaagagcaggttctcagcaattgcgcaaaatttgcacaggctttgagtgagaaaggctatgagcttgtttctggtgggactgagaatcatctagttttggtgaatcttaagaacaagggtattgatggctccagagttgagaaggtgttggaagcagtacatattgcagctaataaaaacactgttccaggagatgtgtctgctatggttcctggtggtatcaggatgggaactcctgctcttacttcaaggggatttgttgaggaggatttcgttaaggtagcagagtattttgatgcatccgtgaatttggctttgaagatcaaggcagagagcaaaggaacaaaattaaaggacttcgtagaaacattgcagtcatcctcctacgtgcagtcagagatctccaaacttcgtcatgatgttgaggagtttgcaaaacaatttccaaccattggttttgaaaaatcaagcatgaagtacaacaaataa

SEQ ID NO: 80024 - protein, 518 aa, Medicago truncatula
MAMAMALRRLSSSINKSSRPLFSASSVYYKSSLPDEAVYDKENSRVSWPKQLNSSLEEIDPEIADIIELEKARQWKGLELIPSENFTSLSVMQAVGSIMTNKYSEGYPGARYYGGNEYIDMAETLCQKRALEAFRLDPAKWGVNVQPLSGSPSNFHVYTALLKPHDRIMALDLPHGGHLSHGYQTDTKKISAVSIFFETMPYRLDESTGYIDYDQLEKSATLFRPKLIVAGASAYARLYDYARIRKVCDKQKAVMLADMAHISGLVAAGVIPSPFDYADVVTTTTHKSLRGPRGAMIFFRKGLKEVNKQGKEVFYDYEDKINQAVFPGLQGGPHNHTITGLAVALKQATTPEYKAYQEQVLSNCAKFAQALSEKGYELVSGGTENHLVLVNLKNKGIDGSRVEKVLEAVHIAANKNTVPGDVSAMVPGGIRMGTPALTSRGFVEEDFVKVAEYFDASVNLALKIKAESKGTKLKDFVETLQSSSYVQSEISKLRHDVEEFAKQFPTIGFEKSSMKYNK

SEQ ID NO: 80025 - DNA, 1596 bp, Oryza sativa subsp
  CDS (1)..(1596)
atggcgatggcttcgcaccacctcgcccagccgcccacgcgcgcggctctctcctcgcgccccacctacccgctctccagccatcaccactcctcccgtctccagctcccgctcgtcagcggggcgcggcgcagcaggctgtcccccgcggtggcgacgtccccggtcgccgccccagcgatggacgccgtggccgactgggggctgaccactctggaggaggctgacccggaggtgtacgacctcgtcgagcgcgagaagcggcggcagcgcgcgggcgtcgagctcatcgcgtcggagaacttcacctcgctcgccgtcatggaggcgctgggctcgccgctcaccaacaagtactccgagggcatgccggggtcccgctactacggaggcaacgaggtcatcgacgaggtggaggagctctgccgcgcccgcgcgctcgccgccttccacctcgaccccgaggcctggggcgtcaacgtgcagccctactccggctcgccggcgaacttcgccgcctacaccgggctgctccaaccccacgagcggatcatggggctcgatttgccgtccggcggccacctcacgcacggctactacaccgccggcggcaaaaagatctccgccacgtccatctacttcgagagcctgccgtacaaggtgagctccgagacaggatacgtcgattatgataagctggaggagaaggccatggattttcggcccaagctcatcatctgcggcgggagcgcgtacccgcgggattgggattacgccaggttcagggccatcgcggataagtgcggcgccatgttgctctgcgacatggctcacatcagtggcctagttgccgcgcaggaggctgcaaatccttttcaatattctgatgtggttaccaccaccacccacaagagtctccgagggccaagatctggtatgatcttctacaggaagggcctgaagcctcccaagaaaggccagcctgagggcgctctgtatgactacgaggacaggatcaacttcgcagtgtttccgtcgctccaagggggccctcacaaccaccaaattgctgcgctagcggttggtttgaagcagactatgtcacctggattcaagtcttatattaagcaggtcaaggccaatgctgttgcccttggtaaccatttgatgagtaagggctacaaattggttactgacggaacagagaaccatcttgttctctgggatctgcgccctcttggcttgactggtaacaaagttgagaaggtctgtgatttgtgcagcattacactgaacaaaaatgctgtctttggggatagcagtgcaatgtcacctggtggtgtccgcattggtacacctgccatgacatcaaggggtttggtagaggaggactttgtacagatcgccgagttccttcaccaggcagtgaccatctgcttggatgttcagaaggagcgtggcaagcttctcaagtacttcaacgagggcctggagaacaacaaggacattgaggacctcagggcggaggtggagaagtttgccacttcattcgagatgcctggcttcagggtatccgacatgaagtacaaggattag

SEQ ID NO: 80026 - protein, 531 aa, Oryza sativa subsp
MAMASHHLAQPPTRAALSSRPTYPLSSHHHSSRLQLPLVSGARRSRLSPAVATSPVAAPAMDAVADWGLTTLEEADPEVYDLVEREKRRQRAGVELIASENFTSLAVMEALGSPLTNKYSEGMPGSRYYGGNEVIDEVEELCRARALAAFHLDPEAWGVNVQPYSGSPANFAAYTGLLQPHERIMGLDLPSGGHLTHGYYTAGGKKISATSIYFESLPYKVSSETGYVDYDKLEEKAMDFRPKLIICGGSAYPRDWDYARFRAIADKCGAMLLCDMAHISGLVAAQEAANPFQYSDVVTTTTHKSLRGPRSGMIFYRKGLKPPKKGQPEGALYDYEDRINFAVFPSLQGGPHNHQIAALAVGLKQTMSPGFKSYIKQVKANAVALGNHLMSKGYKLVTDGTENHLVLWDLRPLGLTGNKVEKVCDLCSITLNKNAVFGDSSAMSPGGVRIGTPAMTSRGLVEEDFVQIAEFLHQAVTICLDVQKERGKLLKYFNEGLENNKDIEDLRAEVEKFATSFEMPGFRVSDMKYKD

SEQ ID NO: 80027 - DNA, 1545 bp, Aspergillus oryzae
  CDS (1)..(1545)
atgctgagccgctgtggtcgccaggctttgcgattgatcccgcgcacgggaagctcttccagagctatcgccatcactactcaactccgaccggctgctcccttgtgtgtctccagctcaatttctcagagccggagtgtgtcatcctccagtcgtgatggacagcaacatgagaaaaaacgtcaaaagcactttatcaacctgatcccttcggagaacttcacttcacaagcggtccttgatgccctgggcagtgtgatgcaaaacaagtattcagagggttatcccggtgccagatactacggaggaaatgagcacatcgacgagtcggagaggttatgtcaacagcgtgccttggagaccttccggctcaatcccgaagaatggggcgtgaatgttcaaccactttccggctctcccgcgaacttgtatgccatctccgcccttctcaacacgcatgaccgcctgatgggcctggacttgcctcatggtggtcacttgtcacatggttatcagacacccaccaagaagatttcattcatctcgaaatactttgagacccttccttaccgccttgatgagtcgactggtctcattgattacgacgccctcgagaagcaggcgttgctctatcgtccaaagctcattattgccggtacttcggcctatagccgattaatcgactaccctcggatgcgccagatcgcagacgcagctggtgcataccttctcagtgacatggcccacatatctggactggttgctgcggatgtacttccctcgcctttcactcactctgatgtggtaacaacgactactcacaagtccctgcgtgggccccgtggtgccatgatcttctaccgcaagggtgtccgccggacggacaagaagggcaacccggagatgtacgacttagagaatcctatcaatgcctccgtcttcccgggccaccagggtgggcctcataaccacaccattactgctctagcagttgcactgaagcaggcccagtcaaccgagttcaagacttaccaggaaaccgtcttagccaacgctaaggcattggctgaccgacttggcagccctctcagcaatgggggtttgggatacaacattgtgtccggtggaacggataaccacctggtcctcgtggatctgaagaaccgtggggttgatggagcccgtgttgaacgtgttctagagctctgcggcgttgctagcaacaagaacaccgttccgggagatcggtcggctttgaagcccggtggtctccgcctgggtactcctgccatgactacccgtggcttccagcccgaggacttccgccgcgtggccgatatcgttgatcgcgcggtcattatcacccaaaagctggacaaggctgccaaggagagcgctgcggctaagggcgttaagaacccgaacactgtcaaggccttcctggaatatgttggtgagggtgaggagatttcagagattgtgctcttgcggcaggaagttgaggactgggtgggaactttcagcctcccttggaaggacgagtaa

SEQ ID NO: 80028 - protein, 514 aa, Aspergillus oryzae
MLSRCGRQALRLIPRTGSSSRAIAITTQLRPAAPLCVSSSISQSRSVSSSSRDGQQHEKKRQKHFINLIPSENFTSQAVLDALGSVMQNKYSEGYPGARYYGGNEHIDESERLCQQRALETFRLNPEEWGVNVQPLSGSPANLYAISALLNTHDRLMGLDLPHGGHLSHGYQTPTKKISFISKYFETLPYRLDESTGLIDYDALEKQALLYRPKLIIAGTSAYSRLIDYPRMRQIADAAGAYLLSDMAHISGLVAADVLPSPFTHSDVVTTTTHKSLRGPRGAMIFYRKGVRRTDKKGNPEMYDLENPINASVFPGHQGGPHNHTITALAVALKQAQSTEFKTYQETVLANAKALADRLGSPLSNGGLGYNIVSGGTDNHLVLVDLKNRGVDGARVERVLELCGVASNKNTVPGDRSALKPGGLRLGTPAMTTRGFQPEDFRRVADIVDRAVIITQKLDKAAKESAAAKGVKNPNTVKAFLEYVGEGEEISEIVLLRQEVEDWVGTFSLPWKDE

SEQ ID NO: 80029 - DNA, 1413 bp, Aspergillus oryzae
  CDS (1)..(1413)
atggccacctacgctctgtcgcaggcccaccgggaccaaatggagaagactctcgttgagtctgatcccgaaattgctcagatcatggaaaaagagattcagcgtcagcgtgaatccatagtcctgatcgcttcggagaacttcacttctcacgccgttttcgacgcccttggttctcccatgtccaacaagtactccgagggttaccccggtgcccgttactacggtggtaatcagcacatcgatgccatcgagctcacatgccaggcccgtgccctgaaggccttcaacctcgaccctgccaagtggggcgtcaacgttcagtgcctgagtggcagccctgccaacttgcaggtctaccaggctcttatgcgcccccatgaccgtctgatgggtctggatcttccccacggaggccatctgtcccacggttatcagacccccgccagaaagatctctgctgtctctacttacttcgagaccttcccctaccgtgtcaaccttgagactggtatcattgattacgatgccctggaggccaacgctgagctctaccgccccaagtgtctggttgccggtacctccgcctactgccgcttgatcgactatgagcgcatgcgcaagatcgctgacaaggtcggcgcttacctcattgttgatatggcccatatctccggattgatcgccgccggtgtcattccttctcccttcgagtacgccgatgttgtcactaccaccacccacaagtctcttcgtggcccccgtggtgccatgatcttcttccgcaagggtgtgcgcagcactgacaagaccggaaaggagattctttacgaccttgagggtcctatcaacttctccgttttccctggtcaccagggtggtccccacaaccacaccatcactgcccttgctgttgctctcaagcaggttgacactcccgagttcaagcagtaccagcagcaggtcctgaacaacgccaaggctctggagaacgagttcaagcagctgggccacaagctcgtctctgacggcactgacagccacatggtcctggtcgacctccgtgctcagaagttggacggtgctcgtgttgaggctgtcctggagcagatcaacattgcttgcaacaagaactccatccctggtgacaagtctgcccttaccccctgtggtatccgtatcggtgctcctgccatgaccacccgtggtatgggtgaggaggacttcaagcgcatcgctcactacatcgacaaggccatcaagatctgcaaggatgttcagggtgcgctccccaaggaggccaacaagctcaaggacttcaaggccaaggttgcctccgagaccgtctcggacatcctggagctgcgcaaggagattgccgcctgggcttccaccttccctctccccgtttaa

SEQ ID NO: 80030 - protein, 470 aa, Aspergillus oryzae
MATYALSQAHRDQMEKTLVESDPEIAQIMEKEIQRQRESIVLIASENFTSHAVFDALGSPMSNKYSEGYPGARYYGGNQHIDAIELTCQARALKAFNLDPAKWGVNVQCLSGSPANLQVYQALMRPHDRLMGLDLPHGGHLSHGYQTPARKISAVSTYFETFPYRVNLETGIIDYDALEANAELYRPKCLVAGTSAYCRLIDYERMRKIADKVGAYLIVDMAHISGLIAAGVIPSPFEYADVVTTTTHKSLRGPRGAMIFFRKGVRSTDKTGKEILYDLEGPINFSVFPGHQGGPHNHTITALAVALKQVDTPEFKQYQQQVLNNAKALENEFKQLGHKLVSDGTDSHMVLVDLRAQKLDGARVEAVLEQINIACNKNSIPGDKSALTPCGIRIGAPAMTTRGMGEEDFKRIAHYIDKAIKICKDVQGALPKEANKLKDFKAKVASETVSDILELRKEIAAWASTFPLPV

SEQ ID NO: 80031 - DNA, 1524 bp, Medicago truncatula
  CDS (1)..(1524)
atggccatggcacttcgaagactcacttccaccatcaacaaacctacttctctctatcgcttgtcatcttctctctccgctcaacacactcacaaatctcaccccgattggattaaacaactcaacgatcctcttggtgtagtagatcctgagatcgaagatataatcgaactagaaaaagctcgtcaatggaaggggctagagcttataccatcagaaaattttacgtcgttgtcggtgatgcaagcggttggatcggttatgacgaataaatacagtgaaggttatcctggtgctagatactatggtggaaatgagtacattgacatggctgagactttgtgtcagaagcgtgcattggaaacttttggattggatccaacacaatggggagggttcagtacctcagtttctggtcaactgaaaccttctaacttccaagtttacactgctttattgaaacctcatgagagaattatggcacttgatctcccccatggtgggcatctatcacatggaactgacaccaagaagatatcagctgtatctatattctttgaaacaatgccatacaggttggatgagagcactggttatattgactatgaccagatggagaaaagtgctgcactttttaggccaaaattaatagttgccggtgctagtgcttatgcccgtctttatgattatgcgcgtattcgcaaggtctgtgataaacagaaggcagttatgttggctgatatggcacacatcagtggattagttgctgcaggtgttattccttctccttttgattatgcagatgttgtaacaaccacaacacataagtcacttcgtggaccacgtggggctatgatattcttcaggaagggtctgaaagagataaacaagaaagggcaggaagtgctgtatgactacgaagacaagataaatcaggctgttttccctggacttcaaggtggtccccacaatcacactattacaggcttagcagttgcattgaagcaggctatgacaccggaattcaagaattaccagaaacaagttcttagtaactcctcgacatttgcacagagcttgttagagaaaggctatgaccttgtatcgggtggaactgagaaccatttggtgttggtaaacttaagaaacaagggcattgatggttcaagggttgagaaggtgttagaatcagttcatatagctgccaataaaaacactgttccaggagatgtgtctgcaatggttcctggagggatcagaatgggaactcctgctcttacatctaggggttttgttgaggatgattttaaaaaagtagctgaatactttgacgcggctgtcaaaatagccttacagattaaggaaaattctaaaggcacaaagttgaaggattttgtggaagctatggagtccgattcacaagttcaatctcaaatcgctgatctccgccatgacgtagaaggttatgctaagcagtttcccacaattggttttgagatagagacaatgaagtataacaagtga

SEQ ID NO: 80032 - protein, 507 aa, Medicago truncatula
MAMALRRLTSTINKPTSLYRLSSSLSAQHTHKSHPDWIKQLNDPLGVVDPEIEDIIELEKARQWKGLELIPSENFTSLSVMQAVGSVMTNKYSEGYPGARYYGGNEYIDMAETLCQKRALETFGLDPTQWGGFSTSVSGQLKPSNFQVYTALLKPHERIMALDLPHGGHLSHGTDTKKISAVSIFFETMPYRLDESTGYIDYDQMEKSAALFRPKLIVAGASAYARLYDYARIRKVCDKQKAVMLADMAHISGLVAAGVIPSPFDYADVVTTTTHKSLRGPRGAMIFFRKGLKEINKKGQEVLYDYEDKINQAVFPGLQGGPHNHTITGLAVALKQAMTPEFKNYQKQVLSNSSTFAQSLLEKGYDLVSGGTENHLVLVNLRNKGIDGSRVEKVLESVHIAANKNTVPGDVSAMVPGGIRMGTPALTSRGFVEDDFKKVAEYFDAAVKIALQIKENSKGTKLKDFVEAMESDSQVQSQIADLRHDVEGYAKQFPTIGFEIETMKYNK

SEQ ID NO: 80033 - DNA, 1674 bp, Oryza sativa subsp
  CDS (1)..(1674)
atgctgatgcgtccggtgtggtgggtgctggggctgatcactgcagataaaaacgccacgcgaatccactacctcccaaaccccgagacccccccgcctccaccaccacccgccgctcgccgctcgcccaccatggccatggcgacggcgctccgcaagctctcctccgacgccctccgccgccagccgctctcccgcatcaccccgctctactacatggcgtccctgccggcgacggaggagagatccggagtcacctggccgaagcagctgaacgcgccgctggaggaggtggatcccgagatcgccgacatcatcgagcacgagaaggcccgccaatggaagggtctggagctcatcccgtcggagaacttcacctcggtgtcagtgatgcaggcggtgggatccgtcatgaccaacaagtacagcgaggggtaccccggcgcgagatactacggtggaaacgaatacattgatatggccgagtcattgtgccagaaacgtgctttggaggccttccgcttggacccagcgaaatggggagtgaatgtgcaacctctatcagggtcacctgccaacttccatgtttacactgccctattgaaaccacatgagagaatcatggctttggatcttcctcatggtggacatctttctcacggctaccagactgatactaagaagatttcagcagtttcgatattctttgagacaatgccctacagattggatgaaagcactggcttgattgattatgatcagatggagaaaagtgccgttctttttaggccaaagttgatcgttgcgggtgcaagtgcatatgcgcgtctttatgactatgaccgcatgcggaaggtttgtgacaagcagaaggcaatacttctagcagatatggcacatatcagtgggcttgtcgcagctggtgttgttccatctccttttgattatgcagatgtagtgactaccactactcacaagtcactccgtggaccacgtggagccatgatcttttacaggaagggggtgaaaggagtaaacaagcaaggcaaagaggttatgtatgactttgaggacaagatcaatgctgctgtcttcccaggtctgcaaggtggaccacataatcataccattactggcttagctgttgcgcttaagcaggcaactactccggagtacagagcttatcaagagcaagttatgagtaactgtgcaaaatttgcacagagcttgacagcaaaaggctacgaacttgtctctggtgggactgacaaccatttagtgttggtaaatctcaagagcaagggcatagatggttcaagagtggagaaggttttagaaaacgtgcacattgcagcaaacaagaacacagttcctggtgatgtttcagctatggtaccaggaggcatcaggatgggaaccccagcactgacctcaagaggatttgttgaggaggactttgctaaggttgctgatttcttcgatgcagcagtgaacttggctttgaaggttaaggctgcagcaggtggaacaaaactgaaggactttgttgccactttgcaatctgatagcaacattcaatccgagattgcaaaacttcgccatgatgtggaggaatatgcaaaacagttccccacaattgggtttgagaaagaaaccatgaagtacaagaactaa

SEQ ID NO: 80034 - protein, 557 aa, Oryza sativa subsp
MLMRPVWWVLGLITADKNATRIHYLPNPETPPPPPPPAARRSPTMAMATALRKLSSDALRRQPLSRITPLYYMASLPATEERSGVTWPKQLNAPLEEVDPEIADIIEHEKARQWKGLELIPSENFTSVSVMQAVGSVMTNKYSEGYPGARYYGGNEYIDMAESLCQKRALEAFRLDPAKWGVNVQPLSGSPANFHVYTALLKPHERIMALDLPHGGHLSHGYQTDTKKISAVSIFFETMPYRLDESTGLIDYDQMEKSAVLFRPKLIVAGASAYARLYDYDRMRKVCDKQKAILLADMAHISGLVAAGVVPSPFDYADVVTTTTHKSLRGPRGAMIFYRKGVKGVNKQGKEVMYDFEDKINAAVFPGLQGGPHNHTITGLAVALKQATTPEYRAYQEQVMSNCAKFAQSLTAKGYELVSGGTDNHLVLVNLKSKGIDGSRVEKVLENVHIAANKNTVPGDVSAMVPGGIRMGTPALTSRGFVEEDFAKVADFFDAAVNLALKVKAAAGGTKLKDFVATLQSDSNIQSEIAKLRHDVEEYAKQFPTIGFEKETMKYKN

SEQ ID NO: 80035 - DNA, 1281 bp, Bacteroides forsythus
  CDS (1)..(1281): transl_table=11
atgaaacgagacagtgtaatttttgaaattatcgaacgtgaccatcaacgccagttgaaaggtatcgagttgattgcttcggaaaacttcgtgagtgaacaggtgatgcaggccatgggcagttaccttaccaacaagtatgccgaaggatatcccgggaaacgttattacgggggctgcgaagtggtagacgaaagcgagaatctggccatcgaacggctgaaaaagctcttcggggccgaatgggctaacgtgcagccacattctggagcacaggcaaacgcggccgtctttctggcagtcctgaatccgggcgatacgttcttaggcttaaacctctcgcacggagggcatctttcgcacggttcgccggtaaacagctcaggtatcttgtatcgcgccgtcgaatataatgtaaaagaagatacgggacgcgtggattacgaacagatggaagaagtggcattgcgcgagaaaccgaaattaattgtcggaggagcttccgcttattctcgggactgggattatgccagaatgcgtgcgattgccgacaaagtcggcgcattgctgatgatcgatatggcacacccggccggcctgattgctgccggtttactgaacaacccgctgccacacgcccatatcgtcacttcaacgacgcataagaccctgcgcggcccgcgcggtggtgtgattttgctgggcaaggattttgaaaatccatggggcaagaaaacaccgcaaggcgaaatcaaaaccatgtctcagctgctcgattcggcggtattccccggtattcagggtggtccgctcgaacatgtgattgccgccaaagccgtgtcattcggcgaagcgcttgaacccgaatacaagacttatcaaacacaggtaaagaaaaatgcagccgtgatggcacaagcctttatcgataagggctacaaaatcatttcgggcggaacggacaaccacagcatgcttatcgacctgcgtaccaaattccccgagttgacaggtaaggtagctgaaaaagcgctagttgccgccgatattacggtgaacaagaatatggtaccgttcgacagccgttcgccgttccaaacatcgggcatccgtatcggtacgccggccatcaccacacgcggagtaaaagagccgctgatgggtgagattgtcgagatgatcgacaccgtactttccaatcccgaatcggaaacaacgatcgcttccgtgcgcagcaaagtgaatcagacgatgaaagactatccgttgtatgcatggtaa

SEQ ID NO: 80036 - protein, 426 aa, Bacteroides forsythus
MKRDSVIFEIIERDHQRQLKGIELIASENFVSEQVMQAMGSYLTNKYAEGYPGKRYYGGCEVVDESENLAIERLKKLFGAEWANVQPHSGAQANAAVFLAVLNPGDTFLGLNLSHGGHLSHGSPVNSSGILYRAVEYNVKEDTGRVDYEQMEEVALREKPKLIVGGASAYSRDWDYARMRAIADKVGALLMIDMAHPAGLIAAGLLNNPLPHAHIVTSTTHKTLRGPRGGVILLGKDFENPWGKKTPQGEIKTMSQLLDSAVFPGIQGGPLEHVIAAKAVSFGEALEPEYKTYQTQVKKNAAVMAQAFIDKGYKIISGGTDNHSMLIDLRTKFPELTGKVAEKALVAADITVNKNMVPFDSRSPFQTSGIRIGTPAITTRGVKEPLMGEIVEMIDTVLSNPESETTIASVRSKVNQTMKDYPLYAW

SEQ ID NO: 80037 - DNA, 1221 bp, Streptomyces roseochromogenes subsp
  CDS (1)..(1221): transl_table=11
gtggacgccgagctttgccgtcagcggtcgacgctcgaaatgatcgcctcggagaacttcgccccggccgccgtcctggacgcccagggctcggtactgacgaacaagtacgccgagggctacccgggccgccgctactacggcggctgcgaacacgtggacgtcatcgagcagttggccatggcccgggtgaaggacctgttcggcgccgaggccgcgaacgtgcagccgcactcgggcgcccaggccaacgcggccgcgatgttcgcgctgctccagcccggcgacacgatcctcggcctcgacctggcgcacggcgggcacctcacccatggcatgcgcctcaactactccggcaagctgtacgacgtcgtgccgtaccacgtgcgccagtccgacctgcgcatcgacatggacgaggtcgagcagctcgccctcgctcaccggcccaggatgatcgtcgccggctggtcggcctatccccgacagctcgacttcgccgcgttccggcggatcgctgacgaggtgggcgcctacctgatggtggacatggcgcacttcgccggactggtggccgcgggcctgcacccgaaccccgtgccgtacgccgacgtcgtcacgaccaccacgcacaagaccctcggcggcccgcgcggcggtgtgatcctcagccgggccggtctggccaagaagatcaactccgcggtcttcccgggccagcagggcggcccgctggagcatgtcatcgcggcgaaggcggtggccttcaaggtggcggcgagcgaggagttcaaggagcgccagcggcgcaccctggacggcgcccgcatcctcgccggccggctgctggccgacgatgtggccgaggccgggatcacggtgctgaccggcggcaccgaggtccacctggtcctggtcgacctgcgcgactccgcgctcgacgggcagcaggccgaggaccggctgcaccgcatcggcatcaccgtcaaccgcaacgcggtgccgttcgacccacgcccgccgatggtctcctcggggctgcggatcggcacgcctgccctggccacccggggcttcggcgcgacggagttccgcgaggtcgccgacatcgtcgccgaagccttgaagggcgaacaggccgacgacgaactgcgcgaccgggtcgagaagctcgccggcgcgttccccctctatccccacctgaacggagccgcggcatga

SEQ ID NO: 80038 - protein, 406 aa, Streptomyces roseochromogenes subsp
MDAELCRQRSTLEMIASENFAPAAVLDAQGSVLTNKYAEGYPGRRYYGGCEHVDVIEQLAMARVKDLFGAEAANVQPHSGAQANAAAMFALLQPGDTILGLDLAHGGHLTHGMRLNYSGKLYDVVPYHVRQSDLRIDMDEVEQLALAHRPRMIVAGWSAYPRQLDFAAFRRIADEVGAYLMVDMAHFAGLVAAGLHPNPVPYADVVTTTTHKTLGGPRGGVILSRAGLAKKINSAVFPGQQGGPLEHVIAAKAVAFKVAASEEFKERQRRTLDGARILAGRLLADDVAEAGITVLTGGTEVHLVLVDLRDSALDGQQAEDRLHRIGITVNRNAVPFDPRPPMVSSGLRIGTPALATRGFGATEFREVADIVAEALKGEQADDELRDRVEKLAGAFPLYPHLNGAAA

SEQ ID NO: 80039 - DNA, 1299 bp, Rhizobium meliloti
  CDS (1)..(1299): transl_table=11
atgctttcacagaccaacgacgctttcttcacccgctctctcgccgacagcgatccggaaatcttcggtgcgatcgagaaggagctgggccgccagcgccatgagatcgagctgatcgcctccgagaacatcgtttcacgggccgtgctcgaggcgcagggctcgatcatgaccaacaaatacgccgagggttacccgggcaagcgctattacggcggctgccaatatgtcgatatcgccgaggcactcgcgatcgagcgcgccaagaagctcttcggcgtcaacttcgcgaacgtgcaaccgaattcgggctcccagatgaaccaggcggtcttcctggcgctgctgcagccgggcgacaccttcatgggcctcgacctcaattccggcggccacctgacccatgggtccccggtgaacatgtcgggcaaatggttcaacgtcgtttcctacggcgtgcgcgaagacgatcaccttctcgacatggacgaagtcgccaggaaggcgcgcgagcagaagccgaaactgatcatcgccggcggaacggcctattcccgcatctgggactggaagcgcttccgcgagatcgccgacgaggtgggcgcgtggctgatggtcgacatggcccacatcgccggtctcgtggccggtggccagcatccgtcgccgttcccgcactgccacgttgcgacgacgaccacgcacaagtccctgcgcggcccccgcggcggcatgatcctcaccaatgacgaggaaatcgccaagaagatcaactccgccgtattccccggtctccagggtgggccgctgatgcacgtgattgccgccaaggccgtcgcgcttggcgaggcgctgcagccctccttcaaggattatgcggcccaggtcgtcaagaacgcccgcacccttgccgaaaccttgaaggccaacggcctggatggacatcgtctcggcggtaccgacacccacctgatgcctggtcgacctgcgcaagaagaatgcgaccggcaagcgtgccgaagctgctctcggccgtgctacgtcacctgcaacaagaacggcattcccttcgaccccgaaaagcccttcgtcacctccggcgtgcgcctcggtgcaccggccggtacgacgcgcggcttcaaggaggcggagttcaaggaggtcggcgaactgatcgtcgaggtgctcgacggtctcaaggccgccaattccgacgagggcaatgccgctgtcgaggctggcgtgcgcgagaaggtgatcaagctcaccgaccgcttcccgatgtacggctatatgtga

SEQ ID NO: 80040 - protein, 432 aa, Rhizobium meliloti
MLSQTNDAFFTRSLADSDPEIFGAIEKELGRQRHEIELIASENIVSRAVLEAQGSIMTNKYAEGYPGKRYYGGCQYVDIAEALAIERAKKLFGVNFANVQPNSGSQMNQAVFLALLQPGDTFMGLDLNSGGHLTHGSPVNMSGKWFNVVSYGVREDDHLLDMDEVARKAREQKPKLIIAGGTAYSRIWDWKRFREIADEVGAWLMVDMAHIAGLVAGGQHPSPFPHCHVATTTTHKSLRGPRGGMILTNDEEIAKKINSAVFPGLQGGPLMHVIAAKAVALGEALQPSFKDYAAQVVKNARTLAETLKANGLDGHRLGGTDTHLMPGRPAQEECDRQACRSCSRPCYVTCNKNGIPFDPEKPFVTSGVRLGAPAGTTRGFKEAEFKEVGELIVEVLDGLKAANSDEGNAAVEAGVREKVIKLTDRFPMYGYM

SEQ ID NO: 80041 - DNA, 1416 bp, Arabidopsis thaliana
  CDS (1)..(1416)
atggaaccagtctcttcatggggtaacacctctctcgtctccgtagatccagagatccacgacctaatcgagaaggagaaacgtcggcaatgtcgaggaatcgaacttatcgcttccgagaatttcacttccttcgccgtcatcgaagctctcggaagtgccttaaccaacaaatactccgaaggtattcctggtaatcgttattacggaggtaacgaattcatcgatgagatcgagaatctttgccgttcacgtgctctcgaagctttccattgtgatccagcagcgtggggcgttaatgttcagccgtattctggatctccggcgaatttcgctgcttacacggctttgcttcagcctcacgatcgtatcatggggcttgatttgccttcaggtggtcatttgactcatggttactatacatctggtggtaagaagacctctgcgacttcgatctactttgagagtcttccgtataaggtgaatttcaccactggttacattgattacgataagcttgaagagaaggcgttggatttcaggcctaagttgcttatctgtggtggtagtgcgtatcctagggattgggattacgctagatttagagctattgctgataaggttggagctcttttgctttgtgacatggctcacatcagtggtctcgttgctgctcaggaagctgcaaacccatttgagtactgtgacgttgtgacaaccacaacccacaagagtttgaggggtccaagggctggtatgattttctacaggaagggtccaaaaccaccaaagaagggtcaacccgagggtgcagtctatgattttgaggacaaaatcaactttgctgtattccctgcgcttcaaggtggtcctcacaatcaccagattggtgctttagctgttgcgttgaagcaggctaatactcctgggttcaaggtctacgcaaaacaagtgaaagccaatgctgttgcccttggaaactacctaatgagcaagggttaccagattgtgaccaatggaactgagaaccaccttgttctctgggatcttcgccctcttggattgaccggaaacaaggttgagaagctctgcgatctgtgcagcattacattgaacaagaacgcagtatttggagacagtagtgctcttgctcctggaggtgtaagaatcggtgcacccgcgatgacatcgagaggattggtggagaaggactttgagcagataggagaattcctgagccgtgcagtgacactgacgttggacatccaaaagacatacggtaagttgttgaaggacttcaacaagggtttggtgaacaacaaagatctcgaccagctcaaggctgacgtcgagaagttctctgcgtcttatgaaatgcctggattcctcatgtctgagatgaagtaccaggattag

SEQ ID NO: 80042 - protein, 471 aa, Arabidopsis thaliana
MEPVSSWGNTSLVSVDPEIHDLIEKEKRRQCRGIELIASENFTSFAVIEALGSALTNKYSEGIPGNRYYGGNEFIDEIENLCRSRALEAFHCDPAAWGVNVQPYSGSPANFAAYTALLQPHDRIMGLDLPSGGHLTHGYYTSGGKKTSATSIYFESLPYKVNFTTGYIDYDKLEEKALDFRPKLLICGGSAYPRDWDYARFRAIADKVGALLLCDMAHISGLVAAQEAANPFEYCDVVTTTTHKSLRGPRAGMIFYRKGPKPPKKGQPEGAVYDFEDKINFAVFPALQGGPHNHQIGALAVALKQANTPGFKVYAKQVKANAVALGNYLMSKGYQIVTNGTENHLVLWDLRPLGLTGNKVEKLCDLCSITLNKNAVFGDSSALAPGGVRIGAPAMTSRGLVEKDFEQIGEFLSRAVTLTLDIQKTYGKLLKDFNKGLVNNKDLDQLKADVEKFSASYEMPGFLMSEMKYQD

SEQ ID NO: 80043 - DNA, 1737 bp, Arabidopsis thaliana
  CDS (1)..(1737)
atgactccaacaccaacaccaagagctccaatcgcagacgattcgattaatctacaagtcgatcaaagtttccgatcattaccaacaactttctctccgattccgttacaattactcgaacaaaaagccgagaagaccaccaccgttgatgagccaaagaaagatggaggaggaggaggagatcaaaaggaagacgagcatttcagaatcttaggtcaccatatgtgtctcaaaaggcaaagagattgtccacttttgttaacgcaatcaaagcatccgaagagaagttccatcggtgattcagatctggaatcgcgacgtgctgctgtacgagcttggggtgatcaaccgattcatttggcggatcctgatattcatgagcttatggagaaagagaagcaacgacaagtaagaggaattgaattgattgcttctgagaatttcgtgtgtagagctgtaatggaagctttaggtagtcatttaacgaataaatactctgaaggtatgcctggagctagatactatactgggaatcaatatattgatcagattgagaatctctgtattgagcgtgctcttactgcgtttggtcttgaatctgataaatggggtgttaatgttcagccttattcttgtacttctgctaacttcgcggtgtataccggacttttattgcccggtgaacggattatggggcttgattcgccttctggtggtcatatgagtcatggttattgtactcctggtgggaagaagatttcggctgcttccatcttctttgagagttttccttataaagtgaatcctcaaactgggtatattgattatgataaggttgaagataaggcgcttgattaccgtcctaagattcttatttgtggtgggagttcttatcctagggattgggattttgcaagggttagacagattgcagataagtgtggagctgttttgatgtgtgatatggctcatattagcggtcttgttgcaactaaggaatgttcaaatccatttgatcactgtgacatagtaacctccactactcacaaaggtctacgtggtcctagaggaggtatcatcttctacaggagaggcccaaagataagaaagcagggccatcactctagccattgtgacacttccacgcattacgatctagaggaaaagatcaactttgctgtttttccatctctacaaggaggtccacacaacaaccatatcgctgctcttgccattgcattgaaacaagtggccactccagagtacaaagcttacatacaacagatgaagaaaaacgcccaagctttagcagcagctcttcttagaagaaaatgcagactggttactggtggtacagacaaccatttgttgctgtgggatctcactcctatgggcttaacagggaaagtctacgagaaagtgtgtgagatgtgccatatcactttaaacaagacggctatattcggggacaatggtacaatatctcctggaggtgtaagaatagggacacccgcaatgacaacccgaggctgtatagagtctgatttcgagacaatggcggattttctgataaaggcggctcagataacaagtgcgttgcagagagagcatggaaagtcacacaaggagtttgtgaaaagtttatgcaccaacaaagacatagctgagcttagaaaccgagtcgaagcatttgctttgcagtatgagatgcctgcttctcttattcgaattgaatga

SEQ ID NO: 80044 - protein, 578 aa, Arabidopsis thaliana
MTPTPTPRAPIADDSINLQVDQSFRSLPTTFSPIPLQLLEQKAEKTTTVDEPKKDGGGGGDQKEDEHFRILGHHMCLKRQRDCPLLLTQSKHPKRSSIGDSDLESRRAAVRAWGDQPIHLADPDIHELMEKEKQRQVRGIELIASENFVCRAVMEALGSHLTNKYSEGMPGARYYTGNQYIDQIENLCIERALTAFGLESDKWGVNVQPYSCTSANFAVYTGLLLPGERIMGLDSPSGGHMSHGYCTPGGKKISAASIFFESFPYKVNPQTGYIDYDKVEDKALDYRPKILICGGSSYPRDWDFARVRQIADKCGAVLMCDMAHISGLVATKECSNPFDHCDIVTSTTHKGLRGPRGGIIFYRRGPKIRKQGHHSSHCDTSTHYDLEEKINFAVFPSLQGGPHNNHIAALAIALKQVATPEYKAYIQQMKKNAQALAAALLRRKCRLVTGGTDNHLLLWDLTPMGLTGKVYEKVCEMCHITLNKTAIFGDNGTISPGGVRIGTPAMTTRGCIESDFETMADFLIKAAQITSALQREHGKSHKEFVKSLCTNKDIAELRNRVEAFALQYEMPASLIRIE

SEQ ID NO: 80045 - DNA, 2025 bp, Chlamydomonas reinhardtii
  CDS (14)..(1576)
gcacgaggtacagatgcagcgcactgtgcagggtatttcgcagcttgcgcgtgcgctgtcgtccgcgcacgcggtcgcgggccagcgctgcttcgctgcgcagccggcgctgtccaacgaggaggagtacagtcgcttctctcaggatgctagccgggcgcatgtgacgtggcccaaggtcctgaacgccggcctggctgaggtggacccagatctcttcgacatcattgagaaggagaagaaccgccagttcaagggcctggagctgatcccctcggagaacttcgtgtctgcctcggtgatggaggcggtgggcagcgtcatgaccaacaagtacagcgagggctaccccggcgcccgctactacggcggcaacgagttcattgaccaggcagagcgcctgtgccaggagcgtgcgctgaaggcattccacctggacccggctcagtggggcgtcaacgtgcagtcgctgtcgggctcgccctccaacttccaggtgtacacggcgctgctgcagccgcacgaccgcatcatggcgctggacctgccccacggcggccacctcagccacggctaccagactgataccaagaagatcagcgccacctccatctactttgagcaaatgccgtaccgcctgaacgaggagactggcctgatcgactacgacatgctggagaagacggccgtgctgttccgccccaagctcattgtggcgggtgcctccgcctacacccgccactacgactatgcccgcatgcgcgccatcgccgacaaggtgggcgcctggctgctggcggacatggcgcacatcagtggcctggtggcggcggacctggtgccctcgcccttcggcttcgcggacgtggtcaccaccaccactcacaagtccctgcgcggtccccgcggcgccatgatcttctaccgcaagggtgtgcgccgcacggacgccaagaccggcaagcccatcaactacgacatcgaggacaagatcaacttcgccgtgttccccggcctgcagggtggcccccacaaccacaccatcgccggtctggcctgcgcgctgaagcaggcggccacccctgagttcaagtcctaccagcagcaggtgctgtccaacagccaggccctggccggcgccctggccaagcgcggcttcaagctggtgtcgggcggcaccgacaaccacatcgtgctggtggacctgcggccaaagggcgtcgacggcagccgcgtggagcgtgtgctggagctggcgcacatcgccgccaacaagaacactgtgcccggcgacgtgagcgcgctggtgcccggcggcctgcgcatgggctcgcctgccctcacctcgcgcggctttgtggagaaggacttcgagcaggtggctgagtttgtggaccgcgccgtgaacatcgcggtggacctcaagaagaagtaccccaagctcaaggagttccgcgaggccatggccaaggagtccacccccgacatcaacgcgctgaagaaggacgtggagaccttcgcgatgcgcttccccacgataggcttcgacaaggccgccatgcgctacaagaactaagcagcgcatcggatgtccatcagcttcccgtgggttttggaccgtctgccttcttgagtgctagtagcgaaagaagaataagttgcgtgtattggcgtgggcactgtttcgcacgtcgcaaaaccggtggcgctttttggtgggataagtgagtccaagtaggagtcgcggttaagctctgttgtaggagtggttaacagtgtgttggccccggtaggggtgtgttagcttcacgcgtcggtctgttggtgaacggagggtggcgctttcgagtcgaaccggcactgtcccagcacgggtaacaatgaacccctgtttgtcagggcccggaaaggtttgcatgtgtgtgatcgggatcgcgcttcagtggagggttttgtctcctcaactccacctgtaacgcgcgcaaccctgaaaaaaaaaaaaaaaaaaaaaaaaaaaaaaaaaaa

SEQ ID NO: 80046 - protein, 520 aa, Chlamydomonas reinhardtii
MQRTVQGISQLARALSSAHAVAGQRCFAAQPALSNEEEYSRFSQDASRAHVTWPKVLNAGLAEVDPDLFDIIEKEKNRQFKGLELIPSENFVSASVMEAVGSVMTNKYSEGYPGARYYGGNEFIDQAERLCQERALKAFHLDPAQWGVNVQSLSGSPSNFQVYTALLQPHDRIMALDLPHGGHLSHGYQTDTKKISATSIYFEQMPYRLNEETGLIDYDMLEKTAVLFRPKLIVAGASAYTRHYDYARMRAIADKVGAWLLADMAHISGLVAADLVPSPFGFADVVTTTTHKSLRGPRGAMIFYRKGVRRTDAKTGKPINYDIEDKINFAVFPGLQGGPHNHTIAGLACALKQAATPEFKSYQQQVLSNSQALAGALAKRGFKLVSGGTDNHIVLVDLRPKGVDGSRVERVLELAHIAANKNTVPGDVSALVPGGLRMGSPALTSRGFVEKDFEQVAEFVDRAVNIAVDLKKKYPKLKEFREAMAKESTPDINALKKDVETFAMRFPTIGFDKAAMRYKN

SEQ ID NO: 80047 - DNA, 1554 bp, Arabidopsis thaliana
  CDS (1)..(1554)
atggcgttggctcttcgtagactctcctcttccgttaagaaaccgatctcgcttctctcctctaatggcggttcactccgtttcatgtcgtctttatcaaccgcagctatggcggaatcggagaaatctcgttctagttggattaagcaattgaatgcatctctagatgaaatcgatcctgaagttgcggatattatcgaattagagaaggctagacaatggaagggatttgaacttataccgtcagagaatttcacttctctatctgtgatgcaagccgttggttctgttatgactaataagtatagtgaaggataccctggagctagatactatggaggaaatgagtacattgacatggctgagacattatgtcaaaaacgcgcattagaagcttttcagttagatccttctaaatggggagtcaatgtgcagtctttatcaggatcaccagctaatttccaagtttacactgcattgttgaagcctcatgaaagaatcatggcacttgatttacctcatggtggacatctttctcatggttatcagactgacacgaagaaaatatcggctgtatccatcttttttgagacaatgccatacagattggatgagaacactggttacattgattatgaccagctagaaaagagtgccgtgcttttcagaccgaaacttattgttgcgggtgcaagtgcttatgctcgtctatatgactatgcacgtattcgtaaggtctgtaacaagcaaaaggcagttatgttggctgatatggctcatattagtgggttggttgctgctggcgttattccttctccttttgagtatgcagatgttgttacgactacaactcacaaatcgcttcgcggtcctagaggggctatgatattctttaggaaggggttaaaagagattaacaaacaagggaaagaggtcatgtatgactatgaggacagaattaatcaagctgtttttcctggactgcaaggtggtccacataatcacactataacgggtctagcagttgctctgaagcaggcaagaactcctgagtacaaggcctaccaggatcaagttctccgtaattgctcaaagtttgctgagactttgcttgcgaaaggatatgatttagtgtctggaggcactgataatcatttagttttggtgaatctgaaaaacaagggaatagatggatcaagagtggaaaaagtattagaattagtacatattgcagcaaacaagaatactgttcctggtgatgtttctgccatggttcccggtggcatccatatgggaacaccagccctcacatcaagaggattcattgaggaagattttgcaaaagtggcggagtattttgatttagccgtcaagatagccttaaagatcaaagcagagtctcaaggaacaaagttgaaagactttgtagcaacaatgcaatcaaatgagaaattacagtcagagatgtcaaagctccgtgagatggtagaagaatatgctaagcaattcccaacgattgggttcgagaaagagacgatgagatacaaagagtag

SEQ ID NO: 80048 - protein, 517 aa, Arabidopsis thaliana
MALALRRLSSSVKKPISLLSSNGGSLRFMSSLSTAAMAESEKSRSSWIKQLNASLDEIDPEVADIIELEKARQWKGFELIPSENFTSLSVMQAVGSVMTNKYSEGYPGARYYGGNEYIDMAETLCQKRALEAFQLDPSKWGVNVQSLSGSPANFQVYTALLKPHERIMALDLPHGGHLSHGYQTDTKKISAVSIFFETMPYRLDENTGYIDYDQLEKSAVLFRPKLIVAGASAYARLYDYARIRKVCNKQKAVMLADMAHISGLVAAGVIPSPFEYADVVTTTTHKSLRGPRGAMIFFRKGLKEINKQGKEVMYDYEDRINQAVFPGLQGGPHNHTITGLAVALKQARTPEYKAYQDQVLRNCSKFAETLLAKGYDLVSGGTDNHLVLVNLKNKGIDGSRVEKVLELVHIAANKNTVPGDVSAMVPGGIHMGTPALTSRGFIEEDFAKVAEYFDLAVKIALKIKAESQGTKLKDFVATMQSNEKLQSEMSKLREMVEEYAKQFPTIGFEKETMRYKE

SEQ ID NO: 80049 - DNA, 1590 bp, Arabidopsis thaliana
  CDS (1)..(1590)
atgcaagcttgttgtggtggtaattcgatggcttctcttcagcaacctggacgggttcaaggatctgtctttcccccaattatgcctccagtgaccaaattttctcagcagttgaagttcaatatttcaaaacctttccgttcttcatttctgaaaagaaacctggtctctgaaatgagagcatcttcagtctcgctacctaatgtcgagataagcagcaaagaaatcccttttgaggactatggtcttggtgaagttgatccagaggtccgaaccatcatcacaaaggagaaagatagacaattcaggagcttggagcttattgcatctgagaatttcacgtctcgagcagttatggaggcggttggctcatgccttaccaacaagtattctgagggactgcctggtaaaagatattatggtggcaatgagtacattgatcagttggagacgctttgccagaaccgggctttggcagccttccgcttagattctacgaaatggggggttaatgttcagccgttatctggttcacctgcaaactttgctgtctacactgcgatacttagccctcatgatcggatcatgggtttggatttacctcacggtggtcatctgtcgcatgggttcatgaccgctaaaaggcgtgtatctggaacttcaatatactttgagtccatgccttatcgacttgatgaatcaacaggcattgttgactacgatatgctcgagaaaactgctacacttttcagaccaaagcttattatcgcaggagctagtgcatacagccgagattttgactatcctcgcatgaggaagatcgcagactcagttggtgcttttctgatgatggatatggctcatatcagtgggcttgtggctgcttctgtggtagctgacccttttgagtattgtgatattgttacaacaacaactcacaagtctttgagaggtccgagaggtggcatgatcttcttcaggaaggatccaattaatggggttgatcttgaatctgccgtgaacaatgctgtcttccctggtttgcagggtggccctcataaccacacaattggaggattagcagtctgcttgaaacacgcacaatcaccggaattcaaggcgtaccagaaaagagttgtgtctaactgtagagctctagctaaccgattggttgaactcgggtttaagctagtttctggtggcagcgataaccacttggttctcgtcgatcttagacccatgggtatggatggtgcgcgggttgagaaaatcttagacatggcatctattactctcaacaagaactctgtccctggggacaaaagtgcgttggtaccagggggaataaggataggatcccccgcgatgacgacaagaggactgtcagagaaagactttgtagtagtggctgacttcatcaaggaaggtgtggagataacaatggaagccaagaaagccgcgccgggttcaaagcttcaagatttcaacaagttcgtgacatctcctgagtttccattgaaagagagagtgaagagtctaacggagagagtggaaaccttcacatctcgttttcccattcctggcgtttaa

SEQ ID NO: 80050 - protein, 529 aa, Arabidopsis thaliana
MQACCGGNSMASLQQPGRVQGSVFPPIMPPVTKFSQQLKFNISKPFRSSFLKRNLVSEMRASSVSLPNVEISSKEIPFEDYGLGEVDPEVRTIITKEKDRQFRSLELIASENFTSRAVMEAVGSCLTNKYSEGLPGKRYYGGNEYIDQLETLCQNRALAAFRLDSTKWGVNVQPLSGSPANFAVYTAILSPHDRIMGLDLPHGGHLSHGFMTAKRRVSGTSIYFESMPYRLDESTGIVDYDMLEKTATLFRPKLIIAGASAYSRDFDYPRMRKIADSVGAFLMMDMAHISGLVAASVVADPFEYCDIVTTTTHKSLRGPRGGMIFFRKDPINGVDLESAVNNAVFPGLQGGPHNHTIGGLAVCLKHAQSPEFKAYQKRVVSNCRALANRLVELGFKLVSGGSDNHLVLVDLRPMGMDGARVEKILDMASITLNKNSVPGDKSALVPGGIRIGSPAMTTRGLSEKDFVVVADFIKEGVEITMEAKKAAPGSKLQDFNKFVTSPEFPLKERVKSLTERVETFTSRFPIPGV

SEQ ID NO: 80051 - DNA, 1737 bp, Arabidopsis thaliana
  CDS (1)..(1737)
atgactccaacaccaacaccaagagctccaatcgcagacgattcgattaatctacaagtcgatcaaagtttccgatcattaccaacaactttctctccgattccgttacaattactcgaacaaaaagccgagaagaccaccaccgttgatgagccaaagaaagatggaggaggaggaggagatcaaaaggaagacgagcatttcagaatcttaggtcaccatatgtgtctcaaaaggcaaagagattgtccacttttgttaacgcaatcaaagcatccgaagagaagttccatcggtgattcagatctggaatcgcgacgtgctgctgtacgagcttggggtgatcaaccgattcatttggcggatcctgatattcatgagcttatggagaaagagaagcaacgacaagtaagaggaattgaattgattgcttctgagaatttcgtgtgtagagctgtaatggaagctttaggtagtcatttaacgaataaatactctgaaggtatgcctggagctagatactatactgggaatcaatatattgatcagattgagaatctctgtattgagcgtgctcttactgcgtttggtcttgaatctgataaatggggtgttaatgttcagccttattcttgtacttctgctaacttcgcggtgtataccggacttttattgcccggtgaacggattatggggcttgattcgccttctggtggtcatatgagtcatggttattgtactcctggtgggaagaagatttcggctgcttccatcttctttgagagttttccttataaagtgaatcctcaaactgggtatattgattatgataagcttgaagataaggcgcttgattaccgtcctaagattcttatttgtggtgggagttcttatcctagggattgggattttgcaagggttagacagattgcagataagtgtggagctgttttgatgtgtgatatggctcatattagcggtcttgttgcaactaaggaatgttcaaatccatttgatcactgtgacatagtaacctccactactcacaaaggtctacgtggtcctagaggaggtatcatcttctacaggagaggcccaaagataagaaagcagggccatcactctagccattgtgacacttccacgcattacgatctagaggaaaagatcaactttgctgtttttccatctctacaaggaggtccacacaacaaccatatcgctgctcttgccattgcattgaaacaagtggccactccagagtacaaagcttacatacaacagatgaagaaaaacgcccaagctttagcagcagctcttcttagaagaaaatgcagactggttactggtggtacagacaaccatttgttgctgtgggatctcactcctatgggcttaacagggaaagtctacgagaaagtgtgtgagatgtgccatatcactttaaacaagacggctatattcggggacaatggtacaatatctcctggaggtgtaagaatagggacacccgcaatgacaacccgaggctgtatagagtctgatttcgagacaatggcggattttctgataaaggcggctcagataacaagtgcgttgcagagagagcatggaaagtcacacaaggagtttgtgaaaagtttatgcaccaacaaagacatagctgagcttagaaaccgagtcgaagcatttgctttgcagtatgagatgcctgcttctcttattcgaattgaatga

SEQ ID NO: 80052 - protein, 578 aa, Arabidopsis thaliana
MTPTPTPRAPIADDSINLQVDQSFRSLPTTFSPIPLQLLEQKAEKTTTVDEPKKDGGGGGDQKEDEHFRILGHHMCLKRQRDCPLLLTQSKHPKRSSIGDSDLESRRAAVRAWGDQPIHLADPDIHELMEKEKQRQVRGIELIASENFVCRAVMEALGSHLTNKYSEGMPGARYYTGNQYIDQIENLCIERALTAFGLESDKWGVNVQPYSCTSANFAVYTGLLLPGERIMGLDSPSGGHMSHGYCTPGGKKISAASIFFESFPYKVNPQTGYIDYDKLEDKALDYRPKILICGGSSYPRDWDFARVRQIADKCGAVLMCDMAHISGLVATKECSNPFDHCDIVTSTTHKGLRGPRGGIIFYRRGPKIRKQGHHSSHCDTSTHYDLEEKINFAVFPSLQGGPHNNHIAALAIALKQVATPEYKAYIQQMKKNAQALAAALLRRKCRLVTGGTDNHLLLWDLTPMGLTGKVYEKVCEMCHITLNKTAIFGDNGTISPGGVRIGTPAMTTRGCIESDFETMADFLIKAAQITSALQREHGKSHKEFVKSLCTNKDIAELRNRVEAFALQYEMPASLIRIE

SEQ ID NO: 80053 - DNA, 1416 bp, Arabidopsis thaliana
  CDS (1)..(1416)
atggaaccagtctcttcatggggtaacacctctctcgtctccgtagatccagagatccacgacctaatcgagaaggagaaacgtcggcaatgtcgaggaatcgaacttatcgcttccgagaatttcacttccttcgccgtcatcgaagctctcggaagggccttaaccaacaaatactccgaaggtattcctggtaatcgttattacggaggtaacgaattcatcgatgagatcgagaatctttgccgtccaagagctctcgaagctttccattgtgatccagcagcgtggggcgttaatgttcagccgtattctggatctccggcaaatttcgctgcttacacggctttgcttcagcctcacgatcgtatcatggggcttgatttgccttcaggtggtcatttgactcatggttactatacatctggtggtaagaagatctctgcgacttcgatctactttgagagtcttccgtataaggtgaatttcaccactggttacattgattacgataagcttgaagagaaggcgttggatttcaggcctaagttgcttatctgtggtggtagtgcgtatcctagggattgggattacgctagatttagagctattgctgataaggttggagctcttttgctttgtgacatggctcacatcagtggtctcgttgctgctcaggaagctgcaaacccatttgagtactgtgacgttgtgacaaccacaacccacaagagtttgaggggtccaagggctggtatgattttctacaggaagggtccaaaaccaccaaagaagggtcaacccgagggtgcagtctatgattttgaggacaaaatcaactttgctgtattccctgcgcttcaaggtggtcctcacaatcaccagattggtgctctagctgttgcgttgaagcaggctaatactcctgggttcaaggtctacgcaaaacaagtgaaagccaatgctgttgcccttggaaactacctaatgagcaagggttaccagattgtgaccaatggaactgagaaccaccttgttctctgggatcttcgccctcttggattgaccggaaacaaggttgagaagctctgcgatctgtgcagcattacattgaacaagaacgcagtatttggagacagtagtgctcttgctcctggaggtgtaagaatcggtgcacccgcgatgacatcgagaggattggtggagaaggactttgagcagataggagaattcctgagccgtgcagtgacactgacgttggacatccaaaagacatacggtaagttgttgaaggacttcaacaagggtttggtgaacaacaaagatctcgatcagctcaaggctgatgtcgagaagttctcggcgtcttatgagatgcctggattcctcatgtctgagatgaagtacaaggattag

SEQ ID NO: 80054 - protein, 471 aa, Arabidopsis thaliana
MEPVSSWGNTSLVSVDPEIHDLIEKEKRRQCRGIELIASENFTSFAVIEALGRALTNKYSEGIPGNRYYGGNEFIDEIENLCRPRALEAFHCDPAAWGVNVQPYSGSPANFAAYTALLQPHDRIMGLDLPSGGHLTHGYYTSGGKKISATSIYFESLPYKVNFTTGYIDYDKLEEKALDFRPKLLICGGSAYPRDWDYARFRAIADKVGALLLCDMAHISGLVAAQEAANPFEYCDVVTTTTHKSLRGPRAGMIFYRKGPKPPKKGQPEGAVYDFEDKINFAVFPALQGGPHNHQIGALAVALKQANTPGFKVYAKQVKANAVALGNYLMSKGYQIVTNGTENHLVLWDLRPLGLTGNKVEKLCDLCSITLNKNAVFGDSSALAPGGVRIGAPAMTSRGLVEKDFEQIGEFLSRAVTLTLDIQKTYGKLLKDFNKGLVNNKDLDQLKADVEKFSASYEMPGFLMSEMKYKD

SEQ ID NO: 80055 - DNA, 1389 bp, Arabidopsis thaliana
  CDS (1)..(1389)
atgactgaatatctaggcaaagaaatcccttttgaggactatggtcttggtgaagttgatccagaggtccgaaccatcatcacaaaggagaaagatagacaattcaggagcttggagcttattgcatctgagaatttcacgtctcgagcagttatggaggcggttggctcatgccttaccaacaagtattctgagggactgcctggtaaaagatattatggtggcaatgagtacattgatcagttggagacgctttgccagaaccgggctttggcagccttccgcttagattctacgaaatggggggttaatgttcagccgttatctggttcacctgcaaactttgctgtctacactgcgatacttagccctcatgatcggatcatgggtttggatttacctcacggtggtcatctgtcgcatgggttcatgaccgctaaaaggcgtgtatctggaacttcaatatactttgagtccatgccttatcgacttgatgaatcaacaggcattgttgactacgatatgctcgagaaaactgctacacttttcagaccaaagcttattatcgcaggagctagtgcatacagccgagattttgactatcctcgcatgaggaagatcgcagactcagttggtgcttttctgatgatggatatggctcatatcagtgggcttgtggctgcttctgtggtagctgacccttttgagtattgtgatattgttacaacaacaactcacaagtctttgagaggtccgagaggtggcatgatcttcttcaggaaggatccaattaatggggttgatcttgaatctgccgtgaacaatgctgtcttccctggtttgcagggtggccctcataaccacacaattggaggattagcagtctgcttgaaacacgcacaatcaccggaattcaaggcgtaccagaaaagagttgtgtctaactgtagagctctagctaaccgattggttgaactcgggtttaagctagtttctggtggcagcgataaccacttggttctcgtcgatcttagacccatgggtatggatggtgcgcgggttgagaaaatcttagacatggcatctattactctcaacaagaactctgtccctggggacaaaagtgcgttggtaccagggggaataaggataggatcccccgcgatgacgacaagaggactgtcagagaaagactttgtagtagtggctgacttcatcaaggaaggtgtggagataacaatggaagccaagaaagccgcgccgggttcaaagcttcaagatttcaacaagttcgtgacatctcctgagtttccattgaaagagagagtgaagagtctaaaggagagagtggaaaccttcacatctcgttttcccattcctggcgtttaa

SEQ ID NO: 80056 - protein, 462 aa, Arabidopsis thaliana
MTEYLGKEIPFEDYGLGEVDPEVRTIITKEKDRQFRSLELIASENFTSRAVMEAVGSCLTNKYSEGLPGKRYYGGNEYIDQLETLCQNRALAAFRLDSTKWGVNVQPLSGSPANFAVYTAILSPHDRIMGLDLPHGGHLSHGFMTAKRRVSGTSIYFESMPYRLDESTGIVDYDMLEKTATLFRPKLIIAGASAYSRDFDYPRMRKIADSVGAFLMMDMAHISGLVAASVVADPFEYCDIVTTTTHKSLRGPRGGMIFFRKDPINGVDLESAVNNAVFPGLQGGPHNHTIGGLAVCLKHAQSPEFKAYQKRVVSNCRALANRLVELGFKLVSGGSDNHLVLVDLRPMGMDGARVEKILDMASITLNKNSVPGDKSALVPGGIRIGSPAMTTRGLSEKDFVVVADFIKEGVEITMEAKKAAPGSKLQDFNKFVTSPEFPLKERVKSLKERVETFTSRFPIPGV

SEQ ID NO: 80057 - DNA, 1290 bp, Agrobacterium tumefaciens
  CDS (1)..(1290): transl_table=11
atgtcgaacacagatgctttcttctcccgtccgcttgccgaagtcgatccggatattttcggcgcgatcgagaaggaactgggtcgccagcgccacgagatcgaactgatcgcctcggaaaacatcgtttcccgcgctgtgcttgaagcgcagggttcgatcatgaccaacaaatatgcggaaggttatccgggcaagcgttattacggcggctgccagttcgtcgatatcgctgaagagcttgccatcgagcgcgccaagaagctgttcggcgtcaacttcgccaacgttcagccgaactccggttcgcagatgaatcaggccgtgttcctcgcgcttttgcagccgggcgataccttcatgggtctcgatctgaactcggggggccacctgacgcatggttcgccggtcaacatgtccggtaaatggttcaacgtcgtgtcctacggcgtgcgtgaaggcgacaacctgctcgacatggacgaagtggagcgcaaggccaaggaaacccggccgaagctgatccttgccggcggcaccgcctattcgcgcgtctgggactggaagcgcttccgcgagatcgccgatgaagtcggcgcctatctgatggtcgacatggcccacatcgccggtctcgttgccggtggccagcacccgtcgccgttcccgcattgccatgttgccaccaccacgacgcacaagtctctgcgcggcccgcgtggcggcatgatcctcaccaatgacgaggatctggccaagaagttcaactcggccgtattccccggcctgcagggtggcccgctgatgcatgtcatcgccgccaaggccgttgccttcggcgaagcgctgcagccggaattcaaggactatgccgcgcaggtcgtgaagaacgccaaggcgctggccgaaaccctgatcgaaggcggtctcgatgtcgtctccggcggcaccgacaaccacctgatgctggtcgatcttcgcaagaagaacgccaccggcaagcgcgcggaagcagcccttggccgcgcttacatcacctgcaacaagaacggcattcctttcgacccggaaaaacccttcgtcacgtcgggtgtccgtctcggcacgccggccggcacgacgcgcggtttcaaggaagcggaattccgcgaaatcggcaagctgatcgtcgaggttctcgacggcctgaaggttgccaattcggatgaaggtaatgcctccgtcgaggctgccgtgcgcgaaaaggtcgtcggtttgaccgaccgtttcccgatgtatccgtacatgtaa

SEQ ID NO: 80058 - protein, 429 aa, Agrobacterium tumefaciens
MSNTDAFFSRPLAEVDPDIFGAIEKELGRQRHEIELIASENIVSRAVLEAQGSIMTNKYAEGYPGKRYYGGCQFVDIAEELAIERAKKLFGVNFANVQPNSGSQMNQAVFLALLQPGDTFMGLDLNSGGHLTHGSPVNMSGKWFNVVSYGVREGDNLLDMDEVERKAKETRPKLILAGGTAYSRVWDWKRFREIADEVGAYLMVDMAHIAGLVAGGQHPSPFPHCHVATTTTHKSLRGPRGGMILTNDEDLAKKFNSAVFPGLQGGPLMHVIAAKAVAFGEALQPEFKDYAAQVVKNAKALAETLIEGGLDVVSGGTDNHLMLVDLRKKNATGKRAEAALGRAYITCNKNGIPFDPEKPFVTSGVRLGTPAGTTRGFKEAEFREIGKLIVEVLDGLKVANSDEGNASVEAAVREKVVGLTDRFPMYPYM

SEQ ID NO: 80059 - DNA, 1248 bp, Burkholderia mallei
  CDS (1)..(1248): transl_table=11
atgtttgacagagcccaaagcaccattgcgaacgtcgatcccgagatctggcaagcgattcagcaggaaaacgtccgtcaggaagagcacatcgagctgatcgcgtcggagaattacacgagcccggccgtgatggcggcgcaaggctcgcaactgacgaacaagtacgcggaaggctatccgggcaagcgctattacggcggctgcgaatacgtggacatcgtcgagcagctcgcgatcgatcgcgtgaaggcgctgttcggcgccgaagcggcgaacgtgcagccgaactcgggctcgcaggcgaaccagggcgtgttcttcgcgatgctcaagccgggcgacacgatcatgggcatgagcctcgcgcacggcggccacctcacgcacggctcgccggtgaacatgtcgggcaagtggttcaacgtcgtgagctacgggctgaacgaggctgaagacatcgattacgaagcggccgagcagctcgcgcacgagcacaagccgaagctgatcgtcgcgggcgcgtcggcgttcgcgctgaagatcgatttcgagcgcctcgcgaagatcgccaaggcagtgggcgcgtacctgatggtcgacatggcgcactacgcgggcctgatcgcggcgggtgtctatccgaacccggtgccgcacgcggatttcgtcacgacgacgacgcacaagagcctgcgcggcccgcgcggcggcgtgatcctgatgaaggccgagtacgagaagcagatcaactcggcgatcttcccgggcatccagggcggaccgctgatgcacgtgatcgccgcgaaggccgtcgcgttcaaggaagcgctgtcgccggaattcaaggaataccagcagaaggtggtcgagaacgcccgcgtgctggcgcaaacgctcgtcaagcgcggcctgcgcatcgtgtcgggccgcaccgagagccatgtgatgctggtcgacctgcgcgcgaagaacatcacgggcaaggcggcggaagcggcgctcggcaatgcgcacatcacggtcaacaagaacgcgatcccgaacgatccggagaagcccttcgtgacgagcggcgtgcgcctgggctcgccggcgatgacgacgcgcggcttcggcccgcaggaagcggagctcgtcggcaacctgatcgccgacgtgctcgagcatcccgaagacgcggcgacgatcgagcgcgtgcgtgcgcaggtcgccgagctgacgaagcgtttcccggtctatcgctga

SEQ ID NO: 80060 - protein, 415 aa, Burkholderia mallei
MFDRAQSTIANVDPEIWQAIQQENVRQEEHIELIASENYTSPAVMAAQGSQLTNKYAEGYPGKRYYGGCEYVDIVEQLAIDRVKALFGAEAANVQPNSGSQANQGVFFAMLKPGDTIMGMSLAHGGHLTHGSPVNMSGKWFNVVSYGLNEAEDIDYEAAEQLAHEHKPKLIVAGASAFALKIDFERLAKIAKAVGAYLMVDMAHYAGLIAAGVYPNPVPHADFVTTTTHKSLRGPRGGVILMKAEYEKQINSAIFPGIQGGPLMHVIAAKAVAFKEALSPEFKEYQQKVVENARVLAQTLVKRGLRIVSGRTESHVMLVDLRAKNITGKAAEAALGNAHITVNKNAIPNDPEKPFVTSGVRLGSPAMTTRGFGPQEAELVGNLIADVLEHPEDAATIERVRAQVAELTKRFPVYR

SEQ ID NO: 80061 - DNA, 1275 bp, Burkholderia sp
  CDS (1)..(1275): transl_table=11
atgtcgaacacccagcctttcttctcgcagccccttgccgagcgcgacgcgccggtgcgcagcgccatcctgaaggagctcgagcgtcagcagtcgcaggtcgagctgatcgcgtcggaaaacatcgtgtcgcgcgccgtgctcgaggcgcagggctcggtgctgaccaacaagtacgcggaaggctatcccggcaagcgctactacggtggctgcgagttcgcggatgaagtcgaggcgctggcaatcgatcgcgtcaagcagatcttcaatgccggctatgcgaacgtgcagccgcactcgggtgcgcaggcgaacggctcggtgatgctcgcgctggccaagccgggcgacacggtactcggcatgtcgctcgacgccggcggccacctgacgcacggcgcgaagccggcgctgtcgggcaagtggttcaacgcggtccagtacggcgtgaaccgcgacacgatgctgatcgactacgaccaggtcgaggcgctcgcgcacgagcacaagccgaacctgatcattgccggcttctcggcctacccgcgtgcgctcgacttcgcgcgcttccgtgcgatcgccgacagcgtcggcgcgaagctgatggtcgacatggcgcacatcgccggcgtgatcgccgcgggccgccacgcgaacccggtcgagcatgcgcacgtcgtcacgtcgacgacccacaagacgctgcgcggcccgcgcggcggcttcgtgctgaccaacgacgaggacatcgcgaagaagatcaactcggccgtgttccccggcctgcagggcggcccgctgatgcacgtgatcgccggcaaggccgtcgcgttcggcgaagtgctgcaggcggacttcaagacctacatcgacaacgtcctcgcgaacgcgcaggcgctgggtgaagtgctgaaggcgggcggcgtcgatctcgtcacgggcggtaccgacaaccacctgctgctggtcgacctgcgcccgaagggcctgaagggcgcgccggtcgaacaggcgctggagcgtgcgggcatcacctgcaacaagaacggcattccgttcgacaccgagaagccgaccgtcacgtcgggcatccgcctcggcacgccggccggcacgacgcgcggcttcggcgtcgcggaattccgcgaagtgggccgcctgatcctggaagtgttcgacgcgctgcgcgcgaacccggaaggcgaccacgcgaccgaacagcgcgtgcgccgcgagatcttcgcgttgtgcgaacgcttcccgatctattga

SEQ ID NO: 80062 - protein, 424 aa, Burkholderia sp
MSNTQPFFSQPLAERDAPVRSAILKELERQQSQVELIASENIVSRAVLEAQGSVLTNKYAEGYPGKRYYGGCEFADEVEALAIDRVKQIFNAGYANVQPHSGAQANGSVMLALAKPGDTVLGMSLDAGGHLTHGAKPALSGKWFNAVQYGVNRDTMLIDYDQVEALAHEHKPNLIIAGFSAYPRALDFARFRAIADSVGAKLMVDMAHIAGVIAAGRHANPVEHAHVVTSTTHKTLRGPRGGFVLTNDEDIAKKINSAVFPGLQGGPLMHVIAGKAVAFGEVLQADFKTYIDNVLANAQALGEVLKAGGVDLVTGGTDNHLLLVDLRPKGLKGAPVEQALERAGITCNKNGIPFDTEKPTVTSGIRLGTPAGTTRGFGVAEFREVGRLILEVFDALRANPEGDHATEQRVRREIFALCERFPIY

SEQ ID NO: 80063 - DNA, 1260 bp, Colwellia psychrerythraea
  CDS (1)..(1260): transl_table=11
atgtttactcgtgatatgaatattgctacttttgatccagaactttttgaagcaatgagcaatgaagttgttcgccaagaagagcacattgaattaattgcatctgaaaactactgtagcccgcgcgttcttgaagcacaaggctcacaacttactaacaaatacgctgaaggttaccctggcaagcgttactacggtggttgtgaatatgttgatatcgctgagcaattagcgattgatcgtgctaaagaattatttggtgctacttatgccaacgttcagcctcatgctggttcacaagctaacgcagctgtttttcaagctttagttacaccaggcggtaaagtattaggcatgagcttagctcatggcggtcacttaactcatggttcacatgtaagcttctctggtaagtcttacgaagcgttccaatatggtcttcaccctgaaacaggcgatattgactatgaagaattagaacgtttagctgtagagcacaaaccagaaatgattatcggtggtttctcagcattctcaggtgttgttgactgggcacgtatgcgtacaattgctgataaagttggcgcttacttcttcgtagatatggctcacgttgcgggtttaattgctgcaggtctttaccctaacccagttccacatgcgcatgttgttactacaactacgcataaaacattagctggcccacgtggcggtttaattatctctggttgtgatgacgaagctatttacaaaaagttaaacagcgctgttttcccaggtggtcaaggtggcccattaatgcacattattgcagcgaaagccgttgcatttaaagaagcattatcgccagagtttaaagtttaccaacaaaatgttttagctaacgctttagcaatggtagatgtattacaagaccgtggttataaagtagtatctaacggtacgcaaaaccacttattgttacttgatttaatcgataaagatattactggtaaagatgctgatgccgctttaggtaaagcacacatcacagtaaacaaaaactcagtgccaaacgatcctcgttctccgtttgttacatcaggtctacgtttaggtactccagcgattactcgtcgtggttttggtatcgaagaaactaaggcattaactggctggatttgtgacattcttgatgatattgaaaatgaagacgttagcaaacgtgttcaagaccaagttaaagagttatgtgctcgtttccctgtttaccaaaagtag

SEQ ID NO: 80064 - protein, 419 aa, Colwellia psychrerythraea
MFTRDMNIATFDPELFEAMSNEVVRQEEHIELIASENYCSPRVLEAQGSQLTNKYAEGYPGKRYYGGCEYVDIAEQLAIDRAKELFGATYANVQPHAGSQANAAVFQALVTPGGKVLGMSLAHGGHLTHGSHVSFSGKSYEAFQYGLHPETGDIDYEELERLAVEHKPEMIIGGFSAFSGVVDWARMRTIADKVGAYFFVDMAHVAGLIAAGLYPNPVPHAHVVTTTTHKTLAGPRGGLIISGCDDEAIYKKLNSAVFPGGQGGPLMHIIAAKAVAFKEALSPEFKVYQQNVLANALAMVDVLQDRGYKVVSNGTQNHLLLLDLIDKDITGKDADAALGKAHITVNKNSVPNDPRSPFVTSGLRLGTPAITRRGFGIEETKALTGWICDILDDIENEDVSKRVQDQVKELCARFPVYQK

SEQ ID NO: 80065 - DNA, 1281 bp, Mycobacterium bovis
  CDS (1)..(1281): transl_table=11
atgtctgccccgctcgctgaggttgaccccgatatcgccgagttgctggccaaggagcttggtcggcaacgagacaccctggagatgatcgcctcggagaacttcgcaccgcgcgctgtgctgcaggcccagggcagtgtgctgaccaacaagtacgccgagggactgcccgggcggcgctactacggcggttgtgagcacgtcgacgtggtggaaaacctcgcccgcgaccgagccaaggcgttgttcggtgccgaattcgccaatgtgcaaccgcattcgggcgctcaggccaacgccgcggtgctgcatgcgctgatgtcacccggcgagcggctgttgggtctggacctggccaacggtggtcacctgacccatggcatgcggctgaacttctccggcaagctctacgagaatggcttctacggcgtcgacccggcgacacatctgatcgacatggatgcggtgcgggccaccgcactcgaattccgcccgaaggtgatcatcgccggctggtcggcctacccgcgggtgctcgacttcgcggcgttccggtcgatcgccgacgaggtcggggccaagttgctcgtggacatggcgcatttcgcgggtctggtcgccgcggggttgcacccgtcgccggtgccgcacgcggatgtggtgtccaccaccgtgcacaagacgctcggcggcggccgctccggcctgatcgtcggtaagcagcagtacgccaaggcgatcaactcggcggtgtttcccgggcagcagggcggtccgctcatgcacgtcattgccggcaaggcggtcgcgttgaagatcgccgccacacccgaatttgccgaccggcagcggcgcacgctgtccggggcccggatcattgccgatcgactgatggctcccgatgtcgccaaggccggtgtgtcggtggtcagcggcggcaccgacgtccacctggtgctggtcgatctgcgtgattccccactggatggccaggccgccgaggacctgctgcacgaggtcggcatcacggtcaaccgcaacgccgtccccaatgatccccgaccgccgatggtgacctcgggcctgcggataggcacgcccgcgctggcgacccgcggcttcggcgacaccgagttcaccgaggtcgccgacattattgcgaccgcgctggcgaccggcagttccgttgatgtgtcggcgcttaaggatcgggcgacccggctggccagggcgtttccgctctacgacgggctcgaggagtggagtctggtcggccgctga

SEQ ID NO: 80066 - protein, 426 aa, Mycobacterium bovis
MSAPLAEVDPDIAELLAKELGRQRDTLEMIASENFAPRAVLQAQGSVLTNKYAEGLPGRRYYGGCEHVDVVENLARDRAKALFGAEFANVQPHSGAQANAAVLHALMSPGERLLGLDLANGGHLTHGMRLNFSGKLYENGFYGVDPATHLIDMDAVRATALEFRPKVIIAGWSAYPRVLDFAAFRSIADEVGAKLLVDMAHFAGLVAAGLHPSPVPHADVVSTTVHKTLGGGRSGLIVGKQQYAKAINSAVFPGQQGGPLMHVIAGKAVALKIAATPEFADRQRRTLSGARIIADRLMAPDVAKAGVSVVSGGTDVHLVLVDLRDSPLDGQAAEDLLHEVGITVNRNAVPNDPRPPMVTSGLRIGTPALATRGFGDTEFTEVADIIATALATGSSVDVSALKDRATRLARAFPLYDGLEEWSLVGR

SEQ ID NO: 80067 - DNA, 1281 bp, Mycobacterium tuberculosis
  CDS (1)..(1281): transl_table=11
atgtctgccccgctcgctgaggttgaccccgatatcgccgagttgctggccaaggagcttggtcggcaacgagacaccctggagatgatcgcctcggagaacttcgtaccgcgcgctgtgctgcaggcccagggcagtgtgctgaccaacaagtacgccgagggactgcccgggcggcgctactacggcggttgtgagcacgtcgacgtggtggaaaacctcgcccgcgaccgagccaaggcgttgttcggtgccgaattcgccaatgtgcaaccgcattcgggcgctcaggccaacgccgcggtgctgcatgcgctgatgtcacccggcgagcggctgttgggtctggacctggccaacggtggtcacctgacccatggcatgcggctgaacttctccggcaagctctacgagaatggcttctacggcgtcgacccggcgacacatctgatcgacatggatgcggtgcgggccaccgcactcgaattccgcccgaaggtgatcatcgccggctggtcggcctacccgcgggtgctcgacttcgcggcgttccggtcgatcgccgacgaggtcggggccaagttgctcgtggacatggcgcatttcgcgggtctggtcgccgcggggttgcacccgtcgccggtgccgcacgcggatgtggtgtccaccaccgtgcacaagacgctcggcggcggccgctccggcctgatcgtcggtaagcagcagtacgccaaggcgatcaactcggcggtgtttcccgggcagcagggcggtccgctcatgcacgtcattgccggcaaggcggtcgcgttgaagatcgccgccacacccgaatttgccgaccggcagcggcgcacgctgtccggggcccggatcattgccgatcgactgatggctcccgatgtcgccaaggccggtgtgtcggtggtcagcggcggcaccgacgtccacctggtgctggtcgatctgcgtgattccccactggatggccaggccgccgaggacctgctgcacgaggtcggcatcacggtcaaccgcaacgccgtccccaatgatccccgaccgccgatggtgacctcgggcctgcggataggcacgcccgcgctggcgacccgcggcttcggcgacaccgagttcaccgaggtcgccgacattattgcgaccgcgctggcgaccggcagttccgttgatgtgtcggcgcttaaggatcgggcgacccggctggccagggcgtttccgctctacgacgggctcgaggagtggagtctggtcggccgctga

SEQ ID NO: 80068 - protein, 426 aa, Mycobacterium tuberculosis
MSAPLAEVDPDIAELLAKELGRQRDTLEMIASENFVPRAVLQAQGSVLTNKYAEGLPGRRYYGGCEHVDVVENLARDRAKALFGAEFANVQPHSGAQANAAVLHALMSPGERLLGLDLANGGHLTHGMRLNFSGKLYENGFYGVDPATHLIDMDAVRATALEFRPKVIIAGWSAYPRVLDFAAFRSIADEVGAKLLVDMAHFAGLVAAGLHPSPVPHADVVSTTVHKTLGGGRSGLIVGKQQYAKAINSAVFPGQQGGPLMHVIAGKAVALKIAATPEFADRQRRTLSGARIIADRLMAPDVAKAGVSVVSGGTDVHLVLVDLRDSPLDGQAAEDLLHEVGITVNRNAVPNDPRPPMVTSGLRIGTPALATRGFGDTEFTEVADIIATALATGSSVDVSALKDRATRLARAFPLYDGLEEWSLVGR

SEQ ID NO: 80069 - DNA, 1251 bp, Photobacterium profundum
  CDS (1)..(1251): transl_table=11
atgctaaagcgcgatatgaatattgccgactatgatgcggaactttttgcagccattcaggaagaaacagcacgtcaagaagagcacatcgagttgatcgcttctgaaaactacacaagcccacgtgtaatggaagctcaaggatctcagctgactaacaaatatgctgaaggttacccaggtaagcgttattacggtggttgtgagtttgttgataaagcagaacaactagcgattgatcgtgcatgtcagctttttggtgctgaatacgcgaacgtacagcctcattctggttctcaagctaacaacgccgtttacatggcactactaaatccaggcgacactgtattaggtatgagccttgctcacggtggtcacttgactcacggttctccagtaaacttttctggtaagttatacaacatcatcccttacggcatcgatgaaactggtcagatcgattacgaagaaatggaagcattggcgttagagcacaaacctaagatgattatcggtggtttctctgcgtactctcaggttgttgactggaaacgcatgcgtgaaatcgctgataaagtgggcgcatacttcttcgttgatatggctcacgttgcgggtcttattgcggcaggtgtttaccctaacccagttccccacgcccatgttgtcacaacaacaacgcataaaacattagccggtcctcgtggcggtctaattttgtctaatgacggcgaagctctttataagaagttgaattcagcggtattccctggtggtcagggtggtcctctaatgcatgttatcgcagcaaaagcggtagccttcaaagaagcaatggaacctgaattcaaagtttatcaagcttgtgttgttgaaaatgcgaaagcaatggttggcgagttcttagaacgcggttacaagattgtatctggtagcactgagaatcacttgttccttgttgatttaatcgacaaaggcatcacaggtaaagaagcggatgccgcactgggtgctgctaacattaccgttaacaaaaacagcgttccaaacgatccacgtagcccgtttgtaacgtctggtattcgtattggtacaccatcaatcactcgccgcggtttcacggttgaagatacaaagcagcttgctggttggatttgtgatgtacttgataacacagataaacctgaagttatcgaagcaacgaaagcgaaagtattagaaatttgtaagcgcttacctgtatacgcttaa

SEQ ID NO: 80070 - protein, 416 aa, Photobacterium profundum
MLKRDMNIADYDAELFAAIQEETARQEEHIELIASENYTSPRVMEAQGSQLTNKYAEGYPGKRYYGGCEFVDKAEQLAIDRACQLFGAEYANVQPHSGSQANNAVYMALLNPGDTVLGMSLAHGGHLTHGSPVNFSGKLYNIIPYGIDETGQIDYEEMEALALEHKPKMIIGGFSAYSQVVDWKRMREIADKVGAYFFVDMAHVAGLIAAGVYPNPVPHAHVVTTTTHKTLAGPRGGLILSNDGEALYKKLNSAVFPGGQGGPLMHVIAAKAVAFKEAMEPEFKVYQACVVENAKAMVGEFLERGYKIVSGSTENHLFLVDLIDKGITGKEADAALGAANITVNKNSVPNDPRSPFVTSGIRIGTPSITRRGFTVEDTKQLAGWICDVLDNTDKPEVIEATKAKVLEICKRLPVYA

SEQ ID NO: 80071 - DNA, 1254 bp, Pseudomonas fluorescens
  CDS (1)..(1254): transl_table=11
atgttcagccgtgatttgactattgccaagtacgacgccgatctctttgccgccatggagcaagaagctcagcgccaggaagagcacattgagctgatcgcttcggaaaactacaccagcccagcggtgatggaagctcaaggctcggtactgaccaacaaatacgccgaaggctacccaggcaagcgctactacggcggttgcgaatacgtcgacgtggttgaacagctggccatcgaccgcgccaaggagctgttcggcgccgactacgccaacgtccagccacacgccggttcccaggccaacgccgcggtctacctggccctgctgcaaggcggcgacaccatcctgggcatgagcctggcccacggcggtcacctgacccacggcgccgcggtgtcctcctccggcaagctgtacaacgctatccagtacggcatcgacgccaacggcctgatcgactacgacgaagtcgagcgcctggccgtcgagcacaagccgaaaatgatcgtggccggtttctccgcctactcgcagatcctcgacttcccgcgtttccgcgaaatcgctgacaaagtgggcgcctacctgttcgtcgacatggcccacgtggccggtctggtcgccgctggcgtctacccgaacccggtgccattcgctgacgtcgtgaccaccaccacccacaagaccctgcgcggtccacgtggcggcctgatcctggctcgcgccaacgccgacatcgagaagaagctcaactccgccgtattcccgggcgcccagggtggcccgctggagcacgtgatcgccgctaaagcgatctgcttcaaggaagcgctgcagcctgagttcaaggcctaccaggaacaagtggtgaagaacgcccaggccatggccgaagtgttcatcgcccgcggtttcgatgtggtttccggtggtaccaagaaccacctgttcctgctgtcgctgatcaagcaggacatctccggtaaagacgccgacgccgctctgggcaaagccttcatcaccgtgaacaagaactccgtgccaaacgatccacgctccccgttcgtcacctccggcctgcgcttcggtactccggccgtgaccactcgtggcttcaaggaagccgagtgcaaggaactggccggctggatctgcgacatcctggcggacctgaacaacgaagcggtgatcgacgctgtgcgtgagaaggtcaaggccatctgcaagaagctgccggtatacggcgcttaa

SEQ ID NO: 80072 - protein, 417 aa, Pseudomonas fluorescens
MFSRDLTIAKYDADLFAAMEQEAQRQEEHIELIASENYTSPAVMEAQGSVLTNKYAEGYPGKRYYGGCEYVDVVEQLAIDRAKELFGADYANVQPHAGSQANAAVYLALLQGGDTILGMSLAHGGHLTHGAAVSSSGKLYNAIQYGIDANGLIDYDEVERLAVEHKPKMIVAGFSAYSQILDFPRFREIADKVGAYLFVDMAHVAGLVAAGVYPNPVPFADVVTTTTHKTLRGPRGGLILARANADIEKKLNSAVFPGAQGGPLEHVIAAKAICFKEALQPEFKAYQEQVVKNAQAMAEVFIARGFDVVSGGTKNHLFLLSLIKQDISGKDADAALGKAFITVNKNSVPNDPRSPFVTSGLRFGTPAVTTRGFKEAECKELAGWICDILADLNNEAVIDAVREKVKAICKKLPVYGA

SEQ ID NO: 80073 - DNA, 1254 bp, Pseudomonas putida
  CDS (1)..(1254): transl_table=11
atgttcagcaagcaagaccagatccagggttacgacgatgcactgctggcggcgatgaatgccgaagaacagcgccaggaagatcacatcgagctgatcgcctcggagaactacaccagcaagcgcgtcatgcaggcccaaggcagcggcctgaccaacaagtacgccgaaggctaccctggcaagcgttactacggtggctgcgagcacgtagacaaggtagaagccctggccatcgagcgcgccaagcagctgttcggtgccgactacgcaaacgtccaaccgcactccggctcgtcggccaacggcgcggtctacctggccctgctgcaagccggtgacaccatcctgggcatgagcctggcccacggcggtcacctgacccacggcgccaaggtgtcgtcctcgggcaaactgtacaacgcagtccagtacggcatcgacaccaacaccggcctgatcgactacgacgaagtcgagcgcctggcggtcgagcacaagccgaaaatgatcgttgccggtttctcggcctactccaagaccctcgacttcccacgtttccgcgccatcgccgacaaggtgggcgcactgctgttcgtcgacatggcccacgttgccggcctggttgccgctggcctgtacccgaacccgatcccgttcgccgacgtggtcaccaccactacccacaagaccctgcgcggtccgcgtggcggcctgatcctggccaagtcgaacgaagagatcgagaaaaagctgaacgccgctgtattcccgggtgcccagggtggcccgctgatgcacgtgatcgctgccaaggcagtgtgcttcaaggaagcgctggagcctggattcaaggcctaccagcagcaagtgatcgaaaacgcccaggccatggcccaggtgttcatcgaccgtggctacgatgtggtttccggtggcaccgacaaccacctgttcctggtcagcctgatccgtcagggcctgactggcaaagacgccgacgccgccctgggtcgtgcgcatatcaccgtcaacaagaacgccgtgccgaacgacccgcagtcgccgttcgtcacttcgggcctgcgtatcggcaccccggccgtcaccacccgcggcttcaaggtcgcccagtgcgtggccctggctggctggatttgcgacatcctcgacaacctcggtgacgcagacgtcgaagccgatgtggcgaagaacgtcgcggccctgtgcgcagatttccctgtctaccgctga

SEQ ID NO: 80074 - protein, 417 aa, Pseudomonas putida
MFSKQDQIQGYDDALLAAMNAEEQRQEDHIELIASENYTSKRVMQAQGSGLTNKYAEGYPGKRYYGGCEHVDKVEALAIERAKQLFGADYANVQPHSGSSANGAVYLALLQAGDTILGMSLAHGGHLTHGAKVSSSGKLYNAVQYGIDTNTGLIDYDEVERLAVEHKPKMIVAGFSAYSKTLDFPRFRAIADKVGALLFVDMAHVAGLVAAGLYPNPIPFADVVTTTTHKTLRGPRGGLILAKSNEEIEKKLNAAVFPGAQGGPLMHVIAAKAVCFKEALEPGFKAYQQQVIENAQAMAQVFIDRGYDVVSGGTDNHLFLVSLIRQGLTGKDADAALGRAHITVNKNAVPNDPQSPFVTSGLRIGTPAVTTRGFKVAQCVALAGWICDILDNLGDADVEADVAKNVAALCADFPVYR

SEQ ID NO: 80075 - DNA, 1248 bp, Ralstonia eutropha
  CDS (1)..(1248): transl_table=11
atgttcgaacgcagccgctatacgatcgaccagatcgaccccgaggtctttgccgctatccagaaggaaaaccagcgccaggaagaccacatcgagctgatcgcctccgaaaactacacctcgccggccgtgatggctgcgcaaggctcgcaactgaccaacaagtacgccgagggctatcccggcaagcgctactacggtggctgcgagtacgtcgacatcgtcgaacagctggccatcgaccgcgtcaagcagctgttcggcgccgaagccgccaacgtgcagccgaactcgggctcgcaggccaaccagggcgtgtacttcgccgtgctgaagccgggcgacaccatcatgggcatgagcctggccgaaggcggtcacctgacccacggcatggcgctgaacatgagcggcaagtggttcaacgtggtcagctacggcctgaacgcgcaggaagacatcgactacgacgcgctggaaaagctggcacaagagaagaagccgaagctgatcatcgccggcgcatcggccttcgcgctgcgcatcgacttcgagcgcatcggcaaggtcgccaagtcgatcggtgcctacttcatggtcgacatggcccactacgccggcctgatcgccgcgggcgtgtacccgaacccggtgccgcacgccgacttcgtcaccaccaccacgcacaagagcctgcgcggcccgcgcggcggcgtgatcctgatgaaggccgagcatgagaaggccatcaactcgtcgatcttcccgggcatccagggcggtccgctgatgcacgtgatcgctggcaaggccgtcgcgttcaaggaagcgctgacgccggaattcaaggcttaccaggaacaagtggtcaagaacgccgccgtgctggccgaaacgctgatcgcgcgcggcctgcgcattgtctcgggccgcaccgaaagccacgtgatgctggtcgacctgcgcgccaagaacatcaccggcaaggaagccgagcgcatcctgggcgaagcgcacctgaccgtgaacaagaacgcgatcccgaacgatccggaaaagccgttcgtgacctcgggcattcgcgtcggctcgccggccatgaccacgcgcggcttcaaggaagaagaagcgcgtatcgtcggcaacctgatcgccgacgtgctggacaacccgcacgacgcgggcaacatcgccagcgtgcgcgagcaggtttccgccctgaccaagcgttttccggtctacggctga

SEQ ID NO: 80076 - protein, 415 aa, Ralstonia eutropha
MFERSRYTIDQIDPEVFAAIQKENQRQEDHIELIASENYTSPAVMAAQGSQLTNKYAEGYPGKRYYGGCEYVDIVEQLAIDRVKQLFGAEAANVQPNSGSQANQGVYFAVLKPGDTIMGMSLAEGGHLTHGMALNMSGKWFNVVSYGLNAQEDIDYDALEKLAQEKKPKLIIAGASAFALRIDFERIGKVAKSIGAYFMVDMAHYAGLIAAGVYPNPVPHADFVTTTTHKSLRGPRGGVILMKAEHEKAINSSIFPGIQGGPLMHVIAGKAVAFKEALTPEFKAYQEQVVKNAAVLAETLIARGLRIVSGRTESHVMLVDLRAKNITGKEAERILGEAHLTVNKNAIPNDPEKPFVTSGIRVGSPAMTTRGFKEEEARIVGNLIADVLDNPHDAGNIASVREQVSALTKRFPVYG

SEQ ID NO: 80077 - DNA, 1248 bp, Ralstonia solanacearum
  CDS (1)..(1248): transl_table=11
atgttcgaacgcaaccgctatacgatcgaccagatcgacccagaagtcttcgccgccatccagcaggaaaaccagcgccaggaagaccacatcgagctgatcgcctccgagaactacacctcgccggccgtgatggccgcccagggctcgcagctgaccaacaagtatgccgagggctatcccggcaagcgctactacggtggctgcgaatacgtggacgtggtcgagcagctcgccatcgaccgcgtgaagcaactgttcggcgccgaggccgccaacgtgcagccgaactccggctcgcaggccaaccagggcgtgttcttcgccatgctcaagccgggcgacaccatcatgggcatgagcctggccgaaggcggccacctgacgcacggcatggcgctcaacatgagcggcaagtggttcaacgtcgtcagctacggcctgaacgcgcaggaagacatcgactacgatgccctcgaagcgctggcacaagagaagaagcccaagctgatcatcgccggcgcctccgcgtttgcgctgcgcatcgacttcgagcgcatcgccaaggtggccaaggccgtcggcgcgtacttcatggttgacatggcccactacgccggcctgatcgccgcgggcgtctacccgaacccggtgccgcacgccgatttcgtgaccaccaccacccacaagagcctgcgcggcccgcgcggcggcgtgatcctgatgaaggccgagcacgagaaggccatcaactcggcgatcttccccggcatccagggcggcccgctgatgcacgtgatcgccggcaaggcggtggcgttcaaggaagcccagtcgcccacgttcaaggcctaccaggaacaggtggtgaaaaacgcccgcgccatggccgaaacgctgatggcccgcggcctgcgcatcgtctccggccgcaccgaaagccacgtgatgctggtcgacctgcgcgcgaagagcattaccggcaaggaagccgagaaggtgctgggcgacgcgcatatcaccgtcaacaaaaacgccatcccgaacgatccggagaagcccttcgtgacctcgggcatccgcctgggctcgccggccatgaccacgcgaggcttcaaggagggtgaggccgtgaaggtagcccacctgatcgccgatgtgcttgataatccgcatgacgaagccaacatcgcggccgtgcgcgccaaggtggccgagctgaccaagcagttcccggtctacgcatga

SEQ ID NO: 80078 - protein, 415 aa, Ralstonia solanacearum
MFERNRYTIDQIDPEVFAAIQQENQRQEDHIELIASENYTSPAVMAAQGSQLTNKYAEGYPGKRYYGGCEYVDVVEQLAIDRVKQLFGAEAANVQPNSGSQANQGVFFAMLKPGDTIMGMSLAEGGHLTHGMALNMSGKWFNVVSYGLNAQEDIDYDALEALAQEKKPKLIIAGASAFALRIDFERIAKVAKAVGAYFMVDMAHYAGLIAAGVYPNPVPHADFVTTTTHKSLRGPRGGVILMKAEHEKAINSAIFPGIQGGPLMHVIAGKAVAFKEAQSPTFKAYQEQVVKNARAMAETLMARGLRIVSGRTESHVMLVDLRAKSITGKEAEKVLGDAHITVNKNAIPNDPEKPFVTSGIRLGSPAMTTRGFKEGEAVKVAHLIADVLDNPHDEANIAAVRAKVAELTKQFPVYA

SEQ ID NO: 80079 - DNA, 1314 bp, Rhizobium loti
  CDS (1)..(1314): transl_table=11
atggcaacagcagcggcagcgtcgaacaaattcgagtccttcttcgaaaccacgctggaagacgccgatccggagattttcggcgccatccgcaacgagcttggccgccagcgccatgagatcgagctgatcgcctcggaaaacatcgtttcccgcgcggtgctcgaggcgcaggggtcgatcatgaccaacaaatacgccgagggctatccgggcaagcgctactatggcggctgccagttcgtcgacgtggccgaggaactggccatcgagcgggcgaagaagctgttcggatgcaatttcgccaacgtccagccgaactccggcagccagatgaaccaggcggtgttcctggcgctgctgcagcccggcgacacctttatgggcctcgacctcaattccggtggccatctcacccacggctcgccggtcaacatgagcggcaagtggttcaaggtcgtctcctacggcgtgcgcaaggaagaccatctgctcgacatggatgccatcgaaaagaccgcgcatgagaccaagccgaagctgatcctggccggcggcaccgcctattcccgcatctgggactggaagcgctttcgcgagatcgcggatgcagtcggcgcctatctgatggtcgacatggcgcatattgctggcctcgtcgccggcggcgtgcatccctcgccattgccgcacgcccatgtggtgacgaccaccacgcacaagtcgctgcgcggcccgcgcggaggcatgatcctgtgcaacgacgaagacattgccaagaagatgaactcggcagtgttccccggcctgcagggcggcccgctgatgcatgtcatcgccgccaaggcggtggcctttggcgaggcgcttaagccgagcttcaaggtctatgccgagagcgtggccgccaacgccaaggcgctggcttcgagcctcaaggagacgggcctcgacatcgtctccggcggtaccgataaccatttgatgctggtcgatttgcgccccaagaacgccaccggcaagcgcgccgaggcggcccttggccgcgccaacatcacttgcaacaagaacggcattcccttcgacccggaaaagcccttcgtcacctctggcgtgcgtctcggcacgccggccggtaccacgcgcggcttcggccaggccgaattccgcgagatcggcaagctgatcgccgaagtgctggatggtctcaagatcgccaattcggacgagggcaatgccgcggtcgaggcggcggtcaaggccaaggtcgtggcgctgaccgatcgttttccgctctatccttatctcggctga

SEQ ID NO: 80080 - protein, 437 aa, Rhizobium loti
MATAAAASNKFESFFETTLEDADPEIFGAIRNELGRQRHEIELIASENIVSRAVLEAQGSIMTNKYAEGYPGKRYYGGCQFVDVAEELAIERAKKLFGCNFANVQPNSGSQMNQAVFLALLQPGDTFMGLDLNSGGHLTHGSPVNMSGKWFKVVSYGVRKEDHLLDMDAIEKTAHETKPKLILAGGTAYSRIWDWKRFREIADAVGAYLMVDMAHIAGLVAGGVHPSPLPHAHVVTTTTHKSLRGPRGGMILCNDEDIAKKMNSAVFPGLQGGPLMHVIAAKAVAFGEALKPSFKVYAESVAANAKALASSLKETGLDIVSGGTDNHLMLVDLRPKNATGKRAEAALGRANITCNKNGIPFDPEKPFVTSGVRLGTPAGTTRGFGQAEFREIGKLIAEVLDGLKIANSDEGNAAVEAAVKAKVVALTDRFPLYPYLG

SEQ ID NO: 80081 - DNA, 1296 bp, Rhizobium meliloti
  CDS (1)..(1296): transl_table=11
atgctttcacagaccaacgacgctttcttcacccgctctctcgccgacagcgatccggaaatcttcggtgcgatcgagaaggagctgggccgccagcgccatgagatcgagctgatcgcctccgagaacatcgtttcacgggccgtgctcgaggcgcagggctcgatcatgaccaacaaatacgccgagggttacccgggcaagcgctattacggcggctgccaatatgtcgatatcgccgaggcactcgcgatcgagcgcgccaagaagctcttcggcgtcaacttcgcgaacgtgcaaccgaattcgggctcccagatgaaccaggcggtcttcctggcgctgctgcagccgggcgacaccttcatgggcctcgacctcaattccggcggccacctgacccatgggtccccggtgaacatgtcgggcaaatggttcaacgtcgtttcctacggcgtgcgcgaagacgatcaccttctcgacatggacgaagtcgccaggaaggcgcgcgagcagaagccgaaactgatcatcgccggcggaacggcctattcccgcatctgggactggaagcgcttccgcgagatcgccgacgaggtgggcgcgtggctgatggtcgacatggcccacatcgccggtctcgtggccggtggccagcatccgtcgccgttcccgcactgccacgttgcgacgacgaccacgcacaagtccctgcgcggcccccgcggcggcatgatcctcaccaatgacgaggaaatcgccaagaagatcaactccgccgtattccccggtctccagggtgggccgctgatgcacgtgattgccgccaaggccgtcgcgcttggcgaggcgctgcagccctccttcaaggattatgcggcccaggtcgtcaagaacgcccgcacccttgccgaaaccttgaaggccaacggcctggacatcgtctcgggcggtaccgacaaccacctgatgctggtcgacctgcgcaagaagaatgcgaccggcaagcgtgccgaagctgctctcggccgtgcctacgtcacctgcaacaagaacggcattcccttcgaccccgaaaagcccttcgtcacctccggcgtgcgcctcggtgcaccggccggtacgacgcgcggcttcaaggaggcggagttcaaggaggtcggcgaactgatcgtcgaggtgctcgacggtctcaaggccgccaattccgacgagggcaatgccgctgtcgaggctggcgtgcgcgagaaggtgatcaagctcaccgaccgcttcccgatgtacggctatatgtga

SEQ ID NO: 80082 - protein, 431 aa, Rhizobium meliloti
MLSQTNDAFFTRSLADSDPEIFGAIEKELGRQRHEIELIASENIVSRAVLEAQGSIMTNKYAEGYPGKRYYGGCQYVDIAEALAIERAKKLFGVNFANVQPNSGSQMNQAVFLALLQPGDTFMGLDLNSGGHLTHGSPVNMSGKWFNVVSYGVREDDHLLDMDEVARKAREQKPKLIIAGGTAYSRIWDWKRFREIADEVGAWLMVDMAHIAGLVAGGQHPSPFPHCHVATTTTHKSLRGPRGGMILTNDEEIAKKINSAVFPGLQGGPLMHVIAAKAVALGEALQPSFKDYAAQVVKNARTLAETLKANGLDIVSGGTDNHLMLVDLRKKNATGKRAEAALGRAYVTCNKNGIPFDPEKPFVTSGVRLGAPAGTTRGFKEAEFKEVGELIVEVLDGLKAANSDEGNAAVEAGVREKVIKLTDRFPMYGYM

SEQ ID NO: 80083 - DNA, 1299 bp, Rhodopseudomonas palustris
  CDS (1)..(1299): transl_table=11
atgagcacagccaatcccgcgtccgcgcccgacagcttcttctccgcctcgctggagcaggccgatcccgagatcgccgctgcgatccgcggcgaactcggccgccagcgccacgaggtcgagctgatcgcctccgagaacatcgtcagccgcgcggtgctggaagcgcagggctcggtgatgaccaacaagtatgcggaaggctatccgggcaaccgctattacggcggctgcgaattcgtcgacgttgccgagaatctggcgatcgaccgagccaagaagctgttcggcgccaatttcgccaacgtccagccgaactccggcagccagatgaaccaggcggtgttcctggcgctgctgcagcccggcgataccttcatgggcctcgatctcgccgccggcggccatctcacccacggcgcccccgtcaacatgagcggcaagtggttcaagccggtgcactacacggtgcgccgcgaagaccagatgatcgatatggatgcggtcgccaagctcgccgaggaagccaagccgaagctgatcatcgccggcggctcggcctatccgcgcgcctgggacttcaagcgcttccgcgagatcgccgacagcgtcggggcgtatttcatggtcgacatggcgcacttcgccggcctcgtggcgggcggcgtccatgcttcgccggtgccgcatgcccacgtcaccacgacgacgactcacaagtcgctgcgtggcccgcgcggcggcctgatcctcaccaacgatgaagcgctggccaagaagttcaattcggcgatcttccccggcctgcagggtggcccgctgatgcacgtgatcgccgccaaggcggtggcgttcaaggaagcgctgcagcccgacttcaaggtttacacgaagaatgtcgtcgaaaacgccaaggcgcttgcggaaacgctgcgctcggccggcttcgatctggtttcgggcggcaccgacaaccatctgatgctggtcgacctgcggccgaaggggctgaagggcaacgtctcggagaaggcgctggtccgcgccggcatcacctgcaacaagaacggtatcccgttcgacccggagaaaccgttcgtgacttcgggcctgcgcctcggcaccccggcggcgacgacccgcggtttcggcgttgccgagttccagcaggttggtcacttgatcgccgaagtgctgaacgcgattgcacaatcgtccgacggcgcggcgccgctggtggaagcctcggtgaagcagcgggtgaaggagttgaccgaccgcttcccgatttatcagtaa

SEQ ID NO: 80084 - protein, 432 aa, Rhodopseudomonas palustris
MSTANPASAPDSFFSASLEQADPEIAAAIRGELGRQRHEVELIASENIVSRAVLEAQGSVMTNKYAEGYPGNRYYGGCEFVDVAENLAIDRAKKLFGANFANVQPNSGSQMNQAVFLALLQPGDTFMGLDLAAGGHLTHGAPVNMSGKWFKPVHYTVRREDQMIDMDAVAKLAEEAKPKLIIAGGSAYPRAWDFKRFREIADSVGAYFMVDMAHFAGLVAGGVHASPVPHAHVTTTTTHKSLRGPRGGLILTNDEALAKKFNSAIFPGLQGGPLMHVIAAKAVAFKEALQPDFKVYTKNVVENAKALAETLRSAGFDLVSGGTDNHLMLVDLRPKGLKGNVSEKALVRAGITCNKNGIPFDPEKPFVTSGLRLGTPAATTRGFGVAEFQQVGHLIAEVLNAIAQSSDGAAPLVEASVKQRVKELTDRFPIYQ

SEQ ID NO: 80085 - DNA, 1308 bp, Vibrio cholerae; identical to SEQ ID NO: 79695
  CDS (58)..(1308): transl_table=11

SEQ ID NO: 80086 - protein, 416 aa, Vibrio cholerae
MLKRDMNIADYDPELYAAIQEETLRQEEHIELIASENYTSPRVMQAQGSQLTNKYAEGYPGKRYYGGCEYVDKAEALAIDRACQLFGCEYANVQPHSGSQANSAVYMALLNPGDTVLGMSLAHGGHLTHGSPVNFSGKHYNVIPYGIDEAGQINYDEMEALALEHKPKMIIGGFSAYSQIVDWKRMREIADKVGAYLFVDMAHVAGLIAAGVYPSPVPFAHVVTTTTHKTLAGPRGGLILSNAGEEMYKKLNSAVFPGGQGGPLMHVIAAKAVAFKEAMEPEFKEYQARVVKNAKAMVAQFQERGYKIVSNSTENHLFLVDLIDKNITGKEADAALGAANITVNKNSVPNDPRSPFVTSGIRVGTPAITRRGFTEQDAKDLANWMCDVLDNINDQGVIEATKQKVLAICQRLPVYA

SEQ ID NO: 80087 - DNA, 1251 bp, Vibrio parahaemolyticus
  CDS (1)..(1251): transl_table=11
atgcttaagcgtgatatgaacatcgcagattacgatgcggaactgttcgcagctatccaggaagaaacccttcgccaggaagaacacattgaacttatcgcttctgaaaactacacaagcccacgtgtaatggaagcgcaaggttctcagctaacgaacaaatacgctgaaggctacccaggcaagcgttactacggcggttgtgagtacgtagataaagcagaacagcttgctatcgatcgtgcatgcaaactattcggttgtgagtacgcgaacgtacaacctcactcaggttctcaagcaaacagcgcagtttacatggcgcttcttaacccaggagatacagtactaggtatgagcctagcgcacggtggtcacctgactcacggttctccagtaaacttctctggtaagcattacaacgttatcccttacggtatcgatgaagcgggtcaaatcaattacgacgagatggaacagctagcgcttgagcacaagcctaagatgatcatcggtggtttttctgcttactcgcaaatcgttgattggaagcgcatgcgtgaaatcgcggacaaagtagatgcttaccttttcgttgatatggcacacgtagctggtcttatcgcagcaggcgaatacccaacacctgttccacacgctcacgtagtaacaacaacgacgcacaaaacactagcaggccctcgcggtggtcttatcttgtctaatgctggcgaagatatgtacaagaagctgaactcagctgtgttccctggtggtcaaggtggccctctaatgcacgttatcgctggtaaagcagtagcgttcaaagaagcgatggagccagagttcaaagcttaccaagctcgcgtagtgaaaaacgcaaaagcaatggttggtcagttccaagagcgtggctacaaaatcgtatctaacggcacagaaaaccacttgttccttgtggatctaatcgacaaagacatcactggtaaagatgcagacgcggcactaggtgcagcaaacatcacagtaaacaagaactcagtaccaaatgacccacgcagcccattcgtaacgtctggtattcgtgtaggtacaccagcgatcactcgtcgtggctttactgaagaagacgcaaaagatctagcaaactggatgtgtgacgttctagataacatcggcaacgaagaagttatcgaagcgactaaacagaaagtattagaaatctgtaagcgtctaccggtttacgcctaa

SEQ ID NO: 80088 - protein, 416 aa, Vibrio parahaemolyticus
MLKRDMNIADYDAELFAAIQEETLRQEEHIELIASENYTSPRVMEAQGSQLTNKYAEGYPGKRYYGGCEYVDKAEQLAIDRACKLFGCEYANVQPHSGSQANSAVYMALLNPGDTVLGMSLAHGGHLTHGSPVNFSGKHYNVIPYGIDEAGQINYDEMEQLALEHKPKMIIGGFSAYSQIVDWKRMREIADKVDAYLFVDMAHVAGLIAAGEYPTPVPHAHVVTTTTHKTLAGPRGGLILSNAGEDMYKKLNSAVFPGGQGGPLMHVIAGKAVAFKEAMEPEFKAYQARVVKNAKAMVGQFQERGYKIVSNGTENHLFLVDLIDKDITGKDADAALGAANITVNKNSVPNDPRSPFVTSGIRVGTPAITRRGFTEEDAKDLANWMCDVLDNIGNEEVIEATKQKVLEICKRLPVYA

SEQ ID NO: 80089 - DNA, 1251 bp, Vibrio vulnificus
  CDS (1)..(1251): transl_table=11
atgcttaagcgtgatatgaatatcgctgattacgatgcggagctattcgcagctatccaggaagaaactcttcgccaggaagaacacatcgagctgatcgcttcagaaaactacacaagcccacgtgtaatggaagctcaaggctctcagctaaccaataagtacgctgaaggctacccaggcaagcgttactacggtggctgtgaatatgttgataaagcggaagcactcgcaattgatcgcgcatgccagttgttcggttgtgaatatgcaaacgtacagcctcactcaggttctcaagcaaacagtgcagtgtatatggcgctgcttaacccaggcgacactgtattaggtatgagccttgcgcacggtggccacttgacgcacggctcaccagttaacttctctggtaagcactacaacgttatcccttacggtatcgatgaagcgggtcaaattaactacgacgagatggaaacgctagcgcttgagcacaaacctaagatgatcatcggtggtttctcagcgtactctcaaatcgttgattggaagcgtatgcgtgaaatcgcggacaaagttgacgcttacctattcgtcgatatggcgcacgttgcgggtcttatcgcagcaggtgaatatccaacaccagttcctcacgcacacgtagtgacgacgacaacgcacaaaacgctagcaggtccacgtggtggtcttatcctgtctaacgctggcgaagacatgtacaagaaactgaactcagccgttttccctggtggtcagggtggccctctgatgcacgttatcgctggtaaagcagtagcgttcaaagaagcgatggaacctgagtttaaagcttaccaagcgcgcgtagtgaaaaatgcaaaagcgatggtggctcagttccaagagcgcggttacaaaatcgtatctaacggtacagaaaaccacctgttccttgttgaccttatcgacaaagacatcacgggtaaagatgcggatgcggcactaggcgcagcaaacatcacggtaaacaagaactcagtaccaaacgaccctcgtagcccatttgtcacttcgggtattcgtgttggtacgcctgcgattactcgccgtggctttacggaagcggacgcgaaagagctagcaaactggatgtgtgacgtattagataacatcggcaatgaagcggttatcgaagcaacgaaacagaaagtactagaaatctgtaagcgtctacctgtttacgcataa

SEQ ID NO: 80090 - protein, 416 aa, Vibrio vulnificus
MLKRDMNIADYDAELFAAIQEETLRQEEHIELIASENYTSPRVMEAQGSQLTNKYAEGYPGKRYYGGCEYVDKAEALAIDRACQLFGCEYANVQPHSGSQANSAVYMALLNPGDTVLGMSLAHGGHLTHGSPVNFSGKHYNVIPYGIDEAGQINYDEMETLALEHKPKMIIGGFSAYSQIVDWKRMREIADKVDAYLFVDMAHVAGLIAAGEYPTPVPHAHVVTTTTHKTLAGPRGGLILSNAGEDMYKKLNSAVFPGGQGGPLMHVIAGKAVAFKEAMEPEFKAYQARVVKNAKAMVAQFQERGYKIVSNGTENHLFLVDLIDKDITGKDADAALGAANITVNKNSVPNDPRSPFVTSGIRVGTPAITRRGFTEADAKELANWMCDVLDNIGNEAVIEATKQKVLEICKRLPVYA

SEQ ID NO: 80091 - DNA, 1269 bp, Agrobacterium tumefaciens
  CDS (1)..(1269): transl_table=11
atgctcaaccgcctgtcacacaataccgtttccgacacggtgatcgctgatgccatcgccgaggaactcgaccgccagaagacgcagatcgagctgatcgcctcggaaaacattgtgtccgccgatgttctggcggcacagggctcggtgctgaccaacaaatatgccgagggttatcccggcaagcgttattacggcggttgcgaattcgtcgacaaggtcgaacaggtcgccatcgaccggttgaagcaactcttcggcgcggaatttgccaatgtgcagccgcattccggcgcgcaggccaaccaagccgtgttcctggcgctgctgcagccgggcgaccgcatcatggggctttcgctcgcccatggcggccacctgacccacggttcgccggtgacgatgtccggcaagtggttcgatgtcgtctcctacgaggttgaccccgaaacccacctgatcgacatggagaaggtgcgcgagaaagcgttggaaacgaagccgaagctgatcgtcgccggggcctcggcctatccgcgccagatcgattttgccggcttccgtgagatcgccgatgaagtgggcgcatatctaatggtcgacatggcccattatgccgggctgatcgccggcggtcactatcccaacgccgtgccccatgcgcacgtcaccacctcgaccacccacaagaccctgcgcggcccgcgcggcggcgtaatcctgaccaatgatgccgatctcgccaagaagctgaactcggcggtcttccccggcaatcagggcggcccgctgatgcatgtcatcgccgccaaggccgtggctttcggcgaggccctgcggccagaattttccgactatgccggtcaggtgatcgccaatgcacaggcgctggccaaggtgctgatacagggtggtctcggcatcgtctcgggcggaaccgacagtcatatggtgctggtcgatttgcgcccgaagggcgtcaccggcaagattgccgaaatcgcgctcgaacgggcgggacttacctgcaacaagaactccattcccaatgacccggaaaagccgttcgtcacttcgggcatccgtcttggcagctcggccggcaccacccgcggtttcggcgtgctcgagttcgaaaagatcggtgcgctgatcctgcgtgtcatcgatgcgctggccacgaatgccgagggtgacagcgcggtcgaggccgaggtgcgggaagaggttgccgcactctgtgaggcgttcccgatctacgtctcgtaa

SEQ ID NO: 80092 - protein, 422 aa, Agrobacterium tumefaciens
MLNRLSHNTVSDTVIADAIAEELDRQKTQIELIASENIVSADVLAAQGSVLTNKYAEGYPGKRYYGGCEFVDKVEQVAIDRLKQLFGAEFANVQPHSGAQANQAVFLALLQPGDRIMGLSLAHGGHLTHGSPVTMSGKWFDVVSYEVDPETHLIDMEKVREKALETKPKLIVAGASAYPRQIDFAGFREIADEVGAYLMVDMAHYAGLIAGGHYPNAVPHAHVTTSTTHKTLRGPRGGVILTNDADLAKKLNSAVFPGNQGGPLMHVIAAKAVAFGEALRPEFSDYAGQVIANAQALAKVLIQGGLGIVSGGTDSHMVLVDLRPKGVTGKIAEIALERAGLTCNKNSIPNDPEKPFVTSGIRLGSSAGTTRGFGVLEFEKIGALILRVIDALATNAEGDSAVEAEVREEVAALCEAFPIYVS

SEQ ID NO: 80093 - DNA, 1248 bp, Bordetella bronchiseptica
  CDS (1)..(1248): transl_table=11
atgttcaaccgcaacctgaccctcgaccaggtggatcccgacgtctgggccgccatccagaaagaagacgtacgccaggaacagcacatcgagctgatcgcgtccgagaactacgccagcccggccgtgatgcaggcccagggcacgcaactgaccaacaagtatgcggaaggctacccgggcaagcgctactacggcggctgcgagtacgtcgacgtggtcgagcagctggccatcgaccgcctgaagcagattttcggcgccgaggccgccaacgtgcagccgaactccggctcgcaggccaaccagggcgtgtacatggcggtgctcaagccgggcgataccgtgctgggcatgagcctggccgaaggcggccacctgacgcacggcgcgtcggtcaacgcctcgggcaagctgtacaacttcgtgccctacggcctggacgccgacgaggtgctggattacgcccaggtcgagcggctgaccaaggaacacaagcccaagctgatcgtggccggcgcctccgcgtacgcgctgcacatcgacttcgagcgcatggcgcgcatcgcccacgacaacggcgcgctgttcatggtggacatcgcccactatgccggcctggtggccggcggcgcctatcccaacccggtgccgcacgccgatttcgtcacctccaccacgcacaagtcgctgcgcggcccgcgcggcggcgtcatcatgatgaaggccgagttcgagaaggccgtcaattcggccatcttcccgggcatccagggcggcccgctgatgcacgtcatcgcggccaaggccgtggccttcaaggaagcgctgtcgcccgagttccaggattacgcccagcaggtcgtcaagaacgccaaggtgctggccgatacgctggtcaagcgcggcctgcgcatcgtgtcgggcaggaccgaaagccacgtcatgctggtggacctgcgtcccaagggcatcaccggcaaggaagcggaagcggtgctgggccaggcccacatcacggtcaacaagaacgccatccccaacgacccggaaaagcccttcgtgaccagcggcatccgcctgggcaccccggccatgaccacccgcggcttcaaggaggccgaggccgagctgaccgccaacctgatcgccgacgtgctggacaatccccgcgacgaggcgaacatcgccgcggtgcgcgcgcgggtcaatgaactgaccgcccgcctgcccgtctacggcaactga

SEQ ID NO: 80094 - protein, 415 aa, Bordetella bronchiseptica
MFNRNLTLDQVDPDVWAAIQKEDVRQEQHIELIASENYASPAVMQAQGTQLTNKYAEGYPGKRYYGGCEYVDVVEQLAIDRLKQIFGAEAANVQPNSGSQANQGVYMAVLKPGDTVLGMSLAEGGHLTHGASVNASGKLYNFVPYGLDADEVLDYAQVERLTKEHKPKLIVAGASAYALHIDFERMARIAHDNGALFMVDIAHYAGLVAGGAYPNPVPHADFVTSTTHKSLRGPRGGVIMMKAEFEKAVNSAIFPGIQGGPLMHVIAAKAVAFKEALSPEFQDYAQQVVKNAKVLADTLVKRGLRIVSGRTESHVMLVDLRPKGITGKEAEAVLGQAHITVNKNAIPNDPEKPFVTSGIRLGTPAMTTRGFKEAEAELTANLIADVLDNPRDEANIAAVRARVNELTARLPVYGN

SEQ ID NO: 80095 - DNA, 1248 bp, Bordetella parapertussis
  CDS (1)..(1248): transl_table=11
atgttcaaccgcaacctgaccctcgaccaggtggatcccgacgtctgggccgccatccagaaagaagacgtacgccaggaacagcacatcgagctgatcgcgtccgagaactacgccagcccggccgtgatgcaggcccagggcacgcaactgaccaacaagtatgcggaaggctacccgggcaagcgctactacggcggctgcgagtacgtcgacgtggtcgagcagctggccatcgaccgcctgaagcagattttcggcgccgaggccgccaacgtgcagccgaactccggctcgcaggccaaccagggcgtgtacatggcggtgctcaagccgggcgataccgtgctgggcatgagcctggccgaaggcggccacctgacgcacggcgcgtcggtcaacgcctcgggcaagctgtacaacttcgtgccctacggcctggacgccgacgaggtgctggattacgcccaggtcgagcggctgaccaaggaacacaagcccaagctgatcgtggccggcgcctccgcgtacgcgctgcacatcgacttcgagcgcatggcgcgcatcgcccacgacaacggcgcgctgttcatggtggacatcgcccactatgccggcctggtggccggcggcgcctatcccaacccggtgccgcacgccgatttcgtcacctccaccacgcacaagtcgctgcgcggcccgcgcggcggcgtcatcatgatgaaggccgaggtcgagaaggccgtcaattcggccatcttcccgggcatccagggcggcccgctgatgcacgtcatcgcggccaaggccgtggccttcaaggaagcgctgtcgcccgagttccaggattacgcccagcaggtcgtcaagaacgccaaggtgctggccgatacgctggtcaagcgcggcctgcgcatcgtgtcgggcaggaccgaaagccacgtcatgctggtggacctgcgtcccaagggcatcaccggcaaggaagcggaagcagtgctgggccaggcccacatcacggtcaacaagaacgccatccccaacgacccggaaaagcccttcgtgaccagcggcatccgcctgggcaccccggccatgaccacccgcggcttcaaggaggccgaggccgagctgaccgccaacctgatcgccgacgtgctggacaatccccgcgacgaggcgaacatcgccgcggtgcgcgcgcgggtcaatgaactgaccgcccgcctgcccgtctacggcaactga

SEQ ID NO: 80096 - protein, 415 aa, Bordetella parapertussis
MFNRNLTLDQVDPDVWAAIQKEDVRQEQHIELIASENYASPAVMQAQGTQLTNKYAEGYPGKRYYGGCEYVDVVEQLAIDRLKQIFGAEAANVQPNSGSQANQGVYMAVLKPGDTVLGMSLAEGGHLTHGASVNASGKLYNFVPYGLDADEVLDYAQVERLTKEHKPKLIVAGASAYALHIDFERMARIAHDNGALFMVDIAHYAGLVAGGAYPNPVPHADFVTSTTHKSLRGPRGGVIMMKAEVEKAVNSAIFPGIQGGPLMHVIAAKAVAFKEALSPEFQDYAQQVVKNAKVLADTLVKRGLRIVSGRTESHVMLVDLRPKGITGKEAEAVLGQAHITVNKNAIPNDPEKPFVTSGIRLGTPAMTTRGFKEAEAELTANLIADVLDNPRDEANIAAVRARVNELTARLPVYGN

SEQ ID NO: 80097 - DNA, 1275 bp, Burkholderia mallei
  CDS (1)..(1275): transl_table=11
atgtcgaacgccaatcccttcttctcgcaatcgctcgccgagcgcgacgcgtccgtgcgcggcgcgatcctcaaggaactcgaacgccagcagtcgcaagtcgagctgatcgcgtcggagaacatcgtgtcgcgcgcggtgctcgacgcgcagggctcggtgctgaccaacaagtatgcggaaggctatccgggcaagcgctattacggcggttgcgaattcgccgacgaagtcgaggcgctcgcgatcgagcgcgtgaagcggctcttcaacgccggccatgcgaacgtgcagccgcactcgggcgcccaggcgaacggcgcggtgatgctcgcgctcgcgaagccgggcgacacggtgctcggaatgtcgctcgacgcgggcggacacctcacgcacggcgcgaagccggcgctgtccggcaagtggttcaacgcgctccagtacggcgtgagccgcgacacgatgctgctcgattacgaccaggtcgaggcgctcgcgcagcagcacaagccgagcctcatcatcgccggcttctccgcctatccgcgcaagctcgacttcgcgcggtttcgcgcgatcgccgattcggtcggcgcgaagctgatggtcgacatggcgcatatcgccggcgtgatcgccgcgggccgccatgcgaacccggtcgaacacgcgcacgtcgtcacgtcgacgacgcacaagacgctgcgcggcccgcgcggcggcttcgtgctgaccaacgacgaggagatcgcgaagaagatcaactcggccgtgttccccggcctgcagggcggcccgctgatgcacgtgatcgccggcaaggcggtggcgttcggcgaggcgctgacagacgatttcaagacctacatcgatcacgtgctcgcgaacgcgcaggcgctcggcgacgtgctgaaggcgggcggcgtcgatctcgtgacgggcggcaccgacaaccatctgctgctcgtcgatctgcgcccgaagggcctgaagggcgcgcaggtcgagcaggcgctcgagcgcgcgggcatcacgtgcaacaagaacggcattccgttcgatccggagaagccgacgatcacgtcgggcatccgcctcggcacgccggcgggcacgacgcgcggcttcggcgcagcggagttccgcgaggtcggccggctgattctcgaggtgttcgaggccctgcgcacgaacccggaaggcgatcacgcgaccgaacagcgcgtgcggcgcgagatcttcgcgctttgcgaacgcttcccgatctactga

SEQ ID NO: 80098 - protein, 424 aa, Burkholderia mallei
MSNANPFFSQSLAERDASVRGAILKELERQQSQVELIASENIVSRAVLDAQGSVLTNKYAEGYPGKRYYGGCEFADEVEALAIERVKRLFNAGHANVQPHSGAQANGAVMLALAKPGDTVLGMSLDAGGHLTHGAKPALSGKWFNALQYGVSRDTMLLDYDQVEALAQQHKPSLIIAGFSAYPRKLDFARFRAIADSVGAKLMVDMAHIAGVIAAGRHANPVEHAHVVTSTTHKTLRGPRGGFVLTNDEEIAKKINSAVFPGLQGGPLMHVIAGKAVAFGEALTDDFKTYIDHVLANAQALGDVLKAGGVDLVTGGTDNHLLLVDLRPKGLKGAQVEQALERAGITCNKNGIPFDPEKPTITSGIRLGTPAGTTRGFGAAEFREVGRLILEVFEALRTNPEGDHATEQRVRREIFALCERFPIY

SEQ ID NO: 80099 - DNA, 1272 bp, Erwinia carotovora subsp
  CDS (1)..(1272): transl_table=11
atgtatgacacctctttgactcttaccgagttcgaccccgaattagccgatgctatcctgcatgaagaagaccgtcaggaaacccacgttgaactcatcgcttcagagaactatgccagtccgctggtgatggcgatccagaattctgtgttcaccaacaaatatgcagaaggttacctcggcaagcgctattacagcggctgcgagtatgttgacgtagccgaacgccttgctatcgagcgagccaaagtgctgtttgactgcgattacgctaacgtccagccccatgctggtgctcaggcgaatgcggccgtgtttctggcattgactaacccaggcgacaccgtgatgggcatgaatctggctcagggcgggcatttgacccacggtaacccttccaacttctctggtcgccactacaagatcgtgccttatgggcttgattctgaaacagggcttatcgattacgacgaaatggaacgtattgccttggaaactcggccaaagatgctaataggagggttctctgcctattcacgccataaggactgggcgcgtatgcgcactattgctgacaaagtgggagctatcttctgggtggatatggctcatgttgccggtttagtggcggcgggtgaatacccgaacccgctccctcaggcgcatgttgtaaccagtacaacgcataagaccctgcgcggcccgcgcggtggcattattttggccaagggacagagtgaggatttttacaaaaagctcaatgccgccgtgttccccggtattcagggtggcccgctgatgcacgttattgcggccaaagcggtggccttcaaggaagcgctacgccctgagttcacggtttatcagcgtcaggtggtggccaatgctcgagcaatggcgcgcattatccagcagcgtggttacaagatcgtctccgacggcactgacaaccatttgctgctgatcgacctgtccgctaagccgtataccggtaaggatgccgacgccgcgctgagtgatgcttatatcacgacaaataagaattcggtgcctaacgacccgcgttcaccttttgttacctcaggactgcgtattggtacgccagccgtgacgacacgtggtttcggtgtgacagagtgcgagcaactggcggggtggctatgtgatgtgctggatgggctgggtgccgggaatgaagaattaacggtgatacgcgatcgtgttcgcgagcaggtagtagcactgtgccaccgttatcctgtgtatcaataa

SEQ ID NO: 80100 - protein, 423 aa, Erwinia carotovora subsp
MYDTSLTLTEFDPELADAILHEEDRQETHVELIASENYASPLVMAIQNSVFTNKYAEGYLGKRYYSGCEYVDVAERLAIERAKVLFDCDYANVQPHAGAQANAAVFLALTNPGDTVMGMNLAQGGHLTHGNPSNFSGRHYKIVPYGLDSETGLIDYDEMERIALETRPKMLIGGFSAYSRHKDWARMRTIADKVGAIFWVDMAHVAGLVAAGEYPNPLPQAHVVTSTTHKTLRGPRGGIILAKGQSEDFYKKLNAAVFPGIQGGPLMHVIAAKAVAFKEALRPEFTVYQRQVVANARAMARIIQQRGYKIVSDGTDNHLLLIDLSAKPYTGKDADAALSDAYITTNKNSVPNDPRSPFVTSGLRIGTPAVTTRGFGVTECEQLAGWLCDVLDGLGAGNEELTVIRDRVREQVVALCHRYPVYQ

SEQ ID NO: 80101 - DNA, 1278 bp, Mycobacterium bovis
  CDS (1)..(1278): transl_table=11
atgaacaccctcaacgactccctgaccgccttcgacccggacatcgccgccctgatcgacggcgagctgcgccgtcaagaatccggcttggagatgatcgcttcggagaactatgcaccgctggccgtgatgcaggcccaaggttcggtcttgaccaacaagtacgccgaaggctacccgggccggcgctactacggtggctgtgaattcgtcgacggtgtcgagcagttggctatcgaccgcgtcaaagcgctctttggcgccgaatacgccaacgtgcaaccacattcgggggccaccgccaacgccgccaccatgcatgcgctgctaaaccccggcgacaccatcctggggttgtcgctggctcatggcggtcacctgacccacgggatgcggatcaacttttccggcaagctctaccacgccaccgcctacgaggtgtccaaagaggactacctggtcgacatggatgccgtcgccgaggcagcgcgcacacaccggcccaaaatgatcatcgccggctggtcggcgtacccacgccagctggatttcgcccgcttccgcgccatcgccgacgaagtcgacgccgtgctcatggtggatatggcgcatttcgccggcctggtcgccgctggcgtgcaccccagcccggtgccgcacgcccacgtcgtcacctccaccactcacaagacgctcggcgggccccgcggcggcatcatcttgtgcaatgacccggccatcgccaagaagatcaattccgcggtcttccctgggcagcagggcgggccgctcgggcatgtcatcgcagccaaggccaccgcattcaagatggcagcacaacctgaattcgcgcagcgccaacaacgttgcctcgacggcgcgcgcatccttgccggccggttgacccagcccgacgtcgccgaacgtggcatcgcggtgctaaccggcggcaccgatgtgcacctcgtcctagtcgacctgcgcgacgccgaactcgacggccagcaagccgaagaccggttggccgccgtggacatcaccgtcaaccgcaacgcggtacccttcgaccctcgtcccccgatgatcacctcgggcctgcgaatcggcaccccggcgctggccgcacgcggcttctcccacaacgacttccgcgccgtggcagacctcatcgcggcggcactgacggccaccaacgacgaccagctgggtccgctgcgcgcccaggtccagcggctggccgcacgctatccgctctacccggaactgcaccggacatga

SEQ ID NO: 80102 - protein, 425 aa, Mycobacterium bovis
MNTLNDSLTAFDPDIAALIDGELRRQESGLEMIASENYAPLAVMQAQGSVLTNKYAEGYPGRRYYGGCEFVDGVEQLAIDRVKALFGAEYANVQPHSGATANAATMHALLNPGDTILGLSLAHGGHLTHGMRINFSGKLYHATAYEVSKEDYLVDMDAVAEAARTHRPKMIIAGWSAYPRQLDFARFRAIADEVDAVLMVDMAHFAGLVAAGVHPSPVPHAHVVTSTTHKTLGGPRGGIILCNDPAIAKKINSAVFPGQQGGPLGHVIAAKATAFKMAAQPEFAQRQQRCLDGARILAGRLTQPDVAERGIAVLTGGTDVHLVLVDLRDAELDGQQAEDRLAAVDITVNRNAVPFDPRPPMITSGLRIGTPALAARGFSHNDFRAVADLIAAALTATNDDQLGPLRAQVQRLAARYPLYPELHRT

SEQ ID NO: 80103 - DNA, 1278 bp, Mycobacterium tuberculosis
  CDS (1)..(1278): transl_table=11
atgaacaccctcaacgactccctgaccgccttcgacccggacatcgccgccctgatcgacggcgagctgcgccgtcaagaatccggcttggagatgatcgcttcggagaactatgcaccgctggccgtgatgcaggcccaaggttcggtcttgaccaacaagtacgccgaaggctacccgggccggcgctactacggtggctgtgaattcgtcgacggtgtcgagcagttggctatcgaccgcgtcaaagcgctctttggcgccgaatacgccaacgtgcaaccacattcgggggccaccgccaacgccgccaccatgcatgcgctgctaaaccccggcgacaccatcctggggttgtcgctggctcatggcggtcacctgacccacgggatgcggatcaacttttccggcaagctctaccacgccaccgcctacgaggtgtccaaagaggactacctggtcgacatggatgccgtcgccgaggcagcgcgcacacaccggcccaaaatgatcatcgccggctggtcggcgtacccacgccagctggatttcgcccgcttccgcgccatcgccgacgaagtcgacgccgtgctcatggtggatatggcgcatttcgccggcctggtcgccgctggcgtgcaccccagcccggtgccgcacgcccacgtcgtcacctccaccactcacaagacgctcggcgggccccgcggcggcatcatcttgtgcaatgacccggccatcgccaagaagatcaattccgcggtcttccctgggcagcagggcgggccgctcgagcatgtcatcgcagccaaggccaccgcattcaagatggcagcacaacctgaattcgcgcagcgccaacaacgttgcctcgacggcgcgcgcatccttgccggccggttgacccagcccgacgtcgccgaacgtggcatcgcggtgctaaccggcggcaccgatgtgcacctcgtcctagtcgacctgcgcgacgccgaactcgacggccagcaagccgaagaccggttggccgccgtggacatcaccgtcaaccgcaacgcggtacccttcgaccctcgtcccccgatgatcacctcgggcctgcgaatcggcaccccggcgctggccgcacgcggcttctcccacaacgacttccgcgccgtggcagacctcatcgcggcggcactgacggccaccaacgacgaccagctgggtccgctgcgcgcccaggtccagcggctggccgcacgctatccgctctacccggaactgcaccggacatga

SEQ ID NO: 80104 - protein, 425 aa, Mycobacterium tuberculosis
MNTLNDSLTAFDPDIAALIDGELRRQESGLEMIASENYAPLAVMQAQGSVLTNKYAEGYPGRRYYGGCEFVDGVEQLAIDRVKALFGAEYANVQPHSGATANAATMHALLNPGDTILGLSLAHGGHLTHGMRINFSGKLYHATAYEVSKEDYLVDMDAVAEAARTHRPKMIIAGWSAYPRQLDFARFRAIADEVDAVLMVDMAHFAGLVAAGVHPSPVPHAHVVTSTTHKTLGGPRGGIILCNDPAIAKKINSAVFPGQQGGPLEHVIAAKATAFKMAAQPEFAQRQQRCLDGARILAGRLTQPDVAERGIAVLTGGTDVHLVLVDLRDAELDGQQAEDRLAAVDITVNRNAVPFDPRPPMITSGLRIGTPALAARGFSHNDFRAVADLIAAALTATNDDQLGPLRAQVQRLAARYPLYPELHRT

SEQ ID NO: 80105 - DNA, 1254 bp, Pseudomonas fluorescens
  CDS (1)..(1254): transl_table=11
atgttcagccgtgatttgactattgccaagtacgacgccgatctttttgccgccatggagcaagaagcccagcgccaggaagaacacatcgagctgatcgcttcggagaactacaccagcccagcggtgatggaagctcaaggctcggtactgaccaacaagtacgccgaaggctacccgggcaagcgctactacggtggttgcgagtacgtcgacgttgtcgagcaactggccatcgaccgcgccaaggaactgttcggcgccgactacgccaacgttcagccgcacgctggctcccaagccaacgccgctgtctacctggccctgctgtcggccggtgacaccatcctgggcatgagcctggctcacggcggtcacctgacccacggcgccagcgtttcctcctccggcaagctgtacaacgccatccagtacggcatcgatgccaacggcctgatcgactacgacgaagtcgagcgcctggcggtcgagcacaagccgaaaatgatcgtggccggtttctctgcctactcgcagatcctcgacttcccgcgcttccgtgccatcgccgacaaggttggcgcctacctgttcgtcgacatggctcacgtggccggtctggtcgccgctggcgtctacccgaacccggttccgttcgctgacgtcgtgaccaccaccacccacaagaccctgcgcggtccacgtggtggcctgatcctggccaaggccaacgccgacatcgagaagaagctgaactccgccgtattcccgggcgcccaaggtggcccgctggagcacgtgatcgccgccaaagcgatctgcttcaaggaagcactgcagcctgagttcaaggcttaccagcaacaagtggtgaaaaacgcccaggccatggccggcgtgttcatcgagcgcggtttcgacgtggtttccggcggtactgaaaaccacctgttcctgctgtcgctgatcaagcaggaaatctccggtaaagacgccgacgccgctctgggcaaagcgttcatcactgtgaacaagaactccgtgccaaacgacccacgctccccgttcgtcacctccggcctgcgcttcggtactccggcagtgaccactcgcggcttcaaagaggcggagtgcaaagagctggcgggctggatctgcgacatcctggctgacctgaacaacgaagcggtgatcgacgccgttcgtgagaaagtcaaagccatctgcaagaaactgccggtatacggcgcttga

SEQ ID NO: 80106 - protein, 417 aa, Pseudomonas fluorescens
MFSRDLTIAKYDADLFAAMEQEAQRQEEHIELIASENYTSPAVMEAQGSVLTNKYAEGYPGKRYYGGCEYVDVVEQLAIDRAKELFGADYANVQPHAGSQANAAVYLALLSAGDTILGMSLAHGGHLTHGASVSSSGKLYNAIQYGIDANGLIDYDEVERLAVEHKPKMIVAGFSAYSQILDFPRFRAIADKVGAYLFVDMAHVAGLVAAGVYPNPVPFADVVTTTTHKTLRGPRGGLILAKANADIEKKLNSAVFPGAQGGPLEHVIAAKAICFKEALQPEFKAYQQQVVKNAQAMAGVFIERGFDVVSGGTENHLFLLSLIKQEISGKDADAALGKAFITVNKNSVPNDPRSPFVTSGLRFGTPAVTTRGFKEAECKELAGWICDILADLNNEAVIDAVREKVKAICKKLPVYGA

SEQ ID NO: 80107 - DNA, 1254 bp, Pseudomonas putida
  CDS (1)..(1254): transl_table=11
atgttcagccgtgatttgaccattgccaagtacgacgccgagctcttcgaagccatgcagcaagaagctctgcgccaggaagagcatatcgagctgatcgcttcggaaaactacaccagcccggcagtcatggaagcccagggctcggtcctgaccaacaagtacgccgaaggctacccaggcaagcgctactacggcggttgcgagtacgtcgacgtcgtcgagcaactggccatcgaccgtgccaaggagctgttcggcgccgactacgccaacgtacagccgcacgctggctcccaggccaacgctgccgtctacctggccctgctgtcggccggtgacaccatcctgggcatgagcctggcacacggtggccacctgacccacggtgcttcggtaagctcctcgggcaagctgtacaacgccatccagtacggcatcgacggcaatggcctgatcgactacgacgaagtcgagcgcctggctgtcgagcacaagcccaagatgatcgttgccggcttctcggcctactcgcaggttctggacttcgcccgcttccgcgccatcgccgacaaggtcggtgcctacctgttcgtcgacatggcccacgttgccggcctggttgccgctggcgtgtacccgaaccctgttccgttcgccgacgtggtcaccaccaccacccacaagaccctgcgcggcccgcgcggcggcctgatcctggcccgtgccaacgccgacatcgagaagaagctgaactccgccgtcttcccgggcgcccagggcggcccgctggagcacgtcatcgcggccaaggccatctgcttcaaggaagccctgcagccagagttcaaggcttaccagcagcaggtcgtgaagaacgcccaggccatggccagcgtgttcatcgagcgcggtttcgacgtggtttccggtggcacccagaaccacctgttcctgctgtcgctgatcaagcaggaaatctccggtaaggatgctgacgccgccctgggcaaagccttcatcaccgtcaacaagaactcggtaccgaacgacccgcgttcgccgttcgttacctcgggcctgcgtttcggcaccccagccgtgaccacccgtggtttcaaggaagccgagtgcaaggaactggccggctggatctgcgacatcctggccgacctgaacaacgaagcggtgatcgacgccgtccgtgagaaggtcaaggccatctgcaagaagctgccggtttacggcaactga

SEQ ID NO: 80108 - protein, 417 aa, Pseudomonas putida
MFSRDLTIAKYDAELFEAMQQEALRQEEHIELIASENYTSPAVMEAQGSVLTNKYAEGYPGKRYYGGCEYVDVVEQLAIDRAKELFGADYANVQPHAGSQANAAVYLALLSAGDTILGMSLAHGGHLTHGASVSSSGKLYNAIQYGIDGNGLIDYDEVERLAVEHKPKMIVAGFSAYSQVLDFARFRAIADKVGAYLFVDMAHVAGLVAAGVYPNPVPFADVVTTTTHKTLRGPRGGLILARANADIEKKLNSAVFPGAQGGPLEHVIAAKAICFKEALQPEFKAYQQQVVKNAQAMASVFIERGFDVVSGGTQNHLFLLSLIKQEISGKDADAALGKAFITVNKNSVPNDPRSPFVTSGLRFGTPAVTTRGFKEAECKELAGWICDILADLNNEAVIDAVREKVKAICKKLPVYGN

SEQ ID NO: 80109 - DNA, 1254 bp, Pseudomonas syringae pv
  CDS (1)..(1254): transl_table=11
atgttcagccgtgatttgactatcgccaagtacgacgccgatctgtttgccgccatggagcaagaagctctgcgtcaggaagaacatatcgagctgatcgcctcggaaaactacaccagtccggccgtcatggaagctcaaggctcggtactgaccaacaagtacgctgaaggctacccaggcaagcgttattacggtggctgcgagtacgtcgacgttgtcgagcaactggctatcgaccgtgccaaagagctgttcggcgccgactacgccaacgtccagccacacgccggttcgcaagccaactcggcggtctacctggctctgctgcaaggcggcgacaccattctgggcatgagcctggctcacggcggtcacttgacccacggtgccagcgtgtcctcctcgggcaagctgtacaacgctgttcagtacggcatcgacggcaacggcatgatcgactacgacgaagtcgagcgcctggctgttgaacacaagccaaaaatgatcgttgccgggttctctgcctactcgcagatcctcgacttcccgcgcttccgtgccattgccgacaaggtcggtgcctacctgttcgtcgacatggcgcacgtagccggtctggttgccgcaggtgtctacccgaacccggtgccgttcgccgacgtcgtcaccaccaccacgcacaagaccttgcgcggtccacgtggcggtctgatcctggctcgcgccaacgccgacatcgagaagaagctcaactccgccgtattccctggctcccagggcggtccgctggagcacgtcatcgcagccaaggccatctgcttcaaggaagcgttgcagcctgagttcaagacctaccagcaacaagtggtcaagaacgccaaggcaatggccggcgtgttcatcgagcgcggtttcgacgtggtgtccggcggtactgaaaaccacctgttcctgctctcgctgatcaagcaggacatctccggtaaagacgccgacgccgcattgggtcgcgccttcatcaccgtcaacaagaactcggtacccaacgacccacgctccccgttcgtcacctccggcctgcgcttcggcaccccggcagtgaccactcgcggcttcaaggaaacagagtgcaaagaactggccggctggatctgcgacatcctggcggacctgaacaacgaagccgtgatcgacgctgtccgtgagaaggtcaaggccatctgcgcgaagctgccggtttacggcgcttga

SEQ ID NO: 80110 - protein, 417 aa, Pseudomonas syringae pv
MFSRDLTIAKYDADLFAAMEQEALRQEEHIELIASENYTSPAVMEAQGSVLTNKYAEGYPGKRYYGGCEYVDVVEQLAIDRAKELFGADYANVQPHAGSQANSAVYLALLQGGDTILGMSLAHGGHLTHGASVSSSGKLYNAVQYGIDGNGMIDYDEVERLAVEHKPKMIVAGFSAYSQILDFPRFRAIADKVGAYLFVDMAHVAGLVAAGVYPNPVPFADVVTTTTHKTLRGPRGGLILARANADIEKKLNSAVFPGSQGGPLEHVIAAKAICFKEALQPEFKTYQQQVVKNAKAMAGVFIERGFDVVSGGTENHLFLLSLIKQDISGKDADAALGRAFITVNKNSVPNDPRSPFVTSGLRFGTPAVTTRGFKETECKELAGWICDILADLNNEAVIDAVREKVKAICAKLPVYGA

SEQ ID NO: 80111 - DNA, 1275 bp, Ralstonia eutropha
  CDS (1)..(1275): transl_table=11
atgtcgaacacccagtctttcttctcgcagcccctggccgagcgcgatgcgctggttcgcggcgccctttcgaaggaactcgagcgtcagcagtcgcaagtcgagctgatcgcctcggaaaacatcgtgtcgcgcgcggtgctcgaagcccaaggttcggtactgaccaacaagtacgccgaaggttacccgggcaagcgctactacggcggctgtaaatttgcggacgaagtcgaatcgctcgcgatcgagcgcgtgaagcagctcttcaacgccggctttgccaacgtgcagccccactcgggcgcccaggcgaacggctcggtgatgctcgcgctgacgaagccgggcgacaccgtgctcggcatgtcgctggacgcgggaggccacctgacccatggcgccaagccggcgttgtcgggcaagtggttcaacgccgtgcagtatggcgtgaaccgcgagtcgatgctgatcgactatgaccaggtcgaagcgcttgcgaaggaacacaagccgagcctgatcatcgccggcttctccgcgtatccacgccagctcgatttcgcccgcttccgcgcgatcgccgacagcgtcggtgcgaagctgatggtcgacatggcgcacatcgccggtgtgattgctgcgggccgtcattcgaacccggtcgattatgctcacgtcgtcacttcgacgacgcacaagaccctccgaggcccgcgcggcggattcgtgctgaccaaccatgaagaaatcgccaagaagatcaactcggccgtgttccccgggctgcagggtggcccgttgatgcacgtgattgcagccaaggcggtggcgttcggcgaggcgatgacgtcggacttcaggacctatatcgacaacgtgctcgcgaacgccaaggccctcggcgaagtgttgaaggaaggcggcgtcgacctggtcaccggcggcaccgacaaccatctgctgctggtcgatcttcgcccgaaagggctcaagggcacgcaggtcgagcaggcgctcgaacgtgccggcatcacctgcaacaagaacggcattccattcgacaccgagaagccgaccatcacgtccggcatccggctcggcgcgccggccgccacgacgcgcggcttcggtgttgcggagttccgcgagatcggccgcctgatcctcgaggtgttcgaagcgctgcgcgcgaatccggagggcgacgctgtcaccgagcagcgcgtgcgccagcaaatcttcgcgctgtgcgatcgcttcccgatctactga

SEQ ID NO: 80112 - protein, 424 aa, Ralstonia eutropha
MSNTQSFFSQPLAERDALVRGALSKELERQQSQVELIASENIVSRAVLEAQGSVLTNKYAEGYPGKRYYGGCKFADEVESLAIERVKQLFNAGFANVQPHSGAQANGSVMLALTKPGDTVLGMSLDAGGHLTHGAKPALSGKWFNAVQYGVNRESMLIDYDQVEALAKEHKPSLIIAGFSAYPRQLDFARFRAIADSVGAKLMVDMAHIAGVIAAGRHSNPVDYAHVVTSTTHKTLRGPRGGFVLTNHEEIAKKINSAVFPGLQGGPLMHVIAAKAVAFGEAMTSDFRTYIDNVLANAKALGEVLKEGGVDLVTGGTDNHLLLVDLRPKGLKGTQVEQALERAGITCNKNGIPFDTEKPTITSGIRLGAPAATTRGFGVAEFREIGRLILEVFEALRANPEGDAVTEQRVRQQIFALCDRFPIY

SEQ ID NO: 80113 - DNA, 1275 bp, Ralstonia solanacearum
  CDS (1)..(1275): transl_table=11
atgtcgaacactcagtcattcttctcgcagtcgctggccgagcgcgacgcgcccatccgcagctcgcttctgaaagaacttgagcggcagcaatcgcaagtggagttgatcgcgtcggagaacatcgtgtcgcgcgccgtgctcgaagcacagggctcggtgttgaccaacaagtatgcggaaggctatccgggcaagcgctactacggcggctgcgaatatgcagacgaggtggaatcgctcgcgatcgaccgtgtgaagcagctctttaacgccggctttgccaacgtgcagccgcactcgggggcacaggcaaacggcgcggtcatgctggcactcaccaaaccgggcgacacggtgctgggcatgtcgctggatgcaggcggccacttgacgcacggggcaaagcctgccctgtcaggtaaatggttcaacgccatgcagtacggcgtgaatcgcgacacgatgctgatcgactacgaacaggttgaaaagctcgcgcaagagcacaaaccgagtttgatcatcgccgggttctccgcctacccgcgcaagctggatttcgcccgcttccgtgccattgccgacagcgtgggcgcaaagctgatggtcgacatggcgcacattgccggcgtgattgccgctggccgccatgacaaccccgtcgatcacgcgcacgtcgtcacgtcgaccacgcacaagacactgcgtggcccgcgcggcggtttcgtgctgaccaacgatgaagagatcgccaagaagatcaactccgccgtgtttccgggcctgcagggcggcccgctgatgcacgtgattgcgggcaaggccgttgcgtttggcgaggcgctcaagcccgagttcaagacctatatcgacagcgtgctggcgaacgcgaaggccctgggcgaagtgctgaaggcgggcggcgttgacctggtcacgggcggcaccgacaaccatctgttgcttgttgacctgcggccgaaggggctcaaggggacgcaggtggagcaggcgctggagcgtgccggtatcacctgcaacaagaacggcattccgtttgacaccgagaaaccgactatcacgtcgggcatccgccttggtacgccggcggccacgacgcgcggtttcggggtggccgagttcgagcagatcggccggctgatcctcgaggttttcgaggcgctgcgtgccaatccggatggcgacagggccaccgagcaccgcgtgcgcagcgaaatcttcgcgctgtgcgaccgcttcccgatctactga

SEQ ID NO: 80114 - protein, 424 aa, Ralstonia solanacearum
MSNTQSFFSQSLAERDAPIRSSLLKELERQQSQVELIASENIVSRAVLEAQGSVLTNKYAEGYPGKRYYGGCEYADEVESLAIDRVKQLFNAGFANVQPHSGAQANGAVMLALTKPGDTVLGMSLDAGGHLTHGAKPALSGKWFNAMQYGVNRDTMLIDYEQVEKLAQEHKPSLIIAGFSAYPRKLDFARFRAIADSVGAKLMVDMAHIAGVIAAGRHDNPVDHAHVVTSTTHKTLRGPRGGFVLTNDEEIAKKINSAVFPGLQGGPLMHVIAGKAVAFGEALKPEFKTYIDSVLANAKALGEVLKAGGVDLVTGGTDNHLLLVDLRPKGLKGTQVEQALERAGITCNKNGIPFDTEKPTITSGIRLGTPAATTRGFGVAEFEQIGRLILEVFEALRANPDGDRATEHRVRSEIFALCDRFPIY

SEQ ID NO: 80115 - DNA, 1314 bp, Rhizobium loti
  CDS (1)..(1314): transl_table=11
atggcagagcccggcacatacggacggtcttccttggtccaggtcgattgccgcgttcatgaactgcttctacgacagaggcggcaagagcggacgatgctcaaacttatcgcatctgagaactttgcctcctcagccgtactggaagcgaccggctctatcttcgcgaacaagtatgccgagggctacccgggtgcgcgctactacgcgggaaatgagatcgtcgatgagcttgagaccctcgcgatcgagcgcctgaaagcgctatttggcagtgagcacgccaacgtccagccttattcgggctcaccagccaaccaggctgtctatcgcgcgcttttgagcccccgtgacaaagtcatggggctgccgttgcccgaagggggccatctgactcatgggtggtccgtcaacttttccggcactgattatcaacgcgtcccctatgggctgcacgataagacgcagcaaattgactatgaccgcttgcgcgagaccgccaggcgggaacggccgaaactcatttgggtcggcggaacttcctacccgcgtgtctttgactacgcggcaatggcagaaatcgctctggaggcgaactcttatctcgtggccgacatcgcccacatcagcggcctgattgtcgctggagcgcatccgaatcccgtggtccattgcgacgtcgtcaccagcacatctcacaagtcgatccgcggcccccgtggaggctttattttgtcgaagaatgaagatcgttatcaggcgctctatcattccacgagcaaacacaatctcgccaaacggattgatcgcgcggtgtttcctcaactgcaaggtgggccgcacatgaataccatcgccgcgctcgctgttgctttgcaggaagccgcgaccccctctttccgcacctacggtcaccagatcgtcaagaatgccaaggcgctggccgaggcgcttctgggtcgtggttattatctggtcaccggcgggactgacaatcacatgctgatccttgatcttcgggaccggccgctatcaggcaaagcctatgccgagcgcctggcaagggcaggcatcattacgaactttgatatggtgccgggcgacccgcgcgacccgacggtcacaagcggaatccgcttggggtcgccggcagtgacgtccatgggcatgcgtgaggcggaaatggtgcagatcgccgctttcatcgactccgtctgccgccagcccgacgaccaggaagttcatgcgagcgtacgaagagacgttgccgacttctgcactgcgttcgacgtccccggcatcagcgaccggtaa

SEQ ID NO: 80116 - protein, 437 aa, Rhizobium loti
MAEPGTYGRSSLVQVDCRVHELLLRQRRQERTMLKLIASENFASSAVLEATGSIFANKYAEGYPGARYYAGNEIVDELETLAIERLKALFGSEHANVQPYSGSPANQAVYRALLSPRDKVMGLPLPEGGHLTHGWSVNFSGTDYQRVPYGLHDKTQQIDYDRLRETARRERPKLIWVGGTSYPRVFDYAAMAEIALEANSYLVADIAHISGLIVAGAHPNPVVHCDVVTSTSHKSIRGPRGGFILSKNEDRYQALYHSTSKHNLAKRIDRAVFPQLQGGPHMNTIAALAVALQEAATPSFRTYGHQIVKNAKALAEALLGRGYYLVTGGTDNHMLILDLRDRPLSGKAYAERLARAGIITNFDMVPGDPRDPTVTSGIRLGSPAVTSMGMREAEMVQIAAFIDSVCRQPDDQEVHASVRRDVADFCTAFDVPGISDR

SEQ ID NO: 80117 - DNA, 1269 bp, Rhizobium meliloti
  CDS (1)..(1269): transl_table=11
atgcctggtttattcgaaagacagctcaagcatgattcggtcattgccggagcgatcgcgcgcgagatggggcggcaacgatccgagatcgaactgatcgcgtcggagaacatagtgtcgccagctgttcttgccgcgcaaggctccgtcatgaccaacaaatatgccgagggctatccggggcaccgctattatggtggatgccaatatgtcgatctcgtcgaggccgctgcgatagaacgcgctggaatgctgtttgacgcatcgttcgtcaacgtgcagccgcactccggtgcgcaggccaacggcgccgtcatgctcgccctgttgaagccgggcgacaccttcatgggcctgtcgcttgccgccggtggccatcttacccatggggctcggcccaccatgtcagggaagtggttcaacgccgtccaatatggcgttcgcgagagcgattgcctcattgactacgacgagctcgaagtaaaggccatagcgacgcggccgaagctgatcattaccggcgggtcggcctatccgcgtctgatcgacttcaagcgaattcgggcgatcgcagattctgtcggggcggccatgatggtcgatatggcgcattttgccggtctagtcgctggaggggtgcatcctaacccggttgaaatcgccgacatcgtcaccacgacaacgcacaagacgctgcgcggccctcgcggcggtatgatcctgaccaataatcaggacgtagcgaaaaaggtgaactctgcggtgtttccgggattgcagggcggtccgctgatgcatgtcatagcggcaaaggcggtggcgttgggcgaggcgcttgaagacaacttcaggcaatacgctcgccagatggtggccaatgcccgggcccttgcctcagcgctgaccgaacgaggctacgatatcgtttcgggggggaccgatacgcatttgatcctggttgacctgcgcagcaaaggggtttccggcaaggatgcggaagaagctttggggcgtgccgggctgacctgcaacaagaacggcattcccttcgatccagcgccccccgctgtaacttccggcatccggctcggcacgccagcggccaccagccgcggtttccgcgaagcggagttcaacgaagtcggcgcgttgatcgccaacgtcctcgacgcccttggcaccgagcaaagtggcgaacaggagcgccgcgcgagaatgtcggtccacgatctttgcgcggccttcccgatctactcggcgcggcattga

SEQ ID NO: 80118 - protein, 422 aa, Rhizobium meliloti
MPGLFERQLKHDSVIAGAIAREMGRQRSEIELIASENIVSPAVLAAQGSVMTNKYAEGYPGHRYYGGCQYVDLVEAAAIERAGMLFDASFVNVQPHSGAQANGAVMLALLKPGDTFMGLSLAAGGHLTHGARPTMSGKWFNAVQYGVRESDCLIDYDELEVKAIATRPKLIITGGSAYPRLIDFKRIRAIADSVGAAMMVDMAHFAGLVAGGVHPNPVEIADIVTTTTHKTLRGPRGGMILTNNQDVAKKVNSAVFPGLQGGPLMHVIAAKAVALGEALEDNFRQYARQMVANARALASALTERGYDIVSGGTDTHLILVDLRSKGVSGKDAEEALGRAGLTCNKNGIPFDPAPPAVTSGIRLGTPAATSRGFREAEFNEVGALIANVLDALGTEQSGEQERRARMSVHDLCAAFPIYSARH

SEQ ID NO: 80119 - DNA, 1305 bp, Rhodopseudomonas palustris
  CDS (1)..(1305): transl_table=11
atgggtccatccgttgcgccgcacgccgtccacacgatcgcaaacccgggcgttagcgccgccggcctagtcgcggctgatcacgctgtcgcggccgcgatcgccgatgaagaaacccgccagcgcgactcgatcgagctgatcgcctcggagaacttcgtcagccgggcggtcctcgacgcgcagggatcggtgctgaccaacaaatatgccgaaggctatccgcaccgtcgctactacggcggttgcgcgaatgtcgacgcgatcgaggatctggtgatcgcccgtgtcaatcagctgttcggcagcgcctacgccaacgtccagccgcattcgggaagccaggccaatcaggcggtgtttctcgcactgctcgcgcccggcgatacgatcctcggcctggatttgaaggccggcggccatctgacccatggggcgccggtcaacatgtccggccgctggttcaaggccgtcagctacggcgtcgaccccgagacccatcgcatcgacatggatcaggtggcggtgcaggcgcgccagcatcgcccaaggctgctgattgcaggcgggtcggcctatccgcggatcatcgatttcggccgcttccgccagatcgccgacgaggttggagcgatcctgatggtcgacatggcccacttcgccgggctcgtggccggaggcgtttatccgtcgcctgttccgtttgccgatgtcgttacctcgacgacgcacaagacgcttcgtgggccgcgcggcgggttcgttctgaccaacgatgcgaacatcgccaagaagatcaattcagcgacgttccccgggcttcagggcggcccgctgatgcatgtgatcgcggcgaaggccgtcgcttttggcgaggcgctgcaaccggagttcggagcctatgcgcaggccgtcgtcgagaattgccgcgtgctggcgcaagcgcttgcggatggcgggctgacgatcacctcgggcggcaccgattgccatctcgccgttgtcgatctgcggccattcggcgtgaccggtaatatcgccgagcaggccttggagtccgtggggatcacgctcaacaagaacgcgatcccgaacgatccggagaagccaatggtgacgtcgggcatccgtgtgggaacggctgccggcacgtcccgcggcttcggcgcggatcagtatcgcgagattgccgggcttgtcctcgaaacgctgcacgccgtccgcgccggaacgttggatgcagcggggcaagagatcaacaagagcgttcggcggctggccgcgagctttccgctcccttactga

SEQ ID NO: 80120 - protein, 434 aa, Rhodopseudomonas palustris
MGPSVAPHAVHTIANPGVSAAGLVAADHAVAAAIADEETRQRDSIELIASENFVSRAVLDAQGSVLTNKYAEGYPHRRYYGGCANVDAIEDLVIARVNQLFGSAYANVQPHSGSQANQAVFLALLAPGDTILGLDLKAGGHLTHGAPVNMSGRWFKAVSYGVDPETHRIDMDQVAVQARQHRPRLLIAGGSAYPRIIDFGRFRQIADEVGAILMVDMAHFAGLVAGGVYPSPVPFADVVTSTTHKTLRGPRGGFVLTNDANIAKKINSATFPGLQGGPLMHVIAAKAVAFGEALQPEFGAYAQAVVENCRVLAQALADGGLTITSGGTDCHLAVVDLRPFGVTGNIAEQALESVGITLNKNAIPNDPEKPMVTSGIRVGTAAGTSRGFGADQYREIAGLVLETLHAVRAGTLDAAGQEINKSVRRLAASFPLPY

SEQ ID NO: 80121 - DNA, 1293 bp, Rhodospirillum rubrum
  CDS (1)..(1293): transl_table=11
atgaccgcctacaccccttggaccggattcttttccgcctccgtcgcccaagccgatcccgagcttgaccgggtgctgcgggccgagttgtcccgccagcaggaccagatcgagctgatcgcctcggaaaacatcgtgtcccgcgccgtcctcgaggccgcgggcagcgttttgaccaataaatacgccgaaggctatcccggcaagcgctactacggcggctgcgaagaggtcgacgtggccgaggagttggccatcgagcgggccaaggcgttgttcggctgctcctacgttaacgtccagccccattccggcgcccaggccaatggcgcggtgatgatggccctggtcaagcccggcgacaccatcatgggcatgagcctggccgccggcggtcacctgacccatggcgcgccgccggcccaatcgggcaagtggttcaacgccgtgcagtacggcgtccgcctgcaagacgccagcatcgatttcgacgaggtggcgaccctggccgaaacccacaagcccaagctgatcatcgccggcggctcggcctatccccgcatcatcgatttcgccaagttccgcgagatcgccgatcgggtcggcgcgctgttcatggtcgatatggcccatttcgccggtctggtggccgccgggctccaccccagcccgctgccctatgccgatatcgtcaccaccaccacccataaaaccctgcgcggcccgcgcggcggcatggtgttgtcgaacaatcccgacatcggcaagaagatcaattcggcggtcttccccgggctgcagggcggccccttgatgcatatcatcgccgccaaggccgtggccttcggcgaggcgctgcgccccgagttcaaggtctatgcccaggcggtgatcgataacgccaaggcgctgaccgacgccctcgccgccggcgggctgaacatcgtgtcgggcggcaccgatacccacctcgccctggtcgatctgcggcccaaggctttgaccggcaatatcgtcgagaagagcctggagcgggccaatatcaccaccaacaagaacggcattcccttcgacccggaaaagccggccatcacctcgggcatccgcgtcggcaccccggcgggcaccacccggggctttggcaccgccgagttcaccgagatcggcaagctgatcgtcgaagtgctcgacgggctggcggccaatggcgaggacaattcccaggccgaggccgccgtgcgcgaaaaggtcgccgtcctttgccgtcgctttcccatatatggtgggttataa

SEQ ID NO: 80122 - protein, 430 aa, Rhodospirillum rubrum
MTAYTPWTGFFSASVAQADPELDRVLRAELSRQQDQIELIASENIVSRAVLEAAGSVLTNKYAEGYPGKRYYGGCEEVDVAEELAIERAKALFGCSYVNVQPHSGAQANGAVMMALVKPGDTIMGMSLAAGGHLTHGAPPAQSGKWFNAVQYGVRLQDASIDFDEVATLAETHKPKLIIAGGSAYPRIIDFAKFREIADRVGALFMVDMAHFAGLVAAGLHPSPLPYADIVTTTTHKTLRGPRGGMVLSNNPDIGKKINSAVFPGLQGGPLMHIIAAKAVAFGEALRPEFKVYAQAVIDNAKALTDALAAGGLNIVSGGTDTHLALVDLRPKALTGNIVEKSLERANITTNKNGIPFDPEKPAITSGIRVGTPAGTTRGFGTAEFTEIGKLIVEVLDGLAANGEDNSQAEAAVREKVAVLCRRFPIYGGL

SEQ ID NO: 80123 - DNA, 1260 bp, Salmonella typhi
  CDS (1)..(1260): transl_table=11
atgaattttcgggggaaccgcatgataaacaacgatccgctttttgatttacttaataaagagcaacagcgccagcagcactcgctggaactgattgcctcggagaatttcgccagccctgccgttcttgcggcacaagggtcggtgttaaccaataaatacgccgaaggctattaccagcaccgctactacggcggctgtaagttcattgatgaggttgagatgctggcgataacccgcgcgcagcaacttttcggcgcgcgttatgttaacgtgcagcctcactccggcagccaggcgaatcaggcggtatatctggcgctgctgaaacccggcgacaaaattctgggcatgagcctgcaatgcggcggccatctcactcacggctcgccggtcaatcaatccggcaaatggtttaacgcctttcactatggcgtcgatgcgcatagcggtcttattgatatggatgaggttgagacgatcgcgaagcgtgagcgcccgcggctgattatcgccgggggatcggcctacccacgacactatgattttgcccgctttcgccgcattgccgatgccgtcggcgcgatgctgctggtggatatggcgcattttgccgggctggtggcgggcggctgtttcccctcgccgctggcgtatgccgatgtgattaccgccaccacgcataaaacgttgcgcgggccgcgtggcggcatgattctgaccaacgacgcccggctggcgaaaaaaatcgacagcgccatctttcccggcttgcagggcgggccgttgatgcacgttatcgcggctaaagcggtggcgcttggcgaagcgctacagcctgaatttaaacgttacgccgggcaggtaatcgaaaatgcgcaagcgatgtgccagcaactggcgcagcgcggcctgacgctgttaacgggcggtaccgactgccatctgggcattatcgacctgcgcccgcaggggttaaccggcgctcaggtggaatactttctcgaactggcggggatcacggtcaataaaaacacgttgctaggcgatccacagccgccgtcgattacctccgggattcgcattggcagcgcagcctgcgccacccgcgggatgaaggccgatgattttacgctgatcgcggactggatcagtgaaattatttttgccatcaagacgccgaatattgcagatatttgcgccgatattcggcaaaaagtgactaaattaaccaccaactatccgttgccttaccaatga

SEQ ID NO: 80124 - protein, 419 aa, Salmonella typhi
MNFRGNRMINNDPLFDLLNKEQQRQQHSLELIASENFASPAVLAAQGSVLTNKYAEGYYQHRYYGGCKFIDEVEMLAITRAQQLFGARYVNVQPHSGSQANQAVYLALLKPGDKILGMSLQCGGHLTHGSPVNQSGKWFNAFHYGVDAHSGLIDMDEVETIAKRERPRLIIAGGSAYPRHYDFARFRRIADAVGAMLLVDMAHFAGLVAGGCFPSPLAYADVITATTHKTLRGPRGGMILTNDARLAKKIDSAIFPGLQGGPLMHVIAAKAVALGEALQPEFKRYAGQVIENAQAMCQQLAQRGLTLLTGGTDCHLGIIDLRPQGLTGAQVEYFLELAGITVNKNTLLGDPQPPSITSGIRIGSAACATRGMKADDFTLIADWISEIIFAIKTPNIADICADIRQKVTKLTTNYPLPYQ

SEQ ID NO: 80125 - DNA, 1296 bp, Vibrio parahaemolyticus
  CDS (1)..(1296): transl_table=11
atgaataagagttaccctaaccacagcttggaaaactttttctctaccaacctctctgcgacagatgacgctgtctttgccggaattcaggcggaattcactcgccaaaacgaacaaatagaacttatcgcctctgagaacattgtgtctaaagcggtaatgcaagctcaaggcacatgcctaacaaacaaatacgctgaaggttatccaggtcgccgttactatggtggttgtgagcacgtagatacagtggaagccattgctatcgaacgcgcaaaaaaactttttaattgcgaatacgcaaacgttcaacctcactcaggcgctcaagcaaacggcgcagtgaaactggcactacttcaacctggcgacaccattcttggcatgtctttggacgcaggtggccacctaacacacggtgcacgccctgctctatctggcaagtggtttaatgcagttcaatacggcgttgatcgtgaaacactagaaatcaactacgatgatgtgcgcgctctggcgctagaacacaaaccaaagatgatcatcgcaggcggtagcgcgattccacgtactatcgatttcgcaaagttccgtgaaatcgccgacgaagtgaacgcaatcctaatggtcgatatggcgcacatcgcaggccttatcgcaacaggcgcacaccctagcccattgccacacgcacacgttgtgaccacgacaacgcacaaaacactgcgtggtccacgcggaggcatgattctgactaaccacgaagacatcattaagaagatcaattcggcggtattcccaggcctacaaggcggtccattaatgcacgttatcgccgctaaagcggtcgcatttggtgaagcacttggccctgaatttaaaacttatattgattcggtgatcaataacgcaaaagtcctagcggaagtattgcaaactcgcggttgcgacatcgtaaccggtggtacagatacgcacttaatgcttgttgaccttcgtcctaaaggcttgaaaggcaacaaagcagaagaagctctagagcgtgctgggatcacatgtaacaaaaatggcatcccattcgatacagagaagcctatgattacatcgggcatccgtttaggaacgcctgcgggtacaagccgcggctttggcgctgaagaattcaaactcatcggtaattggattggtgacgtactggacggtttggtgaacaacccagaaggtgacgcaatcgttgagaaacgcgttcgcaaagaagtaaaagagctttgcagtcgcttccctctttaccagtaa

SEQ ID NO: 80126 - protein, 431 aa, Vibrio parahaemolyticus
MNKSYPNHSLENFFSTNLSATDDAVFAGIQAEFTRQNEQIELIASENIVSKAVMQAQGTCLTNKYAEGYPGRRYYGGCEHVDTVEAIAIERAKKLFNCEYANVQPHSGAQANGAVKLALLQPGDTILGMSLDAGGHLTHGARPALSGKWFNAVQYGVDRETLEINYDDVRALALEHKPKMIIAGGSAIPRTIDFAKFREIADEVNAILMVDMAHIAGLIATGAHPSPLPHAHVVTTTTHKTLRGPRGGMILTNHEDIIKKINSAVFPGLQGGPLMHVIAAKAVAFGEALGPEFKTYIDSVINNAKVLAEVLQTRGCDIVTGGTDTHLMLVDLRPKGLKGNKAEEALERAGITCNKNGIPFDTEKPMITSGIRLGTPAGTSRGFGAEEFKLIGNWIGDVLDGLVNNPEGDAIVEKRVRKEVKELCSRFPLYQ

SEQ ID NO: 80127 - DNA, 1248 bp, Burkholderia sp
  CDS (1)..(1248): transl_table=11
atgtttgacagagcccaaagcaccattgcgaacgtcgatcccgaaatctttgccgcgatcgagcaggaaaaccgccgccaggaagatcacatcgagctgatcgcgtcggaaaactacacgagcccggccgtgatggctgcgcagggttcgcaactcacgaacaagtacgcggaagggtatccgggcaagcgctactacggcggctgcgaatacgtggacgtcgttgagcagctggcgatcgaccgcgtgaagcagctgttcggcgcggaagcggcgaacgtgcagccgaactcgggttcgcaggcgaaccagggcgtgttcttcgcgatgctcaagccgggcgacacgatcatgggcatgagcctcgcgcacggcggccacctgacgcacggctcgcccgtgaacatgtcgggcaagtggttcaacgtggtgagctacggcctgaacgaaaacgaagacatcgactacgaagcggccgagcagctcgcgcaggaacacaagccgaagctgatcgtcgcgggcgcgtctgcgttctcgctgaagatcgatttcgagcgtctggcgaagatcgcgaagtcggtcggcgcgtacctgatggtcgacatggcccactacgcaggcctgatcgcagcgggcgtgtacccgaacccggtgccgcacgcggacttcgtgacgacgacgacgcacaagagcctgcgcggcccgcgcggcggcgtgatcctgatgaaggccgagtacgagaagccgatcaactcggcgatcttcccggggatccagggcggcccgctgatgcacgtgatcgcgggcaaggccgtggcgttcaaggaagcgctgtcgccggaattcaaggcgtaccaggagaaggtggtcgagaacgcccgcgtgctggctgaaacgctggtgaagcgtggcctgcggatcgtgtcgggccgtacggaaagccacgtgatgctggtggacctgcgtgcgaagcacatcacgggcaaggcggcggaagcagcgctgggcgcggcgcacatcacggtgaacaagaacgcgatcccgaacgatccggaaaagccgttcgtgacgagcggtgtgcgcctgggttcgccggcaatgacgacgcgcggcttcggtccggcggaagcggaacaggtgggtaacctgatcgcggacgtgctggacaacccggaagatgcagcgacgatcgagcgcgtgcgcgcgcaggtcgccgagctgaccaagcgtttcccggtctatcgctga

SEQ ID NO: 80128 - protein, 415 aa, Burkholderia sp
MFDRAQSTIANVDPEIFAAIEQENRRQEDHIELIASENYTSPAVMAAQGSQLTNKYAEGYPGKRYYGGCEYVDVVEQLAIDRVKQLFGAEAANVQPNSGSQANQGVFFAMLKPGDTIMGMSLAHGGHLTHGSPVNMSGKWFNVVSYGLNENEDIDYEAAEQLAQEHKPKLIVAGASAFSLKIDFERLAKIAKSVGAYLMVDMAHYAGLIAAGVYPNPVPHADFVTTTTHKSLRGPRGGVILMKAEYEKPINSAIFPGIQGGPLMHVIAGKAVAFKEALSPEFKAYQEKVVENARVLAETLVKRGLRIVSGRTESHVMLVDLRAKHITGKAAEAALGAAHITVNKNAIPNDPEKPFVTSGVRLGSPAMTTRGFGPAEAEQVGNLIADVLDNPEDAATIERVRAQVAELTKRFPVYR

SEQ ID NO: 80129 - DNA, 1254 bp, Pseudomonas aeruginosa
  CDS (1)..(1254): transl_table=11
atgttcagccgtgatttgaccctcgcccgctacgatgccgaactctttgccgcgatggagcaggaagcccagcgccaggaagagcacatcgagctgatcgcctccgagaactacaccagcccggcggtgatggaagcccagggttcggtgctgaccaacaagtacgccgaaggttatccgcacaagcgctactacggcggctgcgagtacgtcgatatcgtcgagcaactggccatcgaccgcgccaagcaactgttcggcgccgattacgccaacgtccagccgcacgccggctcccaggccaacgccgcggtctacctggccctgctgtcggccggcgacaccatcctcggcatgagcctggcccatggcggccacctgacccacggcgccagcgtctcctcctccggcaagctgtacaacgccgtgcagtacggcatcgacgccaatggcctgatcgactacgacgaagtcgagcgcctggccgtggagcacaagccgaagatgatcgtcgccggcttctccgcctattcccaggtcctcgatttcgcccgcttccgcgccatcgccgacaaggtcggcgcctacctgttcgtcgacatggcccacgtcgccggcctggtcgccgctggcgtctacccgaacccggtgccgttcgccgacgtggtcaccaccaccacccacaagaccctgcgcggtccgcgcggtggcctgatcctggcgcgcgccaacgaggagatcgagaagaagctcaactccgcggtattccccagcgcccagggcggtccgctggagcacgtgatcgcggccaaggcggtgtgcttcaaggaagccctgcagccggagttcaagacctaccagcagcaggtcctgaagaacgcccagagcatggcccaggtcttcctggaccgcggtttcgacgtggtttccggcggcacccagaaccacctgttcctgctctccctgatcaagcaggacatcaccggcaaagacgccgacgccgccctcggccgcgcgttcatcaccgtgaacaagaactcggtcccgaacgacccgcgctcgccgttcgtcacctccggcctgcgcatcggtaccccggccgtgaccacccgcggcttcaaggaagccgagtgccgcgagctggccggctggatctgcgacatcctcgagaacatgggcgacgagtccgtggtcgacggcgtacgcgagaaggtcaaggcgatctgcgccaagttcccggtctacggcaactaa

SEQ ID NO: 80130 - protein, 417 aa, Pseudomonas aeruginosa
MFSRDLTLARYDAELFAAMEQEAQRQEEHIELIASENYTSPAVMEAQGSVLTNKYAEGYPHKRYYGGCEYVDIVEQLAIDRAKQLFGADYANVQPHAGSQANAAVYLALLSAGDTILGMSLAHGGHLTHGASVSSSGKLYNAVQYGIDANGLIDYDEVERLAVEHKPKMIVAGFSAYSQVLDFARFRAIADKVGAYLFVDMAHVAGLVAAGVYPNPVPFADVVTTTTHKTLRGPRGGLILARANEEIEKKLNSAVFPSAQGGPLEHVIAAKAVCFKEALQPEFKTYQQQVLKNAQSMAQVFLDRGFDVVSGGTQNHLFLLSLIKQDITGKDADAALGRAFITVNKNSVPNDPRSPFVTSGLRIGTPAVTTRGFKEAECRELAGWICDILENMGDESVVDGVREKVKAICAKFPVYGN

SEQ ID NO: 80131 - DNA, 1254 bp, Acinetobacter sp
  CDS (1)..(1254): transl_table=11
atgtttgccaacatttctctttctgaatttgatccagaattggccaaatcaatcgaagctgaagatgcgcgtcaggaagcgcatattgagttgattgcttctgaaaactattgctctcctgcggtgatggaagcgcaaggatcaaaacttaccaataaatatgcagaaggttatcctggcaaacgctattatggcggctgcgaatatgtagacgtgattgaacagcttgcaattgaccgtgctaaagcgctctttggtgctgattatgcaaacgttcagccacatgctggctcacaagcaaactctgccgtataccttgcattacttaatgcgggtgatactgttttgggtatgagtcttgctcacggtggtcacttgactcacggtgcaaaagtaaacttctctggtaaaacatacaatgccgttcagtacggtcttaaccctgaaacaggcgaaatcgattatgacgaagttgagcgcttagcaatagaacacaaaccgcgtatgatcgttgcaggtttctctgcatatagccgtattgtagattggcaacgtttccgcgatatcgcagataaagtaggcgcttacttatttgttgatatggctcatgtggctggtttggttgctgccggtgtttatccaagcccagttcaaattgctgatgtcaccacaaccacgacccataaaacccttcgtggtccacgttctggtttgattcttgcaaaagcaaatgaagaaattgagaaaaaacttcaatctgctgtattccctggtaaccaaggtggtccacttgtacatgcgattgctgcaaaagcagtctgctttaaagaagcaatggcaccagaatataaagcttatcaacaacaagtagtcaaaaatgctcaagccatggctgaagtattaattgctcgtggttatgatattgtttctggtggtacagataaccacttgttcctactttctttgatcaagcaagatgtcactggtaaagaagcagatgcatggttgggtaatgcaaacattactgtcaacaaaaatgcggttccaaatgacccacgctctccatttgtaacttctggtattcgtattggtacgccagcagtaacgactcgtggttttggtgaagctgaagtgcgcgacttggctagctggattgcagacgttttagacagcaaaggtgatgaaaaagtcattgctgatgtcaaagcaaaagttgaagctgtgtgtgcaaaattccctgtatatgaaaactaa

SEQ ID NO: 80132 - protein, 417 aa, Acinetobacter sp
MFANISLSEFDPELAKSIEAEDARQEAHIELIASENYCSPAVMEAQGSKLTNKYAEGYPGKRYYGGCEYVDVIEQLAIDRAKALFGADYANVQPHAGSQANSAVYLALLNAGDTVLGMSLAHGGHLTHGAKVNFSGKTYNAVQYGLNPETGEIDYDEVERLAIEHKPRMIVAGFSAYSRIVDWQRFRDIADKVGAYLFVDMAHVAGLVAAGVYPSPVQIADVTTTTTHKTLRGPRSGLILAKANEEIEKKLQSAVFPGNQGGPLVHAIAAKAVCFKEAMAPEYKAYQQQVVKNAQAMAEVLIARGYDIVSGGTDNHLFLLSLIKQDVTGKEADAWLGNANITVNKNAVPNDPRSPFVTSGIRIGTPAVTTRGFGEAEVRDLASWIADVLDSKGDEKVIADVKAKVEAVCAKFPVYEN

SEQ ID NO: 80133 - DNA, 1254 bp, Acinetobacter radioresistens
  CDS (1)..(1254): transl_table=11
atgtttgccaatatttctattgccgaatttgatccagaattagctcaagcgatcaccaatgaagatgcgcgccaagaagctcatattgagttaattgcttctgaaaactactgctcacctgcagtaatggaagctcaaggttcaaaacttaccaataaatatgcagaaggctacccaggcaaacgctactacggcggttgcgaatacgtagatattattgaacaactggcgattgaccgtgctaaagaactctttggtgcagattatgctaacgttcaaccacacgccggttcacaagcaaactctgcagtttacttagctttacttaacccaggcgacactgtgttaggtatgagcttggcacatggtggtcacttgactcatggtgcaaaagtaagcttctcaggtaaaacatataacgctatccaatatggtttaaacccagaaactggcgaaattgattacgaggaagttgagcgtttagcgcttgaacacaaaccacgcatgattgttgcgggtttctctgcgtatagccaaattgtagattggcagcgtttccgcgacatcgcagacaaaattggtgcttatttatttgtagatatggcacacgtagcaggtctagtggctgcaggtgtttatccaaaccctgtgcaaattgctgacgtaacgactacgacaactcacaaaacattgcgtggcccacgttctggtctaatccttgcgaaagcaaacgaagagatcgagaaaaaattacaatctgctgtgttccctggtaaccaaggtggtccattagtacacgcagttgcagcaaaagcaatttgctttaaagaagcaatggcgcctgaatacaaagcgtatcaacaacaagttgttaaaaatgcgcaagcgatggctgaagttcttattgaacgtggttatgatgtagtatctggtggtacgaaaaaccacttgttcttgctttctttaatcaagcaagatattacaggtaaagatgcagatgcatggttaggtgctgcgcacattactgtaaacaaaaactctgtaccaaacgatccacgttcaccatttgtaacttcaggtatccgtattggtactccagcagtcactacacgtggttttggtgaagcagaagtacgtgatcttgcgagttggattgcagacattcttgacagcaaaggtgacgaagcagtaattaatactgtaaaagcaaaagtcgaagctgtttgcgcgaaattccctgtttacgcaaaataa

SEQ ID NO: 80134 - protein, 417 aa, Acinetobacter radioresistens
MFANISIAEFDPELAQAITNEDARQEAHIELIASENYCSPAVMEAQGSKLTNKYAEGYPGKRYYGGCEYVDIIEQLAIDRAKELFGADYANVQPHAGSQANSAVYLALLNPGDTVLGMSLAHGGHLTHGAKVSFSGKTYNAIQYGLNPETGEIDYEEVERLALEHKPRMIVAGFSAYSQIVDWQRFRDIADKIGAYLFVDMAHVAGLVAAGVYPNPVQIADVTTTTTHKTLRGPRSGLILAKANEEIEKKLQSAVFPGNQGGPLVHAVAAKAICFKEAMAPEYKAYQQQVVKNAQAMAEVLIERGYDVVSGGTKNHLFLLSLIKQDITGKDADAWLGAAHITVNKNSVPNDPRSPFVTSGIRIGTPAVTTRGFGEAEVRDLASWIADILDSKGDEAVINTVKAKVEAVCAKFPVYAK

SEQ ID NO: 80135 - DNA, 1535 bp, Actinobacillus actinomycetemcomitans
  CDS (190)..(1452): transl_table=11
tttaacgcaaaaaacagcacaaaaaagctcaccacagcttgcgttcgccaatcaaccgacaaatactgccgagtgaaaaattttcataattagaatgaaaaaaaacacatccggcgttattaagatttttattgcgaaaattgagtacaatagaccgcagttccaattcactaccaagaggagaacaccatgtttaaaaaaagtatgaacatcgccgattacgatcccgtgttatggcaagctattgaaaatgaaaaccgccgccaggaagaacatatcgaattaatcgcttctgaaaactatgccagcccgcgcgtaatgcaagcgcaaggttcccaattcaccaacaaatatgcggaaggctacccgggcaagcgttattatggcggttgtgaatacgcggacattgtggaacagctcgctattgagcgtgcgaaagaattattcggcgccgattatgtgaacgtgcaaccgcactccggttcgcaagccaatgcggcagtttacatggggttactcaatccgggcgataccattttaggcatgagcttagcgcacggcggtcacttaacccacggcgcgtccgtgagtttctccggcaagatttatcacgcggaacaatacggcattaccgacgaagggttaatcgactatgatgcgttacgcaaacaagcccatgacgtgaaaccgaaaatgatcgtaggcggattctccgcgtattctcaagtagtggattggaaaaaaatgcgtgaaatcgccgatgaagtgggcgcatatttattcgtggatatggcgcacgttgcgggcctggttgctgcaggtatttacccgaatccattgccgtacgcccatgtggtgaccactactacccacaaaaccttaggcggtccgcgtggcggtttgattctttcttcttgcggtgatgaagaaatctataaaaaactcaacagcgccgttttccctgcaggtcagggcggtccgttggtgcacattatcgcggcgaaagcggtgtgcttcaaagaagccttggagccggaatacaaagtgtatcaacaaaatgtgttgaaaaacgccaaagccatggtggaagtgttcaaacaacgctgttataaagtcgtttccaacggcactgaaaaccacttgttcttagtggacttagtcagccatggattgaccggtaaagccgccgatgccgcattaggcaaggccaacattaccgtcaataaaaactctgtgccgaacgatccgcaaaaaccgttcatcacttccggtatccgtgtgggcacgccttccgtcacccgtcgcggtttcaacgaagcggacgtgaaagaacttgccggctggatgtgtgacgtattagacgccatcggcaaagataacgaagcggaagtgattgccgacaccaaagacaaagtcttggcaatttgtaaacgtcttccggtttacgcgtaattttaatcaaatgaaaaaaaacaaagcggtaatgaaaattgccgctttttctttttgagaaatatgacagtcaaaatcttaca

SEQ ID NO: 80136 - protein, 420 aa, Actinobacillus actinomycetemcomitans
MFKKSMNIADYDPVLWQAIENENRRQEEHIELIASENYASPRVMQAQGSQFTNKYAEGYPGKRYYGGCEYADIVEQLAIERAKELFGADYVNVQPHSGSQANAAVYMGLLNPGDTILGMSLAHGGHLTHGASVSFSGKIYHAEQYGITDEGLIDYDALRKQAHDVKPKMIVGGFSAYSQVVDWKKMREIADEVGAYLFVDMAHVAGLVAAGIYPNPLPYAHVVTTTTHKTLGGPRGGLILSSCGDEEIYKKLNSAVFPAGQGGPLVHIIAAKAVCFKEALEPEYKVYQQNVLKNAKAMVEVFKQRCYKVVSNGTENHLFLVDLVSHGLTGKAADAALGKANITVNKNSVPNDPQKPFITSGIRVGTPSVTRRGFNEADVKELAGWMCDVLDAIGKDNEAEVIADTKDKVLAICKRLPVYA

SEQ ID NO: 80137 - DNA, 1320 bp, Aeropyrum pernix
  CDS (1)..(1320): transl_table=11
ttgaaagagcttgacctttcagaccccctatccatggtccttaagatagcagagctgacgacgaggcataacgtttggaggctcagggagtctataaatctcatagcctctgaaaacgttatgagtctcacagctctcaaggcatatttaagcgacttcatgttcagatacgcagaaggtaagccatttaagagatactaccagggaacccgctatattgacgagctagaggtgctcaccggagagttaatgggtagcatgatgggtactaatctagtggagctcaggcctgtgagcggtacaatagcaaacgcaagcgtcttcagggtactggctgagcctggggacaaggctgtcatagccccggtgcaggccggagcccacgtaagccacacaaagttcggcacactgggtgctctaggtatagagcaggtctcgatgccctacgatgaggagaacatgaatgtcgatgttgacaaggctgtgaagctcatagaggaggtcaagccgaggttcgctgtcctaggtggcagcgtctacatcttcccacaccccaccagggagatagcagaggctatacacagcgtcggaggcaagctaatctacgacgcagcccacgtgctggggctaataatgggtggggcctggcccaaccccctggaaaggggggctgacgcggttacaggctctacacacaaaaccttcccaggaccacagggcggggcagtgttcttcagggacgagcaactctacaagaaggtctcgaaaaccatcttcccctggtgggtaagcaaccaccacctacataggatacccgccactgctataaccgctgtggagatgaagctctacgggagggactacgcatcccaggttacaagcaatgccaggaaactggccgaagccctagccgctgaagggctaaaggttataggcgagcacctaggatacaccaggagccaccaagtcgtagtggatgtaagggatctagggggaggggccaagtgcgccagtttactagaagagtctaacataatagtgaacaagaacctactcccatgggatccccccgaggctgtcaaagacccgagcggaatcaggataggggttcaagaggtcacaaggctaggtatgaagcatggggagatggaggagatagccaaacttatacgcaaggttctcattgacaaagaggacccgaagaaggtggcagaacaggtgaaggaattcagaaaacagttcatgaaaatacactacagcctcgacgacaaggatgttaggatagacactatagcagacatacttagcctggcccagtag

SEQ ID NO: 80138 - protein, 439 aa, Aeropyrum pernix
MKELDLSDPLSMVLKIAELTTRHNVWRLRESINLIASENVMSLTALKAYLSDFMFRYAEGKPFKRYYQGTRYIDELEVLTGELMGSMMGTNLVELRPVSGTIANASVFRVLAEPGDKAVIAPVQAGAHVSHTKFGTLGALGIEQVSMPYDEENMNVDVDKAVKLIEEVKPRFAVLGGSVYIFPHPTREIAEAIHSVGGKLIYDAAHVLGLIMGGAWPNPLERGADAVTGSTHKTFPGPQGGAVFFRDEQLYKKVSKTIFPWWVSNHHLHRIPATAITAVEMKLYGRDYASQVTSNARKLAEALAAEGLKVIGEHLGYTRSHQVVVDVRDLGGGAKCASLLEESNIIVNKNLLPWDPPEAVKDPSGIRIGVQEVTRLGMKHGEMEEIAKLIRKVLIDKEDPKKVAEQVKEFRKQFMKIHYSLDDKDVRIDTIADILSLAQ

SEQ ID NO: 80139 - DNA, 1293 bp, Anaplasma marginale
  CDS (1)..(1293): transl_table=11
atggttgggtacattggcaatgttgatataggggtgtttgacgccgaggtcgcaaacagcatgtcggcggaactagaaaggcagaacacgctgctgcagatgatcgcgtcggaaaattttgtgagtcgtgcggtcttgcaggcccagggttctgtgctaactaacaaatacgctgagggatatgcgggtagcaggtactactgcggttgcgccctagttgacgttgtggaaaacctagccgttgagcgtctctgcagactttttgggtgtaaatttgctaatgtgcagccacactctggctcccaggccaaccagcaggtttttatggcgctcttgaaacctggtgatactattcttggcatgtccctggattgcggaggacacttaacccacggtgcggcccctaatgtttcggggcggtggtttaatgccgtgtcttatggggtcaatcgcgatacggggctcatagatatggatgaggtggaggctcttgccctgtctgccaaaccctcattgattattgccggggcgtcttcatacccgcgaaggatagactttgccgcttttagggccatcgcagataaggtgggggcatatttgcttgcggacatagctcactattcggggctgattgctgggggctgctatccatcaccgtttgggcacgcgcatgtcgttacttccaccacccataagaccctccgggggcctaggggcgccgttataatgactgacgatgaagaaatacacaaaaagataaggctgtccgtgtttcctggaatgcagggtggcccgctgatgcatgtgatagcggcgaaggcggtggcgttcaaagaggctctgcatccggatttcaagctatacgcccaacaggtgctagaaaactcccgcgttcttgctggtgttttgtcttccgaggggctggatgttgtcacgggcgggactgatagccacatcgtgctacttgacctgagatcaaagggtgtaaccggcagggaagtatcttcctccttggaaagagccggtattgtgtgcaacaagaatgcggttccctttgacacagaaaaaccctgggttacttctggaataaggctgggctctgctgctgaaacctcgcgcgggcttggagtacctgagtttgaaagcatagggcgcttggttgcgaaggttgttaatgcttgttctttgggtcaagaaaaaatgtctgcggcggaagcagaggttaggcgcgaagtaaatggcctagtgcgcagccttcccatgtcggcgtttcctgtgtgtgaggtgtgctaa

SEQ ID NO: 80140 - protein, 430 aa, Anaplasma marginale
MVGYIGNVDIGVFDAEVANSMSAELERQNTLLQMIASENFVSRAVLQAQGSVLTNKYAEGYAGSRYYCGCALVDVVENLAVERLCRLFGCKFANVQPHSGSQANQQVFMALLKPGDTILGMSLDCGGHLTHGAAPNVSGRWFNAVSYGVNRDTGLIDMDEVEALALSAKPSLIIAGASSYPRRIDFAAFRAIADKVGAYLLADIAHYSGLIAGGCYPSPFGHAHVVTSTTHKTLRGPRGAVIMTDDEEIHKKIRLSVFPGMQGGPLMHVIAAKAVAFKEALHPDFKLYAQQVLENSRVLAGVLSSEGLDVVTGGTDSHIVLLDLRSKGVTGREVSSSLERAGIVCNKNAVPFDTEKPWVTSGIRLGSAAETSRGLGVPEFESIGRLVAKVVNACSLGQEKMSAAEAEVRREVNGLVRSLPMSAFPVCEVC

SEQ ID NO: 80141 - DNA, 1284 bp, Anabaena sp
  CDS (1)..(1284): transl_table=11
gtgactagaacaaattcagattttctcactaattctgatccagcgatcgccggattgattaatcaagaactccaacgtcaacgcgaccacttggagttaatcgccagtgaaaacttcacctctgcggctgtcttggcggctcagggttcagtattgacaaataaatacgctgagggactgcctgggaagcgctactacggtggttgtgagtttatcgataaaattgagcaaatagctattgatcgtgctaaacagctatttggtgcagatcatgccaacgtccaaccccattctggcgcacaagccaattttgccgtcttcctgactttactcaaaccaggagacaaaatcatggggatggatttgtctcatggtggacacctcacccacggttccccggtgaatgtttccgggaagtggttccaagtttgtcactacggtgtgagccaacaaacagaacaattagactacgaccaaattcgtgagctggcgctgagggagcgtcctaagcttttgatttgcggttattctgcttatccccggattattgactttgaaaaattccgcagcatcgccgatgaagttggtgcttacttgctggctgatattgcccacattgcaggtttagtcgcaactggactgcatcctaacccactaccttattgtgatgtagtcacaaccaccacccataaaaccctccgtggccccagaggtggtttaattttgacccgtgacgcagaactcggtaaaaaattggataaatccgttttccctggaactcaaggcggccctttagaacacgtcattgctgggaaagcagttgcttttggtgaagccttaaaaccagaatttcaaggctattcagcccaagtaattgataatgcccgtacattagccaatcaactccagactcgcggattgaagctggtatctgatggtacggataaccatttaatgctcgtagatttacggtctgtgaacatgacgggtaaacgagcagaccagctagtgagtgaagtaaatatcaccgctaataaaaatacggttcccttcgatccccaatcaccatttgttaccagtggtttgcgcttgggttcaccagccatgaccacacggggaatgggagaggcggaatttaccgaaattggtaacattatcgccgatcgcctactcaacccagattcagacacagtcgctcaagattgtaaacgtcgggtagccgcattgtgcgatcgcttccccttatatccgcacttagaaattcctgtaccagtcttagcgtag

SEQ ID NO: 80142 - protein, 427 aa, Anabaena sp
MTRTNSDFLTNSDPAIAGLINQELQRQRDHLELIASENFTSAAVLAAQGSVLTNKYAEGLPGKRYYGGCEFIDKIEQIAIDRAKQLFGADHANVQPHSGAQANFAVFLTLLKPGDKIMGMDLSHGGHLTHGSPVNVSGKWFQVCHYGVSQQTEQLDYDQIRELALRERPKLLICGYSAYPRIIDFEKFRSIADEVGAYLLADIAHIAGLVATGLHPNPLPYCDVVTTTTHKTLRGPRGGLILTRDAELGKKLDKSVFPGTQGGPLEHVIAGKAVAFGEALKPEFQGYSAQVIDNARTLANQLQTRGLKLVSDGTDNHLMLVDLRSVNMTGKRADQLVSEVNITANKNTVPFDPQSPFVTSGLRLGSPAMTTRGMGEAEFTEIGNIIADRLLNPDSDTVAQDCKRRVAALCDRFPLYPHLEIPVPVLA

SEQ ID NO: 80143 - DNA, 1284 bp, Anabaena variabilis
  CDS (1)..(1284): transl_table=11
gtgactagaacaaattcagattttctcactaattctgatccagcgatcgccggattgattaatcaagaactccaacgtcaacgggaccacttggagttaatcgccagtgaaaactttacctcggcggctgtcttggcggctcagggttcggtactgacaaataaatacgctgaggggctgccaggtaagcgctactacggtggttgtgagtttatcgataaaatcgagcaaatagccattgaccgcgctaaacagctatttggtgccgctcatgccaacgtccaaccccattccggcgcacaagccaattttgctgttttcctgactttactcgcaccaggagacaaaatcatggggatggatttgtctcatggtggacacctcacccacggttccccggtaaacgtttccggtaagtggttccaagtttgccactacggtgtcagtcaacaaacagaacaactagactatgaccaaattcgtgagctggcgctgagggagcgtcctaagcttttgatttgtggttattctgcttatccccgaattattgactttgaaaagttccgcagcatcgccgatgaagttggcgcgtatttgctggcggatattgcccacattgccggtttagtcgcaagtggactgcaccccgaccccataccttactgtcacgtcgtcacaactaccacccataaaaccctccgtggccccagaggtggtttaattttgaccggtgacgcagaactcggtaaaaaattggataaatccgtttttcctggaagccaagggggaccgttagaacacgtaattgctgggaaagcagttgcttttggtgaagccttaaagccagaatttcaaggctattcagcccaagtaattgagaatgctcgtgctttggcaaatcaactccagaatcgtggattaaagcttgtatccgatggtacggataaccacctaatgctcgtagatttacggtctgtgaacatgacaggtaaacgagcagaccagttagtgagtgaagtaaatatcaccgctaataaaaatacggttcccttcgatccccaatcaccatttgttaccagtggtttgcgcttgggttccccagctatgactacacgaggaatgggagaggcagaatttaccgaaattggtaatattatcgccgatcgcctactcaacccagattcagacacagtcgcccaagattgtaaacgccgggtagccgcattgtgcgatcgcttccccttatatccacacttggaaattcctgtaccagtcttagcttag

SEQ ID NO: 80144 - protein, 427 aa, Anabaena variabilis
MTRTNSDFLTNSDPAIAGLINQELQRQRDHLELIASENFTSAAVLAAQGSVLTNKYAEGLPGKRYYGGCEFIDKIEQIAIDRAKQLFGAAHANVQPHSGAQANFAVFLTLLAPGDKIMGMDLSHGGHLTHGSPVNVSGKWFQVCHYGVSQQTEQLDYDQIRELALRERPKLLICGYSAYPRIIDFEKFRSIADEVGAYLLADIAHIAGLVASGLHPDPIPYCHVVTTTTHKTLRGPRGGLILTGDAELGKKLDKSVFPGSQGGPLEHVIAGKAVAFGEALKPEFQGYSAQVIENARALANQLQNRGLKLVSDGTDNHLMLVDLRSVNMTGKRADQLVSEVNITANKNTVPFDPQSPFVTSGLRLGSPAMTTRGMGEAEFTEIGNIIADRLLNPDSDTVAQDCKRRVAALCDRFPLYPHLEIPVPVLA

SEQ ID NO: 80145 - DNA, 1287 bp, Aquifex aeolicus
  CDS (1)..(1287): transl_table=11
atggaacaccttctgaaaacggaccccgaggtttttgacgctgttgtaaaggagtacgaaaggcagttttataacctggaaatgatagcctcagagaacttcacttccctcgcggtaatggaagcgacgggaagcgtcctcacgaacaagtacgcggaaggacttccgggaaagaggtattacggaggctgtgagtacgtagatgtagttgaaaatctcgccatagaaagagcaaaaaaactcttcggagcggagcacgcaaacgttcagccccactcgggttctcaggcgaacatggcggtgtactttgccgttctaaaccccggtgacaccataatgggaatggatttggcccacggaggacatctaacccacggagccaaggtaaacttcagcgggaaactctacaacgtaatccactacggtgtaaatccggaaacggagctcatagattacgaccagttgtacaaactggcaaaggagcacaaaccgaagttaatagtgggaggagcctcggcctatccacgcgtgtttgactgggcaaagatgagggaaatagcggacgaagtgggtgccctctttatggtcgacatggcacactacgctggtctcatagcgggaggcgtttaccccaatcccgtcccttacgcccagtttgtgacctcaacgacccataaaactctcaggggaccaaggagcggttttatcctaactacaaaggaatacgcaaaagccgtagacaagagcgtctttcccggaattcaaggtggtccattaatgcacgttatagcggcaaaggctgtagcttttaaagaggctatgagcgaagagttcaaggagtacgcaaaacaggttgtagaaaacgcaagggttctcgccgaagaactgaaaaagtacgggtttaagatagtcacgggaggaacggactctcacatagtcctcgttgacctcaggaataaaaacattatcggaaaagacgcggaaaaggctctggaaaaggctggaataacggtaaacaaaaacgcggtgccttttgaccctctaccgcctacaaagactagcgggataaggataggaacggctgcactcacaacgagggggatgaaggaagacgaaatgagaaagatagcaggctggataaatgaagtactttcaaacatggacgacgagaagaccatacagagagtaaggcaggaagtaagagagctgtgtgaaacttttcctttatatccggaactcaagaggagaatagatgagcttcgtagtggcaaggcaaccgatctttga

SEQ ID NO: 80146 - protein, 428 aa, Aquifex aeolicus
MEHLLKTDPEVFDAVVKEYERQFYNLEMIASENFTSLAVMEATGSVLTNKYAEGLPGKRYYGGCEYVDVVENLAIERAKKLFGAEHANVQPHSGSQANMAVYFAVLNPGDTIMGMDLAHGGHLTHGAKVNFSGKLYNVIHYGVNPETELIDYDQLYKLAKEHKPKLIVGGASAYPRVFDWAKMREIADEVGALFMVDMAHYAGLIAGGVYPNPVPYAQFVTSTTHKTLRGPRSGFILTTKEYAKAVDKSVFPGIQGGPLMHVIAAKAVAFKEAMSEEFKEYAKQVVENARVLAEELKKYGFKIVTGGTDSHIVLVDLRNKNIIGKDAEKALEKAGITVNKNAVPFDPLPPTKTSGIRIGTAALTTRGMKEDEMRKIAGWINEVLSNMDDEKTIQRVRQEVRELCETFPLYPELKRRIDELRSGKATDL

SEQ ID NO: 80147 - DNA, 1356 bp, Archaeoglobus fulgidus; identical to SEQ ID NO: 79687
  CDS (40)..(1356): transl_table=11

SEQ ID NO: 80148 - protein, 438 aa, Archaeoglobus fulgidus
MRDVHGSLKYFSSVAEDMNPSDVFQIIEGHTKLMRDSIPLIASENLTSLSVRRCYVSDLGHRYAEGRVGERFYEGCKYVDQIESMAIELTRKIFEAEHANVQPISGVVANLAAFFALTNVGDTIMSISVPCGGHISHDRVSAAGLRGLRVIHYPFNSEEMSVDVDETRKVAERERPKLFILGSSLILFRQPVKEIREIADEIGAYVMYDASHVLGLIAGKAFQNPLKEGADVMTGSTHKTFFGPQRAIIASRKELAEKVDRAVFPGVVSNHHLNTLAGYVVAAMEMLEFGEDYAKQVVRNAKALAEELYSLGYKVLGEKRGFTETHQVAVDVREFGGGERVAKVLENAGIILNKNLLPWDSLEKTANPSGIRIGVQEVTRIGMKEEEMRAIAEIMDAAIKEKKSVDELRNEVKELKERFNVIKYSFDESEAYHFPDLR

SEQ ID NO: 80149 - DNA, 1251 bp, Azoarcus sp
  CDS (1)..(1251): transl_table=11
atgttctctgcgcaagacaccctcgccaaggtcgaccccgaactgtggaccgccatccaggccgaaaaccgccgccaggaagaccacatcgaactcatcgcttcggaaaactacgtttcccacgccgtgatggaagcgcagggctcccagctgacgaacaagtacgctgaaggctacccgggcaagcgctactacggtggctgcgagcacgtcgatgtcgccgagcagatcgcaatcgaccgcatcaagaagctgttcggcgcggaagccgccaacgtccagccgaactccggctcgcaggcgaaccaggcggtgctgatggccttcgcgaagcccggcgacacgatcatggggatgagcctcgccgaaggcggtcacctcacgcatggcatgccgctgaacatgtcgggcaagtggttcaacgtcgtggcctacggtcttgacgaaaaggaagagatcgactacgacgcgatggaacggctcgcgcgcgagcacaagccgcgcatcatcatcgccggcgcctccgcctattcgctgcgcatcgacttcgaacgcttcgcgaaaatcgcgaaggaaatcggcgcgatcttctgggtcgacatggcgcactacgccggcctgatcgccgccggctactaccccaacccggtgccgcacgccgacgtcgtgacctcgacaacgcacaagacgctgcgcggcccgcgcggcggcatcatcctgatgaaggccgaacacgagaaagccatcaactcggcgatctttccgggcttgcagggcggcccgctgatgcatgtcatcgccgcgaaggcggtcgctttcaaggaagcgctgacgccgcagttccgtgattaccaggaacaggtcatcgcgaatgcgcgagtcatggcccgtgtgctcggcgaagagcgcggcctgcgcatcatctcgggccgcaccgaaagccacgtcttcctcgtcgacctgcgctcgaaaaacatcaccggcaaagcggccgaagcagtgctcggctcggcgcatatcacggtgaacaagaactcgattccgaaggatcccgaaaagcctttcgtcacctccggcatccgcatcggctcgccggcgatgacgacgcgcggcttcaccgagatcgaagccgagcaggtcgcgcacctgatcgccgacgtcctcgacgcaccgcaggacgaggcagtcctcgcgaatgtgcaggccaaggtcgccgaactgtgcgcccgtcacccggtgtatggaaagtag

SEQ ID NO: 80150 - protein, 416 aa, Azoarcus sp
MFSAQDTLAKVDPELWTAIQAENRRQEDHIELIASENYVSHAVMEAQGSQLTNKYAEGYPGKRYYGGCEHVDVAEQIAIDRIKKLFGAEAANVQPNSGSQANQAVLMAFAKPGDTIMGMSLAEGGHLTHGMPLNMSGKWFNVVAYGLDEKEEIDYDAMERLAREHKPRIIIAGASAYSLRIDFERFAKIAKEIGAIFWVDMAHYAGLIAAGYYPNPVPHADVVTSTTHKTLRGPRGGIILMKAEHEKAINSAIFPGLQGGPLMHVIAAKAVAFKEALTPQFRDYQEQVIANARVMARVLGEERGLRIISGRTESHVFLVDLRSKNITGKAAEAVLGSAHITVNKNSIPKDPEKPFVTSGIRIGSPAMTTRGFTEIEAEQVAHLIADVLDAPQDEAVLANVQAKVAELCARHPVYGK

SEQ ID NO: 80151 - DNA, 1242 bp, Bacillus anthracis
  CDS (1)..(1242): transl_table=11
gtggatcatttaaaacgtcaagatgaaaaggtatttgctgcaattgaggcagaactaggaagacagcgttcgaagattgagttaattgcttcggaaaacttcgtaagtgaagcggtaatggaggcgcaaggttctgttttaacgaataagtatgctgaaggatatcctgggaaacgttactatggtggttgtgaacacgtagacgtagtagaagatatcgcacgtgatcgcgtaaaagaaattttcggcgcagagcacgtaaatgttcaaccgcattctggtgcacaagcgaacatggcagtatacttcacgattttagagcaaggcgatacagtacttggtatgaatttatctcatggtggtcacttaacacacggaagccctgttaacttcagtggagtacaatataatttcgtagaatatggcgtggatgctgaatctcactgtattaattacgatgatgtattagcaaaagcgaaagaacataaaccaaaattaatcgttgcaggtgcaagtgcataccctcgtgttatcgatttcaaacgattccgtgagattgcagatgaagtgggcgcatacttaatggttgatatggcacatatcgctggtttagtagctgctggtttacatccaaacccagtaccacatgcacatttcgttacaacgacaacacataaaacgttacgtggcccacgtggtggtatgattttatgtgaagaacaatttgcaaaacaaattgataaatcaatcttccctggtattcaaggtggtccacttatgcacgtaatcgctgcaaaagctgttgcgtttggtgaggcacttcaagatgatttcaaaacatatgcacaaaatatcattaacaatgcgaaccgcttagctgaaggtcttcaaaaagaaggacttacacttgtttctggtggaacagacaatcacttaatcttaattgatgttcgtaacttagaaatcacaggtaaagtagcagagcacgtattagacgaagttggtattactgtgaacaaaaatacaattccatttgaaacagcaagcccatttgtaacaagtggtgtacgtatcggtacagcagctgtaacatctcgcggtttcggtttagaagacatggatgaaattgcttcacttattgcttacacattaaaaaatcatgaaaatgaagctgcattagaagaagcacgtaagcgtgtagaagcgttaacgagcaaattcccaatgtacacagatctataa

SEQ ID NO: 80152 - protein, 413 aa, Bacillus anthracis
MDHLKRQDEKVFAAIEAELGRQRSKIELIASENFVSEAVMEAQGSVLTNKYAEGYPGKRYYGGCEHVDVVEDIARDRVKEIFGAEHVNVQPHSGAQANMAVYFTILEQGDTVLGMNLSHGGHLTHGSPVNFSGVQYNFVEYGVDAESHCINYDDVLAKAKEHKPKLIVAGASAYPRVIDFKRFREIADEVGAYLMVDMAHIAGLVAAGLHPNPVPHAHFVTTTTHKTLRGPRGGMILCEEQFAKQIDKSIFPGIQGGPLMHVIAAKAVAFGEALQDDFKTYAQNIINNANRLAEGLQKEGLTLVSGGTDNHLILIDVRNLEITGKVAEHVLDEVGITVNKNTIPFETASPFVTSGVRIGTAAVTSRGFGLEDMDEIASLIAYTLKNHENEAALEEARKRVEALTSKFPMYTDL

SEQ ID NO: 80153 - DNA, 1242 bp, Bacillus cereus
  CDS (1)..(1242): transl_table=11
gtggatcatttaaaacgtcaagatgaaaaggtatttgctgcaattgaggcagaactaggaagacagcgttcgaagattgagttaattgcttcggaaaacttcgtaagtgaagcagtaatggaggcgcaaggttctgttttaacgaataagtatgctgaaggatatcctgggaaacgttactatggtggttgtgaacatgtagacgtagtagaagatatcgcacgtgatcgcgtgaaagaaattttcggcgcagagcacgtaaatgttcaaccgcattctggtgcacaagcgaacatggcagtatacttcacgattttagagcaaggcgatacagtacttggtatgaatttatctcatggtggtcacttaacacacggaagccctgttaacttcagtggagtacaatataatttcgtagaatatggcgtggatgctgaatctcaccgtattaattacgatgatgtattagcaaaagcgaaagaacataaaccaaaattaatcgttgcaggtgcaagtgcgtaccctcgtgttatcgatttcaaacgattccgtgagattgcagatgaagtgggcgcatacttaatggttgatatggcacatatcgcaggtttagtagcggctggtttacatccaaatccagtgccacatgcacatttcgttacaacaacaacacataaaacattacgtggtccacgtggtggtatgattttatgtgaagagcaatttgcaaaacaaattgataaatcaatcttccctggtattcaaggtggtccacttatgcacgtaatcgctgcaaaagctgttgcgtttggtgaggcacttcaagatgatttcaaaacatatgcacaaaatatcattaacaatgcgaaccgcttagctgaaggtcttcaaaaagaaggacttacacttgtttctggtggaacagacaatcacttaatcctaattgatgttcgtaacctagaaatcacaggtaaagtagcagagcacgtattggacgaagttggtattacagtgaacaaaaatacaattccatttgaaacagcaagcccatttgtaacaagtggtgtacgtatcggtacagcagctgtaacatctcgtggtttcggtttagaagaaatggatgaaattgcgtcacttattgcttacacattaaaaaatcatgaaaatgaagctgcattagaagaagcacgtaagcgtgtagaagcgttaacgagcaaattcccaatgtacacagatctataa

SEQ ID NO: 80154 - protein, 413 aa, Bacillus cereus
MDHLKRQDEKVFAAIEAELGRQRSKIELIASENFVSEAVMEAQGSVLTNKYAEGYPGKRYYGGCEHVDVVEDIARDRVKEIFGAEHVNVQPHSGAQANMAVYFTILEQGDTVLGMNLSHGGHLTHGSPVNFSGVQYNFVEYGVDAESHRINYDDVLAKAKEHKPKLIVAGASAYPRVIDFKRFREIADEVGAYLMVDMAHIAGLVAAGLHPNPVPHAHFVTTTTHKTLRGPRGGMILCEEQFAKQIDKSIFPGIQGGPLMHVIAAKAVAFGEALQDDFKTYAQNIINNANRLAEGLQKEGLTLVSGGTDNHLILIDVRNLEITGKVAEHVLDEVGITVNKNTIPFETASPFVTSGVRIGTAAVTSRGFGLEEMDEIASLIAYTLKNHENEAALEEARKRVEALTSKFPMYTDL

SEQ ID NO: 80155 - DNA, 1245 bp, Bacillus cereus
  CDS (1)..(1245): transl_table=11
ttggtggatcatttaaaacgtcaagatgaaaaggtatttgctgcaattgaggcagaactaggaagacagcgttcaaagattgagttaattgcttcggaaaactttgtaagtgaagcagtaatggaggcacaaggttctgttttaacgaataagtatgctgaaggatatcctggaaaacgttactatggtggctgtgaacacgtagacgtagtagaagatatcgcacgtgatcgcgtgaaagaaattttcggcgcagagcacgtaaatgttcaaccacactctggtgcacaagcgaacatggcagtatacttcacgattttagagcaaggcgatacagtacttggtatgaacttatctcatggtggtcacttaacacacggaagccctgttaacttcagtggagtacaatataatttcgtagaatatggcgtggatgctgactctcaccgtattaattacgatgatgtattagcaaaagcgaaagaacataaaccaaaattaatcgttgcaggtgcaagtgcataccctcgtgttatcgatttcaagcgattccgtgagattgcagatgaagtgggcgcttatttaatggttgatatggcacatatcgcaggtttagtagctgctggtttacatccaaatccagtaccacatgcacatttcgttacaacgacaacacataaaacgttacgtggtccgcgtggtggtatgattttatgtgaagagcaatttgcaaaacaaattgataaatcaatcttccctggtattcaaggtggtccacttatgcacgtaatcgctgcaaaagctgttgcatttggtgaagcacttcaagatgatttcaaaacatatgcacaaaatatcattaacaatgcgaaccgcttagctgaaggtcttcaaaaagaaggacttacacttgtttctggcggaacagacaatcacttaatcttgattgatgtgcgtaacttagaaatcacaggtaaagtagcagagcacgtattagatgaagttggtattacagtgaacaaaaatacaattccatttgaaacagcaagcccatttgtaacaagtggtgtacgtatcggtacagcagctgtaacatctcgtggttttggtttagaagaaatggatgaaattgcgtcacttattgcttatacattaaaaaatcatgaaaatgaagctgcattagaagaagcacgtaagcgtgtagaagcgttaactagcaaattcccaatgtatccaaatctataa

SEQ ID NO: 80156 - protein, 414 aa, Bacillus cereus
MVDHLKRQDEKVFAAIEAELGRQRSKIELIASENFVSEAVMEAQGSVLTNKYAEGYPGKRYYGGCEHVDVVEDIARDRVKEIFGAEHVNVQPHSGAQANMAVYFTILEQGDTVLGMNLSHGGHLTHGSPVNFSGVQYNFVEYGVDADSHRINYDDVLAKAKEHKPKLIVAGASAYPRVIDFKRFREIADEVGAYLMVDMAHIAGLVAAGLHPNPVPHAHFVTTTTHKTLRGPRGGMILCEEQFAKQIDKSIFPGIQGGPLMHVIAAKAVAFGEALQDDFKTYAQNIINNANRLAEGLQKEGLTLVSGGTDNHLILIDVRNLEITGKVAEHVLDEVGITVNKNTIPFETASPFVTSGVRIGTAAVTSRGFGLEEMDEIASLIAYTLKNHENEAALEEARKRVEALTSKFPMYPNL

SEQ ID NO: 80157 - DNA, 1245 bp, Bacillus cereus
  CDS (1)..(1245): transl_table=11
ttggtggatcatttaaaacgtcaagatgaaaaggtatttgctgcaattgaggcagaactaggaagacagcgttcgaagattgagttaattgcttcggaaaacttcgtaagtgaagcggtaatggaggcgcaaggttctgttttaacgaataagtatgctgaaggatatcctgggaaacgttactatggtggttgtgaacacgtagacgtagtagaagatatcgcacgtgatcgtgtaaaagaaattttcggcgcagagcatgtaaatgttcaacctcattctggtgcacaagcgaacatggcagtatacttcacgattttagagcaaggcgatacagtacttggtatgaatttatctcatggtggtcacttaacacacggaagccctgttaacttcagtggagtacaatataatttcgtagaatatggcgtggatgctgaatctcaccgtattaattacgatgatgtattagcaaaagcgaaagaacataaaccaaaattaatcgttgcaggtgcaagtgcataccctcgtgttatcgatttcaaacgattccgtgagattgcagatgaagtgggcgcatacttaatggttgatatggcacatatcgctggtctagtagctgctggtttacatccaaacccagtaccacatgcacatttcgttacaacgacaacacataaaacgttacgtggcccacgtggtggtatgattttatgtgaagaacaatttgcaaaacaaattgataaatcaatcttccctggtattcaaggtggtccactgatgcacgtaattgctgcaaaagctgttgcgtttggtgaggcacttcaagatgatttcaaaacatatgcacaaaatatcattaacaatgcgaaccgcttagctgaaggtcttcaaaaagaaggacttacacttgtttctggtggaacagacaatcacttaatcttaattgatgttcgtaacttagaaatcacaggtaaagtagcagagcatgtattagatgaagttggtattacagtgaacaaaaatacaattccatttgaaacagcaagcccatttgtaacaagtggtgtacgtatcggtacggcagctgtaacatctcgtggtttcggtttagaagaaatggatgaaattgcgtcacttattgcttacacattaaaaaatcatgaaaatgaagctgcattagaagaagcacgtaagcgtgtagaagcgttaacgagcaaattcccaatgtacacagatctataa

SEQ ID NO: 80158 - protein, 414 aa, Bacillus cereus
MVDHLKRQDEKVFAAIEAELGRQRSKIELIASENFVSEAVMEAQGSVLTNKYAEGYPGKRYYGGCEHVDVVEDIARDRVKEIFGAEHVNVQPHSGAQANMAVYFTILEQGDTVLGMNLSHGGHLTHGSPVNFSGVQYNFVEYGVDAESHRINYDDVLAKAKEHKPKLIVAGASAYPRVIDFKRFREIADEVGAYLMVDMAHIAGLVAAGLHPNPVPHAHFVTTTTHKTLRGPRGGMILCEEQFAKQIDKSIFPGIQGGPLMHVIAAKAVAFGEALQDDFKTYAQNIINNANRLAEGLQKEGLTLVSGGTDNHLILIDVRNLEITGKVAEHVLDEVGITVNKNTIPFETASPFVTSGVRIGTAAVTSRGFGLEEMDEIASLIAYTLKNHENEAALEEARKRVEALTSKFPMYTDL

SEQ ID NO: 80159 - DNA, 1281 bp, Bacteroides fragilis
  CDS (1)..(1281): transl_table=11
atgaaaagagacgatttaattttcgatattatcgaaaaagaacatcaacgtcagttgaaaggcattgagctgatcgcatcagaaaatttcgtaagtgatcaggtgatggaggcaatgggatcttgtcttaccaataaatatgcggaaggatatccgggtaaacgctactatggtggctgtgaagtggtagaccaaagcgaacaaattgccattgaccgcctgaaagagatttttggtgcagaatgggccaatgtgcaaccccactcaggagcacaggctaatgcagccgtatttctggctgtactgaatccgggagataaattcatggggctgaatctggcacatggaggacacctttcacatggttcattagtaaacacttcgggaatcatttatactccctgcgaatataatctgaaacaggaaactgggcgcgtagattacgatcaaatggaggaagtagcattgcgtgaaaagcccaaaatgatcattggaggcggttcggcctactctcgtgaatgggattataaacgtatgcgcgaaattgccgacaaggtaggagcaattctcatgatcgacatggcacatcctgctgggttaattgcagccggtctattggataatcctgtgaaatatgcacatattgtgacttcaaccactcataagaccctccgaggacctcgtggtggcgtaatcatgatgggaaaagactttcctaatccttggggaaagaaaactccgaaaggagaaattaagatgatgtctcaactacttgactcagctgtattcccaggaatacaaggagggccgttggaacatgtgattgcagccaaagctgtagctttcggtgaatgtttgcaacccgaatataaagaatatcaaaaacaggtacaaaagaatgccgctgtattagcacaagccttgattgaccgtggtttcactattgtttcaggtggcacagataatcattccatgctggttgacttgcgtagtaaataccctactctaacaggtaaggttgcagaaaaagcactcgtatctgctgatataacagttaataaaaatatggttccgtttgatagtcgttccgcattccagacttcaggtatccgtttgggtactcctgccatcacaacacgtggtgcaaaagaagatctgatgttggaaatcgcggaaatgatcgaaaccgtattatctaacgtagaaaatgaagaagtgatagcacaagtacgtgcacgtgtcaacaagacaatggaaaaatatccgatcttcgcatattaa

SEQ ID NO: 80160 - protein, 426 aa, Bacteroides fragilis
MKRDDLIFDIIEKEHQRQLKGIELIASENFVSDQVMEAMGSCLTNKYAEGYPGKRYYGGCEVVDQSEQIAIDRLKEIFGAEWANVQPHSGAQANAAVFLAVLNPGDKFMGLNLAHGGHLSHGSLVNTSGIIYTPCEYNLKQETGRVDYDQMEEVALREKPKMIIGGGSAYSREWDYKRMREIADKVGAILMIDMAHPAGLIAAGLLDNPVKYAHIVTSTTHKTLRGPRGGVIMMGKDFPNPWGKKTPKGEIKMMSQLLDSAVFPGIQGGPLEHVIAAKAVAFGECLQPEYKEYQKQVQKNAAVLAQALIDRGFTIVSGGTDNHSMLVDLRSKYPTLTGKVAEKALVSADITVNKNMVPFDSRSAFQTSGIRLGTPAITTRGAKEDLMLEIAEMIETVLSNVENEEVIAQVRARVNKTMEKYPIFAY

SEQ ID NO: 80161 - DNA, 1242 bp, Bacillus halodurans
  CDS (1)..(1242): transl_table=11
atgagtacgttacagtctaaagatccaaaagtatttgaagctgtgcagcaggagctaggtcgccaacgcgacaaaattgagttaatcgcatctgagaactttgtcagcgaagccgttatggaagcacaaagctctgtcttgacgaacaaatatgcggaaggctatccgggtcgacgttattatggtggttgtgaatatgtggatattgtcgaagatttggcacgggatcgagcaaaagagatatttggtggcgagcatgtcaatgtccagcctcactcaggtgcacaggcgaacatggctgtatattttactattttagagcatggtgatactgttcttggtatgaacttgtcccatggtggtcatttgacccatggaagccctgtaaatttcagtggtattcaatacaactttgtggagtacggtgtggacaaggagtcccaacgtatcgattacgaagaagtgcgtcgtttggcgaaggagcatcaaccaaaaatgatcgtagcaggtgccagtgcgtatccgcgcgaaatcgattttgcgaagtttcgtgaaattgccgatgaagttggcgcttacctcatggtggacatggcccacatcgctggccttgtagcagctggtcttcatcaaaatccagtgcctcatagtcatttcgtgacgacaacgacacacaaaaccttacgtggcccacgtggtggtatgattatttgcaacgaagaatttgctaagcaaatcgataaatcgattttccctggtattcaaggtggaccgctcatgcacgtgattgcagctaaggcggtagccttcggtgaggcgcttcagcctgagttcaaaagctacggtgaggcgatcattcgcaatgccaaacgcctaggtgaaaagctgacatcggaaggtattgaccttgtgtctggtggaacagacaatcatcttcttctccttgacttgcgcagccttgggctaacaggtaaagtagcggagaaagctcttgacgatgtggggatcacaacgaacaagaacacgattccattcgaccctgaaagtccatttgtgacaagtgggattcgaatcggaacagctgctgtgacatctcgtggccttgatgaagaagcaatggatgaaattggcgcgactatcgcattaaccttgaaaaatgttgataacgaagagaagatgaatgaagcgagagagcgagtggacgctttaactgcgaagttcccaatgtatccaaatctttaa

SEQ ID NO: 80162 - protein, 413 aa, Bacillus halodurans
MSTLQSKDPKVFEAVQQELGRQRDKIELIASENFVSEAVMEAQSSVLTNKYAEGYPGRRYYGGCEYVDIVEDLARDRAKEIFGGEHVNVQPHSGAQANMAVYFTILEHGDTVLGMNLSHGGHLTHGSPVNFSGIQYNFVEYGVDKESQRIDYEEVRRLAKEHQPKMIVAGASAYPREIDFAKFREIADEVGAYLMVDMAHIAGLVAAGLHQNPVPHSHFVTTTTHKTLRGPRGGMIICNEEFAKQIDKSIFPGIQGGPLMHVIAAKAVAFGEALQPEFKSYGEAIIRNAKRLGEKLTSEGIDLVSGGTDNHLLLLDLRSLGLTGKVAEKALDDVGITTNKNTIPFDPESPFVTSGIRIGTAAVTSRGLDEEAMDEIGATIALTLKNVDNEEKMNEARERVDALTAKFPMYPNL

SEQ ID NO: 80163 - DNA, 1245 bp, Bacillus thuringiensis subsp
  CDS (1)..(1245): transl_table=11
ttggtggatcatttaaaacgtcaagatgaaaaggtatttgctgcaattgaggcagaactaggaagacagcgttcgaagattgagttaattgcttcggaaaacttcgtaagtgaagcggtaatggaggcgcaaggttctgttttaacgaataagtatgctgaaggatatcctgggaaacgttactatggtggttgtgaacacgtagacgtagtagaagatatcgcacgtgatcgcgtaaaagaaattttcggcgcagagcacgtaaatgttcaaccgcattctggtgcacaagcgaacatggcagtatacttcacgattttagagcaaggcgatacagtacttggtatgaatttatctcatggtggtcacttaacacacggaagccctgttaacttcagtggagtacaatataatttcgtagaatatggcgtggatgctgaatctcaccgtattaattacgatgatgtattagcaaaagcgaaagaacataaaccaaaattaatcgttgcaggtgcaagtgcataccctcgtgttatcgatttcaaacgattccgtgagattgcagatgaagtgggcgcatacttaatggttgatatggcacatatcgctggtttagtagctgctggtttacatccaaacccagtaccacatgcacatttcgttacaacgacaacacataaaacgttacgtggcccacgtggtggtatgattttatgtgaagaacaatttgcaaaacaaattgataaatcaatcttccctggtattcaaggtggtccacttatgcacgtaatcgctgcaaaagctgttgcgtttggtgaggcacttcaagatgatttcaaaacatatgcacaaaatatcattaacaatgcgaaccgcttagctgaaggtcttcaaaaagaaggacttacacttgtttctggtggaacagacaatcacttaatcttaattgatgttcgtaacttagaaatcacaggtaaagtagcagagcatgtattagatgaagttggtattacagtgaacaaaaatacaattccatttgaaacagcaagcccatttgtaacaagtggtgtacgtatcggtacagcagctgtaacatctcgcggtttcggtttagaagacatggatgaaattgcgtcacttattgcttacacattaaaaaatcatgaaaatgaagctgcattagaagaagcacgtaagcgtgtagaagcgttaacgagcaaattcccaatgtacacagatctataa

SEQ ID NO: 80164 - protein, 414 aa, Bacillus thuringiensis subsp
MVDHLKRQDEKVFAAIEAELGRQRSKIELIASENFVSEAVMEAQGSVLTNKYAEGYPGKRYYGGCEHVDVVEDIARDRVKEIFGAEHVNVQPHSGAQANMAVYFTILEQGDTVLGMNLSHGGHLTHGSPVNFSGVQYNFVEYGVDAESHRINYDDVLAKAKEHKPKLIVAGASAYPRVIDFKRFREIADEVGAYLMVDMAHIAGLVAAGLHPNPVPHAHFVTTTTHKTLRGPRGGMILCEEQFAKQIDKSIFPGIQGGPLMHVIAAKAVAFGEALQDDFKTYAQNIINNANRLAEGLQKEGLTLVSGGTDNHLILIDVRNLEITGKVAEHVLDEVGITVNKNTIPFETASPFVTSGVRIGTAAVTSRGFGLEDMDEIASLIAYTLKNHENEAALEEARKRVEALTSKFPMYTDL

SEQ ID NO: 80165 - DNA, 1248 bp, Bacillus licheniformis
  CDS (1)..(1248): transl_table=11
atgaaacatttacctgcgcaagatgaacaagtttttagcgccattcaagatgagcggaaacgtcaacagtcgaagattgagctgatcgcttctgaaaactttgtaagcgaagcggttatggaagctcaaggctcggttttaactaataaatatgcggaaggatatcctggtaaacgctactacggcggttgtgagcatgtagacgtggcagaggatatcgcgcgcgaccgcgccaagcagattttcggcgccgagcacgtcaacgttcagccgcattccggcgcacaagcgaacatggcggtatacttcacgattttggagcacggtgacactgtgttgggaatgaaccttgctcacggcggacatttaacgcacggcagccctgtcaacttcagcggtgttcagtacaacttcgttgaatacggcgttgataaagagacgcagtatattgattacgaagatgtccgtgaaaaggcgctcaaacataagcctaagctgatcgtggccggagcaagcgcatatccgcgcaccatcgattttaaaaagttccgcgaaatcgctgatgaagtcggagcctatgtgatggtggacatggcgcatatcgccggacttgtagcagcaggtcttcacccgaatcctgttccttacgctgactttgtgacgacgacaactcataaaacgcttcgcggaccgcgcggcggcatgattctttgccgtgaagagtttgcgaaacaaattgacaagtcgatcttccctggaattcaaggcggaccgttaatgcacgtgatcgctgcaaaggctgtttcctttggcgaagctttaaaggacgaattcaaaacatatgcccaaaatgtcatcaacaatgcgaagcgcttggctgaaacattgaaaaaagagggtatcgagctcgtatccggcggaacggataaccatcttgtgctggtcgacctgcgctctctcggcattaccggaaaagtggctgaaaatgtacttgatgaagtcggcatcaccgtcaacaaaaacgcgattccttatgatcctgaaaaacctttcgttacgagcggaatccgcgtcggtacagcagctgtgacgagccgcggctttgatctggaagcgatcgaagaagtgggagcgatcattgcgcttgcccttaaaaaccatgaagacgaagcgaaacttgaagaagcaaaacagcgtgtagaagcgctgacaaacagattcccgttgtataccgggcttgattactaa

SEQ ID NO: 80166 - protein, 415 aa, Bacillus licheniformis
MKHLPAQDEQVFSAIQDERKRQQSKIELIASENFVSEAVMEAQGSVLTNKYAEGYPGKRYYGGCEHVDVAEDIARDRAKQIFGAEHVNVQPHSGAQANMAVYFTILEHGDTVLGMNLAHGGHLTHGSPVNFSGVQYNFVEYGVDKETQYIDYEDVREKALKHKPKLIVAGASAYPRTIDFKKFREIADEVGAYVMVDMAHIAGLVAAGLHPNPVPYADFVTTTTHKTLRGPRGGMILCREEFAKQIDKSIFPGIQGGPLMHVIAAKAVSFGEALKDEFKTYAQNVINNAKRLAETLKKEGIELVSGGTDNHLVLVDLRSLGITGKVAENVLDEVGITVNKNAIPYDPEKPFVTSGIRVGTAAVTSRGFDLEAIEEVGAIIALALKNHEDEAKLEEAKQRVEALTNRFPLYTGLDY

SEQ ID NO: 80167 - DNA, 1254 bp, Bacillus clausii
  CDS (1)..(1254): transl_table=11
atggaacatttaaaaacgcaagatccagccgtatttgaagcgattcgccaagaacttggccggcaacgagacaaaattgaattgattgcttcagagaactttgtcagcgaagcggttatggaagcgcaaggctcggtcttgacgaataaatatgcagaaggctatcctggtcgccgttattatggtggctgcgagtatgttgatattgctgaagacgtcgcgcgcgacagagcgaaacaactttttggcgccgcatatgttaatgttcagccgcattctggcgcacaagcaaacatgggcgtttattttactattctcgaacatggagacacggtgcttggcatgaacttgtcccatggtggccatttaacgcacggcagcccagtcaattttagtggcattcaataccgttttgtggaatacggcgtccgtgaagacgacaagcgcattgattacgaagccgttagagaagcagccaagacgcaccagcctaaattaattgtagctggagcaagtgcttacccccgtgaaatcgactttaaaaaattccgggaaattgcggatgaagttggcgcttatcttatggtagacatggcccatattgctggccttgtcgctgcaggcctccatcaaaaccctgtgccatacgcccattttgtcacaacaacgactcataaaacgttacgtggcccacggggcggcatgattttgtgcaatgaggagacggcagaggaatttgggaaaaagctcgataagtcgatcttcccaggcattcaaggcggcccgcttatgcacgtgattgccgcaaaagcggttgcctttggagaagcattgtcagatgaatttaaaacgtatgccaagcaaatcattgccaatgcaaagcgccttggcgaaaagcttcaagcggaaggcgtggacatcgtttctggtggcacggataaccatttgctgttgcttgatttgcgttccttgcaattgaccggcaaagtcgctgaaaaagcgttagacgccgtcggcattacaaccaataaaaacgcaattccatttgatcctgagaaaccatttgtaacgagtggcattcgaattggcaccgccgctgttacatcgcgtggctttggggaaaacgaaatggatgaaattggcgaactcattgcactgacgctcaaaaacatcgacaatgaagaagcgctaaacagcgtccgttcacgtgttgccgcattgacaaaaacatttccgatgtacccaaatttgtaa

SEQ ID NO: 80168 - protein, 417 aa, Bacillus clausii
MEHLKTQDPAVFEAIRQELGRQRDKIELIASENFVSEAVMEAQGSVLTNKYAEGYPGRRYYGGCEYVDIAEDVARDRAKQLFGAAYVNVQPHSGAQANMGVYFTILEHGDTVLGMNLSHGGHLTHGSPVNFSGIQYRFVEYGVREDDKRIDYEAVREAAKTHQPKLIVAGASAYPREIDFKKFREIADEVGAYLMVDMAHIAGLVAAGLHQNPVPYAHFVTTTTHKTLRGPRGGMILCNEETAEEFGKKLDKSIFPGIQGGPLMHVIAAKAVAFGEALSDEFKTYAKQIIANAKRLGEKLQAEGVDIVSGGTDNHLLLLDLRSLQLTGKVAEKALDAVGITTNKNAIPFDPEKPFVTSGIRIGTAAVTSRGFGENEMDEIGELIALTLKNIDNEEALNSVRSRVAALTKTFPMYPNL

SEQ ID NO: 80169 - DNA, 1248 bp, Bacillus subtilis
  CDS (1)..(1248): transl_table=11
atgaaacatttacctgcgcaagacgaacaagtgtttaacgccattaaaaatgagcgtgaacgccaacagactaagatcgaattgattgcttctgagaactttgtaagtgaagcggttatggaagcacaaggatctgttttgacaaataagtacgcagaaggatatccgggcaaacgctactacggcggatgcgagcacgtcgatgtcgttgaagatatcgcccgtgaccgcgcgaaggaaatctttggagcggagcatgtaaacgttcagcctcattcaggcgcacaagcaaacatggcagtgtacttcacgattttggagcaaggcgatactgtacttgggatgaacctctcccacggcggccatttaacacacggaagcccagtcaacttcagcggtgttcaatataactttgttgagtacggcgtagataaagaaactcaatatattgattacgatgacgtgcgtgaaaaagccctcgctcataaaccgaagcttatcgtagcaggagcaagtgcgtatcctcgtacaatcgactttaagaaattccgtgaaattgctgatgaagtcggcgcttacttcatggtggatatggcacatatcgcaggacttgttgcggcaggccttcatccaaacccggttccttacgctgatttcgttacaacaacaacacataaaacacttcgcggtcctcgcggcggtatgatcctttgccgtgaagagtttggcaagaaaattgataaatcgatcttccctggaattcaaggcggccctctgatgcacgttattgccgcaaaagctgtttcattcggtgaagtattgcaggacgatttcaaaacatatgcacaaaacgtcatttcaaacgcgaaacgtctggctgaagccttaacgaaagagggcatccagctcgtttcaggcggaacagacaaccaccttatccttgttgaccttcgttcgctcggactgactggtaaggttgcggagcatgtacttgatgaaattggtattacgtctaacaaaaacgcgattccatatgatcctgaaaaacctttcgtaacaagcggcatccgtcttggtacagctgctgtaaccagccgcggttttgacggagacgcattagaagaagtcggtgctatcattgcgcttgcattgaaaaaccacgaagatgaaggaaaacttgaagaagcaagacagcgtgtagctgctctgactgataaatttcctttatataaagaattagattattaa

SEQ ID NO: 80170 - protein, 415 aa, Bacillus subtilis
MKHLPAQDEQVFNAIKNERERQQTKIELIASENFVSEAVMEAQGSVLTNKYAEGYPGKRYYGGCEHVDVVEDIARDRAKEIFGAEHVNVQPHSGAQANMAVYFTILEQGDTVLGMNLSHGGHLTHGSPVNFSGVQYNFVEYGVDKETQYIDYDDVREKALAHKPKLIVAGASAYPRTIDFKKFREIADEVGAYFMVDMAHIAGLVAAGLHPNPVPYADFVTTTTHKTLRGPRGGMILCREEFGKKIDKSIFPGIQGGPLMHVIAAKAVSFGEVLQDDFKTYAQNVISNAKRLAEALTKEGIQLVSGGTDNHLILVDLRSLGLTGKVAEHVLDEIGITSNKNAIPYDPEKPFVTSGIRLGTAAVTSRGFDGDALEEVGAIIALALKNHEDEGKLEEARQRVAALTDKFPLYKELDY

SEQ ID NO: 80171 - DNA, 1281 bp, Bacteroides thetaiotaomicron
  CDS (1)..(1281): transl_table=11
atgaaaagagacgacttaattttcgacatcatcgaaaaagagcaccaacgtcagctgaaaggtatcgagctgattgcatctgaaaactttgtaagtgaccaggtaatgcaggcaatgggttcttgcctgactaacaagtacgcagaaggttatccgggcaaacgttactacggaggttgtgaagtagttgaccaaagcgaacaaatcgctatcgaccgcctgaaagaaatcttcggtgccgaatgggcaaacgtacaaccgcattcaggagcacaagccaatgcagccgtatttctggctgttttgaatccaggcgacaagtttatgggattaaacctcgcacacggcggacacctttctcacggttcattagtaaacacttccggcattatctacactccttgcgaatacaatctgaatcaggaaaccggccgtgtagactacgaccagatggaagaagttgctttgcgcgaaaagccgaaaatgattatcggcggcggctctgcttattcccgcgaatgggactacaaacgtatgcgtgaaatcgcagataaagtaggcgctatcctgatgatcgacatggctcaccctgcgggtctgatcgctgccggactgttggagaacccggttaaatatgcacacatcgtcacttcgactacacataaaacacttcgcggacctcgtggtggggtcatcatgatgggaaaagatttccctaatccttggggaaagaaaactccgaagggtgaaatcaaaatgatgtctcaattactggattcagctgtattcccaggtgtacagggcggaccgttggaacacgtaatcgctgccaaagccgtagctttcggtgaaatcctgcaaccggaatacaaggaatatgcaaaacaggttcagaagaatgctgccatactggcacaggccttgatagaccgtggttttacaatcgtttccggtggtacggacaatcactccatgctggttgacctgcgtagcaaataccctgatctgacaggtaaggtagcagaaaaagcattagtttctgctgacattaccgtgaataagaacatggttccgtttgacagccgttctgctttccaaacttccggtatccgtctgggtactcctgccatcacaacccgtggtgcgaaagaagacctgatgatcgaaattgccgaaatgatcgaaacagttctgtctaacgtggaaaatgaagaggtgatcgcacaagtacgtgcacgtgtcaatgagacaatgaagaaatatcctctttttgctgattaa

SEQ ID NO: 80172 - protein, 426 aa, Bacteroides thetaiotaomicron
MKRDDLIFDIIEKEHQRQLKGIELIASENFVSDQVMQAMGSCLTNKYAEGYPGKRYYGGCEVVDQSEQIAIDRLKEIFGAEWANVQPHSGAQANAAVFLAVLNPGDKFMGLNLAHGGHLSHGSLVNTSGIIYTPCEYNLNQETGRVDYDQMEEVALREKPKMIIGGGSAYSREWDYKRMREIADKVGAILMIDMAHPAGLIAAGLLENPVKYAHIVTSTTHKTLRGPRGGVIMMGKDFPNPWGKKTPKGEIKMMSQLLDSAVFPGVQGGPLEHVIAAKAVAFGEILQPEYKEYAKQVQKNAAILAQALIDRGFTIVSGGTDNHSMLVDLRSKYPDLTGKVAEKALVSADITVNKNMVPFDSRSAFQTSGIRLGTPAITTRGAKEDLMIEIAEMIETVLSNVENEEVIAQVRARVNETMKKYPLFAD

SEQ ID NO: 80173 - DNA, 1314 bp, Bartonella henselae
  CDS (1)..(1314): transl_table=11
atgaccaagcaaggaaatgatacacaaaagcgtttttttaatgataatttacaaacagttgatgttgcaatctttgatgcgatcaggggagagtttgagcgtcaacaacatgaaattgagttgattgcgtcagagaatattgtttcaagggcagtccttgaagctcaaggatcagttttgaccaataaatatgcagaaggttatccaggaaagcgctattatggaggttgtcaatttgttgatgtgattgaaaatttagcaattgaacgagctaaaaagctttttggtgctgattttgcaaacgttcaggctaattctggtagccaaatgaatcaggctgtgtttttagctttactaaagccgggtgatacatttatggggttggatttaaattccgggggtcatcttacacatggttcatccgttaatatgtcaggaaaatggtttaaatctatttcctatggtgtacgtaaagaagatcagcttcttgatatggaggctgttgaacgccttgcaaaggaacataaacccaaacttattatagcaggtggatcggcttattctcgcttatgggattggaaaaaatttcgtgaaattgcagatgagattggtgcttatctcctcgttgatatgtctcatattgctggtttagttgctggtggtgttcatccttcacctgttccacatgcgcacattgtgacaacgacaacgcataaatcactgagaggtcctcgtggtggtttaattttaacaaatgatgaaattttagccaaaaaaattaactcagcgattttccctggtcttcagggtggtcctttaatgcacgtgattgcagctaaagctgttgcatttgaggaagctttgcaacctgttttcaaagattatagtgccaatgttgttgctaatgcaaaaaccttagcaaaaacactacagagcaacggttttgatattgtttctggcggtacggacaatcatttattgttggttgatttgcgttcaaaaaaagtgacaggaaaatgtgccgaattggctttagggcgtgctcatattacctgcaataaaaatagtattccttttgatcttgaaacaccatttataacatctggaattcgtcttggttcacctgctgcgacgacacgtggttttgcagaaaatgaatttattgaaattgctcatatgatttcggagattcttgataatctcggtatggcaaaaagtgatgaagacaatagtgccgttgaaatggttgttaggaaaaaggtggaagatatgacaaataaatttcctctttactcttaccttcacacttgttag

SEQ ID NO: 80174 - protein, 437 aa, Bartonella henselae
MTKQGNDTQKRFFNDNLQTVDVAIFDAIRGEFERQQHEIELIASENIVSRAVLEAQGSVLTNKYAEGYPGKRYYGGCQFVDVIENLAIERAKKLFGADFANVQANSGSQMNQAVFLALLKPGDTFMGLDLNSGGHLTHGSSVNMSGKWFKSISYGVRKEDQLLDMEAVERLAKEHKPKLIIAGGSAYSRLWDWKKFREIADEIGAYLLVDMSHIAGLVAGGVHPSPVPHAHIVTTTTHKSLRGPRGGLILTNDEILAKKINSAIFPGLQGGPLMHVIAAKAVAFEEALQPVFKDYSANVVANAKTLAKTLQSNGFDIVSGGTDNHLLLVDLRSKKVTGKCAELALGRAHITCNKNSIPFDLETPFITSGIRLGSPAATTRGFAENEFIEIAHMISEILDNLGMAKSDEDNSAVEMVVRKKVEDMTNKFPLYSYLHTC

SEQ ID NO: 80175 - DNA, 1314 bp, Bartonella quintana
  CDS (1)..(1314): transl_table=11
atgaccaaacaagaaaatgacatacaaaagcgcttttttaatgataatttacaaaccgttgatgttgcaatctttgatgcaatcaatggagagtttaaacgccaacaacacgaaattgaattgattgcgtcagagaatattgtttcaagggcagttcttgaagcacaggggtcaattttaaccaataagtatgcagaaggttatccaagaaagcgcttttatgggggttgtcgctttgttgatgtcgttgaagatttagcaattgaacgagcaaaacagctttttggtgctgcttttgctaacgtccaggctcattctggtagccaaatgaatcaagctgtatttttagctttactccagcctggtgatacatttatggggttggatttaaattctggtggtcatcttactcatggttcatccgttaatatgtcaggaaaatggtttgatgttgtttcttatggtgtgcgtaaagaagatcagattcttgatatggaggagattgaacgtcttgcaaaggaacataagcccaaacttattataacgggtggatcagcttattctcgcttatgggattggaaacgattccgtgaaattgcagatgagatcggtgcttatttgctcgttgatatgtctcatattgctggtttagtcgctggtggtgttcatccttcacctgtcccacatgcacatattgtaacaactacaacgcataaatcgctacgaggtcctcgtggtggtttgatattgacaaatgacgaaactttagccaggaagattaactcagcgatttttcctggtcttcaaggtggtcctttaatgcatgtaattgcagcgaaggctgttgcatttgaggaggctttgcaacctgctttcaagaattatagtgccaatgttgttgttaatgcgaaaaccttagcaaagacattacaaagtaatggttttgatattgtttctggtgggacagacaatcatttattgttggttgatttgtgttctaaaaaagtgacaggaaaacgtgctgaattggctttagggcgtgctcatattacctgtaataaaaatgctattccttttgatcttcaagcaccatctgtaacatcggggattcgtttgggatcacctgctgcgacgacacgtggtttggcggaaaatgagtttgtacaagttggtcatatgatttcagaagttcttgatggtctccagatggcaaagagcgatgaagacaataatgccgttgaaatggctgttaggaaaaaggtagaagatatgacaaataaatttcctctttactcttatcttcccatttgttaa

SEQ ID NO: 80176 - protein, 437 aa, Bartonella quintana
MTKQENDIQKRFFNDNLQTVDVAIFDAINGEFKRQQHEIELIASENIVSRAVLEAQGSILTNKYAEGYPRKRFYGGCRFVDVVEDLAIERAKQLFGAAFANVQAHSGSQMNQAVFLALLQPGDTFMGLDLNSGGHLTHGSSVNMSGKWFDVVSYGVRKEDQILDMEEIERLAKEHKPKLIITGGSAYSRLWDWKRFREIADEIGAYLLVDMSHIAGLVAGGVHPSPVPHAHIVTTTTHKSLRGPRGGLILTNDETLARKINSAIFPGLQGGPLMHVIAAKAVAFEEALQPAFKNYSANVVVNAKTLAKTLQSNGFDIVSGGTDNHLLLVDLCSKKVTGKRAELALGRAHITCNKNAIPFDLQAPSVTSGIRLGSPAATTRGLAENEFVQVGHMISEVLDGLQMAKSDEDNNAVEMAVRKKVEDMTNKFPLYSYLPIC

SEQ ID NO: 80177 - DNA, 1248 bp, Bdellovibrio bacteriovorus
  CDS (1)..(1248): transl_table=11
atgcattcaacttcactcagcttagcccaagtggatccggaaattctggccgccatcaacaaagaatctgaacgtcagcagttcggactggaaatgatcgcttctgagaactacacctccaaagctgtgatggaagctcagggctctatcctgaccaacaagtacgctgaaggctatccaggcaaacgctactatggcggctgcgtaaacgtggacacagttgaatccctggcgattgaaagagcaaagaaacttttcggcgttcagtatgccaacgtccagccacactctggatcccaggccaacatgggtgtttacctggcggcctgcaaagcgggtgaaactatcttgggcatggatctttctcacggcgggcatctgactcacgggtctccggtgaatttcagcgggatgctgttcaaagcagcttcgtacaagctggatccggaaacaggtcgtttgaattatgatacaatccgcgctacagcgaaagaggttcagccgaaactgatcattgcgggttacagtgcttatccgcgcaccttggactttgcaaaattcaaagagatcgcagacgaagtcggcgctcaactgctggtggacatggctcactttgcaggtcttgtggcaacaggccatcacccgtccccggttccttatgctgactacatcaccacgaccacacacaaaaccttgcgcggtcctcgtggcggcatgatcctgacgaactcagaagaaaaagccaagaccatgaactcccgcatcttccctggtatccagggtggaccgttggagcacgtgattgcgggtaaagccgtggccttcggcgaagctcttaaaccagagtttaaagattattccggcaaagtggttagcaacgcaaaagttctggcagaagagcttttgtctgcaggcttcaagcttgtgaccggcggcactgacaaccatttgatcctggtggatctgagcgatcgagaaatcacggggaagctggcagaaaattctttggatgaagctggcatcactgtgaataaaaacactgtgccaaatgaaaagcgctctccatttgtcacaagtggtgttcgcatcggaactcccgctttgaccacacgtggaatgggtccagcggaaatgaagcaaattgcgaaatggatcggccaagttctgaataacgctgaagatgctggtgtgaaaaaccgcgtgcatgaagaagtaaaagagctttgcaagcagttcccgatttactaa

SEQ ID NO: 80178 - protein, 415 aa, Bdellovibrio bacteriovorus
MHSTSLSLAQVDPEILAAINKESERQQFGLEMIASENYTSKAVMEAQGSILTNKYAEGYPGKRYYGGCVNVDTVESLAIERAKKLFGVQYANVQPHSGSQANMGVYLAACKAGETILGMDLSHGGHLTHGSPVNFSGMLFKAASYKLDPETGRLNYDTIRATAKEVQPKLIIAGYSAYPRTLDFAKFKEIADEVGAQLLVDMAHFAGLVATGHHPSPVPYADYITTTTHKTLRGPRGGMILTNSEEKAKTMNSRIFPGIQGGPLEHVIAGKAVAFGEALKPEFKDYSGKVVSNAKVLAEELLSAGFKLVTGGTDNHLILVDLSDREITGKLAENSLDEAGITVNKNTVPNEKRSPFVTSGVRIGTPALTTRGMGPAEMKQIAKWIGQVLNNAEDAGVKNRVHEEVKELCKQFPIY

SEQ ID NO: 80179 - DNA, 1245 bp, Blochmannia floridanus
  CDS (1)..(1245): transl_table=11
atggtatatgatattatggattacgatattgaattgtgggatatagttaagaaagaaattaatcgtcaagaacgacatattgatttagttgcttcagaaaattatattagtatacaagctatgaaagctcaaggttctcagcttaccaataaatatgctgagggttatcctggtaagcgttattatgggggttgtaaatatgttgatttaattgaacaattagctatagatagagcaaaggtattgtttactgctgaatatgtaaatgtacaaccgcattctggatctcaggcaaatttttctgttttcaatgctttattggatcctggagatacgattttggggatgcatttgtatcatggaggacatttgactcatggatcaaaagtgaatttttcgggtaaattgtataaaactatattttatggagtggataagtttggatgtattgattatgaacaattgtgttttttaactgaaagatataggcccaagatgattataggaggattttctgcatattccggtattgtggattgggctagaatgcgtcgtatagctgattctgttggagcttacttttttgttgatatggcgcatattgcaggtttagtagcagctggagtatatcctaatccgattccttatgcacatgtagtaactgctactactcataaaacgttagcaggtcctagaggtggaataattttatctaatggagataatgatatagaattttatagaaaattagatgcttcagtttttcctggttctcagggtggtcctcttatgcatgtcattgcggctaaagcagtagcttttaaagaagccatgcatgtagattttaaaagatatcaaaaacaagttattattaattctcaaaaaatggcaaaagagtttttaaataatggttttacagtggtttcaggaattccgtataatcatttatttatattagatttaaccaatcattatattacagggaaagatgcaagtttagttttagagcgtgcaaatattattgttaataaaaattgtataccaaatgatagccatagtccgtttattacatcaggaatacgtattggaacagctgctgtgactcgtcgcggatttaatgataatgatgttcaagaagtagcgcgatggatttgtaatattttaaatgatatttctaatgaaaagattatattgaatgcaaaaaaaaatgttttggatatatgttatcgacatccagtatattaa

SEQ ID NO: 80180 - protein, 414 aa, Blochmannia floridanus
MVYDIMDYDIELWDIVKKEINRQERHIDLVASENYISIQAMKAQGSQLTNKYAEGYPGKRYYGGCKYVDLIEQLAIDRAKVLFTAEYVNVQPHSGSQANFSVFNALLDPGDTILGMHLYHGGHLTHGSKVNFSGKLYKTIFYGVDKFGCIDYEQLCFLTERYRPKMIIGGFSAYSGIVDWARMRRIADSVGAYFFVDMAHIAGLVAAGVYPNPIPYAHVVTATTHKTLAGPRGGIILSNGDNDIEFYRKLDASVFPGSQGGPLMHVIAAKAVAFKEAMHVDFKRYQKQVIINSQKMAKEFLNNGFTVVSGIPYNHLFILDLTNHYITGKDASLVLERANIIVNKNCIPNDSHSPFITSGIRIGTAAVTRRGFNDNDVQEVARWICNILNDISNEKIILNAKKNVLDICYRHPVY

SEQ ID NO: 80181 - DNA, 1254 bp, Borrelia burgdorferi
  CDS (1)..(1254): transl_table=11
atgagagatgatcaaatatttaatttaattgaaaaggaaaaattaagagaaagagagcatattgaacttattgcttctgaaaattttacatctttagagataaggcaggctgttggtagtattttaactaataagtatgccgaaggatatcctttgaatcgatactacggtggttgttcttttattgatgagattgaaactctggcaatttcgagagcaaaagagctttttggcgcaaagtatgccaatgttcaacctcatagcggatctcaggccaatatggctgccataatggctcttattagcccgggtgacaggattcttggtatgcaattatctcatggagggcatttaactcacggcagcagggtaaatttttctggtatattttttaacacttatttttatggtgtttctagagattctgagctaattgattatgatgaagttcttaaaatagctaaagattgcaggccaaatttaataatagctggagcttcttcttattcaagagaaattgattttaaaaaatttagagaaatagcagatgatgtttctgcttatcttttgtgtgatattgctcatattgcaggccttattgttgccggttttcataattcctcaattgatgtggcgcatcttactacaagtactacgcataaaactttaagagggccaagaggtggaataatactttctggaaaggattttgacaaattagtaaactttaatggaaaagagaagcctttgtttaatgctgtaaattctacagtttttcctggaactcaagggggtcctttagttcatgttattgcgggtaaggctattgcattcaaagaagctcttcaagaaagttttaaagaatacattgctaacgtaataaaaaatactaaagttatggctgaatatttcaaatcggaaggatttcgtattgttagtgggggcacagacaatcatttgtttttggttgatcttagtagttcggatctcaccggtgctgatgctgagaaattacttgagagcgtaaatattactttaaataaaaatgctattccttttgataaaaaaagcccttctttggcttctggtattagaattgggggcgctgctattacttctagaggcctaaatgaaagcgattctttaaatgttgctaaatttattgttagagctttaaaggcaaagtctgatattgaattaaaacaaataaaaaaggaagttgtaagatttattagagattttgacatgccttga

SEQ ID NO: 80182 - protein, 417 aa, Borrelia burgdorferi
MRDDQIFNLIEKEKLREREHIELIASENFTSLEIRQAVGSILTNKYAEGYPLNRYYGGCSFIDEIETLAISRAKELFGAKYANVQPHSGSQANMAAIMALISPGDRILGMQLSHGGHLTHGSRVNFSGIFFNTYFYGVSRDSELIDYDEVLKIAKDCRPNLIIAGASSYSREIDFKKFREIADDVSAYLLCDIAHIAGLIVAGFHNSSIDVAHLTTSTTHKTLRGPRGGIILSGKDFDKLVNFNGKEKPLFNAVNSTVFPGTQGGPLVHVIAGKAIAFKEALQESFKEYIANVIKNTKVMAEYFKSEGFRIVSGGTDNHLFLVDLSSSDLTGADAEKLLESVNITLNKNAIPFDKKSPSLASGIRIGGAAITSRGLNESDSLNVAKFIVRALKAKSDIELKQIKKEVVRFIRDFDMP

SEQ ID NO: 80183 - DNA, 1254 bp, Borrelia garinii
  CDS (1)..(1254): transl_table=11
atgagagatgatcaaatatttaatttaattgagaaagagaaattaagagaaaaagaacatattaagcttattgcatctgaaaattttacatctttagagataaggcaagctgttgggagtattttaactaataaatatgcggaaggataccctttgaatcgatattatggtggatgttcttttgttgatgagattgaaagtttagcaattttaagggcaaaagagctttttggtgcaaagtatgccaatgttcagcctcatagcggatctcaggctaatatggctgctataatggctcttattaaccctggtgacaggattcttggtatgcaattgtctcatggagggcatttaacacatggtagtagggtaaatttttctggcatattttttaacacttatttttatggcgtttctagagattctgagttgattgattatgatgaggttcttaaaatagctagagattgtagaccaaatttaataatagctggagcttcttcttattcaagagaaattgattttaaaaaatttagggaaatagcagacgatgtttctgcttatcttttgtgtgatattgcccatattgcgggccttattgttgccggttttcataattcttcgattgatgtagcacatcttactacaagtactacccataaaactttaagagggccaagaggtggaataatactttctggaaaagattttgacaaattggtaacctttaatggaaaagagaaagctttgtttaatgctgtaaattctacagttttccccggcactcaaggaggtcctttagttcatgttattgcagggaaggctattgcattcagagaggctcttcaagaaagttttagagaatacattgctaacgtaataaaaaatactaaagttatggctgaatatttcaaatcggaaggatttaggattgtcagtggaggtacagacaatcatttatttttggttgatcttagtaatttggatcttacaggtgccgatgctgagaaattgcttgagggtgtaaatattactttaaataaaaatgccattccttttgataaaaaaagtccttctttagcttctggtattagaattggaggcgctgctattacttccagaggtttaaatgaaaatgattctttaaatgttgctaaatttattgttagagctttaaagacaaggtctgacatcgaattaaaacaaatcaaaaaggaagttgtaagatttattagagattttgacatgccttaa

SEQ ID NO: 80184 - protein, 417 aa, Borrelia garinii
MRDDQIFNLIEKEKLREKEHIKLIASENFTSLEIRQAVGSILTNKYAEGYPLNRYYGGCSFVDEIESLAILRAKELFGAKYANVQPHSGSQANMAAIMALINPGDRILGMQLSHGGHLTHGSRVNFSGIFFNTYFYGVSRDSELIDYDEVLKIARDCRPNLIIAGASSYSREIDFKKFREIADDVSAYLLCDIAHIAGLIVAGFHNSSIDVAHLTTSTTHKTLRGPRGGIILSGKDFDKLVTFNGKEKALFNAVNSTVFPGTQGGPLVHVIAGKAIAFREALQESFREYIANVIKNTKVMAEYFKSEGFRIVSGGTDNHLFLVDLSNLDLTGADAEKLLEGVNITLNKNAIPFDKKSPSLASGIRIGGAAITSRGLNENDSLNVAKFIVRALKTRSDIELKQIKKEVVRFIRDFDMP

SEQ ID NO: 80185 - DNA, 1299 bp, Bradyrhizobium japonicum
  CDS (1)..(1299): transl_table=11
atgacctcagccaaaaccgcctccgcgcccgattcgtttttcaccgcctcgctcgaccaggccgacccggaaatcgcagccgccatcaagggcgagctcggccggcagcgccatgaggtcgagctgatcgcctccgagaacatcgtcagccgtgccgtgctggaagcgcagggttcggtgatgaccaacaaatatgcggaaggttatccgggcgcgcgttactatggcggttgtgagtgggtcgacgtcgccgagaacctcgcgatcgaccgcgccaagaagctgtttggcgctggcttcgccaacgtccagccgaactccggcagccagatgaaccaggcggtgttcctggcgctgctccagcccggcgacaccttcatgggcctcgacctcgcggccggcggccatctcacccatggctcgcccgtcaacatgagcggcaagtggttcaaggccgcgcactataccgtgcgccgcgaggaccagatcatcgacatggacgcggtccagaagcaggccgaggagatcaagccgaagctgatcgtcgccggcggctcggcctattcgcgcgcctgggacttcaagcgtttccgcgagatcgcggacagtgtcggcgcttacctcctggtcgacatggcccacttcgccggcctcgtcgccggcggcgtgcatgcctcgccggtgccgtatgcgcacgtcaccacaacgacgacgcacaagtcgctgcgcggtccgcgcggcggcctgatcctctctaacgacgagacactcgccaagaagctcaactcggcgatcttcccgggcctgcagggcggccccctgatgcatgtgatcgcggcgaaggcggtcgccttcggcgaggcgctgcgtccggacttcaaggtctatgcgaagaacgtcgtcgagaacgccaaagcgctggccgaggcgatgaagagccacgggttcgatattgtgtccggcggtaccgacaaccatctgatgctggtcgacctcaggccgaagggcctgaagggcaacgtctcggagaaggcgctggtccgcgcagccatcacctgcaacaagaacggcattcccttcgaccccgaaaagcccttcgtgacctcgggtctgcgtctcggcaccccggcggctacgacccgcggtttcggcgtcgctgaattccagcaggtcggcggcatgatcgccgaggttctcaacgcgatcgcgcagtccgacgacggcaaggcgccgctggtggaagccgcgatcaaggaacgggtcaaggcgctcaccgaccggttcccgatctatcagtaa

SEQ ID NO: 80186 - protein, 432 aa, Bradyrhizobium japonicum
MTSAKTASAPDSFFTASLDQADPEIAAAIKGELGRQRHEVELIASENIVSRAVLEAQGSVMTNKYAEGYPGARYYGGCEWVDVAENLAIDRAKKLFGAGFANVQPNSGSQMNQAVFLALLQPGDTFMGLDLAAGGHLTHGSPVNMSGKWFKAAHYTVRREDQIIDMDAVQKQAEEIKPKLIVAGGSAYSRAWDFKRFREIADSVGAYLLVDMAHFAGLVAGGVHASPVPYAHVTTTTTHKSLRGPRGGLILSNDETLAKKLNSAIFPGLQGGPLMHVIAAKAVAFGEALRPDFKVYAKNVVENAKALAEAMKSHGFDIVSGGTDNHLMLVDLRPKGLKGNVSEKALVRAAITCNKNGIPFDPEKPFVTSGLRLGTPAATTRGFGVAEFQQVGGMIAEVLNAIAQSDDGKAPLVEAAIKERVKALTDRFPIYQ

SEQ ID NO: 80187 - DNA, 1317 bp, Brucella suis
  CDS (1)..(1317): transl_table=11
atgtctcaagccaacgccgccacgaaagcgtcttcggacgttttcttcaatgcaagcctcgaggacatcgatcccgagattttcggtgcaatccgcaacgaacttggtcgccagcgccatgaaatcgagctgatcgcttcggaaaacatcgtttcgcgcgctgttctggaagcacagggttccatcctcaccaacaaatatgccgaaggctatccgggcaagcgctattatggcggctgccagtatgtcgatgtcgtggaagaactggcgatcgaacgcgccaagaagcttttcagtgccgaattcgccaatgttcagccgaattccggcagccagatgaatcaggcggttttcctcgcgctgcttcagccaggcgataccttcatgggcctcgaccttaattcaggtggccacctgacccacggttcgccggtcaatatgtccggcaagtggttcaatgtcgtgtcctacggcgtgcgcaaggacgatcatctgctcgacatggacgaagtcgcccgcctcgcacgcgaaaacaagcccaagcttatccttgcaggcggcacggcctattcgcgtatctgggactggaagcgtttccgcgagatcgccgatgaagtgggcgcttatctcatggtcgatatggcgcatattgccggtctcgtggctggcggtcagcatccgtcgccggttccccatgcccatgtctgcaccacgacaacgcacaaatcgcttcgcggtccgcgcggcggcatgatcctcaccaatgatgccgatattgccaagaagatcaattcggctgtcttccccggccttcagggcggcccgctgatgcatgtcatcgccggtaaggctgttgcctttgccgaggcgttgaagcttgagttcaagctctatgcgaagaatgtggtggataacgcccgtgcgcttgccgaggaattgaagtcgcacggcctcgacattgtttcgggcggcaccgacaaccatctcatgctggtcgatctgcgcccgaagaacgcaaccggcaagcgggcggaagccgctctcggacgcgccaacatcacctgcaacaagaacggcattcccttcgaccctgaaaagccgtttgtgacctccggcgtccgtcttggcacgcctgccggcaccacgcgcggcttcggcgttgcggaattcaaggaaatcggttcgctgatcgccgaggttctcgacggtttgaaggtcgccaattccgacgaaggcaatgcggctgtcgaacaggccgtgaaggaaaaggtcatcgccctgaccggccgtttcccgatgtacggctatcagggataa

SEQ ID NO: 80188 - protein, 438 aa, Brucella suis
MSQANAATKASSDVFFNASLEDIDPEIFGAIRNELGRQRHEIELIASENIVSRAVLEAQGSILTNKYAEGYPGKRYYGGCQYVDVVEELAIERAKKLFSAEFANVQPNSGSQMNQAVFLALLQPGDTFMGLDLNSGGHLTHGSPVNMSGKWFNVVSYGVRKDDHLLDMDEVARLARENKPKLILAGGTAYSRIWDWKRFREIADEVGAYLMVDMAHIAGLVAGGQHPSPVPHAHVCTTTTHKSLRGPRGGMILTNDADIAKKINSAVFPGLQGGPLMHVIAGKAVAFAEALKLEFKLYAKNVVDNARALAEELKSHGLDIVSGGTDNHLMLVDLRPKNATGKRAEAALGRANITCNKNGIPFDPEKPFVTSGVRLGTPAGTTRGFGVAEFKEIGSLIAEVLDGLKVANSDEGNAAVEQAVKEKVIALTGRFPMYGYQG

SEQ ID NO: 80189 - DNA, 1254 bp, Buchnera aphidicola subsp
  CDS (1)..(1254): transl_table=11
atgttaaataataaaatagatttttcaaaatatgatccaaaactatggtttgcaatagaacaagaaaaaaaaagacaagaaaatcatatagaattaatagcatcggaaaattatacgagtaattatgtaatggatgtacagggttcacaattgactaataaatatgcagaaggttatcctggaaaaagatattatggtggttgtgagtatgtagatataatagaagaattagcaattgaacgagcaaaaaaattatttaacgccgattatgctaatgttcaaccacattctggctctcaagctaatttttctgtttataccgcattgttaaatcctggtgatacaatattaggtatgaagttatcacatggtggtcatttgactcatggatcatctgtcaatttttcaggtaaaatgtataatgttatttcctatggagtagatgaaaatggtgaaattaattatgaagaattattaagattgacgaaaaagtataaaccaaaaatgattattggtggtttttcagcatattctggcatttgtaactggaaaaaaatgcgatttattgcagataacgcggatgcttattttgttgttgatatggctcatgttgctggtttagtagcagctggaatctatccaaatccaattaattatgctcatgttgttacgagtacaactcataaaacattagcgggacctagaggcggtcttattcttgctaaaaatggagatgatattttatataaaaaattaaacttatcagtttttcctggagcacaaggtggaccattaatgcatgtaattgcagcaaaagctattgcatttaaagaagctttagaaccaaagtttaaaacatatcaaaaacaaatagtaaaaaactctaaagttatggttgaaagatttttagaaaaaggatataaaatcatatctggacatacttttaatcatttgtttctaattgatttaaccaataaaaaaataacaggaaaagatgctgatattattttaagtaaagcaaatataactgttaataaaaatacgatacctaatgatttaaaaagtccttttattacttcaggcatacgtattggtactgccgctgttactagaagaggattcaaagaaaatgaggtctctagaatatcagattggataactagtattttaaataatgttgatgatcataataatgttcttcaaataaaaaagaaagtattagaaatgtgtttaaaatatcccgtgtacatttga

SEQ ID NO: 80190 - protein, 417 aa, Buchnera aphidicola subsp
MLNNKIDFSKYDPKLWFAIEQEKKRQENHIELIASENYTSNYVMDVQGSQLTNKYAEGYPGKRYYGGCEYVDIIEELAIERAKKLFNADYANVQPHSGSQANFSVYTALLNPGDTILGMKLSHGGHLTHGSSVNFSGKMYNVISYGVDENGEINYEELLRLTKKYKPKMIIGGFSAYSGICNWKKMRFIADNADAYFVVDMAHVAGLVAAGIYPNPINYAHVVTSTTHKTLAGPRGGLILAKNGDDILYKKLNLSVFPGAQGGPLMHVIAAKAIAFKEALEPKFKTYQKQIVKNSKVMVERFLEKGYKIISGHTFNHLFLIDLTNKKITGKDADIILSKANITVNKNTIPNDLKSPFITSGIRIGTAAVTRRGFKENEVSRISDWITSILNNVDDHNNVLQIKKKVLEMCLKYPVYI

SEQ ID NO: 80191 - DNA, 1254 bp, Buchnera aphidicola subsp
  CDS (1)..(1254): transl_table=11
atgtttaatacaaaaatagaattttcaaaatatgatccagaattatggaaagcgatagatcaagaaaaaaatagacaagaaaaccatatagaattaatcgcatcagaaaattatactagtaattacgttatgcatgtacaaggttcacaattaactaacaaatatgcagaaggttatcctgaaaaacgttactatggtggttgcaaatatgtagatattatagaaaaattagcgattaatcgagctaaaaaactctttaatgctgattatgccaacgttcaacctcattcaggatctcaagctaattttgctgtttatacagcactgttaaatcctggtgatacaatattaggcatgaaattatcgcacggaggtcatttaacacatggttcttctgtaaatttttcagggaaaacatataatgttattgggtatggagtagataaaaaaggaaatattgactatcaagaaattttaacattagcaaagaaatataaacctaaaatgattattggtggtttttcagcctattctggcatttgtaattggtcaaaaatgcgcgatattgctgacgaaattaacgcttattttgttgttgatattgctcacgttgctggtttaatagcggcgaatctttatcctaatcctatagattatgcacatgttgtaacaagtacgacacataaaacattagcaggtcctcgaggtggtttaattttagctaaaaatggaactaatactttctataaaaaaataaatttatctgtttttccaggagcacaaggtggaccgcttatgcatgttattgcagcaaaagctattgcttttaaagaagctttagaacctgcttttaaaatatatcaaaaacaggtaattaaaaatgctcaagttatggttcaatcttttttaaaaaaagattatcaaattgtatccggaaacacatttaatcatttatttttactagatttaacaagcaaaaatataactggacaagaagctgatattgctttgggtaaatgtaatataactgttaataaaaatactattccaaatgatcttagaagtccttttattacatcaggaattcgtattgggacacctgcggttacaaaaagaggttttaaagaaaacgaaatgttacaaatatcagattggatcgttcatattttaaataatattaaagataaaaatagtcttcttggcataaaaaatgaagtattaaaactctgttcaaaatatcctgtctatatttaa

SEQ ID NO: 80192 - protein, 417 aa, Buchnera aphidicola subsp
MFNTKIEFSKYDPELWKAIDQEKNRQENHIELIASENYTSNYVMHVQGSQLTNKYAEGYPEKRYYGGCKYVDIIEKLAINRAKKLFNADYANVQPHSGSQANFAVYTALLNPGDTILGMKLSHGGHLTHGSSVNFSGKTYNVIGYGVDKKGNIDYQEILTLAKKYKPKMIIGGFSAYSGICNWSKMRDIADEINAYFVVDIAHVAGLIAANLYPNPIDYAHVVTSTTHKTLAGPRGGLILAKNGTNTFYKKINLSVFPGAQGGPLMHVIAAKAIAFKEALEPAFKIYQKQVIKNAQVMVQSFLKKDYQIVSGNTFNHLFLLDLTSKNITGQEADIALGKCNITVNKNTIPNDLRSPFITSGIRIGTPAVTKRGFKENEMLQISDWIVHILNNIKDKNSLLGIKNEVLKLCSKYPVYI

SEQ ID NO: 80193 - DNA, 1245 bp, Campylobacter jejuni
  CDS (1)..(1245): transl_table=11
atgagtttagaaatgtttgataaagaaatttttgatttaacaaacaaagagttagagcgtcaatgtgaaggtcttgaaatgatagcgagtgaaaatttcactttacctgaagtaatggaagttatgggaagtatcttgacaaacaaatacgcagaaggttatccgggtaaaagatattatggtggttgtgaatttgttgatgagattgaaactctagctattgaaagatgtaaaaaactttttaattgtaaatttgctaatgttcagcctaattcaggttctcaagctaatcaaggtgtttatgcggctttgattaatccaggtgataaaattttaggaatggatttaagtcatggcggacatttaactcatggtgcaaaagtaagttcttcgggcaaaatgtatgaaagctgtttttacggcgtagaacttgatggaagaattgattatgaaaaagtaagagaaattgctaaaaaagaaaaaccaaaacttatagtttgtggagctagtgcttatgcaagagtgattgattttgctaaatttagagaaattgctgatgaaataggtgcctatctttttgctgatatagcacatattgcaggtcttgttgtggcaggtgagcatccaagtccttttccatacgctcatgtagtaagctcaactacacataaaactttgcgtggcccaagaggtggtattattatgacaaatgatgaagagcttgctaaaaaaattaattctgccatttttccaggtattcaaggtggtcctttgatgcatgtaattgctgcaaaagcagtaggatttaaatttaatcttagcgatgagtggaaagtttatgcaaaacaagtaagaactaatgctcaagttttagctaatgttttaatggatagaaaatttaaacttgttagcgatggaacggataatcaccttgttttaatgagttttttagatcgtgaatttagtggaaaagatgcagatttagctcttggaaatgcaggtattactgcaaataaaaataccgttccaggagagattagaagtccttttatcacaagtggattaagacttggaactccagcccttactgccagaggttttaaagaaaaagaaatggaaattgtgtcaaattatattgcagatattttagatgatgttaataatgaaaaattacaagagaatattaaacaagaattaaaaaaacttgcaagtaattttattatttatgaaagggctatgttttga

SEQ ID NO: 80194 - protein, 414 aa, Campylobacter jejuni
MSLEMFDKEIFDLTNKELERQCEGLEMIASENFTLPEVMEVMGSILTNKYAEGYPGKRYYGGCEFVDEIETLAIERCKKLFNCKFANVQPNSGSQANQGVYAALINPGDKILGMDLSHGGHLTHGAKVSSSGKMYESCFYGVELDGRIDYEKVREIAKKEKPKLIVCGASAYARVIDFAKFREIADEIGAYLFADIAHIAGLVVAGEHPSPFPYAHVVSSTTHKTLRGPRGGIIMTNDEELAKKINSAIFPGIQGGPLMHVIAAKAVGFKFNLSDEWKVYAKQVRTNAQVLANVLMDRKFKLVSDGTDNHLVLMSFLDREFSGKDADLALGNAGITANKNTVPGEIRSPFITSGLRLGTPALTARGFKEKEMEIVSNYIADILDDVNNEKLQENIKQELKKLASNFIIYERAMF

SEQ ID NO: 80195 - DNA, 1245 bp, Campylobacter jejuni
  CDS (1)..(1245): transl_table=11
atgagtttagaaatgtttgataaagaaatttttgatttaacaaacaaagagttagagcgtcaatgcgaaggtcttgaaatgatagcgagtgaaaatttcactttacctgaagtaatggaagttatgggaagtatcttgacgaacaaatacgcagaaggttatccaggtaaaagatattatggtggttgtgaatttgttgatgagattgaaactctagctattgaaagatgtaaaaaactttttaattgtaaatttgctaatgttcagcctaattcaggttctcaagctaatcaaggtgtttatgcggctttgattaatccaggtgataaaattttaggaatggatttaagtcatggtggacatttaactcatggtgcaaaagtaagttcttcgggtaaaatgtacgaaagttgtttttacggcgtagaacttgatggaagaattgattatgaaaaagtaagagaaattgctaaaaaagaaaagccaaaattaatagtttgtggagctagtgcttatgcaagagtgattgattttgctaaatttagagaaatcgctgatgaagtaggcgcctatctttttgctgatatagcacatattgcaggtcttgttgtagcaggcgaacatccaagtccttttccacacgctcatgtagtaagttcaactacgcataaaactttgcgtggcccaagaggtggtattattatgacaaatgatgaagagcttgctaaaaaaattaattctgccatttttccaggtattcaaggtggtcctttgatgcatgtaattgctgcaaaagcagtaggatttaaatttaatcttagcgatgagtggaaagtttatgcaaaacaagtaagaaccaatgctcaagttttagctaatgttttaatggatagaaaatttaaacttgttagcgatggaacggataatcaccttgttttaatgagttttttagatcgtgagtttagcggaaaagatgcagatttagctcttggaaatgcaggtattactgcaaataaaaataccgttccaggagagattagaagtccttttatcacaagtggattaagacttggaactccagcccttactgccagaggttttaaagaaaaagaaatggaaattgtgtcaaattatattgcagatattttagatgatgttaataatgaaaaattacaaaagaatattaaacaagaattaaaaaaacttgcaagtaattttattatttatgaaagggctatgttttga

SEQ ID NO: 80196 - protein, 414 aa, Campylobacter jejuni
MSLEMFDKEIFDLTNKELERQCEGLEMIASENFTLPEVMEVMGSILTNKYAEGYPGKRYYGGCEFVDEIETLAIERCKKLFNCKFANVQPNSGSQANQGVYAALINPGDKILGMDLSHGGHLTHGAKVSSSGKMYESCFYGVELDGRIDYEKVREIAKKEKPKLIVCGASAYARVIDFAKFREIADEVGAYLFADIAHIAGLVVAGEHPSPFPHAHVVSSTTHKTLRGPRGGIIMTNDEELAKKINSAIFPGIQGGPLMHVIAAKAVGFKFNLSDEWKVYAKQVRTNAQVLANVLMDRKFKLVSDGTDNHLVLMSFLDREFSGKDADLALGNAGITANKNTVPGEIRSPFITSGLRLGTPALTARGFKEKEMEIVSNYIADILDDVNNEKLQKNIKQELKKLASNFIIYERAMF

SEQ ID NO: 80197 - DNA, 1266 bp, Carboxydothermus hydrogenoformans
  CDS (1)..(1266): transl_table=11
gtgacccatttgaacttacgcttaaaagacgtggacccggaaatttttgaggctatggaaaaggaactttcccggcagcgggaaaagattgaactcattgcttcggaaaactttgtaagtagagcggtaatggaggctatgggcagccaccttaccaacaagtacgccgaaggacttcccggaaagcggtattacggcggctgcgaatacgtggatgtggtcgaaaatctcgcccgggagcgggccaagaagctttttggggcagaacacgttaacgtccagccccattccggggctcaggccaatatggctgcgtacatggcgtttttggagccgggggacacggttttgggcatgaacctggcccacggcggtcacttaacccacggaagtccggtgaatttctccggtaagctttataactttgtgagttacggtgtagagccggataccgaaaaaataaattatgaaaaagtttttgagcttgcctacaagcataaacccaaaatgattgttgccggagcatcggcctatccccgggttatcgattttaagcatttaaaggaaattgccgatgaagtgggggcctatcttatggtggacatggcccatattgccggcctggtggcagcaggattgcatccatcacccattccttatgccgatgtggtgaccaccaccacccataaaacgttacgcggtccccgggggggagtgattttctgtaaagcggagcatgcagctaaaatcgataagaccgttttccccggggtacagggtggacctttgatgcacgtaattgccgcaaaagccgtagcttttaaagaagccttatcgccggagtttagggaataccagcagcaggtggtaaataacgctaaagctttagcggaagaactgaaaaagcagggcttaaggttagtttccggcggtaccgataatcacctgatgttagtggatgtgcgtccggtagggcttaccggtaaaagggcggagcagcttttggatgaaattggcgtaacggtaaataaaaacgccattccgtacgaccccgagtcgcccaacgtaacttcgggaattagaattggtaccccagcggtaaccacccgggggatgaaagaaggagaaatggccgaaattgccgaaataatagctctggtcttaaagaatcctgaaaacgaagacaaacaccgggaagcagcccggaaagtacgggatcttttaaaccgcttccctctgtacgataaacttccgtacaacgattaa

SEQ ID NO: 80198 - protein, 421 aa, Carboxydothermus hydrogenoformans
MTHLNLRLKDVDPEIFEAMEKELSRQREKIELIASENFVSRAVMEAMGSHLTNKYAEGLPGKRYYGGCEYVDVVENLARERAKKLFGAEHVNVQPHSGAQANMAAYMAFLEPGDTVLGMNLAHGGHLTHGSPVNFSGKLYNFVSYGVEPDTEKINYEKVFELAYKHKPKMIVAGASAYPRVIDFKHLKEIADEVGAYLMVDMAHIAGLVAAGLHPSPIPYADVVTTTTHKTLRGPRGGVIFCKAEHAAKIDKTVFPGVQGGPLMHVIAAKAVAFKEALSPEFREYQQQVVNNAKALAEELKKQGLRLVSGGTDNHLMLVDVRPVGLTGKRAEQLLDEIGVTVNKNAIPYDPESPNVTSGIRIGTPAVTTRGMKEGEMAEIAEIIALVLKNPENEDKHREAARKVRDLLNRFPLYDKLPYND

SEQ ID NO: 80199 - DNA, 1290 bp, Caulobacter crescentus
  CDS (1)..(1290): transl_table=11
gtgatgacccaaaccgacctcagcgcctttttcggcgcggacctcgccaccgcggaccgcgacatcttcgatcgcatcggtcgcgagctgggtcgccagcagaaccagatcgagctgatcgcctcggagaacatcgtctccaaggccgtgcttgaggcccagggctcgatcctgaccaacaagtacgccgaaggctatccgggcaagcgctactatggcggctgcgaatatgtcgacgagatcgagacgatcgcgatcgagcgcgccaaggcgctgttcggcgcgggcttcgccaatgttcagccgcactcgggctcgcaggccaaccaagcggtgttcatggcgctgctgcagccgggcgacaccttcctgggcatggacctcgcagccggcggccatttgacgcacggcagccccgccaaccagtcgggcaagtggttcaagccgatttcctactcggtccgccagcaggaccagctgatcgactatgacggcgtcgccgaggtcgcccaacgcgagaagcccaagctgatcatcgccggcggcagcgcctacagccgcgagatcgacttcgccaagttccgcgagatcgccgactcgatcggcgcctatctgatggtggacatggcgcactacgccggcctgatcgccggcggcgcctatgccaacccgatcccgcacgcccacatcgtcaccacgaccacgcacaagacgctgcgcggcccgcgcggcggcttggtgctgaccaacgacgaagcgatcatcaagaaggtcaattcggcggtgttccccggcctgcagggcggcccgctggagcacgtcatcgcggccaaggccgtcgctttcggtgaagcgctgcagccttcgttcaaggactatgcgcgacaagttgtcgcgaacgcgcgggccctggccgaggcgctgctgaagtcgggcgtgaatatcgtctcgggcggcaccgacagccacctgatgctggtcgacctgcgcccgaagggcgtgaccggccgcgacgccgagcacagcctcgagcgcgcctacatgacctgcaacaagaacggcgtgccgttcgacactgcgccgttcacgatcacttcgggcattcgcctgggcacgccggccggtacgacgcgcggcttcaaggaagccgagttcacgcgcgttggcgagctgatcggcgaggtcgtcaacggcctggcggtcaatggtccggaaggcaacgccgccgtcgaggccaaggttcgcgaagaagtgctggccttgacgggtcgcttcccgatctacaactaa

SEQ ID NO: 80200 - protein, 429 aa, Caulobacter crescentus
MMTQTDLSAFFGADLATADRDIFDRIGRELGRQQNQIELIASENIVSKAVLEAQGSILTNKYAEGYPGKRYYGGCEYVDEIETIAIERAKALFGAGFANVQPHSGSQANQAVFMALLQPGDTFLGMDLAAGGHLTHGSPANQSGKWFKPISYSVRQQDQLIDYDGVAEVAQREKPKLIIAGGSAYSREIDFAKFREIADSIGAYLMVDMAHYAGLIAGGAYANPIPHAHIVTTTTHKTLRGPRGGLVLTNDEAIIKKVNSAVFPGLQGGPLEHVIAAKAVAFGEALQPSFKDYARQVVANARALAEALLKSGVNIVSGGTDSHLMLVDLRPKGVTGRDAEHSLERAYMTCNKNGVPFDTAPFTITSGIRLGTPAGTTRGFKEAEFTRVGELIGEVVNGLAVNGPEGNAAVEAKVREEVLALTGRFPIYN

SEQ ID NO: 80201 - DNA, 1494 bp, Chlamydophila abortus
  CDS (1)..(1494): transl_table=11
atggtttcattgttgcataaatttttagaaaatgcttcggggaagaaggggcaggatctagcttctaccgcatacttagctgcattagatcatcttttacattcttttccttcgattgggaaaagcattatcgatgaattgaagagtcagcgttcacgcttaaagatgattgcttctgagaattatgcttctatttcagttcagcttgctatggggaacttgcttacagataagtattgcgaggggagcccctttaagcggttctattcttgttgtgagaatgtagatgctatcgagtgggaatgtgtggaaacggctaaagaacttttcggagcggaaagtgcttttgtacaaccacattcgggtgcagatgcgaatttattagccatcatggcaattattacgcagaaaattcaagggcctgccgttaagcgtttgggatataaaacgattaatgatcttacggataaagaatatacggaattaaaagctgagataggttctcacgtctgtttaggaccttcgctgaactccggagggcatttaacccatggaactgtacgtttaaatatcatgtccaagttgatgcgttgtgtgccttatgaagtgaataaaaagacggagtgtttcgattattcggagatcgcacgtttagtacgaacatataaacctacagtactcattgctgggtattcttcatattccagaagattgaatttttccaccctaaaacaaatagctgatgattgtggagctgttttatgggtagatatggcgcattttgctggtctggttgctggcggtgtatttatcgaagaggaaaatccgattccgtttgccgacattattactacgacaactcataagactttgcgaggacctcgtggaggtttagttttagcatccaaagaatatgatgcagtgattaatcgcgcttgtcctttgatgatgggagggcctttgccgcatgttattgcagccaaggctgttgcgttaaaagaagcgctaactgtcgactttaaaaagtacgcgcatcaggttgtggacaacgcgagaactttagctgagcattttcaaaaacagggattacgcttgcttactggcggtacagataaccacatgttaattatagatctaacttctctagggatatctggacgcattgctgaggacatattaagttctgtaggtattgctgtgaatcgcaataccataccatcggatgctgtagggaagtgggatacctcagggatacgtttgggaacacctgctttaacaactctcggtatgggcagtgatgagatggaagaagttgcgaatattattgtgaaagtattgcgaaatattactttgagacgtaatgctgatgatagttttagtaaaagtgaaggagagcttccagaaaacattgctgaagaagcaagagctcgagtcgcaggcttattatcgcggttcccgctttatcctgaaatcgatctggaaactttagtttag

SEQ ID NO: 80202 - protein, 497 aa, Chlamydophila abortus
MVSLLHKFLENASGKKGQDLASTAYLAALDHLLHSFPSIGKSIIDELKSQRSRLKMIASENYASISVQLAMGNLLTDKYCEGSPFKRFYSCCENVDAIEWECVETAKELFGAESAFVQPHSGADANLLAIMAIITQKIQGPAVKRLGYKTINDLTDKEYTELKAEIGSHVCLGPSLNSGGHLTHGTVRLNIMSKLMRCVPYEVNKKTECFDYSEIARLVRTYKPTVLIAGYSSYSRRLNFSTLKQIADDCGAVLWVDMAHFAGLVAGGVFIEEENPIPFADIITTTTHKTLRGPRGGLVLASKEYDAVINRACPLMMGGPLPHVIAAKAVALKEALTVDFKKYAHQVVDNARTLAEHFQKQGLRLLTGGTDNHMLIIDLTSLGISGRIAEDILSSVGIAVNRNTIPSDAVGKWDTSGIRLGTPALTTLGMGSDEMEEVANIIVKVLRNITLRRNADDSFSKSEGELPENIAEEARARVAGLLSRFPLYPEIDLETLV

SEQ ID NO: 80203 - DNA, 1494 bp, Chlamydophila caviae
  CDS (1)..(1494): transl_table=11
atggcatcgttgttgcataaatttttagaaaatgcttcggggaagaaaggtcaggacctagcttctaccgcatatttagctgcattagaccatcttttgcactcctttccttcgattgggaagagcgttattgatgagctcaaggggcaacgctctcgtttaaagatgatagcttctgaaaattacgcctctatttcagttcagcttgctatgggaaacttacttacagataagtattgtgagggaagtccatttaagcgattttattcttgctgcgagaatgttgatgctattgagtgggagtgtgctgaaacagctaaagaactctttggcgcagaaagtgctttcgtgcagccccattccggagccgatgcgaatttattggcgatgatggcaattattactcagaaaatccaaggtcctgctgttaaacgtttgggatacaaaacgattaacgatcttacagataaagagtatgctgaattaaaggctgagataggttctcacgtctgtctaggtccttcattaaattcaggagggcatttgacacatggaacagtacgtatgaatgtgatgtcaaaattgatgcgttgtttgccttatgaagtgaataagaagacagaacgttttgattatgctgaaattgcacgtttagtgcgtacacataagcctacagtgttagttgctggatattcttcttattcgcgtagattaaatttttccaccctaaaacagattgctgatgattgcggagctgttttatgggtagacatggcacattttgcaggacttgttgctgggggtgtttttgtcgaagaagaaaatcctattccttttgctgatattgtcactacgacaacgcataaaactctacgaggacctcgtggaggtttggttttagcttctaaagaatatgatgggataatcaatagagcttgtcctttaatgatgggtggtcccttgcctcatgttattgctgcgaaagccgtagcattaaaagaagctctcactgtggattttaaaaagtacgctcatcaggttgtggataatgcgagaactttagcagagcatttccaaaagcaaggattacgtttgcttacaggcggtacggataatcatatgttgattattgatctgacttctctaggtatttctggacgcatagccgaagatattttaagttctatcggtattgcagtaaaccgcaatacgataccatcggatgcagtgggtaaatgggatacttcaggaatacgtttgggaacacctgctttaaccactctcggtatgggcagtgatgaaatggaagaagttgcgaatattattgtgaaagtattgcgaaatattactttgagacgtaatgctgatgatagttttagtaaaagtgaaggagagcttccagaaaacattgctcaagaagctagagcacgagtcgcagacttattatcgcggttcccgctttatcctgaaatcgatctggaaactttagtttag

SEQ ID NO: 80204 - protein, 497 aa, Chlamydophila caviae
MASLLHKFLENASGKKGQDLASTAYLAALDHLLHSFPSIGKSVIDELKGQRSRLKMIASENYASISVQLAMGNLLTDKYCEGSPFKRFYSCCENVDAIEWECAETAKELFGAESAFVQPHSGADANLLAMMAIITQKIQGPAVKRLGYKTINDLTDKEYAELKAEIGSHVCLGPSLNSGGHLTHGTVRMNVMSKLMRCLPYEVNKKTERFDYAEIARLVRTHKPTVLVAGYSSYSRRLNFSTLKQIADDCGAVLWVDMAHFAGLVAGGVFVEEENPIPFADIVTTTTHKTLRGPRGGLVLASKEYDGIINRACPLMMGGPLPHVIAAKAVALKEALTVDFKKYAHQVVDNARTLAEHFQKQGLRLLTGGTDNHMLIIDLTSLGISGRIAEDILSSIGIAVNRNTIPSDAVGKWDTSGIRLGTPALTTLGMGSDEMEEVANIIVKVLRNITLRRNADDSFSKSEGELPENIAQEARARVADLLSRFPLYPEIDLETLV

SEQ ID NO: 80205 - DNA, 1494 bp, Chlamydia muridarum
  CDS (1)..(1494): transl_table=11
atgacttctttattagataaatatttgagaaatatttccgggaaaggacagcaaagtttagcatccgtagcttatttagcagcattagatcatctattacactctttcccatccataggacaaagcatagtacaagaattgaaaagtcagcgatctcgtttgaaaatgattgcttcagagaacttttcttctctatctgttcagcttgctatgggtaatttactcacagataagtattgtgagggaagtccattcaagcgtttttattcttgttgtgagaatgtggacgctattgagtgggagtgcgtggagacggcaaaggaattatttggtgcagaaagtgcttgtgttcagccacattctggagctgatgcaaacttactggctattatgtcgattattacgcagaagatccaaagcccagctgttcagagactgggatacaagacaatcaacgatctcccggaacaagagtatgaggctttaaaggccgaaatgtctcaatacaaatgcctaggcccgtctttaaattctggcggacatttaacgcatgggactgtgcgtataaatgttatgtctaaattgatgcattgtcttccttatgaggtcaacttagataccgagttatttgattatgacgtgatagcgaaaatagcgaaagaacataggcctactgttcttattgcgggctactcttcttattctagacgattaaactttgctacactgaagcaaattgcggaagattgcggtgcagttttatgggtggatatggctcatttcgcaggattagttgctggaggtgtttttatcggagaagaaaatcctattccttatgcagatatcgttacaacaactactcataagactctgcgagggccaagaggggggcttgttttagctaaaaaagaatattctgatactctaaacaaagcttgtccgttaatgatgggaggtccgcttcctcatgtaattgctgccaaagcagtggctttgaaagaggctatgacaataaatttcaggaaatatgcgcaccaggttgtcgaaaatgctcgaactttagctgaaatttttcagcgtaatggtttgagattattaactggaggaaccgataatcatatgctgattatcgacctgacttctcttggagttcctggacgtatcgcggaggatatgttaacctctgtaggtattgcggtgaatcggaattctattccatcggatgcttctggacagtggaaaacttcgggtattcggttaggtacacctgctctaacaacattaggtatgggtagtgctgaaatggaggaagttgcgaatattatcgcgaaagtattgcgaaatattactgtgagacgcaatgctgagggcagttctagtaaaagtgagggagtgctatcggaggagatcgctcaagaagcgagacaacgagtagctgatttattaggaagattccctctttaccctgaaatcgatctggaaacgctagtttag

SEQ ID NO: 80206 - protein, 497 aa, Chlamydia muridarum
MTSLLDKYLRNISGKGQQSLASVAYLAALDHLLHSFPSIGQSIVQELKSQRSRLKMIASENFSSLSVQLAMGNLLTDKYCEGSPFKRFYSCCENVDAIEWECVETAKELFGAESACVQPHSGADANLLAIMSIITQKIQSPAVQRLGYKTINDLPEQEYEALKAEMSQYKCLGPSLNSGGHLTHGTVRINVMSKLMHCLPYEVNLDTELFDYDVIAKIAKEHRPTVLIAGYSSYSRRLNFATLKQIAEDCGAVLWVDMAHFAGLVAGGVFIGEENPIPYADIVTTTTHKTLRGPRGGLVLAKKEYSDTLNKACPLMMGGPLPHVIAAKAVALKEAMTINFRKYAHQVVENARTLAEIFQRNGLRLLTGGTDNHMLIIDLTSLGVPGRIAEDMLTSVGIAVNRNSIPSDASGQWKTSGIRLGTPALTTLGMGSAEMEEVANIIAKVLRNITVRRNAEGSSSKSEGVLSEEIAQEARQRVADLLGRFPLYPEIDLETLV

SEQ ID NO: 80207 - DNA, 1323 bp, Chlorobium tepidum
  CDS (1)..(1323): transl_table=11
atggacaacgatattctgaaacggctcgaccccgaggtcttcgaggcgattgccaatgaaacaaaacgccaaaccgaaacgctcgaactgatcgcttcggagaacttcaccagcaaggcggtcatggaagcttgcggctcggtgatgaccaacaagtacgccgagggctaccccggcaagcgctactacggcggctgcgaatttgttgatgtggccgagaacctcgcccgcgaccgcgccaagaagcttttcggctgtgagtacgtcaacgtgcagccgcactccggttccagcgccaacatggcggtgcttttcgccgtgctcaagccgggcgacgccatcatgggcctcgacctctcccacggcggccacctgactcacggcagcaaggtgaacttctccggccagttctttgatgcccactcttacggcgttgacaaagagactggcatcatcgacatgaacaaggtcgaagagatggccaggcgagtcaagccgaagctcatcatcaccggcgcgagtgcctactcgcagggctttgacttcaaggcgttccgcgaagtcgccgacaaagtcggtgcgctgctcatggccgacatcgcccacccggcgggcctcgttgctgcgggcctttctgccaacccgatgccgcattgccacttcgtgaccaccaccacgcacaagaccctgcgcggcccacgcggcggcatgatcatgatgggcaaggatttcgagaatccgctcggcctgactatcaacaccaagaacggctcgcgcgtcaagatgatgtccgaggtgatcgacgccgaggtgatgcccggcatccagggcggcccgctcatgcacatcatcgccggcaaggcggttgccttcggcgaagcgctccagcccgagtttaaagcctatgcgcagcagatcaaggacaacgccgctgcaatggccgcgaagttcctcgcggcgggctaccacatcgtcagcggtggtacgaaaaaccacctcatgctgctcgacctgcgcaacaagaacgtcaacggcaaggtagccgaaaacctcctgcacgaagccggaatcacggttaacaaaaacatggtgcctttcgacgacaaatcgccgttcgtcaccagcggcatccgcatcggcaccccggcgatgaccactcgtgggatgaaggttgccgaagctgaaaagatcgttgaattcatcgatcgcgtcatcagcgctgccaacgacgccaacgtcgccgatgtctgcaaggccgtcagggctgaagttcgcgagctgtgccttggcttcccgctcaacaactacggttctctcgtctaa

SEQ ID NO: 80208 - protein, 440 aa, Chlorobium tepidum
MDNDILKRLDPEVFEAIANETKRQTETLELIASENFTSKAVMEACGSVMTNKYAEGYPGKRYYGGCEFVDVAENLARDRAKKLFGCEYVNVQPHSGSSANMAVLFAVLKPGDAIMGLDLSHGGHLTHGSKVNFSGQFFDAHSYGVDKETGIIDMNKVEEMARRVKPKLIITGASAYSQGFDFKAFREVADKVGALLMADIAHPAGLVAAGLSANPMPHCHFVTTTTHKTLRGPRGGMIMMGKDFENPLGLTINTKNGSRVKMMSEVIDAEVMPGIQGGPLMHIIAGKAVAFGEALQPEFKAYAQQIKDNAAAMAAKFLAAGYHIVSGGTKNHLMLLDLRNKNVNGKVAENLLHEAGITVNKNMVPFDDKSPFVTSGIRIGTPAMTTRGMKVAEAEKIVEFIDRVISAANDANVADVCKAVRAEVRELCLGFPLNNYGSLV

SEQ ID NO: 80209 - DNA, 1248 bp, Chromobacterium violaceum
  CDS (1)..(1248): transl_table=11
atgttcgctgctgaccagacgatcgccaaattcgacccagaactcgccgccgccatcgcggctgaatgccaacgccaggaagatcacatcgagctgatcgcctcggaaaactacaccagcccggccgtcatggaagcccaaggctcccagctgaccaacaagtacgccgaaggctatccgggcaagcgcttctacggcggttgcgagcatgtggatgtcgtcgagcaactggccatcgaccgcgtcaagcagctgttcggcgccgaatacgccaacgtgcagccgcactccggctcccaggccaaccaggcggtgtacttctccatcctgaagccgggcgacaccgtgatgggcatgaacctgggccacggcggccacctgacccacggctccccggctaacctgtccggcaagatgttcaacatcgtcgcctacggcctgaacgacaaggaagaaatcgactacgacgacatggagcgcgtggcgatggaaaccaagccgaagctgatcatcggcggcgcgtccgcctacgcgctgcgcttcgacttcgagcgcatgggccagatcgccaagaaagtcggcgcctacttcatggtcgacatggcccactacgccggcctggtggccgcgggcctgtacccgaacccggtgccgcacgccgacttcgtgacctccaccacccacaagaccctgcgcggtccgcgcggcggcatcatcctggccaaggcagagttcgagaagagcatcaacagcaacgtgttcccgacgctgcagggcggtccgctggagcatgtgatcgccgccaaggccgtcgccttcaaggaagcgctgcagccggcattcaaggaataccagcagcaggtgctgaagaacgccgccatcatggccaagaccctggccgagcgcggtttgcgcatcgtgtccggccgcaccgagagccacgtgttcctggtggacctgcgcgccaagggcctgaccggcaagcaagccgacgcgctgctgggccgcgcccacatcaccgtcaacaagaacgcgatcccgaacgatccggaaaccccgttcgtcacctccggcatccgcatcggctccccggccatcaccacccgcggcttcaaggaagccgaggccatcgaagtggccaatatggtcgccgacgtgctggacaacccgaacgacgacgcgctgatcgcccgcatcgccgagaaggccaccgcgctgtgccaccgcttcccggtgtacgccaagtaa

SEQ ID NO: 80210 - protein, 415 aa, Chromobacterium violaceum
MFAADQTIAKFDPELAAAIAAECQRQEDHIELIASENYTSPAVMEAQGSQLTNKYAEGYPGKRFYGGCEHVDVVEQLAIDRVKQLFGAEYANVQPHSGSQANQAVYFSILKPGDTVMGMNLGHGGHLTHGSPANLSGKMFNIVAYGLNDKEEIDYDDMERVAMETKPKLIIGGASAYALRFDFERMGQIAKKVGAYFMVDMAHYAGLVAAGLYPNPVPHADFVTSTTHKTLRGPRGGIILAKAEFEKSINSNVFPTLQGGPLEHVIAAKAVAFKEALQPAFKEYQQQVLKNAAIMAKTLAERGLRIVSGRTESHVFLVDLRAKGLTGKQADALLGRAHITVNKNAIPNDPETPFVTSGIRIGSPAITTRGFKEAEAIEVANMVADVLDNPNDDALIARIAEKATALCHRFPVYAK

SEQ ID NO: 80211 - DNA, 1236 bp, Clostridium acetobutylicum
  CDS (1)..(1236): transl_table=11
atggattttgaaaatataaaagtaagtgattctgaagtctattctatcatagaagaagaaaatgcgagacaagaaaataatatagaacttattgcatctgaaaacttcacaagcaaagctgtaatggaagctatgggttcatatttaactaataagtatgcagaaggatatccaggaaaaagatattatggtggatgttacgtagttgataaagttgaagagcttgcacgtgaaagggcaaaaaaactttttaaagcagagcatgctaatgtacagccacattcaggttcacaagctaatatggctgtttactttgcagtattgaagccgggagacactataatgggaatgaacctaacagatggaggtcatttaactcatggaagtccagttaatttttcaggaaaactctttaatataattgcctatggtgtaagtgatgaaacagaacaaatagattatgaagcgtttagaaaaaaagccttggagtgtaagccaaagatgatagtatctggtgctagtgcatattcaagaattattgattttaagaaaataagagaaatatgcgatgaagtaggagcatatatgatggtagatatggctcatatagcaggacttgtagcagcaggacttcatccgtcaccaattccatatgctgattttgtaacaacaactactcataagactttaaggggaccaagaggcggagcaattttctgcaaggaaaagtatgcaaaggacattgataaatctgtattccctggaatgcaggggggacctttaatgcacataattgcaggaaaagcagtatgctttggagaagctttaaaggatgattttaaagattatgcacagcaaatagtaaataatgcaaaagtgtttgcagatgaacttacaaaatacggttttagaatagtttcaggtggaactgataatcaccttttattagttgatttaacgaacaaaaatataacaggaaaagatgcagaacatcttcttgattcagttggaataactgcaaacaaaaatactataccatttgagaaaaagagtccttttataacaagtggaataagaatgggtacaccttcagttacaactagaggatttaaggaagaggaaatgaaaaaagtagcgtatttcataaactatgttatagagcatagagatgaagatttaagtgaaataaggaaacaagtttcagaattatgtagtggatttcctatatataagtaa

SEQ ID NO: 80212 - protein, 411 aa, Clostridium acetobutylicum
MDFENIKVSDSEVYSIIEEENARQENNIELIASENFTSKAVMEAMGSYLTNKYAEGYPGKRYYGGCYVVDKVEELARERAKKLFKAEHANVQPHSGSQANMAVYFAVLKPGDTIMGMNLTDGGHLTHGSPVNFSGKLFNIIAYGVSDETEQIDYEAFRKKALECKPKMIVSGASAYSRIIDFKKIREICDEVGAYMMVDMAHIAGLVAAGLHPSPIPYADFVTTTTHKTLRGPRGGAIFCKEKYAKDIDKSVFPGMQGGPLMHIIAGKAVCFGEALKDDFKDYAQQIVNNAKVFADELTKYGFRIVSGGTDNHLLLVDLTNKNITGKDAEHLLDSVGITANKNTIPFEKKSPFITSGIRMGTPSVTTRGFKEEEMKKVAYFINYVIEHRDEDLSEIRKQVSELCSGFPIYK

SEQ ID NO: 80213 - DNA, 1233 bp, Clostridium perfringens
  CDS (1)..(1233): transl_table=11
atgaattttgacaacttagaaagagaagatgagcaaattgcacatcttgttcaaaaggaaaaggaaaggcaagaaaatagtatagagcttatagcttcagaaaactttgttagcaaagctgttatggaagctatgggatcatatttaacaaataaatatgctgagggttatccttcaaaaagatactatggtggatgtcacgtagtagatgaggttgaagatttagcaagagaaagagtaaaaaaattatttggggctgagcatgctaatgtacaaccacattcaggatcacaagctaatatggctgtttatttttcaatattagagccaggtgatactgtattaggaatggatttaagccatggaggacacttaactcatggttcatcagttaacttttcaggtagattatttaatttcgtgtcatatggtgtagataaagaaacagaaacaataaactatgaaactgtaagagaattagctcttaaacataaacctaaattaatagttgcaggagctagtgcatattcaagaattatagattttaaaactttaagagagatagcagatgaggtaggagcatacttaatggttgatatagctcacattgcagggcttgtagctacaggcttacatccatcaccagttccttatgctgattttgttacatcaacaactcataaaactttaagaggaccaagaggaggattaatactttgtaaagaaaaatttgcaaaagtattagataaaaatattttcccaggaatacaaggtggtcctttaatgcatataatagctgcaaaggctgtttgttttaaagaagcattagaaccaagttttaaaacatatatggagcaagttgttaaaaatgcacatgttttagcagaagctttagaagcttatggatttaaattagtttcaaatggaactgataaccatttaatacttgttgatttaactaataaagatataactggtaaagatgcagaaattcttttagatagtataggaataactttaaataaaaatactgtaccaaatgaaacaagaagcccatttgttactagtggtgttagaataggaactcctgctataacaactagaggatttaaagaagaagaaatgaaagaaatagcttctataataaatgatgctattaaagaaaaagatggagatttagaaccattaaaagcaagagttaaagctttatgtgctaagtatcctttatattaa

SEQ ID NO: 80214 - protein, 410 aa, Clostridium perfringens
MNFDNLEREDEQIAHLVQKEKERQENSIELIASENFVSKAVMEAMGSYLTNKYAEGYPSKRYYGGCHVVDEVEDLARERVKKLFGAEHANVQPHSGSQANMAVYFSILEPGDTVLGMDLSHGGHLTHGSSVNFSGRLFNFVSYGVDKETETINYETVRELALKHKPKLIVAGASAYSRIIDFKTLREIADEVGAYLMVDIAHIAGLVATGLHPSPVPYADFVTSTTHKTLRGPRGGLILCKEKFAKVLDKNIFPGIQGGPLMHIIAAKAVCFKEALEPSFKTYMEQVVKNAHVLAEALEAYGFKLVSNGTDNHLILVDLTNKDITGKDAEILLDSIGITLNKNTVPNETRSPFVTSGVRIGTPAITTRGFKEEEMKEIASIINDAIKEKDGDLEPLKARVKALCAKYPLY

SEQ ID NO: 80215 - DNA, 1290 bp, Corynebacterium diphtheriae
  CDS (1)..(1290): transl_table=11
atgacagatgacatccgttaccaatcgctaaccgagcttgatccagaggttgcggctgcaatcactggtgagcttgaccgccagcgttccacgctcgagatgatcgcgtctgaaaacttcgttccacgcgcagttttgcaggcacaaggatccgtattcaccaacaaatacgctgaaggttacccagggcgtcgctactacggtggctgtgaaaacgccgacatcgttgaagatctagcgcgtaaccgtgccaaagaggtcttcggtgctgagtttgccaacgtgcagcctcacgcaggtgcacaggctaatgctgctgtgttgatggcactagccaaccccggcgataagatcatgggcctgtccttggctcatggtggccacctgacccacggcatgcacttgaacttctccggaaagctctatgaagttgcagcctacgaggtagaaccagataatttccgcttggacatggacaagatccgtgaacaggctttgaaagagaaaccacaggttctgattgctggctggtccgcatacccacgccaccaggacttcgcagcattccgttctatcgctgatgaggttgacgctaagttgtgggtcgatatggctcacttcgctggtcttgtggctgctggtttgcacccatcgccagttccttacgctgatgttgtgtccacgaccgttcacaagacgttgggtggtccacgctcgggcatgatcttgtccaagcaggagtatgctaagaagctgaactccgcagtcttcccaggccagcagggcggacctttgatgcacgcaattgttgctaaggctgttgccatgaagattgctgctactgaggagttcaaggatcgccagcagcgcacccttgatggtgctcagattatcgctgagcgcttgacaggtgctgattgcaaagctgcaggtgtagacgtactgaccggtggcaccgatgtccacttggttcttgtcgatctgcgtaattcccagatggatggccagcaggctgaagatctcctccatgaggtcggaatcaccgtgaaccgtaacgcggttccattcgacccacgtcctccaatggtcacctccggtttgcgtatcggtacaccagctttggctacccgtggcttcgatgctgcaggtttcaccgaggttgccgacatcatcgctaccgcattggcacaaggcgccggtgctgacaccgagcagctgcgcgcacgcgtcgctaagcttgccgagcagtacccactctacgagggccttgaggactggaagctcctctaa

SEQ ID NO: 80216 - protein, 429 aa, Corynebacterium diphtheriae
MTDDIRYQSLTELDPEVAAAITGELDRQRSTLEMIASENFVPRAVLQAQGSVFTNKYAEGYPGRRYYGGCENADIVEDLARNRAKEVFGAEFANVQPHAGAQANAAVLMALANPGDKIMGLSLAHGGHLTHGMHLNFSGKLYEVAAYEVEPDNFRLDMDKIREQALKEKPQVLIAGWSAYPRHQDFAAFRSIADEVDAKLWVDMAHFAGLVAAGLHPSPVPYADVVSTTVHKTLGGPRSGMILSKQEYAKKLNSAVFPGQQGGPLMHAIVAKAVAMKIAATEEFKDRQQRTLDGAQIIAERLTGADCKAAGVDVLTGGTDVHLVLVDLRNSQMDGQQAEDLLHEVGITVNRNAVPFDPRPPMVTSGLRIGTPALATRGFDAAGFTEVADIIATALAQGAGADTEQLRARVAKLAEQYPLYEGLEDWKLL

SEQ ID NO: 80217 - DNA, 1548 bp, Corynebacterium efficiens; identical to SEQ ID NO: 79723
  CDS (244)..(1548): transl_table=11

SEQ ID NO: 80218 - protein, 434 aa, Corynebacterium efficiens
MTDAHHADDVRYQPLSEIDPEVAQAIAGELSRQRDTLEMIASENFVPRSVLQAQGSVLTNKYAEGYPGRRYYGGCEQVDIIEDLARDRAKALFDAEFANVQPHSGAQANAAVLMTLADPGDKIMGLSLAHGGHLTHGMKLNFSGKLYEVAAYGVDPDTMLVDMDQVREQAIKEQPKVIIAGWSAYPRHLDFAAFREIADEVGATLWVDMAHFAGLVAAGLHPSPVPYADVVSSTVHKTLGGPRSGIILAKQDYAKKLNSSVFPGQQGGPLMHAIAAKATALKIAGTDQFAERQARTIEGARILAERLTASDAKAAGIDVLTGGTDVHLVLADLRNSEMDGQQAEDLLHEVGITVNRNAVPFDPRPPMVTSGLRIGTPALATRGFDATAFTEVADIIGTALAQGKSADLESLQARVTKLAEQYPLYEGLEDWTIV

SEQ ID NO: 80219 - DNA, 1305 bp, Corynebacterium glutamicum
  CDS (1)..(1305): transl_table=11
atgaccgatgcccaccaagcggacgatgtccgttaccagccactgaacgagcttgatcctgaggtggctgctgccatcgctggggaacttgcccgtcaacgcgatacattagagatgatcgcgtctgagaacttcgttccccgttctgttttgcaggcgcagggttctgttcttaccaataagtatgccgagggttaccctggccgccgttactacggtggttgcgaacaagttgacatcattgaggatcttgcacgtgatcgtgcgaaggctctcttcggtgcagagttcgccaatgttcagcctcactctggcgcacaggctaatgctgctgtgctgatgactttggctgagccaggcgacaagatcatgggtctgtctttggctcatggtggtcacttgacccacggaatgaagttgaacttctccggaaagctgtacgaggttgttgcgtacggtgttgatcctgagaccatgcgtgttgatatggatcaggttcgtgagattgctctgaaggagcagccaaaggtaattatcgctggctggtctgcataccctcgccaccttgatttcgaggctttccagtctattgctgcggaagttggcgcgaagctgtgggtcgatatggctcacttcgctggtcttgttgctgctggtttgcacccaagcccagttccttactctgatgttgtttcttccactgtccacaagactttgggtggacctcgttccggcatcattctggctaagcaggagtacgcgaagaagctgaactcttccgtattcccaggtcagcagggtggtcctttgatgcacgcagttgctgcgaaggctacttctttgaagattgctggcactgagcagttccgtgaccgtcaggctcgcacgttggagggtgctcgcattcttgctgagcgtctgactgcttctgatgcgaaggccgctggcgtggatgtcttgaccggtggcactgatgtgcacttggttttggctgatctgcgtaactcccagatggatggccagcaggcggaagatctgctgcacgaggttggtatcactgtgaaccgtaacgcggttcctttcgatcctcgtccaccaatggttacttctggtctgcgtattggtactcctgcgctggctacccgtggtttcgatattcctgcattcactgaggttgcagacatcattggtactgctttggctaatggtaagtccgcagacattgagtctctgcgtggccgtgtagcaaagcttgctgcagattacccactgtatgagggcttggaagactggaccatcgtctaa

SEQ ID NO: 80220 - protein, 434 aa, Corynebacterium glutamicum
MTDAHQADDVRYQPLNELDPEVAAAIAGELARQRDTLEMIASENFVPRSVLQAQGSVLTNKYAEGYPGRRYYGGCEQVDIIEDLARDRAKALFGAEFANVQPHSGAQANAAVLMTLAEPGDKIMGLSLAHGGHLTHGMKLNFSGKLYEVVAYGVDPETMRVDMDQVREIALKEQPKVIIAGWSAYPRHLDFEAFQSIAAEVGAKLWVDMAHFAGLVAAGLHPSPVPYSDVVSSTVHKTLGGPRSGIILAKQEYAKKLNSSVFPGQQGGPLMHAVAAKATSLKIAGTEQFRDRQARTLEGARILAERLTASDAKAAGVDVLTGGTDVHLVLADLRNSQMDGQQAEDLLHEVGITVNRNAVPFDPRPPMVTSGLRIGTPALATRGFDIPAFTEVADIIGTALANGKSADIESLRGRVAKLAADYPLYEGLEDWTIV

SEQ ID NO: 80221 - DNA, 1260 bp, Coxiella burnetii
  CDS (1)..(1260): transl_table=11
atgtatgagcctacgttgaccgtagagagtttcgattccgaattggcgggagcgattcgggacgaaaggcgtcggcaggagcaccatgttgagttgattgcctcggagaactatgtcagtccgcgggtgttggaacttcaggggtcggtgttgaccaataagtacgctgaagggtatcctggcaggcgttattacggtggttgtgaatttgtcgatattgccgagcaattggcgattgatcgagcgaaggaactgtttggggcggattatgcgaacgttcagccgcattcgggttcgcaagccaatgcagaagcctatatggcgctaatgaatccaggcgataccttgcttgccatggatttgtcgcatggagggcacttgacccacggctctcctgtcagtttttcaggtaagttctataaagccgtgcattacggtttaaatgcgcatggtgatattgattacgagcaagcggcccaactagcgcaagagcataaaccgaaagtcatcctagcgggattttctgctttttcgggtatcgtcgattggcagcgttttcgcgaaatcgcggacagtgttaacgcctactttatgactgacattgcacatgtggctggtttagtggccgccggcgtctatccttcgccggttcaaattgctgatgttacgacgaccacgacccataaaacattacgaggccctcgtgcgggtttaattttagcaaaagccaaccccgaactagaaaagcgtttaaattccgccgtatttccaggttctcagggcggacctttgatgcacattattgcggccaaagcagttgccttcaaagaagcgatgcaaccggaatttaaaacttatgcgcaacagattttaaaaaatgctaaggcaatggcggaggtgatgaaggagcgcggttatacgattgtctcgggtggcacgcaaaatcacctatttttagtgagcttgttagataaaaacatatcgggcaaagaagccgaagcggctttaggacgagctaatattacagttaacaaaaataccgttcccggtgaaacccgctcgccttttgtgactagtggccttcgcattggcactcccgccattaccacccgagggtttaaagaaaaagaagcttctcaattggcgcattgggtttgtgatattttagatgatattcataacgaaaaagtcatcgccgatgtcaaacaaaaagcccatgaattgtgtgggaaatttccggtgtatcaggaactcgactga

SEQ ID NO: 80222 - protein, 419 aa, Coxiella burnetii
MYEPTLTVESFDSELAGAIRDERRRQEHHVELIASENYVSPRVLELQGSVLTNKYAEGYPGRRYYGGCEFVDIAEQLAIDRAKELFGADYANVQPHSGSQANAEAYMALMNPGDTLLAMDLSHGGHLTHGSPVSFSGKFYKAVHYGLNAHGDIDYEQAAQLAQEHKPKVILAGFSAFSGIVDWQRFREIADSVNAYFMTDIAHVAGLVAAGVYPSPVQIADVTTTTTHKTLRGPRAGLILAKANPELEKRLNSAVFPGSQGGPLMHIIAAKAVAFKEAMQPEFKTYAQQILKNAKAMAEVMKERGYTIVSGGTQNHLFLVSLLDKNISGKEAEAALGRANITVNKNTVPGETRSPFVTSGLRIGTPAITTRGFKEKEASQLAHWVCDILDDIHNEKVIADVKQKAHELCGKFPVYQELD

SEQ ID NO: 80223 - DNA, 1251 bp, Dechloromonas aromatica
  CDS (1)..(1251): transl_table=11
atgttttccgcgaaagacaccctggcaaaagttgaccctgaactctggcaggccattcaggccgaagtacagcgtcaggaagaccacatcgaactgatcgcgtccgaaaactacgtgagcaaggctgtcatggaagcccaaggctcccagctgaccaacaagtacgccgaaggctacccgggtaagcgctactacggtggctgcgaatacgttgacgtcgccgagcagatcgccatcgaccgcctgaagaagctgttcggcgccgaagccgccaacgtccagccgaattccggttcgcaggccaaccaggccgtgctgatggccttcgccaagccaggcgacaccatcatgggcatgagcctggccgaaggcggccacctgacccacggcatggcgctgaacatgtccggcaagtggttcaacgtcgtctcctacggcctgaatgaaaaggaagagatcgactacgacaagatggaagcgctggcccgcgagcacaagccgaagatcatcgtcgccggtgcctccgcctacgccctgcgcatcgactgggaacgcttcgccaagatcgccaaggaagtcggcgccattttctgggtcgacatggcccactacgccggtctgatcgccgccggattctacccgaacccggtgcctttcgccgatgtcgtgacctcgaccacgcacaagaccctgcgcggcccacgcggtggtgtcatcctgatgaaggccgagcacgaaaaggccctcaattccgccatcttcccgggcctgcaaggcggtccgctggagcatgtgatcgccgccaaggccgtcgccttcaaggaagccgcgacgcccgagttcaagaactaccaggaacaggtcatcaacaacgcccgcgtcatggcgcgcgtgctcggtgaagagcgcggtctgcgcatcgtttctggccgtaccgaaagccacgtcttcctgctcgacctgcgcgccaagaacatcaccggcaaggatgccgaagccgctctgggccgcgcccacatcacggtcaacaaaaacggcatcccgaacgacccgcagaagccgtttgttacctccggcatccgtatcggttcgccggccatgacgacgcgcggtttcaccgaaatcgaagccgagcagatcgctcatctggttgctgatgtgctggaagcaccgagcgacgaagccgtggccgcaactgttcgcgagaaagtttcggccctgtgcaagaagttcccggtctacggcgcctaa

SEQ ID NO: 80224 - protein, 416 aa, Dechloromonas aromatica
MFSAKDTLAKVDPELWQAIQAEVQRQEDHIELIASENYVSKAVMEAQGSQLTNKYAEGYPGKRYYGGCEYVDVAEQIAIDRLKKLFGAEAANVQPNSGSQANQAVLMAFAKPGDTIMGMSLAEGGHLTHGMALNMSGKWFNVVSYGLNEKEEIDYDKMEALAREHKPKIIVAGASAYALRIDWERFAKIAKEVGAIFWVDMAHYAGLIAAGFYPNPVPFADVVTSTTHKTLRGPRGGVILMKAEHEKALNSAIFPGLQGGPLEHVIAAKAVAFKEAATPEFKNYQEQVINNARVMARVLGEERGLRIVSGRTESHVFLLDLRAKNITGKDAEAALGRAHITVNKNGIPNDPQKPFVTSGIRIGSPAMTTRGFTEIEAEQIAHLVADVLEAPSDEAVAATVREKVSALCKKFPVYGA

SEQ ID NO: 80225 - DNA, 1248 bp, Dehalococcoides ethenogenes
  CDS (1)..(1248): transl_table=11
atgagctttttaaagacctcggacccggcagtttataatgccataatgcaggaaaccacccgcttaaaagaaacaattgacctcattgcttcggaaaactataccagcaaagctgttttagaagctcagggttccgttttcaccaataaatacgccgaaggttaccccggtaaaagatactacgccggatgtgaatatgcagatgccatagaagagctggctatagacagggccaagaccctgttccatgccgaacacgccaacgtccagccccattccggggctcaggctaacatggctgcctatttcgccatggtaaaacccggtgataccataatgggtcttaccctttcccatgggggacacctgacccatggttcaaaggccaatttcaccggtaaactttatcacgtaattgaatacgggctgaatgccgaaaccgaacggattgattatgacaatctggagaaactggctttggagcatcgcccccgcctgattgttaccggcgcttcggcctatccccggatactggattttgaacgtttcagagctatctgtgacaaggtagacgccaagctgatggtggatattgcccatattgccggtctggtagccgccgggcttcatccttcacccgtaccttacgctgacgtggttacctctaccagccacaaaaccctgcgcggcccgcggggcggctttatcctctgcaaagagcaatacgccaaagctattgaccaggcagtattcccggtaatacagggcggacccctcatgcaggtagttgccgccaaagcagtggcttttcaggaagctatgcagcccggttttgttacttaccagaagaaaatccttgaaaatacccaggtaatggctgaggaactccgcaaactggggcttcgcctggtttcaggcggcactgacaaccatttggtgctggtggaccttagtcccatcggggtaaacggttatgatgcccagctggcactgcgcagagccggtattgtaatcaaccgcaataccgtaccctttgccgaaaaccagaccgccaatgttccggctggtatacgcctgggctgtccggcggccaccagccgcggattcggtccggctgaaatccgccagacggtaagctggattggcaagatactcaaaaatataggcaacgaagatatagagaaacaggtgctggctgaggtaattcacctatgccgcaaattccctgttcccggcatagacgcataa

SEQ ID NO: 80226 - protein, 415 aa, Dehalococcoides ethenogenes
MSFLKTSDPAVYNAIMQETTRLKETIDLIASENYTSKAVLEAQGSVFTNKYAEGYPGKRYYAGCEYADAIEELAIDRAKTLFHAEHANVQPHSGAQANMAAYFAMVKPGDTIMGLTLSHGGHLTHGSKANFTGKLYHVIEYGLNAETERIDYDNLEKLALEHRPRLIVTGASAYPRILDFERFRAICDKVDAKLMVDIAHIAGLVAAGLHPSPVPYADVVTSTSHKTLRGPRGGFILCKEQYAKAIDQAVFPVIQGGPLMQVVAAKAVAFQEAMQPGFVTYQKKILENTQVMAEELRKLGLRLVSGGTDNHLVLVDLSPIGVNGYDAQLALRRAGIVINRNTVPFAENQTANVPAGIRLGCPAATSRGFGPAEIRQTVSWIGKILKNIGNEDIEKQVLAEVIHLCRKFPVPGIDA

SEQ ID NO: 80227 - DNA, 1248 bp, Dehalococcoides sp
  CDS (1)..(1248): transl_table=11
atgagctttttaaagacctcggatccggcagtttataatgccataatgcaggaaaccacccgcctgaaagaaacaattgacctcatagcttcagaaaactataccagcaaggctgttttggaagctcaaggttcagttttcaccaataaatacgccgaaggataccccggcaaacgatattacgcaggctgtgaatacgcagacgccgtagaggaactggctatagacagggcaaagaccctgttccatgccgaacatgccaacgttcagccccattccggggctcaggctaatatggccgcctatttcgccatggtaaaacccggtgataccataatgggacttaccctttcccacggcggacacctgacccatggttcaaaggtcaattttaccggcaagctttaccatgtaattgagtacgggctgaatgccgaaaccgagcggattgactatgataatctggaaaaactggctatggaacatcgcccccgcatgattgtgaccggtgcttcagcctatccccgaatactggattttgaacgttttagggctatctgtgacaaggtggacgccaaactgatggtggatatcgcccatattgccggtctggtagccgccgggcttcatccttcaccagtgccatacgctgatgtggttacctctaccagccataaaaccctgcgcggcccgcgcggcggctttatactctgcaaagagcaatacgccaaagctattgaccaggcagtattcccggtaatgcagggcggacctcttatgcaggtagttgccgctaaagcagtggcttttcaggaagccatgcagcccggttttgtcacttaccagaaaaaaactcttgagaatacccaggtaatggctgaggaactacgcaagctgggactccgcctggtttcaggcggtaccgacaaccatctggtattggtagacttaagccccataggggtaaacggttatgacgcccagctggcactgcgcagagccggcattgtaatcaaccgcaataccgtaccctttgccgaaaaccaaactgccaacgtaccggcaggcatacgcctgggctgcccggcagcaaccagccgcggatttggtccggctgaaatccgccagactgttggctggattggcaaggtacttaaaaacataggtaacgaagacgtagaaaaacaggtactggccgaggtaattcacctctgccgcaaattccctgtacccggcatagatatataa

SEQ ID NO: 80228 - protein, 415 aa, Dehalococcoides sp
MSFLKTSDPAVYNAIMQETTRLKETIDLIASENYTSKAVLEAQGSVFTNKYAEGYPGKRYYAGCEYADAVEELAIDRAKTLFHAEHANVQPHSGAQANMAAYFAMVKPGDTIMGLTLSHGGHLTHGSKVNFTGKLYHVIEYGLNAETERIDYDNLEKLAMEHRPRMIVTGASAYPRILDFERFRAICDKVDAKLMVDIAHIAGLVAAGLHPSPVPYADVVTSTSHKTLRGPRGGFILCKEQYAKAIDQAVFPVMQGGPLMQVVAAKAVAFQEAMQPGFVTYQKKTLENTQVMAEELRKLGLRLVSGGTDNHLVLVDLSPIGVNGYDAQLALRRAGIVINRNTVPFAENQTANVPAGIRLGCPAATSRGFGPAEIRQTVGWIGKVLKNIGNEDVEKQVLAEVIHLCRKFPVPGIDI

SEQ ID NO: 80229 - DNA, 1311 bp, Deinococcus radiodurans; identical to SEQ ID NO: 79701
  CDS (85)..(1311): transl_table=11

SEQ ID NO: 80230 - protein, 408 aa, Deinococcus radiodurans
MTTADQPQAVRDDAVFDLIAQEAERQRTGLELIASENFTSAAVREAQGSVLTNKYAEGYPGKRWYGGCEVVDQVEQLAIDRVKQLFNAEWANVQPHSGSSANLAVYNALIQPGDTVLGMDLSHGGHLTHGNKANFSGMRYQMVAYQLDRETERIDMEEVRRLAHEHKPKMIIAGASAYSRVIDFAAFREIADEVGALLFADIAHIAGLIAAGEHPNALPHAHVVASTTHKTLRGPRGGIILANDPEIAKQLDRTVFPGYQGGPLEHVIAAKAVAFGEALRPEFKDYARQIIKNAQALAGEFQQKGYRVVSGGTDNHLFLLDLRPQGLNGTKATRLLDANHITISKSTLPYDTEKILHGGGIRIGTPAVTTRGMTEAHMTQVADLIDRALKGEDVQAKVHDFAGGFPLP

SEQ ID NO: 80231 - DNA, 1239 bp, Desulfovibrio desulfuricans
  CDS (1)..(1239): transl_table=11
atggacgaactgcttattcaggatccggaagtcggtcgcgccattgttcaggaagtggaacgtcagaccggcaagctggaactcatcgcctctgaaaactttgtgtcccccgcagtccgcgccgcacagggcagcgtgctgacccataaatacgccgaaggataccccggcaagcggtattacggcggttgcgaatttgtcgacgtggcggaaaacctcgccatcgaccgcgcctgcgaaatattcggcgcccagtacgccaacgtccagccccactccggcagccaggccaatatggccgtatacttttccgcgctgactcccggcgacaccattctggccatggatctgtcgcacggcggacacctgacccacggcagccccgtcaacttttcgggccggttctacaatgtggtgttctacggtgtctcgcgcgaaaccggctgcatagattatgacagcgtggcagaactggcacgcgagcaccgccccgccatgattgtggccggtgccagcgcctactcccgcatcatcgattttgcacggttccgcgccatagccgacgaagtgggttccctgcttatggtcgacatggcccacatagccggtctggtggccgccggtctgcatccttcccctgtgggcacggcgcacttcaccaccacaaccacgcacaaaaccctgcgcggtccgcgtggcggcatgattctgtcggacgaagaagccgccaaaaaactgaacagccagattttccccggcattcagggcggcccgctcatgcatgtcatcgccgccaaggctgtggccttcggcgaagcgctgcgtcccgaattcggcgcctaccagaagcaggtggtcgccaacgccgccaaactggccgccaccctgaccgatgccggttttgaactggtttccggcggcaccgacaaccacctgatgctggtggacctgacaaacaaggatatcaccggtaaagatgcccagcatgcgcttgaccttgcgggcatcaccgccaacaaaaacacggtgccttttgaaacccgctcgcctttcgtgacttcgggcatccggctgggtacccctgccctgaccacccgcggcatgaaagaagctgaaatggtcaaagtggccggctggataatcgacgcgctgggcaatatcggcaacgaaacccgtctggcggaaataagccgcgacgtggaaaagttcgcccgtcagttcccgctgttccactggtaa

SEQ ID NO: 80232 - protein, 412 aa, Desulfovibrio desulfuricans
MDELLIQDPEVGRAIVQEVERQTGKLELIASENFVSPAVRAAQGSVLTHKYAEGYPGKRYYGGCEFVDVAENLAIDRACEIFGAQYANVQPHSGSQANMAVYFSALTPGDTILAMDLSHGGHLTHGSPVNFSGRFYNVVFYGVSRETGCIDYDSVAELAREHRPAMIVAGASAYSRIIDFARFRAIADEVGSLLMVDMAHIAGLVAAGLHPSPVGTAHFTTTTTHKTLRGPRGGMILSDEEAAKKLNSQIFPGIQGGPLMHVIAAKAVAFGEALRPEFGAYQKQVVANAAKLAATLTDAGFELVSGGTDNHLMLVDLTNKDITGKDAQHALDLAGITANKNTVPFETRSPFVTSGIRLGTPALTTRGMKEAEMVKVAGWIIDALGNIGNETRLAEISRDVEKFARQFPLFHW

SEQ ID NO: 80233 - DNA, 1278 bp, Desulfotalea psychrophila
  CDS (1)..(1278): transl_table=11
gtgcacaagaccgaacgaggagatgcaatgacagctttacaacagcaagatccagaaattttttctttaatccaacaagaagaggtacgtcagcacaataagattcgtctcattgcctcagagaactatgtatcctcggctgtgcttgaggcaacaggttctattcttaccaataaatattcagaaggatatcccggcaagcgctactatgaggggcaacagcttattgaccaaatagagagcattgccattgaccgggcaaaggctgtttttggcgcagaacatgttaacgtacagccatactcaggatctcctgctaatatggccgtctatctcgccttcctaaaacctggcgacaccatcctgggaatggcacttccccacggtggacaccttacccacggttccaaggtaagtatttctggtaaatattttaatgccgtctcctatgcactcaacgaagagggcatactggattacgaagaaattcgtaacaaggcccttgaatgcaaaccaaaaattttgattgccggtcactctgcatatccaaggatactcgacttcgccaagttccgcgaaatcgccgatgaggttggggctttgctgatggttgatatggcccactttgcaggacttgttgccggtggcgttcatccctctccatttccatatgccgatgtagttaccaccaccacccacaaatccctccgcggcccacgtggggcaatgatcatgtgtaaggctgaatatgccaaggcaatcgacaaggctgtattcccgggaatgcagggcggtccacacgacagcaccaccgcagccattgccgttgccctgaaagaggctagcacagatagcttcaaaaaatataccgctcaggtagtcgaaaatgcagcaagccttgccgatgtacttattgagaaaggttttaatctggtaacaggtggcacagaaaaccaccttatgctcattgacctttccaacaaaaacattaccggcaagcaggcggcaaaggcccttgatgctgcaggcattgttctcaactgcaactctgtgccctttgataagcgcaaaccttttgatcctagcggtatccgcctcggcacctgcgcaatcacctcaaggggttttgccaaggctgagatggtaatactcggtaacatgatggacagagttgtcaataatttcgaagacagcgcagttcttgccgaaattgcccaggaagtacaagctctctgtgataaatttcctgccccaggactcgaacacattgcaaaataa

SEQ ID NO: 80234 - protein, 425 aa, Desulfotalea psychrophila
MHKTERGDAMTALQQQDPEIFSLIQQEEVRQHNKIRLIASENYVSSAVLEATGSILTNKYSEGYPGKRYYEGQQLIDQIESIAIDRAKAVFGAEHVNVQPYSGSPANMAVYLAFLKPGDTILGMALPHGGHLTHGSKVSISGKYFNAVSYALNEEGILDYEEIRNKALECKPKILIAGHSAYPRILDFAKFREIADEVGALLMVDMAHFAGLVAGGVHPSPFPYADVVTTTTHKSLRGPRGAMIMCKAEYAKAIDKAVFPGMQGGPHDSTTAAIAVALKEASTDSFKKYTAQVVENAASLADVLIEKGFNLVTGGTENHLMLIDLSNKNITGKQAAKALDAAGIVLNCNSVPFDKRKPFDPSGIRLGTCAITSRGFAKAEMVILGNMMDRVVNNFEDSAVLAEIAQEVQALCDKFPAPGLEHIAK

SEQ ID NO: 80235 - DNA, 1239 bp, Desulfovibrio vulgaris
  CDS (1)..(1239): transl_table=11
atggacgagttgctgcttcaggaccccgaggtcggcaaggccatcattctcgaaatcgaacgtcagaccggcaagcttgagctcatcgcgtcggagaacttcgtctccgccgccgtccggcaggctcagggcagcgtcctcacccacaagtacgccgaaggctaccccggcaagcgctactacggcggatgcgagttcgtcgacatcgccgagaacatcgccatcgaacgcgcccgcaccatcttcggctgcgaatacgccaacgtgcagccccattcgggcagtcaggccaacatgggtgtctatttcgcgtgcctcaagcccggcgacaccatcctcggcatgaatctctcgcacggcggtcacctgacgcacggcagccccgtcaacttttccggtcgtctcttcaacgtggtgttctacggtgtcgagaaggagactggccgcatagactacgagcaggtggccgcactcgcacgcgagcacaagccctccctcatcgtcgccggtgctagcgcctacccccgcaccatcgacttcgcccgtttccgcgccatcgcagatgaagtgggcgcgaagctcatggtcgacatggcccacatcgcaggtctggtcgccgctggctaccaccccagccccgtgcagcacgcccactacaccacgaccaccacgcacaagacgctccgcggcccgcgcggtggcatgatcctctccaccgaggacaacggcaagacgctgaacagccagatattccccggcattcagggcggcccgctcatgcatgtcatcgccgccaaggccgtggccttcggcgaggcactgcgccccgcgttcaaggagtaccagaagcaggtggtggacaacgccgccgcccttgccggtgtgctcaccgccgccgggttcgatctcgtttcgggcggtaccgacaaccacctgatgctggtcgacctcaccagcaaggacgtcaccggcaaggacgccgagatagccctcgacaaggcgggcatcaccgtcaacaagaacaccgtcccgttcgagacccgttcgcccttcgtgacctccggtgtgcgtctcggcaccccggccctcaccacccgcggcatgaaggccgccgagatggagaaggtgggcggatggatcgtggacgccatcgccaacaccaccaatgagacccgactggcggagatcagccgcgaagtggaacgcttcgcacggcagttccccctgttcgcatggtag

SEQ ID NO: 80236 - protein, 412 aa, Desulfovibrio vulgaris
MDELLLQDPEVGKAIILEIERQTGKLELIASENFVSAAVRQAQGSVLTHKYAEGYPGKRYYGGCEFVDIAENIAIERARTIFGCEYANVQPHSGSQANMGVYFACLKPGDTILGMNLSHGGHLTHGSPVNFSGRLFNVVFYGVEKETGRIDYEQVAALAREHKPSLIVAGASAYPRTIDFARFRAIADEVGAKLMVDMAHIAGLVAAGYHPSPVQHAHYTTTTTHKTLRGPRGGMILSTEDNGKTLNSQIFPGIQGGPLMHVIAAKAVAFGEALRPAFKEYQKQVVDNAAALAGVLTAAGFDLVSGGTDNHLMLVDLTSKDVTGKDAEIALDKAGITVNKNTVPFETRSPFVTSGVRLGTPALTTRGMKAAEMEKVGGWIVDAIANTTNETRLAEISREVERFARQFPLFAW

SEQ ID NO: 80237 - DNA, 1266 bp, Ehrlichia canis
  CDS (1)..(1266): transl_table=11
atggttaggtatatcttagatcacaatttacaagatatagatgtagaagtttttgactgtatttccggagaattaaataggcaaaattctcaattacagttgatagcatcagaaaattttgttagtaaagcggttttagaagctcagggttctatattcacaaataaatatgcagaaggttatcctggtaaaagatattattgtggatgccactttgcagatattgtagagaatatagcaatagaacgtttatgtaagttatttggttgtaaatttgcaaatgttcagccgcattctggttcacaagctaatcaaggtgtatttgctgcattattaaagccaggtgatacagtagttggattatcacttgattgtggaggtcatttaactcatggttctgctcctagtatttcgggtaagtggtttaatgctgttcagtatcaagttgatcgtaatactggtttgctagatatggatgagatagaaaagctagttcttgagcataagccaacattacttattgctggttcatctgcttatcctcgtacaatagatttcaaaaggtttagagaaatagctgataaagttggagcatatcttttagctgacatagctcattatgctggattaattgctgctggagagtttccttcaccttttgaatatgctcatgttgttacatctactactcataagactttacgtggtcctaggggtgcagtaataatgactaattatgaagatattcataaaaagattcaatcttctatctttcctggtatgcaaggaggtccattaatgcatgttattgctgcaaaagctgtagcatttggagaagcattgaaacctgattttaaagattatgcaaaacaaataattaaaaattctagggttttagttgaagtatttaaagaaagagggcttaatattgttacagatgggacagattctcatatagttttagttgatttacgtcctaaaggtgttacaggtaaagatgcagtgcttgcactagaaagattgggaattatttgtaataaaaatgctattccttttgatacagaaaaaccttttgtaacttctggcttgcggtttggtagtgctgctgaaacatctagaggtttacaagaatcagagtttagagagattggtaatatggtttgtgatgttattgataacttaaaagctagtgatattgttaaagcatctgttgaacaggatgtgataaaaaaagttaaagaattaacctttgcttttatttcttaa

SEQ ID NO: 80238 - protein, 421 aa, Ehrlichia canis
MVRYILDHNLQDIDVEVFDCISGELNRQNSQLQLIASENFVSKAVLEAQGSIFTNKYAEGYPGKRYYCGCHFADIVENIAIERLCKLFGCKFANVQPHSGSQANQGVFAALLKPGDTVVGLSLDCGGHLTHGSAPSISGKWFNAVQYQVDRNTGLLDMDEIEKLVLEHKPTLLIAGSSAYPRTIDFKRFREIADKVGAYLLADIAHYAGLIAAGEFPSPFEYAHVVTSTTHKTLRGPRGAVIMTNYEDIHKKIQSSIFPGMQGGPLMHVIAAKAVAFGEALKPDFKDYAKQIIKNSRVLVEVFKERGLNIVTDGTDSHIVLVDLRPKGVTGKDAVLALERLGIICNKNAIPFDTEKPFVTSGLRFGSAAETSRGLQESEFREIGNMVCDVIDNLKASDIVKASVEQDVIKKVKELTFAFIS

SEQ ID NO: 80239 - DNA, 1239 bp, Enterococcus faecalis
  CDS (1)..(1239): transl_table=11
atggattacaaaacgtatgacccagatttatggaatgcaattgcaagagaagaagagcgccaagaaaataacttggaactaatcgcatctgagaatgtcgtgtcaaaagcagttatggctgcccaaggaagtattttaacgaataaatacgcagaaggttaccctggcaaacggtactatggtggttgtgaatttatcgatatcgtagaaaatttagctatcgatcgtgccaaagaattatttggtgcaaaattcgcgaatgtacaagcccattcaggttctcaagccaatacagcggcatacctttcattggttgaaccaggtgataccattttggggatggatttatcagctggtggtcacttaacacatggttcgcccgttaactttagtggaaaaacctataattttgtcagttatggagtggatccttcaacagaagtaatcgattacgatgtcgtgcgaattttagcaagagaacatcgtccaaaactaatcgttgcaggcgcaagtgcgtattcacgaacgattgacttcaaacgtttccgtgaaatcgctgatgaagtagatgccaagttaatggttgatatggcgcatattgcaggcttggtagcttcagggttgcacccaaatccagttccgtatgctgatatcgtaacaagtacgacccataaaacattgcgtggtcctcgtggcggtttaattttgacaaatagcgaagaattggcgaaaaaagtaaatagtagtattttcccaggcattcaaggtggcccattggaacatgtgattgccggaaaagccgcagcttttaaagaagcattggatccaagttttgctgaatatagtcagcaagtgattgcaaatgcgcaagcgatgacgaaagttttcaatcaagcgccagaagctcgtttaattagtggggcaacagataaccacttattactgattgaagtgacaggttttggtttaaatggaaaagaagcagaagctattttagatagtgtaaatattactgtcaataaaaattcaattccgtttgaacaattaagtccatttaaaacaagtggtatccgtattggaacgcctgcaattacttcacgtggttttaaagaagaagatgcggtagaagttgctaaattaatcgttcaagtcttaaaagatccagaaaatacagcagttcatgatgaagtcaaagcagctgtagcagcgctaactaaaaaatatccattatataactaa

SEQ ID NO: 80240 - protein, 412 aa, Enterococcus faecalis
MDYKTYDPDLWNAIAREEERQENNLELIASENVVSKAVMAAQGSILTNKYAEGYPGKRYYGGCEFIDIVENLAIDRAKELFGAKFANVQAHSGSQANTAAYLSLVEPGDTILGMDLSAGGHLTHGSPVNFSGKTYNFVSYGVDPSTEVIDYDVVRILAREHRPKLIVAGASAYSRTIDFKRFREIADEVDAKLMVDMAHIAGLVASGLHPNPVPYADIVTSTTHKTLRGPRGGLILTNSEELAKKVNSSIFPGIQGGPLEHVIAGKAAAFKEALDPSFAEYSQQVIANAQAMTKVFNQAPEARLISGATDNHLLLIEVTGFGLNGKEAEAILDSVNITVNKNSIPFEQLSPFKTSGIRIGTPAITSRGFKEEDAVEVAKLIVQVLKDPENTAVHDEVKAAVAALTKKYPLYN

SEQ ID NO: 80241 - DNA, 1254 bp, Francisella tularensis subsp
  CDS (1)..(1254): transl_table=11
atgttcagctttgaaaaaaatagcctaaaaaataccgacaaagagatttttgatgctatagaacttgaagttaaaagacaacatgaacatgttgaacttatagcatcagaaaactatgcaagtcctgcagtaatggaggcacaagggtcacaacttacaaacaaatatgccgaaggctatcatggtaaaagatattatggtggttgtgaatttgttgatatcgctgagaaacttgccatagagagagcacagcaactatttggggttgattatgcaaatgttcaaccacattcaggctctcaagcaaatgccgctgtatataatgccgttttaaaaccaggtgatactgttcttggtatggatctaggtgctggtggacacctaacacatggtagcaaagttaatttctctggaaaaatttataattctatccaatacggcttagatgaaaatggtgatatagactacaagcaagtagcacaactagctaaagagcacaaaccaaaaatgataatagccggcttctcagcattttctggaataattaactggcaaaagttcagagaaatagcagactccgtagatgccgtacttatggcagatatagctcatgtagcaggtctagtagcagctggagtataccctaacccattcccatatgtttatgttgcaactacaactactcacaagacattaaggggacctagaggtggattaatactttgtaataataatccggaacttgcaaaaaaattccaatcagctattttccctggtattcaaggtggtcctttaatgcatgtaatagcagctaaagcagttgcatttaaagaagcattagaaccaagttttgtagactatcaaaaacaagtattaaaaaatgctaaggctatggaaaaagttttaaaacaacgtggtattaatataatctctggtggaactagtaatcatctacttttacttgatattacaaatactggtttctctggtaaagaagctgaggcggctctaggtagagcaaatatcactgttaataaaaactctatcccaaatgatccccgttctccttttgtcactagcggattaaggattggaagccctgctataacgacgagaggtttcaaagagaaagaatgtgagttagtcgctaacttattagcagatgtagtatttaattgtggtgatgaaaaagttgaaaatgaaactgctgctaaagttttagatctttgtgataagttccctgtttacaagtaa

SEQ ID NO: 80242 - protein, 417 aa, Francisella tularensis subsp
MFSFEKNSLKNTDKEIFDAIELEVKRQHEHVELIASENYASPAVMEAQGSQLTNKYAEGYHGKRYYGGCEFVDIAEKLAIERAQQLFGVDYANVQPHSGSQANAAVYNAVLKPGDTVLGMDLGAGGHLTHGSKVNFSGKIYNSIQYGLDENGDIDYKQVAQLAKEHKPKMIIAGFSAFSGIINWQKFREIADSVDAVLMADIAHVAGLVAAGVYPNPFPYVYVATTTTHKTLRGPRGGLILCNNNPELAKKFQSAIFPGIQGGPLMHVIAAKAVAFKEALEPSFVDYQKQVLKNAKAMEKVLKQRGINIISGGTSNHLLLLDITNTGFSGKEAEAALGRANITVNKNSIPNDPRSPFVTSGLRIGSPAITTRGFKEKECELVANLLADVVFNCGDEKVENETAAKVLDLCDKFPVYK

SEQ ID NO: 80243 - DNA, 1239 bp, Geobacillus kaustophilus
  CDS (1)..(1239): transl_table=11
atgaattacttgccacaacaagatccgcaagtgttcgccgctattgagcaagagcggaagcggcaacatgcgaaaattgaactgatcgcctcggaaaactttgtcagccgcgcggtcatggaagcgcaagggtcggtgctgacgaacaaatatgcggaaggctatccgggacgccgctactacggcggttgtgaatatgtcgacatcgtcgaagatttggcgcgcgagcgagcgaagcagttgtttggagcggagcatgtgaacgtccagccgcactccggggcgcaggcgaacatggccgtttatttcaccgttcttgagcacggcgacacggtgcttggcatgaacttgtcgcacggcggccatttgacgcacggcagcccggtcaatttcagcggcattcagtacaattttgtcgaatacggcgtcgatccggaaacgcatgtcattgactatgacgacgtgcgcgaaaaagcgcgccttcaccggccgaagttgatcgtcgccggcgcgagcgcctatccgcgcatcatcgacttcgccaagttccgcgagattgccgatgaagtcggcgcctatttaatggttgacatggcccatattgccggtcttgttgcggcaggtgttcatccgaatccagtgccgtacgcccatttcgttacgacgacgacgcacaaaacgctgcgcggtccgcgcggcgggatgattttatgccaggagcagttcgccaaacagatcgacaaagccattttccctggcattcaaggcggcccgctcatgcatgtcattgccgccaaagccgtcgcgctcggcgaagcgttgcaagacgactttaaagtctacgcgaagcgcgtcgtggagaatgccaaacggctcgcagccgccttgcaaaacgaaggattcactctcatttccggcggcacggacaaccatttgctgcttgtcgatttgcgcccgcagcagctgaccgggaaaacggcggagaaagtgctcgatgaggtcgggattacggtcaacaaaaacacgattccgtacgatccggaaagcccgtttgtcacaagcggcatccgcatcggcacggccgcggtcacgacgcgcggcttcggattggaagagatggacgaaatcgccgccatcatcggccttgtgctgaaaaacgtcggcagcgaacaagcgcttgaggaagcgcgccaacgcgtcgccgctttgacggaaaagtttccgctctatcaagactaa

SEQ ID NO: 80244 - protein, 412 aa, Geobacillus kaustophilus
MNYLPQQDPQVFAAIEQERKRQHAKIELIASENFVSRAVMEAQGSVLTNKYAEGYPGRRYYGGCEYVDIVEDLARERAKQLFGAEHVNVQPHSGAQANMAVYFTVLEHGDTVLGMNLSHGGHLTHGSPVNFSGIQYNFVEYGVDPETHVIDYDDVREKARLHRPKLIVAGASAYPRIIDFAKFREIADEVGAYLMVDMAHIAGLVAAGVHPNPVPYAHFVTTTTHKTLRGPRGGMILCQEQFAKQIDKAIFPGIQGGPLMHVIAAKAVALGEALQDDFKVYAKRVVENAKRLAAALQNEGFTLISGGTDNHLLLVDLRPQQLTGKTAEKVLDEVGITVNKNTIPYDPESPFVTSGIRIGTAAVTTRGFGLEEMDEIAAIIGLVLKNVGSEQALEEARQRVAALTEKFPLYQD

SEQ ID NO: 80245 - DNA, 1248 bp, Geobacter metallireducens
  CDS (1)..(1248): transl_table=11
atgtcgatcctcgaaacctttgacccggcagtagccgaggccatccgtcatgaaaccgagcgccaggagtacaatctggagctcattgcgtccgaaaactttgtctccgaagcagtgatggaggcccaggggtcggttctgaccaacaaatatgctgaagggtaccctggcaagcgatactatggcggttgccaccatgtggatgtggtggagaaccttgcaattgagcgggcgaaagaactttttggtgccgatcatgcgaacgtccagccccactccggctcccaagccaatatggcggtttatttctcggtgctgaagccgggcgacaccattctcggcatgaatctctcccacggcggccaccttacccacggtagcccggtgaacttctcgggccggttcttcaacgtggttccctatggtgtttcccaggaaaccgagacgattgacttcaacgaagtcgagcgtctggcccttgagcataagccgaagctgatcgttgtgggggccagcgcctatccacgtgttctggattttgccgccttcagggccatagccgacaaagtgggggcgctggtcatggtggacatggcccatattgcggggctcgttgctgccggccttcacccaagcccggttccctatgccgagtttgtcaccacgacaacccacaaaaccctgcgtggaccccgcggcgggatgattctctgccgcgaggaatttgccaagaccctcaattccaatattttccccggtattcagggcggccctctcatgcatgtcatcgcggccaaggcagttgccttcaaagaggctcttgcgcctgaattcaagttgtatcaggagcagattgtcaagaatgcacggacccttgctgacgaactcatgaagcgcggcttccggcttgtctccggaggtaccgacaaccacctgatgcttgttaacctgacgggcaccgagttgaccggcaaggtggccgaggaggccctcgacaaagcgggtatcacggtcaacaagaacaccgtcccctttgagacacgctctccctttgttacctccggcttccggatcggtactcctgctgccacaagtcatggactcaaagaggcggagatggtggaagttgccgctttcatcgccgaggccttggcaaatgtggggaacgaggcaaagcttgcagaggtaaaggggaaagtgaacgcccttatgggccgttttccgctctatgccagccgcctgaagtaa

SEQ ID NO: 80246 - protein, 415 aa, Geobacter metallireducens
MSILETFDPAVAEAIRHETERQEYNLELIASENFVSEAVMEAQGSVLTNKYAEGYPGKRYYGGCHHVDVVENLAIERAKELFGADHANVQPHSGSQANMAVYFSVLKPGDTILGMNLSHGGHLTHGSPVNFSGRFFNVVPYGVSQETETIDFNEVERLALEHKPKLIVVGASAYPRVLDFAAFRAIADKVGALVMVDMAHIAGLVAAGLHPSPVPYAEFVTTTTHKTLRGPRGGMILCREEFAKTLNSNIFPGIQGGPLMHVIAAKAVAFKEALAPEFKLYQEQIVKNARTLADELMKRGFRLVSGGTDNHLMLVNLTGTELTGKVAEEALDKAGITVNKNTVPFETRSPFVTSGFRIGTPAATSHGLKEAEMVEVAAFIAEALANVGNEAKLAEVKGKVNALMGRFPLYASRLK

SEQ ID NO: 80247 - DNA, 1248 bp, Geobacter sulfurreducens
  CDS (1)..(1248): transl_table=11
atgtcgattctcgaaacctttgacccgcaggtagctgaggcgatccgccatgaaaccgaacggcaggagtacaacctggagttgatcgcttccgaaaactttgtttccgaggcggtactggaagcccagggctcggtgatgaccaataagtatgccgagggataccccggtaagcgctactatggtggatgccaccatgtggacgtggtggaaaatctcgctattgagcgggccaaggagcttttcggtgccgatcatgccaacgtccagccccattcgggctcccaggcaaatatggcggtctatttttcggtgctcaagcccggcgacaccattcttgggatgaatctgtcccacggcggccacctgacccacggcagccccgtgaacttctccggccgtttcttcaacgtggttccctacggcgtgtcccaggagaccgaaacgatcgacttcaatgaggtggagcgtcttgcccttgagcataagccgaagatgatagttgtgggggcaagcgcctatccccgaaccatcgattttgccgccttccgcatcattgccgataaggtcggcgcggttatcatggttgatatggctcacattgcgggcctggttgcggccggtctccatccgagccctgttccctacgctgaattcgtgaccaccactacccataagaccctcagaggtccccgcggcgggatgatcctgtgccgtgaggagtacgccaagacgctcaattccaacatcttccccggtatccagggggggccgctcatgcatgtcatcgcggccaaggccgttgccctcaaggaggccctccagcccgagttcaaagcgtatcaggcccagatcgtgaaaaatgccaaggcccttgccgacgagctggtaaagcgcgggttccggcttgtgtccggcggcaccgataaccatctgatgctggttaacctaaccggcaccgaactgaccggcaaggtggcggaagagtctctggataaggccggcatcacggtgaacaagaacacggtgcctttcgagacccgttcaccctttgtcacctccggtttccggatcggcactcccgcagccactacccacggtctcaaggaagctgaaatggccgacgtggcgggctttatcgcagaggccctggccaacgtggacaatgatgccaaactcgccgagattaaggggagggtcaatgtgcttatgaaacgcttccccctctatgctcaccgtctttcataa

SEQ ID NO: 80248 - protein, 415 aa, Geobacter sulfurreducens
MSILETFDPQVAEAIRHETERQEYNLELIASENFVSEAVLEAQGSVMTNKYAEGYPGKRYYGGCHHVDVVENLAIERAKELFGADHANVQPHSGSQANMAVYFSVLKPGDTILGMNLSHGGHLTHGSPVNFSGRFFNVVPYGVSQETETIDFNEVERLALEHKPKMIVVGASAYPRTIDFAAFRIIADKVGAVIMVDMAHIAGLVAAGLHPSPVPYAEFVTTTTHKTLRGPRGGMILCREEYAKTLNSNIFPGIQGGPLMHVIAAKAVALKEALQPEFKAYQAQIVKNAKALADELVKRGFRLVSGGTDNHLMLVNLTGTELTGKVAEESLDKAGITVNKNTVPFETRSPFVTSGFRIGTPAATTHGLKEAEMADVAGFIAEALANVDNDAKLAEIKGRVNVLMKRFPLYAHRLS

SEQ ID NO: 80249 - DNA, 1281 bp, Gloeobacter violaceus
  CDS (1)..(1281): transl_table=11
atgcctgtgagtgacgatctgctgcgcgcaaccgatccgctggtggctggctggatcgaccgggaactgaaccggcagcgctcccacctggaactgattgccagcgagaactttacttctgcggcggtgatggctgctcagggctcggtgctcaccaacaaatacgccgagggactgcccagcaagcgctactacggcggctgcgaattcgtcgacgccgtcgagcaaattgccatcgaccgggccaaggcgctcttcggcgccgcccacgccaacgtgcagccccactcgggcgcgcaggcgaatgcggcggtctttctggcgctcttggagcgcggcgacaagattctgggcatggacctcagccacggcggccacctcacccacggctcacccgtgaaccagtcgggcatttacttcgaggcgctccactacggcgtcgatcctgcaagccaccgcatcgacttcgatcaagtacgcgaactggcccatgcccaccgcccgaaactgattatctgcggctactcggcctacccgcgcgtgatcgatttcgagtgcttccgcgagatcgcagacgaagtgggagcctacttgctcgccgacatcgcccacatcgccgggctggtggtggcgggggtgcaccccaatccgattccccactgcgacgtggtcaccaccaccacccacaagaccctgcgcgggccgcgcgggggcctcatcctcacccgcgacgaggccctgggcaagcggttcgacaaagcggtcttccccggcacccagggcggtcccctcgagcacgtgattgccgcgaaagccgtcgccttcggcgaagccctgcagcccgagtttaagacctacgccgccgatgtggtggccaacgcccgcgccctggccgagcgcctgacggcccgcggcctgaccctggtctccggcggcaccgacaaccacctgatgctggtggacctgcgctcggtggacctcaccggcaagcaggccgacctgctgatgagcgatgtgaacatcaccaccaacaaaaacacgatccccttcgatccgcagtcgccctttgtgaccagtggcctgcgcctgggctccccggcgatgaccacccgcggcctgggaacaaccgaattcggcgaaatcggcgagatcatcgccaaccgcctcacccagcccaccgacgccagggtcgtagccgactgcctggagcgggtcgcatcgctgtgcacgcgcttcgcgctctacccgcacctcggccgagtggtggccccggtgggctag

SEQ ID NO: 80250 - protein, 426 aa, Gloeobacter violaceus
MPVSDDLLRATDPLVAGWIDRELNRQRSHLELIASENFTSAAVMAAQGSVLTNKYAEGLPSKRYYGGCEFVDAVEQIAIDRAKALFGAAHANVQPHSGAQANAAVFLALLERGDKILGMDLSHGGHLTHGSPVNQSGIYFEALHYGVDPASHRIDFDQVRELAHAHRPKLIICGYSAYPRVIDFECFREIADEVGAYLLADIAHIAGLVVAGVHPNPIPHCDVVTTTTHKTLRGPRGGLILTRDEALGKRFDKAVFPGTQGGPLEHVIAAKAVAFGEALQPEFKTYAADVVANARALAERLTARGLTLVSGGTDNHLMLVDLRSVDLTGKQADLLMSDVNITTNKNTIPFDPQSPFVTSGLRLGSPAMTTRGLGTTEFGEIGEIIANRLTQPTDARVVADCLERVASLCTRFALYPHLGRVVAPVG

SEQ ID NO: 80251 - DNA, 1305 bp, Gluconobacter oxydans
  CDS (1)..(1305): transl_table=11
atgtcggaacacgccagccagtccacgctgaatcgtttctttcatgcccccctcaaggaggttgatgccgaagttgccaccatcctgaacgaggagctgacgcgccagcaggatggcatcgagctcatcgcttcggagaacatggcctcctttgccgtcatggaagcacagggttcagtgctgacgaacaagtatgcggaaggcctgccgggcaagcgctattatggcggttgcgtggatgtggaccgcgtcgagaaccttgccatcgatcgtctgaagaagatcttcggtgccgaattcgcaaacgtgcagccgcattccggcgccaatgccaaccaggccgccttcatggcgctggccaagcccggcgacacggttctgggcctgagccttgctgcgggtggacatctgacgcatggcgcagccccgaactattcgggcaagtggttcaactccgtacagtacggtgtacgcgccgaagacggtctgatcgactacgaccagatggaagccctggcccgcgagcacaagccgaagatcatcgtggctggcagctctgcctatccgcgcgtcatcgacttcgcgcgtttccgcaagattgccgatgaagtcggtgcgtatctgatggtggacatggcgcattttgccggtctggttgccgctggcctgtatccgaacccagttccgatggccgacatcaccacgtccacgacgcataagacgctgcgtggcccgcgtggtggcatcatcctgacgaacaaccccgatctggcgaagaaagtgaactccgccgtgttcccggggctgcagggcggtccgctcatgcacgtcattgcaggcaaggccgtcgcttttggcgaagccctgtcggatgagttcaaggcctatcagaagcgcgttctggccaatgcccgtgcgctggcggacgagcttcagaaccgtggcttcgacatcgtcacgggtggcacggacagccatctgatcctcgtggatctgcgtccgaagaaagtgacgggcaagctcgccgaagccatcctcgagcgcgctggcatcacggcgaacaagaacgccattccgttcgatccggaaaagccgttcgtaacctccggcatccgtctgggcagcccggcagcgacggcacgtggtttcggggaagccgagttccgcgaagtcggtcgtatgatcgacgaagtgctgacggcggctcttgaggaagacaatgccgaagccgtgacggcccgcgtgcatgaggaagtgaaggctctgtgccgccgcttcccgatctatgaccgcgcttctgcctaa

SEQ ID NO: 80252 - protein, 434 aa, Gluconobacter oxydans
MSEHASQSTLNRFFHAPLKEVDAEVATILNEELTRQQDGIELIASENMASFAVMEAQGSVLTNKYAEGLPGKRYYGGCVDVDRVENLAIDRLKKIFGAEFANVQPHSGANANQAAFMALAKPGDTVLGLSLAAGGHLTHGAAPNYSGKWFNSVQYGVRAEDGLIDYDQMEALAREHKPKIIVAGSSAYPRVIDFARFRKIADEVGAYLMVDMAHFAGLVAAGLYPNPVPMADITTSTTHKTLRGPRGGIILTNNPDLAKKVNSAVFPGLQGGPLMHVIAGKAVAFGEALSDEFKAYQKRVLANARALADELQNRGFDIVTGGTDSHLILVDLRPKKVTGKLAEAILERAGITANKNAIPFDPEKPFVTSGIRLGSPAATARGFGEAEFREVGRMIDEVLTAALEEDNAEAVTARVHEEVKALCRRFPIYDRASA

SEQ ID NO: 80253 - DNA, 1266 bp, Haemophilus influenzae
  CDS (1)..(1266): transl_table=11
atgtttacaagaaatatgactatcgctgattacgatccagtattgtggcaagcgatccaagatgaaaatcgtcgtcaagaagaacatatcgaactcattgcatctgaaaactatgcgagtccacgtgtgatggaagcgcaaggttcacaattcactaataaatatgcggaaggctatccaggtaaacgttattacggtggttgtgagtatgcggacattgtggaacagttagcaattgaccgtgcgaaagaattatttggtgcagattacgtgaatgttcaaccgcactctggatcacaagcgaatgctgcggtgtatggtgcattgattaatgcaggcgatactattttaggtatggatttggctcacggtggtcatttaactcacggtgcaaaagtcagtttctctggcaaaatttataactccgtactttatggaattactgcggatggcttaattgattatgaagatgttcgtcaaaaagcattagaatgtaaaccaaaacttatcgttgctggtttctcggcttattcacaagttgtggattgggcgaaaatgcgtgaaatcgcagatgaagttggtgcgtatttatttgtggatatggcgcatgtagcgggattaattgcagcgggtttatatctaaatccactccctcatgcacatgttgtgacaacaacaacccataaaacgttgggcggtccgcgtggtggtttaattctttcatcttgtggcgatgaagaaatctacaaaaaattacaatcatccgtattccctgcaaatcaaggtggtccattagttcatattattgcggcaaaagcagtttgctttaaagaagcattagagcctcaatataaagaataccaagcaaatgtaatcaaaaatgcgaaagcaatggttgaggtatttaaacaacgtggttatgacgttgtgtcaaatggcactgaaaaccacttgttcttagtaagttttattaaacaaggattaacaggtaaagcagctgatgcggcattaggcaaagcaaatattacagtgaataaaaatgctgtaccaaacgatccgcaaaaaccattcgtcacttctggcatccgtgtaggtacaccatctgtgactcgccgtggtttcaatgaaaatgatgtgcgtgaattagctggctggatgtgtgatgttttagatgctttaggcaaagaaaatgaagaacaagtgattgctgaaactaaagaaaaagtattagcaatttgtaaacgtcttccagtttatccgaaatga

SEQ ID NO: 80254 - protein, 421 aa, Haemophilus influenzae
MFTRNMTIADYDPVLWQAIQDENRRQEEHIELIASENYASPRVMEAQGSQFTNKYAEGYPGKRYYGGCEYADIVEQLAIDRAKELFGADYVNVQPHSGSQANAAVYGALINAGDTILGMDLAHGGHLTHGAKVSFSGKIYNSVLYGITADGLIDYEDVRQKALECKPKLIVAGFSAYSQVVDWAKMREIADEVGAYLFVDMAHVAGLIAAGLYLNPLPHAHVVTTTTHKTLGGPRGGLILSSCGDEEIYKKLQSSVFPANQGGPLVHIIAAKAVCFKEALEPQYKEYQANVIKNAKAMVEVFKQRGYDVVSNGTENHLFLVSFIKQGLTGKAADAALGKANITVNKNAVPNDPQKPFVTSGIRVGTPSVTRRGFNENDVRELAGWMCDVLDALGKENEEQVIAETKEKVLAICKRLPVYPK

SEQ ID NO: 80255 - DNA, 1266 bp, Haemophilus influenzae
  CDS (1)..(1266): transl_table=11
atgtttacaagaaatatgactatcgctgattacgatccagtattgtggcaagcgattcaagatgaaaatcgtcgtcaagaagaacatatcgaactcattgcatctgaaaactatgcgagtccacgtgtgatggaagcgcaaggttcacaattcactaataaatatgcggaaggctatccaggtaaacgttattacggtggttgtgagtatgctgacattgtggaacagttagcaattgaccgtgcgaaagaattatttggtgcagattacgtgaatgttcaaccgcactctggatcacaagcgaatgctgcggtgtatggtgcattgattaatgcaggcgatactattttaggtatggatttggctcacggtggtcatttaactcacggtgcaaaagtcagtttctctggcaaaatttataactccgtactttatggaattactgcggatggcttaattgattatgaagatgttcgtcaaaaagcattagaatgtaaaccaaaacttatcgttgctggtttctcggcttattcacaagttgtggattgggcgaaaatgcgtgaaatcgcagatgaagttggtgcgtatttatttgtggatatggcgcatgtagcgggattaattgcagcgggtttatatccaaatccactaccgcatgcacatgttgtgacaacaacaactcacaaaacattgggcggtccgcgtggtggtttaattctttcatcttgtggcgatgaagaaatctacaaaaaattacaatcatccgtattccctgcaaaccaagggggtccattagttcatattattgcggcaaaagcagtttgctttaaaggagcattagagcctcaatataaagaataccaagcaaatgtaatcaaaaatgcaaaagcaatggttgaagtatttaaacaacgtggttatgacgttgtgtcaaatggtactgaaaaccacttgttcttagtaagtttcatcaaacaaggattaacaggtaaagcagcagatgcggcattgggcaaagcaaatattaccgtgaataaaaatgctgtaccaaacgatccgcaaaaaccattcgtcacttctggcatccgtgtaggtacaccatctgtgactcgtcgtggtttcaatgaaaatgatgtgcgtgaattagctggctggatgtgtgatgttttagatgctttaggcaaagaaaatgaagaacaagtgattgctgaaactaaagaaaaagtattagcaatttgtaaacgtcttccagtttatccgaaatga

SEQ ID NO: 80256 - protein, 421 aa, Haemophilus influenzae
MFTRNMTIADYDPVLWQAIQDENRRQEEHIELIASENYASPRVMEAQGSQFTNKYAEGYPGKRYYGGCEYADIVEQLAIDRAKELFGADYVNVQPHSGSQANAAVYGALINAGDTILGMDLAHGGHLTHGAKVSFSGKIYNSVLYGITADGLIDYEDVRQKALECKPKLIVAGFSAYSQVVDWAKMREIADEVGAYLFVDMAHVAGLIAAGLYPNPLPHAHVVTTTTHKTLGGPRGGLILSSCGDEEIYKKLQSSVFPANQGGPLVHIIAAKAVCFKGALEPQYKEYQANVIKNAKAMVEVFKQRGYDVVSNGTENHLFLVSFIKQGLTGKAADAALGKANITVNKNAVPNDPQKPFVTSGIRVGTPSVTRRGFNENDVRELAGWMCDVLDALGKENEEQVIAETKEKVLAICKRLPVYPK

SEQ ID NO: 80257 - DNA, 1248 bp, Haloarcula marismortui
  CDS (1)..(1248): transl_table=11
atgagctacgaaaccgtacgggaagcggacccggcagttgcagacgcccttgagggtgaacgaggccggcagaacgacacactggcgatgattgccagtgagaaccacgtcagcgaggctgtgatggaggcacagagctccgaactgacgaacaagtacgccgagggctatcccggcgaacgctactacggcggctgcgagtacgccgacgacgtcgaggaactcgctatcgaccgcgcgaaagagctatggggcgcggaccacgtcaacgtccagccacactccggttcacaggccaacatgggcgtctatctcggcgtcctcgaacccggcgacaagatcctctcgcttgacctgacccacggcggccacctctcgcacggccacccggcgaacttcgccgggcaggtgtacgaagtcgaacagtacaaggtcgacgaggaaaccggctacgtcgactacgaggggctccacgaccacgcagaggagttcgaaccggatatcatcgtttcgggctactcggcgtacccccgagaggtcgacttcgagcggattcaggaagccgccgatgcggtcgacgcttaccaccttgcggacatcgctcacatcactggtctcgttgctgccggcgtccacgagtcgccggtcggcgtcgccgacttcgtcaccgggtcgacgcacaagaccatccgcgccggccgcggtggcatcatcatgtgcgacgaggagtacgccgacgacatcgacgctgccgtcttccccggctcgcagggcggcccgctgatgcacaacgtcgccggcaaggctgtcggcttcggtgaggcgcttgctcccgagttcgagcaatacgcccagcagactgtcgacaacgccattgcgctcggcgaacaattcaaagagcacggcctctcgctggtctccggcggcacggacaaccacctcgtgctcattgacctccggccgtcccatcctgacaccaccggcaaggaagttgaggaagcgctggaggaagctggtatcgtcctcaacgccaacacggttcccggcgagacccgctcggcgttcaacccctcgggcatccgcgccggcacgcccgcgctcaccacgcgtggcttcgacgaggacgcctgccgcgaggtcgcggacctcatctacaaggtcgtcgacgctccccacgacgacgatgtcgtcgcggaagtcagcgaccgcgtggacgagatgaccgacgagtacacgctgtacgaataa

SEQ ID NO: 80258 - protein, 415 aa, Haloarcula marismortui
MSYETVREADPAVADALEGERGRQNDTLAMIASENHVSEAVMEAQSSELTNKYAEGYPGERYYGGCEYADDVEELAIDRAKELWGADHVNVQPHSGSQANMGVYLGVLEPGDKILSLDLTHGGHLSHGHPANFAGQVYEVEQYKVDEETGYVDYEGLHDHAEEFEPDIIVSGYSAYPREVDFERIQEAADAVDAYHLADIAHITGLVAAGVHESPVGVADFVTGSTHKTIRAGRGGIIMCDEEYADDIDAAVFPGSQGGPLMHNVAGKAVGFGEALAPEFEQYAQQTVDNAIALGEQFKEHGLSLVSGGTDNHLVLIDLRPSHPDTTGKEVEEALEEAGIVLNANTVPGETRSAFNPSGIRAGTPALTTRGFDEDACREVADLIYKVVDAPHDDDVVAEVSDRVDEMTDEYTLYE

SEQ ID NO: 80259 - DNA, 1275 bp, Halobacterium salinarium; identical to SEQ ID NO: 79699
  CDS (28)..(1275): transl_table=11

SEQ ID NO: 80260 - protein, 415 aa, Halobacterium salinarium
MAYDEVREVDPEVADALTGERHRQNDTLAMIASENHVSEAVMEAQSSELTNKYAEGYPGSRYYGGCEYADDVEELAVARAKELFGADHVNVQPHSGSSANMGVYFATLAPGDKILSLDLTHGGHLSHGHPANFAGQLYEVEQYEVDAETGRLDYEALREHADAFEPDMIVSGFSAYPREVEWERIQAAADAVGALHMADIAHITGLVAAGEHASPVGVADFVTGSTHKTIRAGRGGIVMCDEAFADDIDSAVFPGAQGGPLMHNIAGKAVGFNEALDPAFEEYAAQVVENAAVLGERLQEHGFSLVSGGTDTHLVLVDLRESHPDISGGDVEGELEDVGIVLNANTVPDETRSAFDPSGIRIGTPALTTRGFDADAMETVADCIARVIDNLGDESVYADVADTVADLCEQYPQYE

SEQ ID NO: 80261 - DNA, 1251 bp, Helicobacter hepaticus
  CDS (1)..(1251): transl_table=11
atggattactcaatcaaagagcaggactttgaggtctttgagctcatagaaaaagagcttgaacgacaaaatgagcatttagaaatgattgcgagtgaaaattttacttttccaagtgttatggaggctatgggaagtattttaacaaataaatatgctgaaggttacccatttaaacgctattatggaggctgtgagtttgttgataaaattgaagaaattgcgattgaacgagcaaaaaaactctttggtgcaaattttgttaatgtgcaaccacattcaggctcacaggctaatgcagcggtatatgcagcgattttaaaaccttatgataaaattttaggtatggatttaagccacggaggacatctcacacacggggctaaagtcagcacttcagggcaactttatcaaagcttcttttatggtgtagagcttaatgggcgtattgattatgataaactcgcacttcaagctcaagtggttaaaccaaatgttcttgtatgtggattctctgcttatactcgtgagcttgattttaaaagattgcgtgagattgcagattctgtaggggcttaccttatgggtgatattgctcacgtagctgggcttgtggttgcaggagaatatccaaatccttttccacattgccatattgttaccactacgacacataaaacattgcgcggacctagaggtggagcgattcttacaaatgatgaagaactctatgctaaaatcaataaggctgtatttccaggtatccaaggtggacctcttatgcatattatcgcaggaaaggcagtaggttttaaagaaaatctcaaacctgaatggaaaatttatgcaaaacaagtaaagtcaaatattcaagctcttgcagaggtgctcatcaagcgcaactatgaacttgtaagcggtggaagtgataatcatctaattttaatgagtttccttaacaaagattttagtggcaaagatgcagatttagcgcttggtaatgcgggaataacggtgaataaaaataccattccaggagaaatccgttctccttttattacaagtggtattaggattggctctcctgctctaactgcacgaggtatgaaagaaaaggagtttgaatggattggagaaaaaattgctgatattcttgatgatattaacaataccaatttgcaagaacatattaaggcacaagtcaaaaactttagtcgagattttagaatctatgaccgaccaattttttag

SEQ ID NO: 80262 - protein, 416 aa, Helicobacter hepaticus
MDYSIKEQDFEVFELIEKELERQNEHLEMIASENFTFPSVMEAMGSILTNKYAEGYPFKRYYGGCEFVDKIEEIAIERAKKLFGANFVNVQPHSGSQANAAVYAAILKPYDKILGMDLSHGGHLTHGAKVSTSGQLYQSFFYGVELNGRIDYDKLALQAQVVKPNVLVCGFSAYTRELDFKRLREIADSVGAYLMGDIAHVAGLVVAGEYPNPFPHCHIVTTTTHKTLRGPRGGAILTNDEELYAKINKAVFPGIQGGPLMHIIAGKAVGFKENLKPEWKIYAKQVKSNIQALAEVLIKRNYELVSGGSDNHLILMSFLNKDFSGKDADLALGNAGITVNKNTIPGEIRSPFITSGIRIGSPALTARGMKEKEFEWIGEKIADILDDINNTNLQEHIKAQVKNFSRDFRIYDRPIF

SEQ ID NO: 80263 - DNA, 1251 bp, Helicobacter pylori J99
  CDS (1)..(1251): transl_table=11
atggcttattttttagaacaaacggatagtgaaatctttgagttcatcgttgaagaatttaaacgccaaaatgagcatttagaaatgatagcgagcgagaattacacttttcctagtgtcatggaggctatggggagtattttaacgaataaatacgctgaaggctatcctaacaaacgctattatgggggctgtgaagtggtggataaaatagaaagcctagccatagaaagggctaaaaagcttttcaattgccagttcgctaacgtgcaagcgcattcaggctcacaagccaataacgctgtttatcacgcccttttaaagctttatgacaagattttaggcatggatttaagctgtggagggcatttaacgcatggcgctaaagtgagtttaaccggcaagcattaccagagcttttcttatggcgtgggtttggatggctatattgattatgaagaggcgctaaaaatcgctcaaagcgttaagccacaaatcattgtgtgcgggttttcagcctatccaagggagattgattttaagaaatttagggaaatcgctgatgcagtgggggcgttattactaggcgatatagcccatgtggcagggcttgtagtcgctaatgagcatgcccatcctttcccgcattgccatgtggtttcaagcaccactcataagaccttaagagggcctagaggggggcttattctaactaatgacgaagaaatagcggctaagattgacaaagcgatttttccagggactcaaggcgggcctttgatgcatgtgattgctgctaaagcggtggggtttaaagagaatttaaaaccagaatttaaagcttatgcaaaattagtgaaatctaacatgcaagttctcgctaaaacattaaaagaaaaaaaccacaaattagtgagcggtggcacttctaaccatttgcttttaatggattttttagataagccttatagcgggaaagacgctgacattgctttagggaatgctgggatcaccgtgaataaaaacaccattcctggcgaaacgcgcaacccttttgtaacgagcgggataaggattggctcagcagcattgagcgcaagaggcatgggagctaaagaatttgaaatcatagggaataaaatatcagatattttgaatgatattaataatgttagtttgcaattgcatgtgaaagaagaattgaagaccatggctaatcaattccctgtgtaccaccaacctattttttaa

SEQ ID NO: 80264 - protein, 416 aa, Helicobacter pylori J99
MAYFLEQTDSEIFEFIVEEFKRQNEHLEMIASENYTFPSVMEAMGSILTNKYAEGYPNKRYYGGCEVVDKIESLAIERAKKLFNCQFANVQAHSGSQANNAVYHALLKLYDKILGMDLSCGGHLTHGAKVSLTGKHYQSFSYGVGLDGYIDYEEALKIAQSVKPQIIVCGFSAYPREIDFKKFREIADAVGALLLGDIAHVAGLVVANEHAHPFPHCHVVSSTTHKTLRGPRGGLILTNDEEIAAKIDKAIFPGTQGGPLMHVIAAKAVGFKENLKPEFKAYAKLVKSNMQVLAKTLKEKNHKLVSGGTSNHLLLMDFLDKPYSGKDADIALGNAGITVNKNTIPGETRNPFVTSGIRIGSAALSARGMGAKEFEIIGNKISDILNDINNVSLQLHVKEELKTMANQFPVYHQPIF

SEQ ID NO: 80265 - DNA, 1251 bp, Helicobacter pylori
  CDS (1)..(1251): transl_table=11
atggcgtattttttagaacaaacggatagtgaaatttttgagcttatctttgaagaatacaagcggcaaaatgagcatttagaaatgatagcgagcgagaattacacttttgcaagcgttatggaggctatggggagtgttttaacgaataaatacgctgaaggctaccctaacaagcgctattatggaggctgtgaagtggtggataaaatagaaagcctagccatagaaagggctaaaaagctttttaattgccagttcgctaacgtgcaagcgcattcaggctcacaagccaataacgctgtctatcacgctcttttaaagccttatgacaagattttaggcatggatttaagctgtggagggcatttaacgcatggcgctaaagtgagtttaaccggcaagcattatcagagcttttcttatggcgtgaatttggatggctatattgattatgaagaggcgctaaaaatcgctcaaagcgttaagccagaaatcatcgtgtgcgggttttcagcctatccaagggagattgattttaagaaatttagagaaatcgctgatgaagtgggggcgttactattaggcgatatagcccatgtggcagggcttgtggtaaccggtgagcatgcccatcctttcccgcattgccatgtggtttcaagcaccactcataagaccttaagagggcctagaggggggattattttaactaatgatgaagagatagcggctaagattgacaaagcgatttttccaggaactcaaggcgggcctttgatgcatgtgattgctgctaaagcggtgggttttaaagagaatctaaaaccagaatttaaagcttatgcacaattagtgaaatctaacatgcaagttttggctaaagcgttaaaagaaaaaaaccataagttagtgagtggtggcacttctaaccatttgcttttaatggattttttagataagccttatagcgggaaagacgctgatattgcattagggaatgccggaatcaccgtgaataaaaacaccattcctggtgaaacgcgcagcccttttgtaacgagcgggataaggattggctcagcggcattgagcgcaaggggcatgggagctaaggaatttgaaatcatagggaataaaatatcagatattttgaatgatattaataatgttagtttgcaattgcatgtgaaagaagaattgaaagccatggtcaatcaattccctgtgtaccaccaacctattttttaa

SEQ ID NO: 80266 - protein, 416 aa, Helicobacter pylori
MAYFLEQTDSEIFELIFEEYKRQNEHLEMIASENYTFASVMEAMGSVLTNKYAEGYPNKRYYGGCEVVDKIESLAIERAKKLFNCQFANVQAHSGSQANNAVYHALLKPYDKILGMDLSCGGHLTHGAKVSLTGKHYQSFSYGVNLDGYIDYEEALKIAQSVKPEIIVCGFSAYPREIDFKKFREIADEVGALLLGDIAHVAGLVVTGEHAHPFPHCHVVSSTTHKTLRGPRGGIILTNDEEIAAKIDKAIFPGTQGGPLMHVIAAKAVGFKENLKPEFKAYAQLVKSNMQVLAKALKEKNHKLVSGGTSNHLLLMDFLDKPYSGKDADIALGNAGITVNKNTIPGETRSPFVTSGIRIGSAALSARGMGAKEFEIIGNKISDILNDINNVSLQLHVKEELKAMVNQFPVYHQPIF

SEQ ID NO: 80267 - DNA, 1305 bp, Hyphomicrobium methylovorum
  CDS (1)..(1305): transl_table=11
atgtcgtccgcaccggctgcaggtactgcttctacgtcccgttttttcaagtcgcacgtgtcggagacggatcccgatattttcagcgccatccaaaaggaatttggccgccagcagcacgagatcgagctgatcgcgtctgagaacatcgtttcgcaggccgttctcgatgcagctggttcggtgctgaccaacaagtatgccgagggctatccgggcaagcgctactacggcggctgccagtacgtcgacatcgttgaagacatcgcgatcgaccgcgcaaagaagctcttcaactgcgaattcgcgaacgtgcagccgaactccggcagccaggcgaaccagggcgtgttcaatgcgctcgcgcagccgggcgacaccatcctcggtctctcgctcgctgccggtggtcacttgacccacggcgcgccggtgaaccagtccggcaagtggttcaaggccgtgcactacatggtcaagcccgactcgcacctcatcgacatggacgaagtgcgcaagctggcccaggagcacaagccgcgcatcatcatcgctggtggttcggcctatccgcgcaagatcgatttcgctgcattccgcgcgattgcggatgaggttggcgcgatcttcctcgtcgatatggcgcacttcgccggtcttgttgcggccggtctcattccgagcccgttcccgcatgcccacgtcgtaacgacgacgacgcacaagacgctgcgcggaccccgtggcggcatgattttgacgaacgacgcggacatcgcgaagaagatcaactcggcgatcttccctggcattcagggcggcccgctcatgcacgttatcgccggtaaggccgttgcattcggcgaggctctgcgtccggacttcaaggtctacatcaagcaggtgatggacaacgcccgcgcgctcggtgaagtgcttgtgcagaacggcttcgcgctcgtttctggcggcaccgacacgcacctcgttctcgtcgatctgcggccgaagaagctgaccggtacgaaggctgagaaggcgcttggccgtgccaacatcacctgcaacaagaacggcattccgttcgaccccgagaagccgatggtgacgtcgggcattcgtttgggttcgcctgcaggcacgacgcgcggcttcggcgttgccgaattccaggaaatcggccgcctgatctcggaagttctggatggcgttgcgaagaacggcgaagatggcaacggcgccgtcgaagcggccgtcaaggcaaaggctatcgctctttgcgatcgcttcccgatttacgcataa

SEQ ID NO: 80268 - protein, 434 aa, Hyphomicrobium methylovorum
MSSAPAAGTASTSRFFKSHVSETDPDIFSAIQKEFGRQQHEIELIASENIVSQAVLDAAGSVLTNKYAEGYPGKRYYGGCQYVDIVEDIAIDRAKKLFNCEFANVQPNSGSQANQGVFNALAQPGDTILGLSLAAGGHLTHGAPVNQSGKWFKAVHYMVKPDSHLIDMDEVRKLAQEHKPRIIIAGGSAYPRKIDFAAFRAIADEVGAIFLVDMAHFAGLVAAGLIPSPFPHAHVVTTTTHKTLRGPRGGMILTNDADIAKKINSAIFPGIQGGPLMHVIAGKAVAFGEALRPDFKVYIKQVMDNARALGEVLVQNGFALVSGGTDTHLVLVDLRPKKLTGTKAEKALGRANITCNKNGIPFDPEKPMVTSGIRLGSPAGTTRGFGVAEFQEIGRLISEVLDGVAKNGEDGNGAVEAAVKAKAIALCDRFPIYA

SEQ ID NO: 80269 - DNA, 1257 bp, Idiomarina loihiensis
  CDS (1)..(1257): transl_table=11
atgctgaaatctgagatgaacattgccgactttgacgcggacttatggcaggcgatgcaggatgaagttgaacgtcaggaacaacacattgagctgattgcatcggaaaactacaccagtccgcgggtaatgcaggctcaggggtcacaactgaccaacaagtacgcagaaggctatccgcacaagcgttactacggcggctgtgagttcgtcgataaagtcgaggacttagctattgagcgcgcaaaagaattgttcggcgccaagtacgcaaacgtacaaccgcattccggctctcaagctaataccgctgcctttatggctatgatggaagcaggcgataccttccttggtatgagcctggctcacggcggccacttaacacatggctctggtgtgaacttttcaggcaaactatacaatgcagtttcatacggtctggacgaatccaccggtgaaattgactacgctgaagttgaaaagctggcgcaggaacacaaaccgaaagttatcgtcgctggtttctcggcttattcaggcattgttgactgggcaaaattccgtgaaattgccgataaagttgatgcttatttaatggttgatatggcgcacgtagcgggtctggttgccgctggcgtctatcctaacccggtaccttatgctcatgttgtcactaccactacgcataaaactctggcgggccctcgcggcggcctgattatttccggcagcgatgatgaaaagttacacaagaagttaaacagtgcggtattccctggcaaccagggtgggccactttgtcacgttatcgctggtaaagcggtggcttttcaggaggcgttgcagccagagtttaaagactaccaaaagcaagtattagtgaacgccaatgccatggtaaaaaccatgcaggcgcgcggttacaaaatcgtgtcgaacggcactcagaaccacttgttcctggtggatttaattgacaaagatattactggtaaagatgctgatgcggctttaggtaacgcgttcattactgttaacaaaaatgcggttcctaatgacccgcgttcaccttttgtcacttcaggtttgcgtttaggcacgccggcaattactcgccgcggctttaaagaagcggaagctgagcaggtcgccaactggatttgcgatgtgctggatgacattgctgacgaaagtaaaattaatcaagttcgcgagcaggtaaaagcgctatgcgctaagtttccggtttacggttaa

SEQ ID NO: 80270 - protein, 418 aa, Idiomarina loihiensis
MLKSEMNIADFDADLWQAMQDEVERQEQHIELIASENYTSPRVMQAQGSQLTNKYAEGYPHKRYYGGCEFVDKVEDLAIERAKELFGAKYANVQPHSGSQANTAAFMAMMEAGDTFLGMSLAHGGHLTHGSGVNFSGKLYNAVSYGLDESTGEIDYAEVEKLAQEHKPKVIVAGFSAYSGIVDWAKFREIADKVDAYLMVDMAHVAGLVAAGVYPNPVPYAHVVTTTTHKTLAGPRGGLIISGSDDEKLHKKLNSAVFPGNQGGPLCHVIAGKAVAFQEALQPEFKDYQKQVLVNANAMVKTMQARGYKIVSNGTQNHLFLVDLIDKDITGKDADAALGNAFITVNKNAVPNDPRSPFVTSGLRLGTPAITRRGFKEAEAEQVANWICDVLDDIADESKINQVREQVKALCAKFPVYG

SEQ ID NO: 80271 - DNA, 1236 bp, Lactobacillus acidophilus
  CDS (1)..(1236): transl_table=11
ttgaaatacgcagaaaaatcaccagcattgtgggatgcaattcgtcaagaagaaaaacgtcaacagaatacaattgaattaattgcatcagaaaatattgtttcagatgctgttagagaagctcaaggttcagttttaactaataaatatgctgaagggtatcctggtcgtcgttactacggtgggtgtcaatatattgatcaagtagaacaattggcaattgattatgctaaaaaactttttaatgccaagtttgctaatgttcaacctcactcaggctctcaagctaatatggcagtttaccaagcgcttttgaagccaggtgatgtgattttgggtatgggaatggatgccggtgggcaccttactcatggcgctaaggttaactttagtggtaaagaatataagtcttatgaatatggcttaaatgtggaaacagaagaacttgattttgatcaaattcgtaaagttgctttagaagttaagccaaaattaattgtggccggggcttccgcatatagtcgtattattgactggcaaaaattccgcgatattgctgatgaagtgggcgcatacttaatggtagatatggcacatattgcaggacttgttgcaacagatcaacatccgagtccaattccggtagctgacattgtaacaacgactactcataagactttacgtggacctcgcggtggaatgatcctgtctaataatctggaaatcggtaagaagattaattctgcattattcccaggtattcaaggtggtccactggaacatgtaattgctggtaaagcacaggctttttatgaagatttacagccacagtttactgattacattaagcaagtagtaaaaaatgctaaggcaatggccgaagtatttgatgaatcagaaaatattcgtgtagtatctggtggcactgataatcacttaatgattattgatattactgatactggcttaactggaaaagatgcacaaaatctgcttgacttcgtcaatatcaccaccaacaaagagtctattcctggcgataagcgtagtccatttatcaccagtggcttaagaatcggcacccctgcgattactagccgtggttttaatgaagaagatgcaagaaagactgcttcattgattattgaaattttatccgatccggataatgaagctacaattgaacatgtaaaaaaagaagtacatgagttaactaaaaagcatccggttgaataa

SEQ ID NO: 80272 - protein, 411 aa, Lactobacillus acidophilus
MKYAEKSPALWDAIRQEEKRQQNTIELIASENIVSDAVREAQGSVLTNKYAEGYPGRRYYGGCQYIDQVEQLAIDYAKKLFNAKFANVQPHSGSQANMAVYQALLKPGDVILGMGMDAGGHLTHGAKVNFSGKEYKSYEYGLNVETEELDFDQIRKVALEVKPKLIVAGASAYSRIIDWQKFRDIADEVGAYLMVDMAHIAGLVATDQHPSPIPVADIVTTTTHKTLRGPRGGMILSNNLEIGKKINSALFPGIQGGPLEHVIAGKAQAFYEDLQPQFTDYIKQVVKNAKAMAEVFDESENIRVVSGGTDNHLMIIDITDTGLTGKDAQNLLDFVNITTNKESIPGDKRSPFITSGLRIGTPAITSRGFNEEDARKTASLIIEILSDPDNEATIEHVKKEVHELTKKHPVE

SEQ ID NO: 80273 - DNA, 1236 bp, Lactobacillus johnsonii
  CDS (1)..(1236): transl_table=11
atgaattatggagaaaaatcacctgcactttgggatgcaattaaaagtgaagagaaaagacaagaagatacaattgaattaattgcatcagaaaatattgtttccgatgctgtccgagaagcacaaggatctgttctcaccaataaatacgcagaaggatatcccgggaaaagatactatggtggatgtcaatatattgacaaggtagaacaattggcaattgactatgccaaaaaattatttaatgcagaatatgcaaatgtgcagcctcattctggttcacaggcaaacatgacagtttataatgctttgctaaagccaggagatactattttagggatgggtatggatgctggcggtcatcttacgcatggttcaaaggttaatttttcaggaaaaatttttaattctattagttatgacttaaatcctgaaactgaagaattggattttgatcgaattagacagcttgctatagagaagaagccaaaattaattattgctggtgcttctgcttatagcagaattattgattggcagaagtttcgtgagattgcggacgaagttggcgcctacctaatggttgatatggcgcatattgcaggtttagttgcaacgggagcacatccgagcccagttcctatagctgacgttgttacaacaactacacataaaactttgcgtggtccgcgtggaggaatgattctatctaacaataaagaattagggaagaaaattgattcggctctctttccaggaacgcaaggtggaccactagagcatgttattgctgcaaaggcacaagctttttatgaagatttacagccagaatttactcaatacattgatcaagtaattaagaattcaaaagccatggctgaagaatttaaaaatagcaaaaatattcgcgtggtttcaggtggaacagataaccacttgatgattattgatattaccaagactggtgtaacaggaaaagatgcccaaaatttgctagactctgtaaatattacgactaacaaagagtctattcctggtgataagcgaagcccatttattactagtggattaagaattggaacaccagcaataactagccgaggctttaaggaacctgatgctaaagaagtggctaaaataattattgaagttttggataagcctgaagatgcaggagtattggctgaggcaaaagaaagagttaatgatttagttcagaaatatcctattaaataa

SEQ ID NO: 80274 - protein, 411 aa, Lactobacillus johnsonii
MNYGEKSPALWDAIKSEEKRQEDTIELIASENIVSDAVREAQGSVLTNKYAEGYPGKRYYGGCQYIDKVEQLAIDYAKKLFNAEYANVQPHSGSQANMTVYNALLKPGDTILGMGMDAGGHLTHGSKVNFSGKIFNSISYDLNPETEELDFDRIRQLAIEKKPKLIIAGASAYSRIIDWQKFREIADEVGAYLMVDMAHIAGLVATGAHPSPVPIADVVTTTTHKTLRGPRGGMILSNNKELGKKIDSALFPGTQGGPLEHVIAAKAQAFYEDLQPEFTQYIDQVIKNSKAMAEEFKNSKNIRVVSGGTDNHLMIIDITKTGVTGKDAQNLLDSVNITTNKESIPGDKRSPFITSGLRIGTPAITSRGFKEPDAKEVAKIIIEVLDKPEDAGVLAEAKERVNDLVQKYPIK

SEQ ID NO: 80275 - DNA, 1248 bp, Lactococcus lactis subsp
  CDS (1)..(1248): transl_table=11
atgatttttgataaagaagattttgaaagttttgacccagaattgtgggcagccattcatgctgaggaaattcgtcagcaacaaaatattgaattaattgcttcagaaaatattgtttcaaaagcagttatggcagcacaaggttctgttttgacaaataaatatgccgaaggttatcctgggaaacgttattatggcggaacagaagcggttgatgttgtagaaaatttggctattgaacgagcaaaagaacttttcggtgcaaaatttgccaatgttcaacctcattcaggttctcaagccaatgcggcagcttatatggcattaattcaacctggagacacagtcttaggaatggatttaaatgctggcggtcacttgactcatggggcttcagtcaatttttcaggaaaaacttatcattttgttccttatggagttaattctgaaactgagcttttagattatgatgaaattttaaaaattgctaaacaagttcaacctaaactgattgttgctggcgcttctgcctattcacgcctgattgattttgctaagttccgtgaaatcgctgatagtgttggagcaaaattaatggttgatatggcacatattgctggattggtagcgactggtgcgcatcctaatccacttccttatgctgatgtcgttacaacaacaactcataagacactccgtggaccacgtggtggaatgattttgactaacgatgaagctttggccaagaaaattaactctgcaatcttccctggaactcaaggtgggcctttagaacatgtcattgcagcaaaagcagtagcttttaaagaagcacttgatccagaattcacaacctatattgaacaagtcattaaaaatacgcaagcaatggctgaggaatttgctaaagtggaaggcttacgattgatagctggtggttcagataatcatttgcttaatcttaaagttttagacttaggaattaatgggaaagaagctcaagatttattggatagtgttcacatcacacttaataaagaagcaattcctgatgaaacattatcaccatttaaaacttcaggggtgcgaattggagcagcagcaattacatcaagaggatttaaagaagttgaagcgaaaaaagttgcacaattggtctcagaagctttggttaatcacgataatcaagaaaaacttgcggaagttaggaaagcagctttagaactgactcgtcaatttcccttataa

SEQ ID NO: 80276 - protein, 415 aa, Lactococcus lactis subsp
MIFDKEDFESFDPELWAAIHAEEIRQQQNIELIASENIVSKAVMAAQGSVLTNKYAEGYPGKRYYGGTEAVDVVENLAIERAKELFGAKFANVQPHSGSQANAAAYMALIQPGDTVLGMDLNAGGHLTHGASVNFSGKTYHFVPYGVNSETELLDYDEILKIAKQVQPKLIVAGASAYSRLIDFAKFREIADSVGAKLMVDMAHIAGLVATGAHPNPLPYADVVTTTTHKTLRGPRGGMILTNDEALAKKINSAIFPGTQGGPLEHVIAAKAVAFKEALDPEFTTYIEQVIKNTQAMAEEFAKVEGLRLIAGGSDNHLLNLKVLDLGINGKEAQDLLDSVHITLNKEAIPDETLSPFKTSGVRIGAAAITSRGFKEVEAKKVAQLVSEALVNHDNQEKLAEVRKAALELTRQFPL

SEQ ID NO: 80277 - DNA, 1239 bp, Lactobacillus plantarum
  CDS (1)..(1239): transl_table=11
atgaattaccaggaacaagatccagaagtatgggctgcgattagtaaggaacaggcacggcaacaacataatattgagttgattgcttctgagaacatcgtttcaaagggcgtccgggcagcgcaggggagtgtgctgaccaataaatactctgaaggctatccgggtcaccgcttttacggtggtaacgaatacattgaccaagtggaaaccttagcaattgaacgggctaagaaattatttggtgcggaatatgctaatgtgcaaccacactctggttcccaagccaatgcggctgcatatatggcactgattcaacctggtgaccgggtgatggggatgtcactagatgctgggggacacttaacacatggatctagtgtgaacttctctggtaaactttacgattttcaaggttatgggctcgatcctgaaaccgcagaattaaactatgatgcaattcttgcacaagcacaagattttcaaccaaagttaatcgttgcgggggcttctgcttatagtcgattgattgatttcaagaagtttcgcgagattgcagatcaagttggggccttattgatggttgatatggctcatattgccggcttagttgcggccgggctacatcctaatccagtgccatatgctgatgtggttacgacaacgacgcacaaaacgttacgggggccccgtggcggtatgattttagcgaaagaaaagtatggcaagaagatcaactcagccgttttccctggcaatcagggtgggccgttggatcacgtaattgcgggtaaagcgattgctttgggcgaagacttacagcctgagtttaaggtttatgcccaacatatcattgataatgccaaggcaatggcgaaggtcttcaatgactctgacttggttcgggttatttctggtggcacggacaatcatttaatgacgattgatgtcactaagtctggtttgaacggtcgccaagtacaagatctgttagatacggtttatattacggtcaacaaagaagcgattccgaatgagacgttaggggctttcaagacctctggtattcggttgggaacacctgcgattacgacccgtggttttgacgaagctgatgcaactaaggtcgctgaattgattttgcaagcgttacaagcaccgacagatcaagcaaatctagatgacgttaaacagcaagcaatggctttaacagcgaagcacccgatcgatgttgattaa

SEQ ID NO: 80278 - protein, 412 aa, Lactobacillus plantarum
MNYQEQDPEVWAAISKEQARQQHNIELIASENIVSKGVRAAQGSVLTNKYSEGYPGHRFYGGNEYIDQVETLAIERAKKLFGAEYANVQPHSGSQANAAAYMALIQPGDRVMGMSLDAGGHLTHGSSVNFSGKLYDFQGYGLDPETAELNYDAILAQAQDFQPKLIVAGASAYSRLIDFKKFREIADQVGALLMVDMAHIAGLVAAGLHPNPVPYADVVTTTTHKTLRGPRGGMILAKEKYGKKINSAVFPGNQGGPLDHVIAGKAIALGEDLQPEFKVYAQHIIDNAKAMAKVFNDSDLVRVISGGTDNHLMTIDVTKSGLNGRQVQDLLDTVYITVNKEAIPNETLGAFKTSGIRLGTPAITTRGFDEADATKVAELILQALQAPTDQANLDDVKQQAMALTAKHPIDVD

SEQ ID NO: 80279 - DNA, 1293 bp, Leifsonia xyli subsp
  CDS (1)..(1293): transl_table=11
gtgaccgacaccctgccgtccaccttcactgcgtcgcttgcggaggtcgacccggagatcgccgaggtgctccagttggagctcggccgccagcgcgactacctggagatgatcgcgtccgagaacttcgtgccgcgcgccgtcctggaatccgtcggttcggtgctgacgaacaagtacgccgaagggtatccggggcgtcgctactacggcggctgcgagtacgtggacatcgccgagcagctggcgatcgaccgggcgaagagcctgttcggcgcggagtacgcgaacgtgcagccacactcgggcgcctcggccaacgcggccgtgctctccgccatcgcgaccccgggcgaaaccatcctgggcctggaactcgcccacggcgggcacctgacgcacgggatgaagctgaacttctccggcaagctctacaacgcggtcgcctacggcgtcgacccggagaccttcctcgtcgacatggacgctgtgcgcgacagagcgctcgagcacaaaccgcaggtcatcatcgccggctggtcggcctacccgcgtcagctcgacttcgctgcgttccgggcgatcgcagacgaggtgggcgccaagctgtgggtggatatggcccacttcgccggccttgtcgcggccggtctgcacccctcgcccgtgccctacgccgacgtcgtctcctcgactgtccacaagacgctcggcggcccccgctccggtttcatcgtcagccgggacacggagctggcgaagaagctcaactcgaatgtgttccccggtcagcagggcggcccgctcatgcacgtgatcgccgcgaaggcgaccgcgttcaagctggcggcgaccgacgagttcaaggaccgtcaggcacgcaccatccgtggcgcgcagctcctcgccgagcggctcaccgccgccgactcccgcgcatccggtgtggatgtgctcaccggcggcaccgatgtccacctggtgctcgccgatctgcgcacgtcggagctcgacgggcagcaggcggaggatatcctgcacgaggtcgggatcacggtcaaccgcaatgcggtgccgttcgacccgcgcccgccgatggtcacctcgggcctccggatcggcaccccggcgctggcgacccgcggcttcggcgacaccgagttcaccgaggtcgccgacatcatcgcgctggcgctccgtcccggcgccgacacccgcgcgctccgtgcccgcgtcgacgccctgaccgccgcctttccgctctaccctggcctcgcgccctccgcgagctga

SEQ ID NO: 80280 - protein, 430 aa, Leifsonia xyli subsp
MTDTLPSTFTASLAEVDPEIAEVLQLELGRQRDYLEMIASENFVPRAVLESVGSVLTNKYAEGYPGRRYYGGCEYVDIAEQLAIDRAKSLFGAEYANVQPHSGASANAAVLSAIATPGETILGLELAHGGHLTHGMKLNFSGKLYNAVAYGVDPETFLVDMDAVRDRALEHKPQVIIAGWSAYPRQLDFAAFRAIADEVGAKLWVDMAHFAGLVAAGLHPSPVPYADVVSSTVHKTLGGPRSGFIVSRDTELAKKLNSNVFPGQQGGPLMHVIAAKATAFKLAATDEFKDRQARTIRGAQLLAERLTAADSRASGVDVLTGGTDVHLVLADLRTSELDGQQAEDILHEVGITVNRNAVPFDPRPPMVTSGLRIGTPALATRGFGDTEFTEVADIIALALRPGADTRALRARVDALTAAFPLYPGLAPSAS

SEQ ID NO: 80281 - DNA, 1248 bp, Leptospira interrogans serogroup Icterohaemorrhagiae serovar
  CDS (1)..(1248): transl_table=11
atgcagtttcttccaaaagcagatccagaaatatttgcagcattaaaaaaagaggatgaaagacaggaaaataacctggaaatgatcgcctctgaaaattttgtttccagagccgttctggaagcttatacatccacacttacgaataaatatgccgaaggttatccaggcaaaagatattacaacggttgtcataacgctgacgtagtggaaacactcgctatcgaaagagcaaaaaaactttttggttctcaatacgcaaacgttcaacctcactccggcgctcaggcaaatatggccgtttttctcgcttgtttagaacctggagattcttttttaggaatgaatctggctcacggaggtcatttaactcacggttctccggtcaatgtaagcggaaaaatttataagccgattccttatggagtggattctaaaaccgaaaccatcaactacgacgaagtcgcaaaactcgcgagagaacataaaccaaagttgattgttgcaggagcttccgcttatgcaagaacgatcgacttttctaagtttgctgagattgcaaaggaagtaggtgcaaaattgatggcggatattgcacatatttcaggtcttgttgctactggttatcatccttctccaattggtatgtttgattttgtgaccaccaccactcacaaaactttgagaggtcccagaggtgggttgattctttctacattagaaaatgagaaagtactaaactctcgtgtttttccaggaatccaaggtggacctttgatgcacgtgatcgcggccaaagcggtggcatttcaggaagcacttcagccagactataaaaaatatatagaaaccgttcttgcaaacgccaaaactttagcggaagtttttgtaaaaagaggttacagagttgtaagcggtggaacggacaatcacctagttcttttggacgtttccgtaaaaggacttaccggtgcacaagcagctgatggactagacgaggtaggagttaccgtaaataaaaacgcgatcccgtttgataaaaatcctcccgctgtcgcttctggaattcgtctaggaactcccgcacttacaacccgaggtctaaaacctgcagatatggaaactgtgggaaatttaatctgcgactttttagatcatccaaacgatgataaaaatagaacaaaagtcaaaggtggcatccaagagatgactcagaagtttcctatgaatcaatttcgtttagattga

SEQ ID NO: 80282 - protein, 415 aa, Leptospira interrogans serogroup Icterohaemorrhagiae serovar
MQFLPKADPEIFAALKKEDERQENNLEMIASENFVSRAVLEAYTSTLTNKYAEGYPGKRYYNGCHNADVVETLAIERAKKLFGSQYANVQPHSGAQANMAVFLACLEPGDSFLGMNLAHGGHLTHGSPVNVSGKIYKPIPYGVDSKTETINYDEVAKLAREHKPKLIVAGASAYARTIDFSKFAEIAKEVGAKLMADIAHISGLVATGYHPSPIGMFDFVTTTTHKTLRGPRGGLILSTLENEKVLNSRVFPGIQGGPLMHVIAAKAVAFQEALQPDYKKYIETVLANAKTLAEVFVKRGYRVVSGGTDNHLVLLDVSVKGLTGAQAADGLDEVGVTVNKNAIPFDKNPPAVASGIRLGTPALTTRGLKPADMETVGNLICDFLDHPNDDKNRTKVKGGIQEMTQKFPMNQFRLD

SEQ ID NO: 80283 - DNA, 1242 bp, Listeria innocua
  CDS (1)..(1242): transl_table=11
atggtctatttacaaaagcaagataaggaagtttttgatgcaattaagttagaacttggtagacaacgcgcgaatatcgaattaatcgcatctgagaattttgttagtgagcaagtaatggaagcaatgggttctgtattaacgaataaatatgcagaaggttaccctggaaaacgttactacggcggatgtgaattcgtggatattgtggaagatttagcacgcgaccgggcgaagaaattatttggcgctgaatatgcgaatgttcaaccacactcaggcgctcaagcgaacatggcagtttatcatactgtgcttgaaccaggcgacacagtgcttggtatgaacctttcacatggtggccatttaacacatggtagtccagtgaactttagtggcgttttatacaattttgttgaatacggcgttcgtgaagatacgaaagaaattgactatgaaatcgttcgtgaagcagcattaaaacataaaccaaaaatgattgtagctggagcaagtgcttacccacgtaaaattgattttgctaaattccgtgaaattgctgatgaagttggcgcatacttaatggttgatatggcgcatattgctggtcttgttgcagcaggtttacatcaaaatccagttccttatgctgattttacaactacaaccactcataaaacccttcgtggacctcgtggcggaatgattttagcaaaagctgaatgggaacaaaaattaaataaatcgattttcccgggaattcaaggtggaccattaatgcacgtaatcgcagcgaaagcagtggcatttggtgaagcattacaacctgaattcactgcgtactgtgaacaaatcattcgcaactctaaaaaattagcagaaacacttcaagctaatgatgttgctgttttaacaggcggttcggataatcatttactattaattgatttaaaaccacttggcttaacaggaaaagctgctgaaaaagtattagatgaggttggtattaccgtgaataaaaataccattccatttgaaacagaaagcccatttgtaacgagcggtatccgtgtaggcgtggcggcagttacaacacgtggtttcgatgaagtagctattgaaaaagtgggagtacttatttctgaagtgctgcacaacttagaaaatgaagaagttttagcagatgtgaaagctcgtgtagctaatttaacaaatgaatatccgctttatccaagtttataa

SEQ ID NO: 80284 - protein, 413 aa, Listeria innocua
MVYLQKQDKEVFDAIKLELGRQRANIELIASENFVSEQVMEAMGSVLTNKYAEGYPGKRYYGGCEFVDIVEDLARDRAKKLFGAEYANVQPHSGAQANMAVYHTVLEPGDTVLGMNLSHGGHLTHGSPVNFSGVLYNFVEYGVREDTKEIDYEIVREAALKHKPKMIVAGASAYPRKIDFAKFREIADEVGAYLMVDMAHIAGLVAAGLHQNPVPYADFTTTTTHKTLRGPRGGMILAKAEWEQKLNKSIFPGIQGGPLMHVIAAKAVAFGEALQPEFTAYCEQIIRNSKKLAETLQANDVAVLTGGSDNHLLLIDLKPLGLTGKAAEKVLDEVGITVNKNTIPFETESPFVTSGIRVGVAAVTTRGFDEVAIEKVGVLISEVLHNLENEEVLADVKARVANLTNEYPLYPSL

SEQ ID NO: 80285 - DNA, 1242 bp, Listeria monocytogenes serotype 4b
  CDS (1)..(1242): transl_table=11
atggtctatttacaaaagcaagataaggaagtttttgatgcaattaagttagagcttggtagacaacgcgcgaatatcgaattaatcgcatctgagaattttgttagtgagcaagtaatggaagctatgggatctgtattaacgaataaatatgcagaaggttacccagggaaacgctattacggcggatgtgaattcgtggatattgtggaagatttagcacgcgaccgcgcgaaaaaattatttggcgctgaatatgcgaatgtccaaccacactcaggtgctcaagcgaatatggcagtttatcatacagtgcttgaaccaggcgatactgttcttggtatgaacctttcacatggtgggcatttaacacatggtagcccagtaaatttcagcggtgttttatacaattttgttgaatacggcgttcgtgaagatacgaaagaaattgattacgatattgttcgtgaagcagctttaaaacataaaccaaaaatgattgtagctggcgcaagtgcttatccacgtaaaattgattttgctaaattccgcgaaattgctgatgaagttggcgcatacttaatggtagatatggcgcatattgctggtcttgttgctgctggcttgcatcaaaatccagttccttatgctgattttacaacgacaactacccataaaacgcttcgtggacctcgcggcggaatgattttagccaaagcagaatgggaacaaaaattaaataaatcgattttcccaggaatccaaggtggaccgttaatgcacgtaatcgcagcgaaagcagtggcgtttggtgaagcgttacaacctgaattcacggcgtactgtgaacaaattattcgtaactctaaaaaattagcagaaacacttcaagcgaatgatgttgctgttttaacaggtggttcggataatcatttattattaattgatttaaaaccacttggcttaacaggaaaagcagcggagaaagtattagatgaagttggtattaccgtgaataaaaataccattccattcgaaacggaaagcccatttgtcacaagtggtatccgtgtaggtgttgctgcagtgaccactcgtggatttgatgaagttgcgattgaaaaagttggtgtacttatttcagaagtactgcataatttagaaaatgaagaagttctcgcagatgtaaaagcacgcgtggctactttaacaaatgaatatccgctttatccaagtttataa

SEQ ID NO: 80286 - protein, 413 aa, Listeria monocytogenes serotype 4b
MVYLQKQDKEVFDAIKLELGRQRANIELIASENFVSEQVMEAMGSVLTNKYAEGYPGKRYYGGCEFVDIVEDLARDRAKKLFGAEYANVQPHSGAQANMAVYHTVLEPGDTVLGMNLSHGGHLTHGSPVNFSGVLYNFVEYGVREDTKEIDYDIVREAALKHKPKMIVAGASAYPRKIDFAKFREIADEVGAYLMVDMAHIAGLVAAGLHQNPVPYADFTTTTTHKTLRGPRGGMILAKAEWEQKLNKSIFPGIQGGPLMHVIAAKAVAFGEALQPEFTAYCEQIIRNSKKLAETLQANDVAVLTGGSDNHLLLIDLKPLGLTGKAAEKVLDEVGITVNKNTIPFETESPFVTSGIRVGVAAVTTRGFDEVAIEKVGVLISEVLHNLENEEVLADVKARVATLTNEYPLYPSL

SEQ ID NO: 80287 - DNA, 1242 bp, Listeria monocytogenes
  CDS (1)..(1242): transl_table=11
atggtctatttacaaaagcaagataaggaagtttttgatgcaattaagttagaacttggtagacaacgcgcgaatatcgaattaatcgcatctgagaattttgttagtgagcaagtaatggaagcaatgggttctgtattaacgaataaatatgcagaaggttacccaggaaaacgctattacggcggatgtgaattcgtggatatcgtggaagatttagcacgcgaccgcgcgaaaaaattatttggagctgaatatgcgaacgttcaaccacactcaggtgctcaagcgaatatggcggtttatcatacagtgcttgaaccaggtgataccgtacttggtatgaacctttcacatggtggacatttaacacatggtagtccagttaatttcagtggtgttttatacaattttgttgaatacggcgttcgtgaagatacaaaagagattgattatgatatcgtccgtgaagctgctttaaaacataaaccaaaaatgattgtagctggcgcaagtgcttatccacgtaaaattgattttgctaaattccgtgaaattgctgatgaagttggcgcatacttaatggtagatatggcgcatatcgccggtcttgttgctgctggtttacaccaaaatccagttccttatgctgattttacaacgacaactacccataaaacgcttcgtggacctcgcggtggaatgattttagccaaagcagaatgggaacaaaaattaaataaatcgattttcccaggaattcaaggtggaccattaatgcacgtaatcgcagcgaaagcagtggcgtttggtgaagcgttacaacctgaattcacaacgtattgcgagcaaattattcgtaattctaagaaattagcagaaactcttcaagcgaatgatgttgctgttttaacaggtggttcggataatcatttattattaattgatttaaaaccacttggcttaacaggaaaagcagctgagaaagtattagatgaagttggtattaccgtgaataaaaataccattccattcgaaacggaaagcccatttgtaacaagtggtattcgtgtaggtgttgctgcagtgacgactcgtggattcgatgaagttgcgattgaaaaagtcggcgtacttatttcggaagtactgcataacttagaaaatgaagaagttctcgcagatgtaaaagcacgcgtggctactttaacaaatgaatatccgctttatccaagtttataa

SEQ ID NO: 80288 - protein, 413 aa, Listeria monocytogenes
MVYLQKQDKEVFDAIKLELGRQRANIELIASENFVSEQVMEAMGSVLTNKYAEGYPGKRYYGGCEFVDIVEDLARDRAKKLFGAEYANVQPHSGAQANMAVYHTVLEPGDTVLGMNLSHGGHLTHGSPVNFSGVLYNFVEYGVREDTKEIDYDIVREAALKHKPKMIVAGASAYPRKIDFAKFREIADEVGAYLMVDMAHIAGLVAAGLHQNPVPYADFTTTTTHKTLRGPRGGMILAKAEWEQKLNKSIFPGIQGGPLMHVIAAKAVAFGEALQPEFTTYCEQIIRNSKKLAETLQANDVAVLTGGSDNHLLLIDLKPLGLTGKAAEKVLDEVGITVNKNTIPFETESPFVTSGIRVGVAAVTTRGFDEVAIEKVGVLISEVLHNLENEEVLADVKARVATLTNEYPLYPSL

SEQ ID NO: 80289 - DNA, 1263 bp, Mannheimia succiniciproducens
  CDS (1)..(1263): transl_table=11
atgttacaaaaccacagtattgcagaatttgacccagtattatgggacgcgatccaaaatgagaatcgtcgtcaggaagaacatattgaattaatcgcttctgaaaactatgtaacgaaagcggtaatggaagcgcaaggttctcaattaacaaataaatatgcggaaggttatccgggcaaacgttattacggtggttgtgaatatgtcgatatcgtggagcaattagcgattgaccgcgcaaaagaattattcggtgcggattatgccaatgtacagcctcattcgggatcgcaagcgaatgcggcagtttacggtgcgctattaaatgccggcgatactattttaggtatggatcttgcgcacggcggtcacttaactcatggtgcgaaagtcagcttttccggtaaaatttataattcggtgctttacggcattacggccgaaggtttaattgattatgaagatgtgcgtgtaaaagcgctggaaagtaaaccgaaaatgatcgttgcaggtttctccgcttattctcaagtggtggattgggcaaaaatgcgtgaaatcgcggacgaagtgggtgcatatttgttcgttgatatggcacatgtcgcgggtttaatcgcagccggcttatatccgaatccgttacctcacgctcatgtggttactactacaacccataaaacattagcaggtccccgcggcggtttgattttatcagcctgcggagatgaagaaatctacaaaaaactaaacagttccgtatttccggcaaaccaaggcggtccgttaatgcatgtgatcgcggcaaaagcggtatgtttcaaagaagcgttacaaccggaatttaaagcttatcaggctcaagtgttaaaaaatgcaaaagccatggttgaagtatttaaacaacgcggttttgaagtggtatcaaagggtaccgaaaaccatttatttctggtaagttttgtaaaacaaggcttgacgggtaaagcggcggatgcggcgctgggagaggcaaatattacggtaaataaaaactctgtgccgaacgacccgcaaaaaccatttatcacttccgggattcgcgtggggtctccgtctattacccgtcgcggtttcaatgaagctgacgcctcaactttagctggctggatgtgcgatgtgttagaaagcatcggtaaagacaactatgaccaagtgattgcggaaaccagagcgaaagtattggaaatttgcaaacgcttaccggtttacggcgactaa

SEQ ID NO: 80290 - protein, 420 aa, Mannheimia succiniciproducens
MLQNHSIAEFDPVLWDAIQNENRRQEEHIELIASENYVTKAVMEAQGSQLTNKYAEGYPGKRYYGGCEYVDIVEQLAIDRAKELFGADYANVQPHSGSQANAAVYGALLNAGDTILGMDLAHGGHLTHGAKVSFSGKIYNSVLYGITAEGLIDYEDVRVKALESKPKMIVAGFSAYSQVVDWAKMREIADEVGAYLFVDMAHVAGLIAAGLYPNPLPHAHVVTTTTHKTLAGPRGGLILSACGDEEIYKKLNSSVFPANQGGPLMHVIAAKAVCFKEALQPEFKAYQAQVLKNAKAMVEVFKQRGFEVVSKGTENHLFLVSFVKQGLTGKAADAALGEANITVNKNSVPNDPQKPFITSGIRVGSPSITRRGFNEADASTLAGWMCDVLESIGKDNYDQVIAETRAKVLEICKRLPVYGD

SEQ ID NO: 80291 - DNA, 1239 bp, Mesoplasma florum
  CDS (1)..(1239): transl_table=4
atgagtacaataaataaaaatattttagaatcacttaaaggtgaattaaaaagacaacaagatcacattgaattaatagcaagtgaaaactatgttagtgatgcagttttacaattatcaggaagtatattaactaataaatatgcagaaggttacccagataaaaggtattatggtggatgtgaatttgttgatcaaattgaaaaacaaggaattgaattagctaaaaaaatatttaatgcaggtcacgctaatttacaacctcattcaggtagtcaagctaatgaagctgtttatcgtgctttattacaaaacggagataaagttgtttctatgagtttagacgctggaggtcacttaacacatggttatccaattaatttttcaggtaataattatgattttaaattttatggagtaaatagagaaacagaagaaattgattttgatgaagttagaaaagttgttttagaacatcaaccaaaattaattgtcgctggagctagtgcttactcaagaattatagactttaaaaagtttagagaaattgcagatgaagttggagcattattaatggttgatatggctcatattgctggtttagttgctggtggtgctcacccaaaccctatggaatatgcagatgttgttacaacaacaacacacaaaactttaagaggcgcaagaggtggaatgattttatcaaaagctgaaattggtaaaaaaattgattcatcagttttcccaggtactcaaggtggacctttagaaaatcaaatagctgggaaagttcaagccttatatgaagcagatactcctgaatttaaagaatatgttcatcaagtagttgctaactcaaaagcatttgctaaagccttagcagataatggaatgagattaatagctaatggaacagataatcatttaattaatttagatgtaaaaaatactttaaatgttactggaaaagatgcagaaaaaatccttgaaagtattggtatagtttcaaataaaaacatgattccttttgatacagaaaaaccttttgttacaagtggaattagagttggaactgcagcaatgacaactagaggatttaaagaagaacaatttgttgaagttgctaaaataattgcaagtgcattaaaagatcaatcagaaacaaatttaaatactctttcaaaagaagttgctaaattatgtaagcaattcccaatatatgaacatttatcatattaa

SEQ ID NO: 80292 - protein, 412 aa, Mesoplasma florum
MSTINKNILESLKGELKRQQDHIELIASENYVSDAVLQLSGSILTNKYAEGYPDKRYYGGCEFVDQIEKQGIELAKKIFNAGHANLQPHSGSQANEAVYRALLQNGDKVVSMSLDAGGHLTHGYPINFSGNNYDFKFYGVNRETEEIDFDEVRKVVLEHQPKLIVAGASAYSRIIDFKKFREIADEVGALLMVDMAHIAGLVAGGAHPNPMEYADVVTTTTHKTLRGARGGMILSKAEIGKKIDSSVFPGTQGGPLENQIAGKVQALYEADTPEFKEYVHQVVANSKAFAKALADNGMRLIANGTDNHLINLDVKNTLNVTGKDAEKILESIGIVSNKNMIPFDTEKPFVTSGIRVGTAAMTTRGFKEEQFVEVAKIIASALKDQSETNLNTLSKEVAKLCKQFPIYEHLSY

SEQ ID NO: 80293 - DNA, 1239 bp, Methanosarcina acetivorans
  CDS (1)..(1239): transl_table=11
gtgtcttacattgaaaaaatcgatccagatatgttcgaggctatccaaaaggaagctgatcgtcaggaacacaaacttaacctgattgcgtccgaaaactatgcgagcagggctgtaatggaagctcagggctcaatcatgaccaacaagtatgccgaaggatattccggtaagcgctattacggcggttgtgatttcgtggacattgccgaaaatctcgcaattgccagggcaaaggaaatcttcggggcaaaatacgtaaatgtccagccccactcaggttcaggtgccaacatggctgtctacttctccgtactgcagcctggggacacaatcatgtccatggatctctcccacggcgggcacctttctcacggcagccctgtaagtttttccggaaaactctataacatcgtgccttacggagtcagcaaagagaccgaagccctggactatgacgagcttatgaaaatggcaaaagaatgcaaaccgaaaatgatcgtctgcggagcttcagcctatccccgtgtaatcgatttcaagaagttcagggaaattgccgatgaagtgggagcttatctccttgcagacattgcccacattgcaggtcttgtcgtttcaggcgtacacccaagccctgtgccttatgcggattttgtcaccaccacgacccacaagaccctccgggggccgaggggcggaatgattatctcaaagaccgaggaacttgcaatgggagtaaacaaggccgttttcccgggcattcagggtgggcccctcatgcatgtcatagctgcaaaggccgtcgcctttaaggaagccatggatgaaaagttcaggcaggaccaggctcagaccgtaaagaatgcaaaagttctctgcgcctgtctgaaggagaagggttttgatattgtttccggcggtactgacaaccatctgatgcttgtaaacctcaataatatgaacattacaggcaaggacgcggaagctgcaatgagcaaagccgggattatcgccaacaaaaacacggtgcctttcgagactcgcagccccttcataaccagcggagtaaggctcgggactcctgcctgtaccacaaggggcatgaaagaaaaagaaatggaactgattgccgactatatcgagactgcaatcaagaatgcaggaaacgatgctctgctgtcggaagtaagcgctaaggtaagggacctctgctcaaggttccctgtttacagctaa

SEQ ID NO: 80294 - protein, 412 aa, Methanosarcina acetivorans
MSYIEKIDPDMFEAIQKEADRQEHKLNLIASENYASRAVMEAQGSIMTNKYAEGYSGKRYYGGCDFVDIAENLAIARAKEIFGAKYVNVQPHSGSGANMAVYFSVLQPGDTIMSMDLSHGGHLSHGSPVSFSGKLYNIVPYGVSKETEALDYDELMKMAKECKPKMIVCGASAYPRVIDFKKFREIADEVGAYLLADIAHIAGLVVSGVHPSPVPYADFVTTTTHKTLRGPRGGMIISKTEELAMGVNKAVFPGIQGGPLMHVIAAKAVAFKEAMDEKFRQDQAQTVKNAKVLCACLKEKGFDIVSGGTDNHLMLVNLNNMNITGKDAEAAMSKAGIIANKNTVPFETRSPFITSGVRLGTPACTTRGMKEKEMELIADYIETAIKNAGNDALLSEVSAKVRDLCSRFPVYS

SEQ ID NO: 80295 - DNA, 1239 bp, Methanosarcina barkeri
  CDS (1)..(1239): transl_table=11
atgtcttacattgaaaaaactgatccggaattgttcgaggctataaaaaaagaagccgagcgccaggaatataaactgaaccttatcgcatctgaaaattatgcgagtaaagccgtaatggaagctcagggatcgattctgaccaataaatatgccgaaggatattccggcaagcggtactatggtggctgcgacttcgtggacattgccgaggatctcgcgattgccagggcaaagaaaatctttaacgcaggctacgtcaacgtccagcctcactctggttctggggctaatatggctgtctatttctcggttttgaagccaggagacaccatcatgtccatggatctctctcacggcggtcatctttctcacggcagccctgtgagtttttccggaaagctctttaatattgtgccttacggggtcagtaaaaagactgagatgctggactattccgaacttatgaaaaaagcaaaggaaaacaaaccgcaaatgattgtttgtggagcttcagcttatcctcgtgaaatcgatttcaagcaattccgcgaaattgctgatgaggtaggagcctatctgcttgcagacattgcccacattgcaggtcttgtagttgcaggtgtgcacccgagtccagtaccttatgcggacttcgttaccagcacaacccacaaaactctccgaggcccaagaggcggaattattatctccaagacagaagaacttgcgaccagaattaacaaagcggttttccccggccttcagggtgggcctctcatgcacattatagccggaaaggcagtagcctttaaagaagccatgagtgaaaagttcaaacaggatcaggttcagaccgtaaagaacgcaaaaactctctgcaaatgcctgaaagagaaaggttttgatatggtatctggcgacacggataatcatcttatgcttgtcaatctcaacaatatgaatataacaggcaaggatgcagaagccgccctgagcaaagccgggattattgcaaacaaaaacacggtgccttttgagacacgcagtccatttatcacaagcggtgtaaggctcggaacccctgcctgtaccacgaggggtatgaaggaaacagaaatggaattaattgccgactatattgagaccgcaatcacaaactcagaaaacgataagatcctgtcggaaacaagtgacaaggtcagagaactctgttcaaggttccctgtttattgttaa

SEQ ID NO: 80296 - protein, 412 aa, Methanosarcina barkeri
MSYIEKTDPELFEAIKKEAERQEYKLNLIASENYASKAVMEAQGSILTNKYAEGYSGKRYYGGCDFVDIAEDLAIARAKKIFNAGYVNVQPHSGSGANMAVYFSVLKPGDTIMSMDLSHGGHLSHGSPVSFSGKLFNIVPYGVSKKTEMLDYSELMKKAKENKPQMIVCGASAYPREIDFKQFREIADEVGAYLLADIAHIAGLVVAGVHPSPVPYADFVTSTTHKTLRGPRGGIIISKTEELATRINKAVFPGLQGGPLMHIIAGKAVAFKEAMSEKFKQDQVQTVKNAKTLCKCLKEKGFDMVSGDTDNHLMLVNLNNMNITGKDAEAALSKAGIIANKNTVPFETRSPFITSGVRLGTPACTTRGMKETEMELIADYIETAITNSENDKILSETSDKVRELCSRFPVYC

SEQ ID NO: 80297 - DNA, 1257 bp, Methylococcus capsulatus
  CDS (1)..(1257): transl_table=11
atgttcagcaagggtatggaaattgccggattcgacgacgaactctgggctgcgatccaggaagaggaacgcaggcaagaggaccatatcgagctgatcgcatcggagaactatgccagcccgcgggtgctgcaggcacagggaaccgtgctgaccaacaaatacgcggaagggtatccgggcaaacgctactacggaggctgcgagtacgtcgacattgtggagacactggccatcgagcgcgcgaaacgactgttcggggctgattatgccaatgtccagccgcattccggttcgcaggccaatgccgccgtgtacatggctttgctgaagccgggcgatacggtgctgggcatgagtctggcgcacggtggacatctgacccatggcgccaaggtcaacttttcaggcaagatttacaatgccgtacaatatggactcaacccggaaaccggggagatcgattacgaccaggtcgacgaactggcccgggagcaccgtccaaagatgatcgtggccggtttctcggcctactcccaggtggtcgactggcagcgtttccgggcgattgccgactcggtcggtgcctggctcatggtcgacatggcccacgtcgcggggctgatcgcggccggcctgtaccccagcccggtgcagatcgccgacgtgaccacgaccacaacccacaagacgcttcgtggcccgcgcggtggcctgattctggccaaagccaatcccgaggtcgagaaacagctcaactcgctggttttccccggcattcaaggggggccgctgatgcatgtgatcgcggcgaaggcagtggcattaaaggaggccttgcagccggatttcaggcactaccagtcagcggtgatggagaacgccgacgccatggcgaagactttcatcgagcgcggctaccgtatcgtgtcgggcggcacccggaatcatctgttcctggtcgatctgatccaaaagggcctcaccggcaagctggcggaagaggtgttgggcagagcgcatatcaccgtcaacaaaaatgcggtgccgaacgatccgcagtcgcccttcgtgaccagcggcatccgggtggggacccccgcggtgacgacgcgcggctttggggtcgaggagtgccggctgttggcaggctggatgtgcgatatcatggactgcccgggagatgaaacggtcataggccaggtgcgcgaggaggtgacccatctgtgccggcgtttcccggtctatgccaactga

SEQ ID NO: 80298 - protein, 418 aa, Methylococcus capsulatus
MFSKGMEIAGFDDELWAAIQEEERRQEDHIELIASENYASPRVLQAQGTVLTNKYAEGYPGKRYYGGCEYVDIVETLAIERAKRLFGADYANVQPHSGSQANAAVYMALLKPGDTVLGMSLAHGGHLTHGAKVNFSGKIYNAVQYGLNPETGEIDYDQVDELAREHRPKMIVAGFSAYSQVVDWQRFRAIADSVGAWLMVDMAHVAGLIAAGLYPSPVQIADVTTTTTHKTLRGPRGGLILAKANPEVEKQLNSLVFPGIQGGPLMHVIAAKAVALKEALQPDFRHYQSAVMENADAMAKTFIERGYRIVSGGTRNHLFLVDLIQKGLTGKLAEEVLGRAHITVNKNAVPNDPQSPFVTSGIRVGTPAVTTRGFGVEECRLLAGWMCDIMDCPGDETVIGQVREEVTHLCRRFPVYAN

SEQ ID NO: 80299 - DNA, 1305 bp, Methylobacterium extorquens
  CDS (1)..(1305): transl_table=11
atgagcgccggaactgcgaccgacaccaccgacctcgactccttcttctcggctcatcttgccgagaccgatcccgagatcgccaaggccatctcgcaggagctgggccggcagcagcacgagatcgagctgatcgcgtccgagaacatcgtctcgcgcgccgtgctcgaagcgcagggctcggtcctgaccaacaagtacgccgagggttatccgggtcggcgctactacggcggctgccagttcgtggacatcgccgaggaactcgccatcgaccgggccaagcgcctgttcggctgcggcttcgccaacgtgcagccgaattcaggctcgcaggcgaaccagggcgtgttcatggccctgatgcagccgggcgacaccttcctcggcctcgacctcgcggccggcggccacctcacccacggcgcccccccgaacgtctcgggcaagtggttcaagccggtctcctacaccgtgcgccgcgaggaccagcgcatcgacatggagcaggtcgagcgcctcgcccaggagcacaagccgaaggtgatcatcgccggcggctcgggctacccgcgtcactgggacttcgcgaagttccgtgagatcgccgattccgtcggcgcctacttcttcgtcgacatggcccacttcgccggcctcgtcgccgcgggcctgcacccgtcgccgttcccgcatgcgcacgtcgccaccacgacgacgcacaagaccctgcgcggcccgcgcggcggcatgatcctgacgaacgacgaggcgctggccaagaagttcaactcggcgatcttccccggcctccagggcggcccgctgatgcacgtcatcgccgccaaggcggcggccttcggcgaggcgctgaagcccgagttcaagatctacgccaagcaggtgatcgacaacgcccgggcgctggccgacaccatcatctccggcggctacgacatcacctcgggcggcaccgacaaccacctgatgctggtcgaccttcagaagaagggcctcaccggcaaggcggccgaggcggcgctctcccgggccgacatcacctgcaacaagaacggcgtgccgttcgacccgcagaagccgacgatcacctccggcatccgtctcggcacgccggccagcaccacccgcggcttcggcgtcgccgagttcaagcaggtcggctcgctgatcgttcaggtgctcgatggcatcgccgagaagggcgatggcggcgacgcggcggtcgaggcggcggtgaaagagaaggtccacgccctcaccgatcggttcccgatctacgcctga

SEQ ID NO: 80300 - protein, 434 aa, Methylobacterium extorquens
MSAGTATDTTDLDSFFSAHLAETDPEIAKAISQELGRQQHEIELIASENIVSRAVLEAQGSVLTNKYAEGYPGRRYYGGCQFVDIAEELAIDRAKRLFGCGFANVQPNSGSQANQGVFMALMQPGDTFLGLDLAAGGHLTHGAPPNVSGKWFKPVSYTVRREDQRIDMEQVERLAQEHKPKVIIAGGSGYPRHWDFAKFREIADSVGAYFFVDMAHFAGLVAAGLHPSPFPHAHVATTTTHKTLRGPRGGMILTNDEALAKKFNSAIFPGLQGGPLMHVIAAKAAAFGEALKPEFKIYAKQVIDNARALADTIISGGYDITSGGTDNHLMLVDLQKKGLTGKAAEAALSRADITCNKNGVPFDPQKPTITSGIRLGTPASTTRGFGVAEFKQVGSLIVQVLDGIAEKGDGGDAAVEAAVKEKVHALTDRFPIYA

SEQ ID NO: 80301 - DNA, 1290 bp, Methanococcus jannaschii
  CDS (1)..(1290): transl_table=11
atggaatattcggatgttccaaagtttattagggacgtttcaataaaacagcacgagtggatgagagagagcataaaattaattgcaagtgagaatataacaagtttagcagttagagaggcgtgtgcaacagattttatgcatagatatgctgagggattaccaggaaaaagattataccaaggatgtaaatatatagatgaagttgaaacactctgtatagagttgtctaaagaattatttaaagctgaacacgcaaacgttcagccaacaagtggtgtcgttgctaatttagctgttttctttgctgaaacaaagccaggggataaattaatggctttaagtgttccagatggtgggcatataagccattggaaagtaagtgctgctggaattagaggattaaaagttataaaccatccattcgacccagaagagatgaatattgatgctgatgcaatggttaaaaaaatcttagaagagaagccaaagctaatattgtttggaggttctttattcccattccctcatccagtagctgatgcctatgaagctgctcaagaagttggtgctaaaattgcctatgatggagctcatgttttgggattaatagctggaaagcagttccaagacccattgagagaaggggcggagtatttaatgggtagcactcataaaacattctttggtcctcaaggaggagttatattaacaacaaaagaaaacgctgacaagatagacagccatgtattcccaggggttgttagtaaccatcatttacatcataaggctggtttagccattgccttagctgagatgttggagtttggagaagcttatgctaagcaagttattaagaatgcaaaggcattagctcaggctctgtatgagagaggatttaatgttttatgtgagcacaaggactttacagaaagccatcaagtaattattgatatagagagttctccagacatagagttttcagcaagtgagttagctaagatgtatgaagaggcaaatatcattttaaataaaaacttattgccatgggatgatgttaataactcagacaatccaagtggtattaggttaggaacacaagaatgtacaagattaggaatgaaagaaaaagagatggaagaaatagctgaatttatgaaaaggatagctattgataaagaaaaaccagagaaagttagagaggatgttaaagaatttgctaaggagtacagcactattcattacagttttgatgagggagatggatttaaatatctaagattctattaa

SEQ ID NO: 80302 - protein, 429 aa, Methanococcus jannaschii
MEYSDVPKFIRDVSIKQHEWMRESIKLIASENITSLAVREACATDFMHRYAEGLPGKRLYQGCKYIDEVETLCIELSKELFKAEHANVQPTSGVVANLAVFFAETKPGDKLMALSVPDGGHISHWKVSAAGIRGLKVINHPFDPEEMNIDADAMVKKILEEKPKLILFGGSLFPFPHPVADAYEAAQEVGAKIAYDGAHVLGLIAGKQFQDPLREGAEYLMGSTHKTFFGPQGGVILTTKENADKIDSHVFPGVVSNHHLHHKAGLAIALAEMLEFGEAYAKQVIKNAKALAQALYERGFNVLCEHKDFTESHQVIIDIESSPDIEFSASELAKMYEEANIILNKNLLPWDDVNNSDNPSGIRLGTQECTRLGMKEKEMEEIAEFMKRIAIDKEKPEKVREDVKEFAKEYSTIHYSFDEGDGFKYLRFY

SEQ ID NO: 80303 - DNA, 1287 bp, Methanopyrus kandleri
  CDS (1)..(1287): transl_table=11
gtgttcgggttggaggacgtacattccgtcgtgcgggcggtggagaagcatcacgagtggctgaagaagtgcctccccatgatcgccagcgagaacgtgaccagccccgcggtgcgcgagatgctcgtgacggatttcgggcaccggtacgccgaagggaaacccggtgagcggctttacgagggttgtgagtacatcgacgaagtcgagctggcctgtgtacgactggccaaagagctcttcggtgccgagcacgcgaacgtccagcccacatccggcgtggtggccaacctagccgctctcttcgcgttgaccgagcccggtgacacgatcttggggcttcggatctcccacgggggtcacatcagccaccacgatatcagcgctccgggtgttagagggctcaacgtcgagtacctaccgttcgacgaggaggatatggccatcgacgtcgacggtatggtccgcaagatcgaggaagtcgagccgtcggtggtcatgctcggggctagcctgttcctgtttccacatccggtggaggaggccgtagaagccgtggaggccgtcggaggttacgtggtgtacgacgccgcccacgtgctcggactgatcgccggcggtcagttccaggaccctatccgagaaggcgctcacgtggtcaccggaagcactcacaagacgtttccgggtcctcagggcggaatcgtgctctgtcaacgggatctagccgacgacatcgacgaggcagtgtttccggggctcgtgagcaaccaccacctgcaccacgtggcggcgctggccgtagcgctcgcggagttcaaggagtacggggagcgatacgcgcgtgacacggttcggaacgctaaggctctggccgaggctctgtacgccgaggggctccgggtactctgtgagcaccggggcttcacggagtcccatcaaatcgccgtggacgtgcgggagcaaggagggggagcggtcatcgccgaaaaactggagagtgccaacatcctgtgcaacaagaacctgctaccctgggacgacgagtcgaaatcccacgatccgagcggtatccggctgggcacccaggagctcacccggttgggcatgggtctttctgagatggagtacatcgccgagctgatcgcggacgtcgtgctcggtcgcagggagccgtccgaggtccggaaggacgtcgaggaactccggcgtgagttccaggaggtcaagtacgggttcgggtcgggagtgggtgcccacgaatggcccaggctcgccgactggtag

SEQ ID NO: 80304 - protein, 428 aa, Methanopyrus kandleri
MFGLEDVHSVVRAVEKHHEWLKKCLPMIASENVTSPAVREMLVTDFGHRYAEGKPGERLYEGCEYIDEVELACVRLAKELFGAEHANVQPTSGVVANLAALFALTEPGDTILGLRISHGGHISHHDISAPGVRGLNVEYLPFDEEDMAIDVDGMVRKIEEVEPSVVMLGASLFLFPHPVEEAVEAVEAVGGYVVYDAAHVLGLIAGGQFQDPIREGAHVVTGSTHKTFPGPQGGIVLCQRDLADDIDEAVFPGLVSNHHLHHVAALAVALAEFKEYGERYARDTVRNAKALAEALYAEGLRVLCEHRGFTESHQIAVDVREQGGGAVIAEKLESANILCNKNLLPWDDESKSHDPSGIRLGTQELTRLGMGLSEMEYIAELIADVVLGRREPSEVRKDVEELRREFQEVKYGFGSGVGAHEWPRLADW

SEQ ID NO: 80305 - DNA, 1260 bp, Methanosarcina mazei; identical to SEQ ID NO: 79721
  CDS (22)..(1260): transl_table=11

SEQ ID NO: 80306 - protein, 412 aa, Methanosarcina mazei
MSYIEKIDPELFEAIKNEADRQEHKLNLIASENYASRAVMEAQGSIMTNKYAEGYSGKRYYGGCDFVDVAENLAIARAKELFGAKYVNVQPHSGSGANMAVYFSVLQPGDTILSMDLSHGGHLSHGSPVSFSGKLYNIVPYGVSKETEALDYDELLKLAKECKPRMIVCGASAYPRVIDFKRFREIADEVGAYLLADIAHIAGLVVAGVHPSPVPYADFVTTTTHKTLRGPRGGMIISKTEELAIGVNKAVFPGIQGGPLMHIIAAKAVAFKEAMSEEFRQDQDQTVKNAKVLCSCLKQKGFDIVSGGTDNHLMLVNLNNMNITGKDAEAALSKAGIIANKNTVPFETRSPFVTSGVRLGTPSCTTRGMKEKEMELVADYIEAAIKNSENDALLSEINIKVRDLCLKFPVYE

SEQ ID NO: 80307 - DNA, 1275 bp, Methanobacterium thermoautotrophicum
  CDS (1)..(1275): transl_table=11
atggtcagcaatcaggattataccgagaggataagagatctcatgaaggatcataacagctggatggagtcaagcatcaacctcatagcaagtgaaaatataaccagttcaagggtcaaggaggccctcatctctgacctttcacaccgctatgcagagggtcttcccggtgagaggctctatgagggctgcaggtacatagatgagattgaagagatcacaattgaactctcaaagaaactcttcagggcagaacatgcaaatgtccagccaacatcgggtgttgtggccaacctcgcctgcttctttgcaactgcagatgttggcgaccccatgatggccatggaggtcccatacggcggccacatatcacatgccaaggtcagtgcagccggtgtgaggggattcaaaatatacacccacccctttgactttgaaaacatgaacatagacgccgatgcaatgaagaagaagatccttgaggtcaaaccaaggataatactcttcggcggaagcctcttcctcttcccccaccctgtggaggaggcagttgaggccgcagaggaggtgggtgcaaggataatgtacgacggcgcccacgtccttggcctaattgcaggcggatacttccaggatcccctcagggagggcgccgatatgctggtgggaagcacacacaagacattccccggaccccagggcggcataatcctctgcagggaggaacttgcagatgacatagatgaggctgtcttcccgggacttgtgagtaaccaccacctccaccacgtggcaggacttggaatagcaaccgcagagatgcttgagtttggaagtgaatacgcggcacagacaatcagaaacgcaaagaaactcgcagaaaacctcaatgaacttggattcaacgtactctgtgagcacctcgacttcacagaatcccatcaggttgtgatggatgtatcagacattggcagggccgccgagatatccaaaaaactcgaggccaacaacataatactcaacaagaaccttctcccatgggacgatgttaacaggtcagacgacccatcaggaataaggataggtacacaggagataacaaggcgcggaatgaaggagtcagagatgtcagaggttgcagaatacataaagaaggttgttattgatggcaggaatgttaaggaagaggtttcagagttcatgtcctcctatacaaggtccactacgcctttgaggagtcaggggcctacaagtacatggagatcctgtagatga

SEQ ID NO: 80308 - protein, 424 aa, Methanobacterium thermoautotrophicum
MVSNQDYTERIRDLMKDHNSWMESSINLIASENITSSRVKEALISDLSHRYAEGLPGERLYEGCRYIDEIEEITIELSKKLFRAEHANVQPTSGVVANLACFFATADVGDPMMAMEVPYGGHISHAKVSAAGVRGFKIYTHPFDFENMNIDADAMKKKILEVKPRIILFGGSLFLFPHPVEEAVEAAEEVGARIMYDGAHVLGLIAGGYFQDPLREGADMLVGSTHKTFPGPQGGIILCREELADDIDEAVFPGLVSNHHLHHVAGLGIATAEMLEFGSEYAAQTIRNAKKLAENLNELGFNVLCEHLDFTESHQVVMDVSDIGRAAEISKKLEANNIILNKNLLPWDDVNRSDDPSGIRIGTQEITRRGMKESEMSEVAEYIKKVVIDGRNVKEEVSEFMSSYTRSTTPLRSQGPTSTWRSCR

SEQ ID NO: 80309 - DNA, 1251 bp, Moorella thermoacetica
  CDS (1)..(1251): transl_table=11
atgaacctggaaacagtagccaaggttgatcccgaaatagtagccgccgtcaggggcgagcttcaacgccagcggacccacctggaactaatcgcctcagagaacttcgtcagccaggccgtcatggaggcctatagctgcgtcctgaccaataaatacgccgaagggtatcccggcaaacgctattatggcggttgtgaatgggccgacgtagtcgaaaacttggcccgggaaagggccaaagccctcttcggggccgagcacgccaatgtccagccccattccggcagccaggccaacaccgccgtctacctggccgttctgaacccgggcgataaggccctgggcatgaacctggcccacggcggccatttgacccacggtagcccggtaagcctttccggcaaatactataacttctgtttctacggcgtcgatgccaaaaccggccgtattgactatgacgccgtagcccgcatcgcccgtgaggagcggcccagactgatcgtcgccggggccagcgcctacccgcgggtaatcgactttgcccgtttccgcgagattgccgacgaggtcggcgccctgctgatggtggatatggcccatatcgccggactggtggccgccggtatccatcccaacccggtaccctacgcccacttcgtgaccaccaccacccataagaccatgcgcggtccgcggggtgggattatcctgaccaccagggaatacgcccgggatatcgataaggccgtcttccccggtgtccagggcggtcccctgatgcacgtcatcgccgccaaggctgtggccttaaaggaggccatgctgccggagttcaaacgttaccaggagcaaatagttaccaatgcccgtaccctggccgacgccctcatgggctacggatttaacctggtttccggcggtaccgacaaccacctaatgctcgtcgacctacgcaataagaatataaccggccgggaggccgaagatatcctggcctcggtccagattaccgtcaacaagaacgccatccccttcgacccgcagaagcccagcgtaaccagcggcatccgcctgggaacggccgctctgacctcccggggcatggacgccgacgccatggtccaggtggcccgggccatcgacctggccctctcctacggtccggatgagaagaaactggaggaagccaggggtatcgtcgccgaactctgccgggccttccccctctaccaggagctcgactaa

SEQ ID NO: 80310 - protein, 416 aa, Moorella thermoacetica
MNLETVAKVDPEIVAAVRGELQRQRTHLELIASENFVSQAVMEAYSCVLTNKYAEGYPGKRYYGGCEWADVVENLARERAKALFGAEHANVQPHSGSQANTAVYLAVLNPGDKALGMNLAHGGHLTHGSPVSLSGKYYNFCFYGVDAKTGRIDYDAVARIAREERPRLIVAGASAYPRVIDFARFREIADEVGALLMVDMAHIAGLVAAGIHPNPVPYAHFVTTTTHKTMRGPRGGIILTTREYARDIDKAVFPGVQGGPLMHVIAAKAVALKEAMLPEFKRYQEQIVTNARTLADALMGYGFNLVSGGTDNHLMLVDLRNKNITGREAEDILASVQITVNKNAIPFDPQKPSVTSGIRLGTAALTSRGMDADAMVQVARAIDLALSYGPDEKKLEEARGIVAELCRAFPLYQELD

SEQ ID NO: 80311 - DNA, 1245 bp, Mycoplasma gallisepticum
  CDS (1)..(1245): transl_table=4
atttggatcaatcttatggagatttttaagctaattaatcaagaattgcaaagacaacaagatcagattgaactgatcgcttcagaaaactatgtttctgaagctgttcttagagcaactggatcagtcctaactaataagtatgctgaaggaacacccaataaacgctattatggtgggtgtgagtatgttgatcagattgaattaattgcgattgaaaaactaaaaaaactttttggtgctcgtcatgctaatgttcaaccacactcaggatcaacagcaaatgctgctgcttatctagccttattacaaccacacgataaagtattagcgatggggttaaatgatggtggtcatttaacccatggatctaaagttaatttttcagggaagatttatgacttttatcattataatgttgatccaaatacttatctattagactatgatgagatcttaaaaaaagcaattgaagtaaaacctaaactaattgtttgtggggcttcaaactattcaagagcaatcgactttgcaaagtttagacagatcgctgatcatgttagtgcttatttaatggctgatatcgcacatattgctggactaatcgttgcaggttatcatcaaaacccggttgaatattgtgatatcatcacaagcactactcacaaaaccttaagaggcccacgtggtgggattatcttaactaatcgtgaagatctaattaaaaagattgatagtgcagttttccctggagaattgggtggaccactaatgcatgtgattgcagcaaaagcaattgcttttgatgaagcacttcaacctaaatttaagacttacattaaaaatgtaattgataatagtaaagctttttgtgaagcttttattaataaaggttatcagattattgctaatggaactgataaccatttattctcaatcaatttattcaaaaagtttaatttaaccggtgatttagtagaaaattgattgtaccaagctaatattgttgttaataaaaatatgattccatacgattcaaataaatcaatgaatcctagtggaattagattgggtactgcagcaatgacatcaaggggattggttcaatctgactttgttcagattgctgattgaattgatcagatcattaaagcaaaaggtgatcttaatgtgatcaataaagttaaatctgaagtaaaaaaactattagtaaaatacccaatttaccaagaccgagattactag

SEQ ID NO: 80312 - protein, 414 aa, Mycoplasma gallisepticum
MWINLMEIFKLINQELQRQQDQIELIASENYVSEAVLRATGSVLTNKYAEGTPNKRYYGGCEYVDQIELIAIEKLKKLFGARHANVQPHSGSTANAAAYLALLQPHDKVLAMGLNDGGHLTHGSKVNFSGKIYDFYHYNVDPNTYLLDYDEILKKAIEVKPKLIVCGASNYSRAIDFAKFRQIADHVSAYLMADIAHIAGLIVAGYHQNPVEYCDIITSTTHKTLRGPRGGIILTNREDLIKKIDSAVFPGELGGPLMHVIAAKAIAFDEALQPKFKTYIKNVIDNSKAFCEAFINKGYQIIANGTDNHLFSINLFKKFNLTGDLVENWLYQANIVVNKNMIPYDSNKSMNPSGIRLGTAAMTSRGLVQSDFVQIADWIDQIIKAKGDLNVINKVKSEVKKLLVKYPIYQDRDY

SEQ ID NO: 80313 - DNA, 1221 bp, Mycoplasma genitalium
  CDS (1)..(1221): transl_table=4
atgttttcaaaggtaagacttttacttaataaagagttacaacgtcaaagagaaaacatttgtttaattgcttcagaaaattacgttagccaagacatattagctgtaactggttcagtattaacaaataaatatgcagaaggctatcccagtaaacgtttttatcaaggctgtgaagttgttgatgaatctgaaaacttagccattgaaagttgcaaaactttatttggagcacaatgggctaatgtccaacctcattctggatcatctgctaactatgcagtttacttagcattgttaaaaccaggagatactatcttaggattagatcttaattgtggtggtcatttaacccatggtagccccgttaatttttcaggtaagcaatatcaagcagtaacttattcgttagattttgaaacagaaactcttgattatgatgcaattcttcaaattgctctcgaacacaaaccaaagttaattatttgtggtttttctaactattctaggactgttgactttaaaaaatttagtgcaattgcaaaacaagttaatgcgtatcttttagctgatattgcccatattgctggtttcatcgctgcaggtttgcaccaaaaccctttgccttttgtggatgttgtcacttcaacaactcataaaactttgcgtggtcctagggggggtatcattatgtctaacaaccaagcaattatcaaaaagcttgatagtggagtatttcctggatgtcagggtggacctttacaacatgtgatagcagctaaatatgtttgttttaaagaagctttgaatccaaagtttaagcagtatatgcaacaagttaaagataatgctttagcaatggcaaattgatttttaaagcagggttatcgtgttgtgtcaaaaggtactgaaacccacttattttcattagtggttggtaatggtaaagatgttgcgttgtggttacaaaaagctaacattgttttgaatatgaatacaatcccttttgaaacaaaatctgcttttagtccttcaggtattagacttggaactcctgcaatgacaaccagaggttttaaaactaatgactttatttttgttgccagtttgattgataaggttattaaaagtaatggtaatcaaaaggtaattagtcaaacaaaaacagctgttttaaatctcttaaaacgctttccgctctataagggtttagcttattaa

SEQ ID NO: 80314 - protein, 406 aa, Mycoplasma genitalium
MFSKVRLLLNKELQRQRENICLIASENYVSQDILAVTGSVLTNKYAEGYPSKRFYQGCEVVDESENLAIESCKTLFGAQWANVQPHSGSSANYAVYLALLKPGDTILGLDLNCGGHLTHGSPVNFSGKQYQAVTYSLDFETETLDYDAILQIALEHKPKLIICGFSNYSRTVDFKKFSAIAKQVNAYLLADIAHIAGFIAAGLHQNPLPFVDVVTSTTHKTLRGPRGGIIMSNNQAIIKKLDSGVFPGCQGGPLQHVIAAKYVCFKEALNPKFKQYMQQVKDNALAMANWFLKQGYRVVSKGTETHLFSLVVGNGKDVALWLQKANIVLNMNTIPFETKSAFSPSGIRLGTPAMTTRGFKTNDFIFVASLIDKVIKSNGNQKVISQTKTAVLNLLKRFPLYKGLAY

SEQ ID NO: 80315 - DNA, 1281 bp, Mycobacterium leprae
  CDS (1)..(1281): transl_table=11
atggtcgcgccgctggctgaagtcgacccggatatcgccgagctactgggcaaagagctaggccggcaacgggacaccttggagatgatcgcttcagagaactttgtgccgcgctcggttctacaggcccaaggcagcgtgctgaccaacaagtacgctgaggggttgcccggccgacgctattacgacggctgcgagcacgtcgacgtcgtggagaacatcgcccgcgaccgggccaaggcgctgttcggtgccgacttcgccaacgtgcagccgcactcgggggcccaggccaacgccgcggtactgcacgcgctgatgtctccgggggagcggctgctgggtctggatctcgccaatggcggtcatctgacgcatggcatgcggctgaacttctccggcaagctgtatgaaaccggcttttatggcgtcgacgcgacaacgcatctcatcgatatggacgcggtgcgggccaaggcgctcgaattccgcccgaaggtgctgatcgctggctggtcggcctatccgcggattctggacttcgctgcttttcggtcgatcgcagacgaagtcggcgccaagctgtgggtcgacatggcgcatttcgcgggcctggttgcggtggggttgcacccgtctccagtgccgcatgcagatgtggtgtccacgaccgttcacaagactcttggcgggggccgttccggtttgatcctgggcaagcaggagttcgccacggccatcaactcagcggtgtttcctggccagcagggtggaccgcttatgcatgtcatcgcgggcaaggcggtcgcgctgaagattgctaccacgcctgagttcaccgaccggcagcagcgcacgctggccggcgcccggattctcgccgatcggcttaccgccgctgatgtcaccaaggccggggtgtcggtggtcagtggtggcactgacgtccacctagtgctggtcgacctgcgcaactccccgttcgacggccaggcagcagaagatctgctgcacgaggtcggcatcactgtcaaccgcaacgtggttcccaatgacccccggccgccgatggtgacctcaggcctgcggataggaacccccgcgctggcaacccgagggttcggtgaagcggagttcaccgaggtcgcggacatcatcgcgacggtgctgaccactggtggcagtgtcgatgtggccgcgctgcggcagcaggttacccgacttgccagggacttcccgctctacgggggacttgaggactggagcttggccggtcgctag

SEQ ID NO: 80316 - protein, 426 aa, Mycobacterium leprae
MVAPLAEVDPDIAELLGKELGRQRDTLEMIASENFVPRSVLQAQGSVLTNKYAEGLPGRRYYDGCEHVDVVENIARDRAKALFGADFANVQPHSGAQANAAVLHALMSPGERLLGLDLANGGHLTHGMRLNFSGKLYETGFYGVDATTHLIDMDAVRAKALEFRPKVLIAGWSAYPRILDFAAFRSIADEVGAKLWVDMAHFAGLVAVGLHPSPVPHADVVSTTVHKTLGGGRSGLILGKQEFATAINSAVFPGQQGGPLMHVIAGKAVALKIATTPEFTDRQQRTLAGARILADRLTAADVTKAGVSVVSGGTDVHLVLVDLRNSPFDGQAAEDLLHEVGITVNRNVVPNDPRPPMVTSGLRIGTPALATRGFGEAEFTEVADIIATVLTTGGSVDVAALRQQVTRLARDFPLYGGLEDWSLAGR

SEQ ID NO: 80317 - DNA, 1257 bp, Mycoplasma mobile
  CDS (1)..(1257): transl_table=4
atgaaaaaaattaatttaaaagataaagaaattgaaaaaattattaataatgagcaacaaaggcaagaagaacacattgaattaatagcaagtgaaaactatgtatcaaaagatgtgcttgaagctacaggaagtattttaacaaataaatatagtgaaggttatccaggagctagatattatgatggatgtgaatttgttgatcaaatagaaactttagcaattgaaagattgaaaaaactttttaatgttaaatttgcaaatgttcaaccacattctggaagtagtgcgaattctgctgcaattgcagctttagtaaaacctggcggaaaaattttgggaatgtctttagatgccggaggtcatttaactcatggatacaaaattagtttcagtggaacattttatgatccatatttttacggagtaaatgatgaaggtttattagattatgatgtaattgagaaattagcagaaaaaataaaaccagaactaattatttgtggtgcaagtaattatagcagaacaatagactttgaaaaattcagtaaaattgctaaaaaagtgggtgcttttttattagctgatattgcccatatagcaggtttaattattgctgatcttcacccaagtcctgttggacatgcagatgtaattacttctacaacacataaaacaataagaggcgctagaggtggaattattatgtctaatgacgaaactttaatgaaaaaaattgatcgttgagtatttcctggttaccaaggtggccctttagtccatgttattgcaggtaaagcagttgcttttggcgaagcacttacacctcaatttaaaaaatatcaacaacaaattatttcaaatgcaaaagcttttagtgaagaatttaaaaaagttggaacaaaaataatttcaggtcaaactgataatcacttatttacaattgatgtgaaatcttcttttaatattagtggtaaagaagcttctgaattaatgcatagcattaatattacagcaaataaaaattcaattccaaatgatactttaggtcctaaaatttctagcggtgttagaatgggaacccctgcaatgactacaaggggttttaaagaagttgaatttaaaaaacttgcaagaatcataattgaactattagcaaattcaacttcatctaatcttgaatcattaaaactgaaattgaaaaatgaagttttagaacttacaaaagcatttccaacaaaggattattatttataa

SEQ ID NO: 80318 - protein, 418 aa, Mycoplasma mobile
MKKINLKDKEIEKIINNEQQRQEEHIELIASENYVSKDVLEATGSILTNKYSEGYPGARYYDGCEFVDQIETLAIERLKKLFNVKFANVQPHSGSSANSAAIAALVKPGGKILGMSLDAGGHLTHGYKISFSGTFYDPYFYGVNDEGLLDYDVIEKLAEKIKPELIICGASNYSRTIDFEKFSKIAKKVGAFLLADIAHIAGLIIADLHPSPVGHADVITSTTHKTIRGARGGIIMSNDETLMKKIDRWVFPGYQGGPLVHVIAGKAVAFGEALTPQFKKYQQQIISNAKAFSEEFKKVGTKIISGQTDNHLFTIDVKSSFNISGKEASELMHSINITANKNSIPNDTLGPKISSGVRMGTPAMTTRGFKEVEFKKLARIIIELLANSTSSNLESLKLKLKNEVLELTKAFPTKDYYL

SEQ ID NO: 80319 - DNA, 1242 bp, Mycoplasma mycoides subsp
  CDS (1)..(1242): transl_table=4
atgaatacaaaaattagtccattaattaaagaatcattaaataaagaattaaaaagacaacaatctcatattgaattaattgcttctgaaaactatgtttctaaagctgttttagaattaaatggttctgttttaactaataaatatgctgaaggttatcctggtaaaagatattatggtggttgtgaatttattgatgaaattgaaagtttaggaattcaaactgctaaagaattgtttcatgccgaacatgctaacattcaacctcattcaggaagtcaagcaaatgatgctgcttataaagctttattagaaccaaaagatcgtgttgttgctatgagtttagacgctggtggtcatttaactcatggatatcctattaatttttctggatatacttatgattttagattttatggagttaataaagatactgagcaactagattatcaagaaattgaaaaaatcgttttagaacataagccaaaattaattgtagctggtgctagtgcttattctagaattattgattttaaaaaatttaaagaaattgcagataaagttggagcttatttaatggttgatatggctcatattgctggattagtagctgctggagtgcacccaaatccactggaatatgcagatattgtaacaacaactactcataaaactttaagaggagcacgtggtggattaattttatgtaaacaagagtttgcaaaaaaagttgatttagcagtatttcctggttcacaaggtggtcctttagaaaatttaattgctggaaaaactcaagctcttttagaagcttcaactgatgaatttaaagaatatggaaaacaaattgtaaaaaatactaaagctttagctaatgttttacaagaaaatggtttaagactagttgctggtggtagtgataatcacttaattaatgttgatgttaagtctactttacgaattacaggtaaaaaagctgaaaagattttagaatcaattggtattatttgtaataaaaatatgattccatttgatactgaaaaacctttttatacttctggaattagacttggaactcctgcaatgacaactagaggattcaaagaagaagaatttaaacaagtaggattaattattgttaatgctttaaaagatccatcagaagaaaatttagaaaaactagcaaaacaagttactagtttatgtgaaaaattcccaatatatcaaaatattaaatactaa

SEQ ID NO: 80320 - protein, 413 aa, Mycoplasma mycoides subsp
MNTKISPLIKESLNKELKRQQSHIELIASENYVSKAVLELNGSVLTNKYAEGYPGKRYYGGCEFIDEIESLGIQTAKELFHAEHANIQPHSGSQANDAAYKALLEPKDRVVAMSLDAGGHLTHGYPINFSGYTYDFRFYGVNKDTEQLDYQEIEKIVLEHKPKLIVAGASAYSRIIDFKKFKEIADKVGAYLMVDMAHIAGLVAAGVHPNPLEYADIVTTTTHKTLRGARGGLILCKQEFAKKVDLAVFPGSQGGPLENLIAGKTQALLEASTDEFKEYGKQIVKNTKALANVLQENGLRLVAGGSDNHLINVDVKSTLRITGKKAEKILESIGIICNKNMIPFDTEKPFYTSGIRLGTPAMTTRGFKEEEFKQVGLIIVNALKDPSEENLEKLAKQVTSLCEKFPIYQNIKY

SEQ ID NO: 80321 - DNA, 1281 bp, Mycobacterium paratuberculosis
  CDS (1)..(1281): transl_table=11
atgtcggcgccgctcgccgacatcgaccccgacatcgccgggttgctgggtcaggagctgggccgccagcgcgacacgctggagatgatcgcctcggagaacttcgtcccgcgcgcggtgctgcaggcccagggcagcgtgctgaccaacaagtacgccgaggggctgcccggccgccgctactacggcggctgcgagtacgtcgacgtggtggagaacatcgcccgggatcgggccaaggccctcttcgacgccgacttcgccaacgtgcagccgcattcgggtgcccaggccaacgcggccgtgctgcacgcgctgatgacgccgggggagcggctgctgggtctggacctggccaacggcgggcacctgacgcacggcatgaagctgaacttctccggcaagctctacgacgtcggcttctacggcgtcgacccgaccacgcacctgatcgacatggacgcggtgcgggccaaggccctcgagttccgtcccaaggtcatcatcgccggctggtcggcctacccgcgggtgctggacttcgcggcgttcgcgtcgatcgccgacgaggtcggcgccaagctgtgggtcgacatggcacacttcgcgggcctggtcgccgccgggctgcacccgtccccggttccgcacgccgacgtggtgtccaccaccgtgcacaagacgctcggcggcccgcgctccggcctgatcctgggcaagcaggagtacgccaagtcgatcaactccgcggtgttccccggccagcagggcgggccgctcatgcacgtcatcgccgccaaggccgtcgcgctcaagatcgccggcacggaagagttcgccgaccggcagcggcgcaccctgtccggggcgcgcatcctcgccgagcggctgtcgggcgccgacgtggcggccgccggcgtgtcggtggtcagcggcggcaccgacgtccacctggtgctggtcgacctgcgcaactcggagctcgacggccaggccgccgaggacctgctgcacgagatcggcatcaccgtgaaccgcaacgccgtgcccaacgatccccggccgccgatggtcacctccgggttgcgggtgggcacgccggccctggccacccggggcttcgggggcgccgagttcagtgaggtcgccgacgtcatcgccaccgcgctggcgggcggccgcggggccgatctggcggcgctgcgggaccgggtcacccggctggccagggatttcccgctgtacgagggcctcgaagactgggcgctggtcggccggtag

SEQ ID NO: 80322 - protein, 426 aa, Mycobacterium paratuberculosis
MSAPLADIDPDIAGLLGQELGRQRDTLEMIASENFVPRAVLQAQGSVLTNKYAEGLPGRRYYGGCEYVDVVENIARDRAKALFDADFANVQPHSGAQANAAVLHALMTPGERLLGLDLANGGHLTHGMKLNFSGKLYDVGFYGVDPTTHLIDMDAVRAKALEFRPKVIIAGWSAYPRVLDFAAFASIADEVGAKLWVDMAHFAGLVAAGLHPSPVPHADVVSTTVHKTLGGPRSGLILGKQEYAKSINSAVFPGQQGGPLMHVIAAKAVALKIAGTEEFADRQRRTLSGARILAERLSGADVAAAGVSVVSGGTDVHLVLVDLRNSELDGQAAEDLLHEIGITVNRNAVPNDPRPPMVTSGLRVGTPALATRGFGGAEFSEVADVIATALAGGRGADLAALRDRVTRLARDFPLYEGLEDWALVGR

SEQ ID NO: 80323 - DNA, 1221 bp, Mycoplasma pneumoniae
  CDS (1)..(1221): transl_table=4
atggaaccaaagattagaagaatcctcaataaggaattgcaaagacaaagagattgcatttgtttaatagcatcagagaactatgtgagtagggacatcctagaggtcactggttctattttgaccaataagtacgctgagggttatcctactagacgcttttatgaaggttgtgaggtagttgatgaatcagagagcttagccattaatacctgtaaggaattatttggtgcgaagtgagcgaatgtgcaaccgcactccggttcttctgctaactatgccgtgtacttagctctacttaaacctggcgatgccattttagggcttgaccttaactgtggtgggcacttaactcacggtaataaatttaacttttcgggtaaacagtaccagccttattcctacaccatcaaccccgaaaccgagatgttggactatgatgaggtgctacgtgttgctcgggaggtaaaacctaaactaattatctgcggtttttccaattactcgagaaccgttgactttgagcgctttagtgcaattgcgaaagaagttggtgcttaccttttagcggacattgcccacattgcgggattggtagcagctggcttgcaccccaatcccttaccttacactgatgtggttacatctactacccacaaaacactgcgcggtccacggggagggttaattatgtccaataacgaagcgattattcgcaaattggacagcggtgtctttccgggttgtcaaggtggtcccttacagcacgtaattgcggctaagtatgtttgttttaaagaagctttacaaccaaaatacaagcagtacatccaaaacgttaagaccaatgcagcgagcatggctagttggttcaaacaacaaggttaccgcgtcatttctaacggaactgatacccacttgttctcgcttgatgtcggtaagggtaaagatgtttcacaatgattgcaacaagccaacattgtgttgaacatgaacacggttcctttcgataagaatcctgccataaatccttccggtattcgtattggtacacctgccatgactactcgtggctttaaggaaaagcacttcctttatgttgctgccttaattgacaagattattaaatctgacggtaataagaaagttattaaagaagtaaaaaaagcggttttaaaactgttagaacgttttccgttgtataagggattggagtattag

SEQ ID NO: 80324 - protein, 406 aa, Mycoplasma pneumoniae
MEPKIRRILNKELQRQRDCICLIASENYVSRDILEVTGSILTNKYAEGYPTRRFYEGCEVVDESESLAINTCKELFGAKWANVQPHSGSSANYAVYLALLKPGDAILGLDLNCGGHLTHGNKFNFSGKQYQPYSYTINPETEMLDYDEVLRVAREVKPKLIICGFSNYSRTVDFERFSAIAKEVGAYLLADIAHIAGLVAAGLHPNPLPYTDVVTSTTHKTLRGPRGGLIMSNNEAIIRKLDSGVFPGCQGGPLQHVIAAKYVCFKEALQPKYKQYIQNVKTNAASMASWFKQQGYRVISNGTDTHLFSLDVGKGKDVSQWLQQANIVLNMNTVPFDKNPAINPSGIRIGTPAMTTRGFKEKHFLYVAALIDKIIKSDGNKKVIKEVKKAVLKLLERFPLYKGLEY

SEQ ID NO: 80325 - DNA, 1242 bp, Mycoplasma pulmonis
  CDS (1)..(1242): transl_table=4
atgtataaaaaaattactttaaatgacaaggaagttgaacaagcaattaacaatgaattaaaaagacagcaagaacatgttgaattaattgcaagtgaaaattttgtctctgaagatacactaaaagcagtaggatctattttaacaaacaaatatggtgaaggttatccttcaaagcgttattatggaggatgtgaaaacgttgatgtagtagaaaatttagcaattgaaagagcaaaaaaacttttcaatgttaaatacgttaatgttcaaccttactcaggttctgtagctaatgcctctgctattgcttcacttgcgaataatggagatactatcctaggactttcactaaaatcaggaggacatttaactcatggttacaaaataagctttagtggttttttctataattctcatacttatgaagttgatgaaaatggttttctaaattatgatgatattttaaagatagcaaaagaagtaaaaccaaaagttattatttgtggttactctgcatatcctagaatagttgattttaaaaaatttagagaaatagctgatgaagttggagcttatcttttagctgatatttcccacattgctggattaatagttacaaataaccacccttctccaagtgaatatgcagatgtcattatgacaacaacacataaaacaatgcgctctgcaagaggggcaatcattatgaccaataatgaagagcttgctaaaaaaattgatagatgagtttttcctggatatcaaggaggacctcttttccatgctatagctggaaaggcaacaggattttatgaagctttgcaaccttcttttaaaacctaccaagatcaagttgtaaaaaatgcaaaagtttttgcagatgaatttatcaagcttggagccaaagttatttcaggaggaactgacaaccatctactaatagttaatgtttttgactcttatggaattactggtaaaaaagctgaaaatatcttagggaaaatcaacataacagttaataaaaatactattccctttgatacaaactcaccaatggttacttcaggaataagattgggaactcctgctatgaccacaagaggttttaaagaaaatgaatttattttaattgcaagaattatggttaaagctttaaaaaatcctgatgatctttcactacatcaagagttaaaaaatgaagttcttgaaataactaaaaaattctctctaccatgatag

SEQ ID NO: 80326 - protein, 413 aa, Mycoplasma pulmonis
MYKKITLNDKEVEQAINNELKRQQEHVELIASENFVSEDTLKAVGSILTNKYGEGYPSKRYYGGCENVDVVENLAIERAKKLFNVKYVNVQPYSGSVANASAIASLANNGDTILGLSLKSGGHLTHGYKISFSGFFYNSHTYEVDENGFLNYDDILKIAKEVKPKVIICGYSAYPRIVDFKKFREIADEVGAYLLADISHIAGLIVTNNHPSPSEYADVIMTTTHKTMRSARGAIIMTNNEELAKKIDRWVFPGYQGGPLFHAIAGKATGFYEALQPSFKTYQDQVVKNAKVFADEFIKLGAKVISGGTDNHLLIVNVFDSYGITGKKAENILGKINITVNKNTIPFDTNSPMVTSGIRLGTPAMTTRGFKENEFILIARIMVKALKNPDDLSLHQELKNEVLEITKKFSLPW

SEQ ID NO: 80327 - DNA, 1251 bp, Neisseria gonorrhoeae
  CDS (1)..(1251): transl_table=11
atgttttcaaaaagcgttaccctcgcacaatatgaccccgatttggcagcagccattgcccaagaagaccgacgccagcaagaccacgtcgagctgattgcctctgaaaactacgtcagctgcgccgtgatggaggcacaaggttcgcaattgaccaacaaatacgccgaaggctatcccgcaaaacgctactacggcggctgcgaatacgtcgatattgtcgaacaattggcaatcgaccgcgtaaaagaactgtttggcgcagcctatgccaacgttcaaccgcactccggttcccaagccaaccaagccgtatatgcttccgttttaaaaccgggcgacaccattttgggtatgtctctggcgcacggcggacacctgacccacggcgcgagcgttaatatttccggcaaactctacaatgccgttacttatggcttggatgaaaacgaagtcctcgattatgccgaagtcgaacgcctcgcgctcgaacacaaacccaaaatgattgtggcgggcgcgtctgcctacgcgttgcaaatcgactgggcaaaattccgcgaaatcgccgataaagtcggcgcatacctctttgtcgacatggcgcactatgccggactggttgccggcggcgaatatcctaaccccgtgccattctgcgacttcgtaaccactaccacccacaaaaccctacgcggccctcgcggcggtgtgattttgtgccgtgacaatacccacgaaaaagcgctgaactcttccatcttcccaagcctgcaaggcggtccgttgatgcacgttatcgccgccaaagccgtagcgtttaaagaagcgttgcaacccgagttcaaacaatacgcaaaacaagtgaaaatcaatgctgccgtcatggcggaagagttggttaaacgcggtttgcgcatcgtttccggccgcaccgaaagccacgttttcctcgtcgacctgcaaccgatgaaaatcaccggcaaagccgccgaagccgctttgggcaaagcgcacatcaccgtcaacaaaaacgccatcccgaacgatccggaaaaaccgttcgttacctccggcatccgcatcggttccgccgccatgaccactcgcggctttaacgaaaccgacgctcgcgtattgtcgaacttggttgccgatgtattggctaatcccgaagacgaagccaacctcgccaaagtccgcggacaagtgactgccttgtgcgacaaataccccgtttacggaacctaa

SEQ ID NO: 80328 - protein, 416 aa, Neisseria gonorrhoeae
MFSKSVTLAQYDPDLAAAIAQEDRRQQDHVELIASENYVSCAVMEAQGSQLTNKYAEGYPAKRYYGGCEYVDIVEQLAIDRVKELFGAAYANVQPHSGSQANQAVYASVLKPGDTILGMSLAHGGHLTHGASVNISGKLYNAVTYGLDENEVLDYAEVERLALEHKPKMIVAGASAYALQIDWAKFREIADKVGAYLFVDMAHYAGLVAGGEYPNPVPFCDFVTTTTHKTLRGPRGGVILCRDNTHEKALNSSIFPSLQGGPLMHVIAAKAVAFKEALQPEFKQYAKQVKINAAVMAEELVKRGLRIVSGRTESHVFLVDLQPMKITGKAAEAALGKAHITVNKNAIPNDPEKPFVTSGIRIGSAAMTTRGFNETDARVLSNLVADVLANPEDEANLAKVRGQVTALCDKYPVYGT

SEQ ID NO: 80329 - DNA, 1251 bp, Neisseria gonorrhoeae
  CDS (1)..(1251): transl_table=11
atgttttcaaaaagcgttaccctcgcacaatatgaccccgatttggcagcagccattgcccaagaagaccgacgccagcaagaccacgtcgagctgattgcctctgaaaactacgtcagctgcgccgtgatggaggcacaaggttcgcaattgaccaacaaatacgccgaaggctatcccgcaaaacgctactacggcggctgcgaatacgtcgatattgtcgaacaattggcaatcgaccgcgtaaaagaactgtttggcgcagcctatgccaacgttcaaccgcactccggttcccaagccaaccaagccgtatatgcttccgttttaaaaccgggcgacaccattttgggtatgtctctggcgcacggcggacacctgacccacggcgcgagcgttaatatttccggcaaactctacaatgccgttacttatggcttggatgaaaacgaagtcctcgattatgccgaagtcgaacgcctcgcgctcgaacacaaacccaaaatgattgtggcgggcgcgtctgcctacgcgttgcaaatcgactgggcaaaattccgcgaaatcgccgataaagtcggcgcatacctctttgtcgacatggcgcactatgccggactggttgccggcggcgaatatcctaaccccgtgccattctgcgacttcgtaaccactaccacccacaaaaccctacgcggccctcgcggcggtgtgattttgtgccgtgacaatacccacgaaaaagcgctgaactcttccatcttcccaagcctgcaaggcggtccgttgatgcacgttatcgccgccaaagccgtagcgtttaaagaagcgttgcaacccgagttcaaacaatacgcaaaacaagtgaaaatcaatgctgccgtcatggcggaagagttggttaaacgcggtttgcgcatcgtttccggccgcaccgaaagccacgttttcctcgtcgacctgcaaccgatgaaaatcaccggcaaagccgccgaagccgctttgggcaaagcgcacatcaccgtcaacaaaaacgccatcccgaacgatccggaaaaaccgttcgttacctccggcatccgcatcggttccgccgccatgaccactcgcggctttaacgaaaccgacgctcgcgtattgtcgaacttggttgccgatgtattggctaatcccgaagacgaagccaacctcgccaaagtctgcggacaagtgactgccttgtgcgacaaataccccgtttacggaaactaa

SEQ ID NO: 80330 - protein, 416 aa, Neisseria gonorrhoeae
MFSKSVTLAQYDPDLAAAIAQEDRRQQDHVELIASENYVSCAVMEAQGSQLTNKYAEGYPAKRYYGGCEYVDIVEQLAIDRVKELFGAAYANVQPHSGSQANQAVYASVLKPGDTILGMSLAHGGHLTHGASVNISGKLYNAVTYGLDENEVLDYAEVERLALEHKPKMIVAGASAYALQIDWAKFREIADKVGAYLFVDMAHYAGLVAGGEYPNPVPFCDFVTTTTHKTLRGPRGGVILCRDNTHEKALNSSIFPSLQGGPLMHVIAAKAVAFKEALQPEFKQYAKQVKINAAVMAEELVKRGLRIVSGRTESHVFLVDLQPMKITGKAAEAALGKAHITVNKNAIPNDPEKPFVTSGIRIGSAAMTTRGFNETDARVLSNLVADVLANPEDEANLAKVCGQVTALCDKYPVYGN

SEQ ID NO: 80331 - DNA, 1251 bp, Neisseria meningitidis serogroup A
  CDS (1)..(1251): transl_table=11
atgttttcaaaaagcgttaccctcgcacaatatgaccccgatttggcagcagccattgcccaagaagaccaacgccagcaagaccacgtcgagctgattgcctctgaaaactacgtcagctgcgccgtaatggaagcgcaaggttcccagctgaccaacaaatacgccgaaggctaccccggcaaacgctactacggcggctgcgaatacgtcgatattgtcgaacaattggcgattgaccgcgtcaaaaaactgttcggcgcgcaatacgccaacgtccaaccgcactccggctcgcaagccaaccaagccgtgtacgcttccgttttaaaaccaggcgacaccattttgggtatgtctctggcgcacggcggccacctgacccacggcgcgagcgttaatatctcaggcaaactctacaacgctgttacttatggtttggatgaaaacgaagtgctcgattatgccgaagtcgaacgcctcgcgctcgaacacaaacccaaaatgattgtggcgggtgcgtctgcctacgcgttgcaaatcgactgggcaaaattccgcgaaatcgccgataaagtcggcgcatacctctttgtcgatatggcgcactatgccggtctggttgccggcggcgaatatcccaatcccgtgccgttctgcgacttcgttaccaccaccacccacaaaaccctgcgcggtcctcgcggcggcgtaattttgtgccgcgacaatacccacgaaaaagcgttgaactcttccatcttcccaagcctgcaaggtggcccgctgatgcacgttatcgccgccaaagccgtggcgtttaaagaagcattgcaacccgagttcaaacaatacgcaaaacaagtgaaaatcaatgcagccgccatggcggaagagttggttaaacgcggtttgcgcatcgtttccggccgcaccgaaagccacgttttcctcgttgacctgcaaccgatgaaaattaccggcaaagccgccgaagctgctttgggcaaagcgcacatcactgtcaacaaaaacgccatcccgaatgatccggaaaaacccttcgttacctccggcatccgcatcggttccgccgccatgaccacacgcggttttaacgaagccgacgcgcgcgtattggcgaacttggttgccgacgtattgtctaaccccgaagacgaagccaacctcgccaaagtccgcgaacaagtaactgctttgtgcaataaataccccgtttacggcgcgtaa

SEQ ID NO: 80332 - protein, 416 aa, Neisseria meningitidis serogroup A
MFSKSVTLAQYDPDLAAAIAQEDQRQQDHVELIASENYVSCAVMEAQGSQLTNKYAEGYPGKRYYGGCEYVDIVEQLAIDRVKKLFGAQYANVQPHSGSQANQAVYASVLKPGDTILGMSLAHGGHLTHGASVNISGKLYNAVTYGLDENEVLDYAEVERLALEHKPKMIVAGASAYALQIDWAKFREIADKVGAYLFVDMAHYAGLVAGGEYPNPVPFCDFVTTTTHKTLRGPRGGVILCRDNTHEKALNSSIFPSLQGGPLMHVIAAKAVAFKEALQPEFKQYAKQVKINAAAMAEELVKRGLRIVSGRTESHVFLVDLQPMKITGKAAEAALGKAHITVNKNAIPNDPEKPFVTSGIRIGSAAMTTRGFNEADARVLANLVADVLSNPEDEANLAKVREQVTALCNKYPVYGA

SEQ ID NO: 80333 - DNA, 1251 bp, Neisseria meningitidis serogroup B
  CDS (1)..(1251): transl_table=11
atgttttcaaaaagcgttaccctcgcacaatacgaccccgatttggcagcagccattgcccaagaagaccaacgccagcaagaccacgtcgagctgattgcttccgaaaactacgtcagctgcgccgtaatggacgcgcaaggttcccagctgaccaacaaatacgccgaaggctaccccggcaaacgctactacggcggctgcgaatacgtcgatattgtcgaacaattggcgattgaccgcgtaaaagaactgtttggcgcagcctatgccaacgtccaaccgcactccggctcgcaagccaaccaagccgtgtacgcttccgttttaaaaccaggcgacaccattttgggtatgtctctagcgcacggcggccacctgacccacggcgcgagcgttaatatctcaggcaaactctacaacgccgttacttatggtttggatgaaaacgaagtgctcgattatgccgaagtcgaacgcctcgcgctcgaacacaaacccaaaatgattgtggcgggtgcgtctgcctacgcgttacaaatcgactgggcaaaattccgcgaaatcgccgataaagtcggcgcatacctctttgtcgatatggcgcactatgccggtctggttgccggcggcgaatatcccaacccggtgccgttctgcgacttcgtgaccaccaccacccacaaaaccctgcgcggtcctcgcggcggcgtaattttgtgccgcgacaatacccacgaaaaagcgttgaactcttccatcttcccaagcctgcaaggcggtccgctgatgcacgttatcgccgccaaagccgtggcgtttaaagaagcattgcaacccgagttcaaacaatacgcaaaacaagtgaaaatcaatgcagccgccatggcggaagagttggttaaacgcggtttgcgcatcgtttccggccgcaccgaaagccacgttttcctcgttgacctgcaaccgatgaaaattaccggcaaagccgccgaagccgctttgggcaaagcgcacatcaccgtcaacaaaaacgccattccgaacgatccggaaaaacccttcgttacctccggcatccgcatcggctccgctgccatgaccacacgcggttttaacgaagccgacgcgcgcgtattggcgaacttggttgccgacgtattgtctaaccccgaagacgaagccaacctcgccaaagtccgcaaacaagtaactgctttgtgcaataaataccccgtttacggcgcgtaa

SEQ ID NO: 80334 - protein, 416 aa, Neisseria meningitidis serogroup B
MFSKSVTLAQYDPDLAAAIAQEDQRQQDHVELIASENYVSCAVMDAQGSQLTNKYAEGYPGKRYYGGCEYVDIVEQLAIDRVKELFGAAYANVQPHSGSQANQAVYASVLKPGDTILGMSLAHGGHLTHGASVNISGKLYNAVTYGLDENEVLDYAEVERLALEHKPKMIVAGASAYALQIDWAKFREIADKVGAYLFVDMAHYAGLVAGGEYPNPVPFCDFVTTTTHKTLRGPRGGVILCRDNTHEKALNSSIFPSLQGGPLMHVIAAKAVAFKEALQPEFKQYAKQVKINAAAMAEELVKRGLRIVSGRTESHVFLVDLQPMKITGKAAEAALGKAHITVNKNAIPNDPEKPFVTSGIRIGSAAMTTRGFNEADARVLANLVADVLSNPEDEANLAKVRKQVTALCNKYPVYGA

SEQ ID NO: 80335 - DNA, 1251 bp, Neisseria meningitidis serogroup C
  CDS (1)..(1251): transl_table=11
atgttttcaaaaagcgttaccctcgcacaatatgaccccgatttggcagcagccattgcccaagaagaccaacgccagcaagaccacgtcgagctgattgcctctgaaaactacgtcagctgcgccgtaatggaagcgcaaggttcccagctgaccaacaaatacgccgaaggctaccccggcaaacgctactacggcggctgcgaatacgtcgatattgtcgaacaattggcaatcgaccgcgtcaaaaaactgttcggcgcgcaatacgccaacgttcaaccgcactccggctcgcaagccaaccaagccgtgtacgcttccgttttaaaaccgggcgacaccattttgggtatgtctttggcgcacggcggccacctgacccacggcgcgagcgttaatatttccggcaaactctacaatgccgttacttatggtttggatgaaaacgaagtgctcgattatgccgaagtggaacgcttggctctcgaacacaaacccaaaatgattgtggcgggtgcgtctgcctacgcgttgcaaatcgactgggcaaaattccgcgaaatcgccgataaagtcggcgcatacctctttgtcgacatggcgcactacgccggactgattgccggtggcgaatatcccaaccccgtgccattctgcgacttcgtgaccaccaccacccacaaaaccctacgcggccctcgcggcggcgtgattctgtgccgcgacaatacccacgaaaaagcactgaactcttccatcttcccaagcctgcaaggcggtccgctgatgcacgtcatcgccgccaaagccgtagcgtttaaagaagcgttgcaacccgagttcaaacaatacgcaaaacaagtgaaaatcaatgctgccgccatggcggaagaactggtcaaacgcggtttgcgcatcgtttccggccgcaccgaaagccacgttttcctcgtcgacctgcaaccgatgaaaattaccggcaaagccgccgaagccgctttgggcaaagcgcacatcaccgtcaacaaaaacgccattccgaacgatccggaaaaacccttcgttacctccggcatccgcatcggctccgccgccatgaccacacgcggttttaacgaagccgacgcacgcgtattggcgaacttggttgccgacgtattgtctaaccccgaagacgaagcgaatctggaaaacgtccgcaaacagattaccgccctctgcgacaaataccccgtttacggcgcgtaa

SEQ ID NO: 80336 - protein, 416 aa, Neisseria meningitidis serogroup C
MFSKSVTLAQYDPDLAAAIAQEDQRQQDHVELIASENYVSCAVMEAQGSQLTNKYAEGYPGKRYYGGCEYVDIVEQLAIDRVKKLFGAQYANVQPHSGSQANQAVYASVLKPGDTILGMSLAHGGHLTHGASVNISGKLYNAVTYGLDENEVLDYAEVERLALEHKPKMIVAGASAYALQIDWAKFREIADKVGAYLFVDMAHYAGLIAGGEYPNPVPFCDFVTTTTHKTLRGPRGGVILCRDNTHEKALNSSIFPSLQGGPLMHVIAAKAVAFKEALQPEFKQYAKQVKINAAAMAEELVKRGLRIVSGRTESHVFLVDLQPMKITGKAAEAALGKAHITVNKNAIPNDPEKPFVTSGIRIGSAAMTTRGFNEADARVLANLVADVLSNPEDEANLENVRKQITALCDKYPVYGA

SEQ ID NO: 80337 - DNA, 1251 bp, Nitrosomonas europaea
  CDS (1)..(1251): transl_table=11
atgttttcacagagcttgacgattgagcaggtcgatccggatttatggcaggctatcaaaggtgaagtacagcggcaggaagatcatatcgagctgattgcctcggaaaattatgccagtccggccgttttacaggcacagggtaccgtactgacaaacaagtatgctgaagggtatccgggcaagcggtattacggggggtgcaggtatgtggatatcgtcgagcagcttgctatcgaccgtctccggaatctgttcaatgcggaatatgtcaacgtgcagccacactccggttctcaggcaaatgccgcggtctatctgtcggctctgaagcccggagatacgctcctgggtatgtcgctggctcatggtggacatttgactcacggatcagcagtcaatatgagtggcaagatattcaattcaatctcttacggtctgaatccggaaaccgaagagatcgattacgcagaactggagcggcttgcacatgagcataaaccgcgcatgatcgtggctggagcatcctcctatgcacgagtcatagactggaaagcttttcgtcagattgctgacaacgtgggtgcctatctgtttgttgatatggcgcactatgccggattgattgctgccggttactatcccaatcctgtgggaatcgctgattttgtcaccagtaccacacataaaacactgcgtggtccgcgtggcggagtaatcatggccaagccggaacatgaaaaggcactcaattcggcagtatttccgcagacacaaggcggcccgctgatgcatgtcatcgcggccaaagcagtggctttcaaggaagcctccagccaggcgttcaaggattaccagaagcaggtcatcgagaatgcacgtgtcatggcaagggtgctgcaacagcgcggcctgcgtatcgtatctggccgtacggattgccatatgttcctggtcgatctgcgtgccaaaaatctgacaggaagggaggcagaatccgcgctggaggcggcgcatattaccgtcaacaagaatgcgattccgaatgatccgcaaaaacctttcgttaccagtggaatacggatcggtactccggccattactacgcgcggattcaaggagcctgagtccgaggaacttgccaatctggtggctgatgtgctggatgctccggccaacacagcagtgctggatcaggtcgcccggaaagcgcaggcattgtgtacgaagtttccggtgtatggaaactga

SEQ ID NO: 80338 - protein, 416 aa, Nitrosomonas europaea
MFSQSLTIEQVDPDLWQAIKGEVQRQEDHIELIASENYASPAVLQAQGTVLTNKYAEGYPGKRYYGGCRYVDIVEQLAIDRLRNLFNAEYVNVQPHSGSQANAAVYLSALKPGDTLLGMSLAHGGHLTHGSAVNMSGKIFNSISYGLNPETEEIDYAELERLAHEHKPRMIVAGASSYARVIDWKAFRQIADNVGAYLFVDMAHYAGLIAAGYYPNPVGIADFVTSTTHKTLRGPRGGVIMAKPEHEKALNSAVFPQTQGGPLMHVIAAKAVAFKEASSQAFKDYQKQVIENARVMARVLQQRGLRIVSGRTDCHMFLVDLRAKNLTGREAESALEAAHITVNKNAIPNDPQKPFVTSGIRIGTPAITTRGFKEPESEELANLVADVLDAPANTAVLDQVARKAQALCTKFPVYGN

SEQ ID NO: 80339 - DNA, 1296 bp, Nocardia farcinica
  CDS (1)..(1296): transl_table=11
gtgacgcagacgaccgcctctgtcaatacccagtctctcggtgagctcgatcccgagctcgcggccgcgatggcaggcgaactcgcccgcgagcgcgacactctcgagatgatcgcctcggagaacttcgtgccgcgcgcggtgctgcaggcccagggcagcgtgctgaccaacaagtacgccgagggttacccggggcgtcgctactacggcggttgcgagaacgtcgacgtcgtcgagaacctggcccgcgagcgcgccaaggaactgttcggcgccgaattcgccaacgtgcagccgcattccggcgcgcaggccaacgcggcggtgctgatgtcgctgatggatcccggcgaccggctgctcggcctcgacctcgcgcacggcggccatctcacccacggcatgcggctgaacttctccggcaagctctacgaggtgcactcctacggggtgagcaaggaagaccaccgcgtcgacatggacgaggtgcgcacgatcgcgctcggcgccaagccgaaggtgatcgtcgcgggctggtcggcctacccgcgtcaccaggacttcgccgccttccgcgcgatcgccgacgaggtgggtgcctacctgtgggtggacatggcgcacttcgccggtctcgtcgccgcgggcctgcacccctcgccggtgccctacgccgatgtcgtctcctccaccgtgcacaagaccctcggcggtccccgctccggcctgatcctggccaagcaggagttcgccaagaagatcaacagcgcggtcttccccggccagcagggcggtccgctcatgcacgcgatcgcggccaaggcggtggccttcaagatcgcgggcaccgaggagttccgcgaccgccagcagcgcaccctgtcgggcgcgaagatcctggccgagcggctcaccggcgccgacgtcgccgacaagggcatcagcgtgctcaccggcggcaccgacgtgcacctggtgctggtcgatctgcgcaactcccagctcgacggtcagcagggcgaggacctgctgcacgagatcggcatcaccgtcaaccgcaacgccgtgccgttcgacccccggccgccgatggtcacctccggtctgcggatcggcaccgccgccctggccacccgcggcttcggcgacgccgagttcaccgaggtcgccgacatcatcgccaccgcgctggccggcggctccgatgcggagacgctgcgcggtcgggtgcgcgcgctggctcagcgcgtgccgctctaccagggcctggaggattggcacctgctcggctga

SEQ ID NO: 80340 - protein, 431 aa, Nocardia farcinica
MTQTTASVNTQSLGELDPELAAAMAGELARERDTLEMIASENFVPRAVLQAQGSVLTNKYAEGYPGRRYYGGCENVDVVENLARERAKELFGAEFANVQPHSGAQANAAVLMSLMDPGDRLLGLDLAHGGHLTHGMRLNFSGKLYEVHSYGVSKEDHRVDMDEVRTIALGAKPKVIVAGWSAYPRHQDFAAFRAIADEVGAYLWVDMAHFAGLVAAGLHPSPVPYADVVSSTVHKTLGGPRSGLILAKQEFAKKINSAVFPGQQGGPLMHAIAAKAVAFKIAGTEEFRDRQQRTLSGAKILAERLTGADVADKGISVLTGGTDVHLVLVDLRNSQLDGQQGEDLLHEIGITVNRNAVPFDPRPPMVTSGLRIGTAALATRGFGDAEFTEVADIIATALAGGSDAETLRGRVRALAQRVPLYQGLEDWHLLG

SEQ ID NO: 80341 - DNA, 1311 bp, Novosphingobium aromaticivorans
  CDS (1)..(1311): transl_table=11
atgaccactgccaccgcagcgccggaaatccgtaaagccggcttcttcaccgaacatctcgagaccgcagacgccgaagtcttcgccgcgatccgtggcgagctgaagcgccagcagaccaagatcgaactgatcgcgtccgagaacatcaccagcctggccgtgcttgaagcgaccggttcggtcttcaccaacaagtacgccgaaggctatccgggcaagcgctactacggcggctgcgaatatgcagacgtggtcgaaaacctcgcgatcgagcgcgcgaagaagctgttcggctgcaacttcgccaacgtccagcccaactcgggcagccagatgaaccaggccgtgttcctcgcgctgcttcagcctggcgacagcttcatgggcctcgacctcaattcgggcggccacctgacgcacggttcgccggtcaacatgagcggcaagtggttcaagccgatcccctatggcgtgcgcgccgacgatcacctgatcgacatggacgaggttgcccgccttgcccgcgagaacaagcccaagctgatcatcgcaggcggcactgcatattcgcgcgtgtgggatttcaagcgcttccgcgagatcgccgatgaagtgggcgcctggctgctggtcgacatgtcgcacttctccggcctcgtcgctggcggtgcgcacccctcgcccttcccgcacgcccatgtcgtgaccagcacgacgcacaagtcgctgcgcggtccgcgttcgggcatcatcctgaccaacgacgaggatctggcgaagaagttcaacatggcggtgttccccggcatgcagggcggcccgctagtccacgtgatcgcggcaaaggcggtcgcgtttggcgaagcgctgcgtcctgaattcaaggcctatgccgcgcagatcgtcgccaacgcccgcgcgctggccgaagcggtcaaggacgccggcctttcggtcgtctcgggtgggaccgacaaccacctgatgctggtcgatctttctgccaaggacgtgacgggcaaggccgccgagaaggggctcgaccgcgcctggctgacctgcaacaagaacggcgtccccttcgacaagcgctcgcccttcgtcacgtcgggcatccgcctcggcaccccggcgggcacgacgcgcggtttccgcgaggaagagttccgcaagatcggcgcactgatcggtgaagtggtcgatggccttgcacgcaacggcgaagagggcgatggtcaggtggaacagcgcgtgcgcgaccgtgtcgccgagctttgcgcgcagttcccgatctatccggagctttga

SEQ ID NO: 80342 - protein, 436 aa, Novosphingobium aromaticivorans
MTTATAAPEIRKAGFFTEHLETADAEVFAAIRGELKRQQTKIELIASENITSLAVLEATGSVFTNKYAEGYPGKRYYGGCEYADVVENLAIERAKKLFGCNFANVQPNSGSQMNQAVFLALLQPGDSFMGLDLNSGGHLTHGSPVNMSGKWFKPIPYGVRADDHLIDMDEVARLARENKPKLIIAGGTAYSRVWDFKRFREIADEVGAWLLVDMSHFSGLVAGGAHPSPFPHAHVVTSTTHKSLRGPRSGIILTNDEDLAKKFNMAVFPGMQGGPLVHVIAAKAVAFGEALRPEFKAYAAQIVANARALAEAVKDAGLSVVSGGTDNHLMLVDLSAKDVTGKAAEKGLDRAWLTCNKNGVPFDKRSPFVTSGIRLGTPAGTTRGFREEEFRKIGALIGEVVDGLARNGEEGDGQVEQRVRDRVAELCAQFPIYPEL

SEQ ID NO: 80343 - DNA, 1236 bp, Oceanobacillus iheyensis
  CDS (1)..(1236): transl_table=11
atggaatttgtgaaacaagcagataccgaagtgtttgaagcaatgcaagccgaaaaaaatcgccagcaagataagattgagttaattgcatccgaaaattttgtaacaaaagcagtaatggatgcgatgggatctattcttaccaataaatatgcagaaggttatccaggcaagcgttattatggtggttgtgagcatgttgatgtagtggaaaatcttgctcgtgatcgtgcgaaagaattatttggtgctgatcacgcaaatgtacaacctcattcaggagcacaagcaaatatggcagtttattctgcggtacttgagcctggtgatacggtactaggtatgaatctaaatcatggtggacatttaactcatggtagcccagtgaactttagcggtcaattgtataattttgttgactatggtgtagacaaagagacagaacaacttgattatgatgctgtattggaaaaagcaaaggaagtaaaacctaaattaatcgtggctggagcaagtgcatactcccgttctattaattttgctaaattccgtgaaattgctgatgcagtagatgcatatctaatggtagatatggcacatattgctggtttagttgctactggtgaacatgaaaatccagttcctcatgcagattttgttactactacaacccataaaacattgcgcggacctcgtggtggtatgattctttgtaaagaagaatttgccaaaaaagtagataaagcgattttccctggaatccaaggtggaccgttaatgcatgttattgctgcaaaagctgtatcctttaaagaagcattgtcagatgactttaaagcatattcaaagcaaattgttgcaaatgcaaaattactaggggaagctctcaataaagaaggaattcgtattgtatctggaggtacagataaccatctactattattagatgttactccattacaattaaccggaaaagtagctgaaaaagcactagatgatatcggtattacaacgaataaaaacacgattccttttgatcaagaaagtccttttgtaacaagtggtatccgtattggtactgctgcagtaactacacgtggatttggtgaagaagaaatgaaagaaattgcttctattatttctttaacgttaaaacaccatgaagatgaagcgaagttaaaagaagcagcacaacgtgtacaagcacttacagaaaaattcacgctatatgcttaa

SEQ ID NO: 80344 - protein, 411 aa, Oceanobacillus iheyensis
MEFVKQADTEVFEAMQAEKNRQQDKIELIASENFVTKAVMDAMGSILTNKYAEGYPGKRYYGGCEHVDVVENLARDRAKELFGADHANVQPHSGAQANMAVYSAVLEPGDTVLGMNLNHGGHLTHGSPVNFSGQLYNFVDYGVDKETEQLDYDAVLEKAKEVKPKLIVAGASAYSRSINFAKFREIADAVDAYLMVDMAHIAGLVATGEHENPVPHADFVTTTTHKTLRGPRGGMILCKEEFAKKVDKAIFPGIQGGPLMHVIAAKAVSFKEALSDDFKAYSKQIVANAKLLGEALNKEGIRIVSGGTDNHLLLLDVTPLQLTGKVAEKALDDIGITTNKNTIPFDQESPFVTSGIRIGTAAVTTRGFGEEEMKEIASIISLTLKHHEDEAKLKEAAQRVQALTEKFTLYA

SEQ ID NO: 80345 - DNA, 1251 bp, Onion yellows phytoplasma
  CDS (1)..(1251): transl_table=11
atgaatcaaaagttaggattaaaagaccaagatcaagaaatctttgatcttattgaacaagaaaaaattagacaaaaagaaaatatcttattaattgcttcggaaaattttgtttctcaagcagtattagatgcccaaggaagcattttgactaacaaatatgcagaaggttatcctcaagctagatattataatggttgtaaaaatgtagatcaaatagaaaaaattgccattcaaagagcaaccaagctgtttggtgctaaatatgcaaacgtccaacctcattcaggttcacaagccaatatgggagcatttcaagccttattaaaacctggtgacaaaattttaggattatctttaatggatggaggacatcttactcacggtcataaattaagtttttctggtggtttttatgaagctcatttttataatgtccatccccaaactgaaatgcttgattatgatgaaattcgtaaagttgccttaaaagttaaacctaaattaattattgcaggatattcggcttattctaaaactattaattttaaaaagtttcgtcaaattgctgatgaagttaatgcctatttaatggcagatattgcccatattgcaggtttagttgcttgtgggcttcatccttgtccctttgaagctaacgccgatgttgttacttctactatgcacaaaacactgagaggaccgcgtggaggtttgattttaaccaataaagaagaagtatttaaaaaaataaatcgtggtatttttccaggtattcaaggaggaccttgtattcatactattgcagctaaagctgttgcttttcaagaagcgatgatgccttcttttaaagaatatcaaaagcaagttatcaaaaatgcaaacacctttgctaaagccttccaacaaaaaggttatcgcattgtaagtggaggcactgataatcatttatttttaattgatgttaaacataaaaatcctgagtttacaggatccaaaattgcaaacatgttagaaaaaataaatattgttgtcaacaaaaataccattccttttgatcaagaaaaaccttttgtgacaagcggtattagaattggcacacctgctatgacaacagtaggttttagagaaaatgattttattttagttgcagatttgatggacaaagctatcaatcacttggacgacgaatcttatttagcccaaattaaacaacaagttttggctttattaagtaaatttaataagtaa

SEQ ID NO: 80346 - protein, 416 aa, Onion yellows phytoplasma
MNQKLGLKDQDQEIFDLIEQEKIRQKENILLIASENFVSQAVLDAQGSILTNKYAEGYPQARYYNGCKNVDQIEKIAIQRATKLFGAKYANVQPHSGSQANMGAFQALLKPGDKILGLSLMDGGHLTHGHKLSFSGGFYEAHFYNVHPQTEMLDYDEIRKVALKVKPKLIIAGYSAYSKTINFKKFRQIADEVNAYLMADIAHIAGLVACGLHPCPFEANADVVTSTMHKTLRGPRGGLILTNKEEVFKKINRGIFPGIQGGPCIHTIAAKAVAFQEAMMPSFKEYQKQVIKNANTFAKAFQQKGYRIVSGGTDNHLFLIDVKHKNPEFTGSKIANMLEKINIVVNKNTIPFDQEKPFVTSGIRIGTPAMTTVGFRENDFILVADLMDKAINHLDDESYLAQIKQQVLALLSKFNK

SEQ ID NO: 80347 - DNA, 1263 bp, Pasteurella multocida
  CDS (1)..(1263): transl_table=11
atgttaaaaagaagtatgaacatcgctgattacgatccggttttatggcaggcaattcaagacgaaaatcgccgtcaagaagaacacattgaattaattgcatcagaaaactatgccagcccacgcgtgatggaagcacagggttctcaatttaccaataaatatgcggaaggttacccgggtaaacgttattatggtggttgtgaatatgcagatatcgttgagcaattagcgattgatcgtgcaaaagagttatttcatgcggattatgtgaacgtacaaccccactcgggttcgcaagctaacgcggcagtgtatggtgccttattacagccacatgacactattcttggtatgagccttgcacacgggggacacttaacgcacggtgcatcagtgagcttttcgggtaaaatctataatgcagtgcaatatggaattactgccgaaggtttaattgattatgaagatgtgcgtcaaaaagccttagagtgcaagccaaaaatgatcgtggcgggtttctctgcctattcgcaagtagtggattgggcgaaaatgcgtgaaatcgctgatgaagtgggagcgtatcttttcgtggatatggcgcacgtggcagggctgattgcagcaggtgtttacccaagtccgttaccacatgcacatgttgtgactactaccacacacaaaaccttagggggacctcgtggtggtttaattctatcggctgcgaaagatgaagatctttataaaaaattacaaagttctgttttccctgccaaccaaggtggtccgttagtgcatgtgatcgccgcaaaagcggtctgttttaaagaagcgcttgagcctgaatacaaagtgtatcaacaacaagtggtgaaaaatgcgaaagccatggtggacgtgtttaaacaacgtggttataacgtggtatccaatggcacagaaaaccatttattcttagtagatttagttagccacggtttaaccggtaaagcagcagatgctgcgttaggcagtgcaaacattaccgtcaacaaaaatgcggtaccaaacgatccacaaaaaccatttgtgacctcaggtatccgtgtgggcacaccatctatcacccgtcgtggctttaaagaagctgaatcggcagaattagccggttggatgtgtgatgtgttggatgcgatgggtaaagacaacgaagcacaagtgattgcacagacaaaagagaaagtcttagcaatttgtaaacgtcttcctgtttatgcttaa

SEQ ID NO: 80348 - protein, 420 aa, Pasteurella multocida
MLKRSMNIADYDPVLWQAIQDENRRQEEHIELIASENYASPRVMEAQGSQFTNKYAEGYPGKRYYGGCEYADIVEQLAIDRAKELFHADYVNVQPHSGSQANAAVYGALLQPHDTILGMSLAHGGHLTHGASVSFSGKIYNAVQYGITAEGLIDYEDVRQKALECKPKMIVAGFSAYSQVVDWAKMREIADEVGAYLFVDMAHVAGLIAAGVYPSPLPHAHVVTTTTHKTLGGPRGGLILSAAKDEDLYKKLQSSVFPANQGGPLVHVIAAKAVCFKEALEPEYKVYQQQVVKNAKAMVDVFKQRGYNVVSNGTENHLFLVDLVSHGLTGKAADAALGSANITVNKNAVPNDPQKPFVTSGIRVGTPSITRRGFKEAESAELAGWMCDVLDAMGKDNEAQVIAQTKEKVLAICKRLPVYA

SEQ ID NO: 80349 - DNA, 1302 bp, Picrophilus torridus
  CDS (1)..(1302): transl_table=11
atgcttgataataaaaaggagtatctaaaggatgccatgtttattagagatatggccatgcagcatgaacagctttttagggagagcataccgttgatagcatccgagaatattatgagcccgcttgcaatggagatgcttttaacagaccttggttttagatatgccgaggggctgccacaccaccgctattaccagggaaatgaatatgtcgatgttatagaggataaaacgacggagcttggaaagaggctctttaattcaaagacttttgatccaaggcccctgtcaggtacaaacgcaaacatggccgttttatatgccttaaccgagcctggagataagatatctgttccaccactgtcaggtggcggtcatataagtgcggcaaaatttggtgccgttggctttagaggtttaaaaaccgtgcagtatccatttgatattaatgagatgaatatagatattgatggcacaataaaaacaataaaaaatgaaaggccaaaggtctgctggtttgggcagtcagtatttctcttcccaacaccgctaaaggagcttcaggatgcttttaatgaggtaaatgcaagggttgtttacgatggcgcacatgttgccggccttatagcaggcggtgaatttcaggatccattaagggagggtgcggagataatcactggaagcacacataaaactttaccggggccacagcacggcatgattattggaaatacagacgatgacacatggaaaaaagtgcagcgcggtgtctttccaggtacgttaagcaatcatcatttaaatgcaatggccgcccttggtgtaacgcttgctgaggagctggattttggaagggattacgcaaaacagatcgtaaaaaatgcaaggcatcttggagaaaagctttatgaattcggttttaacgtccttggagagaaaaatggatttacaagatctcatacccttgctgttgatgtctcaaagaacggtggcggaagaaaggttgccgagaatcttgagaaatctggaataatactaaataaaaaccttcttccatgggatgacaataaaaattcacagaatccaagcggtattagaataggtgtccaggagataacaaggataggcttcatggaggatgatgtaaccgagcttgccgagatactaagggatgccgtaataaatgaaaaaccggtaaatgaaataagaagaagggcactcgaattaaaatcaaggtttaataatatagaatactgctatggaaatatgaaaccatattcatacataaaaatttttgaataa

SEQ ID NO: 80350 - protein, 433 aa, Picrophilus torridus
MLDNKKEYLKDAMFIRDMAMQHEQLFRESIPLIASENIMSPLAMEMLLTDLGFRYAEGLPHHRYYQGNEYVDVIEDKTTELGKRLFNSKTFDPRPLSGTNANMAVLYALTEPGDKISVPPLSGGGHISAAKFGAVGFRGLKTVQYPFDINEMNIDIDGTIKTIKNERPKVCWFGQSVFLFPTPLKELQDAFNEVNARVVYDGAHVAGLIAGGEFQDPLREGAEIITGSTHKTLPGPQHGMIIGNTDDDTWKKVQRGVFPGTLSNHHLNAMAALGVTLAEELDFGRDYAKQIVKNARHLGEKLYEFGFNVLGEKNGFTRSHTLAVDVSKNGGGRKVAENLEKSGIILNKNLLPWDDNKNSQNPSGIRIGVQEITRIGFMEDDVTELAEILRDAVINEKPVNEIRRRALELKSRFNNIEYCYGNMKPYSYIKIFE

SEQ ID NO: 80351 - DNA, 1281 bp, Porphyromonas gingivalis
  CDS (1)..(1281): transl_table=11
atgaaaaaagacagcgtaattttcgatctgatcgaaaaagaacatcagcgccagctcaaaggcatcgagctgatcgcatcggaaaactttgtaagcgaacaagttatgcaggctatgggtagctgtatgaccaataagtatgccgaaggttatcccggcaaacgctattacggtggttgtgaagtggtagaccaaagcgagcaaatcgccatcgaccgtatcaaacaactctacggagccgaatgggccaacgtacagcctcactccggagcacaggccaatatggccgttcttctggcttgcctcgaagcaggcgatacgttcatgggactgaacctcgaacacggcggccacctatcgcacggctcactcgtcaatagctcgggtatcctctaccgtcccatcggctacaatctgagcgaagagacgggaatggtggattacgaccacatggagaaaatggccatcgagcacaaacccaagctgatcatcggcggtggttcggcctattctcgtgagtgggactacaagcgtatgcgtgagatcgctgacaaggtgggtgccttgttgatgatcgatatggcacaccctgccggtctgatcgctgccggtctgctggagaaccccgtgaagtatgctcatatcgttacttctacgactcacaagacactgcgtggcccccgtggcggtatcatccttatgggcaaggacttcgacaatccttggggcaagaaaaccccgaagggcgagatcaagaagatgagcgcactcctcgactctgccgtattccccggtgtacagggtggtccgctcgagcacgttatagctgctaaggctgtagctttcggagaagcactggatccttcgttcaaggaataccaaacgcaggtgaaaaagaatgctgccgttttggctcaggctttcatggacaaaggctataaagtgatttccggtggtacggacaaccacagtatgctgatcgatcttcgtccgaagttccccgaactgacaggtaaagtggcagagaaagccctcgtggcagcggatattaccgtcaataagaacatggtaccgttcgattctcgctctgcattccagacatcgggcttccgcgtgggtactccggccatcaccactcgtggcgtaaaagaagataagatgggctatatcgtggagttgatagaccgtgtgctctccgcaccggaggacgaagccgtaatagcatcggttcgtaccgaagtcaaccggatgatggccgattatcctctctttgcttggtaa

SEQ ID NO: 80352 - protein, 426 aa, Porphyromonas gingivalis
MKKDSVIFDLIEKEHQRQLKGIELIASENFVSEQVMQAMGSCMTNKYAEGYPGKRYYGGCEVVDQSEQIAIDRIKQLYGAEWANVQPHSGAQANMAVLLACLEAGDTFMGLNLEHGGHLSHGSLVNSSGILYRPIGYNLSEETGMVDYDHMEKMAIEHKPKLIIGGGSAYSREWDYKRMREIADKVGALLMIDMAHPAGLIAAGLLENPVKYAHIVTSTTHKTLRGPRGGIILMGKDFDNPWGKKTPKGEIKKMSALLDSAVFPGVQGGPLEHVIAAKAVAFGEALDPSFKEYQTQVKKNAAVLAQAFMDKGYKVISGGTDNHSMLIDLRPKFPELTGKVAEKALVAADITVNKNMVPFDSRSAFQTSGFRVGTPAITTRGVKEDKMGYIVELIDRVLSAPEDEAVIASVRTEVNRMMADYPLFAW

SEQ ID NO: 80353 - DNA, 1476 bp, Propionibacterium acnes
  CDS (1)..(1476): transl_table=11
gtgagtgatccccgtgccgtcgatcccactgcccgtgacattgccgagaagctagccccggcctaccgcaccatgctcgacgcgatcgcacaggtcgagccgcggatcgcggaggccacccgtgctgaactcaccgaccagcgtcattccctcaaacttattgcttccgaaaactacgcatccttgccagttctggcgaccatgggtacctggttctctgataagtacgccgaaggtactgccggccaccgcttctacgccggttgccaaaacgttgacaccgtcgagacgatcgccgccgagcatgcctgcgctctgttcggcgctgagcacgcttacgtacagccccactccggcattgacgccaacctcaccgcctactggacgatcctggcccaccatatcgagaccccagccctgtcagaatttggcgcccgcactgtcaatgacctcactcaagttgactgggacaccctgcgtcatcgtttcaatgaccagcgggcgatcggcatgagcctcgatgctggtggccaccttacccacggtttccgccccaatatctccggaaagatgttcgaccagcgctcctacggcaccgatccgcaaacgggcctgctcgactacgacaaggtcgctgagctggcccgcgagtttaagccgcttgtcatcgtcgccggatactccgcctacccgcgccgcgttaatttcgcaaagatgcgcgagattgccgacgaagtcggtgctgtgctcatggtcgatatggcccacttcgctggcctggtagctggcaaagtcttcactggtgacgagaaccccatcccccacgcccaggtcgtgacgacgacgacccacaagtcgctacgcggaccgcgcggcggcatggtgctgacgactaaggactacgccgacgacgtcgaccgcggctgcccaatggtgctcggcggcccgctgtcccacgtcatggctgccaaggccgtcgctctggcagaagcgcgcacccagaccttccgcgactacgctcagcgcgtcgccaataacgcgaaggccctagccgaaggactcatgaaacgtggcgtcaagctcgtcaccgatgggactgacaaccacatcaacctgctcgacgtcacgacgagcttcgggctgaccggtcgtcaggccgaggccgcgctgctggacgccggtgtggtcaccaaccgcaactccattccgactgacccgaacggcgcctggtacacctctggcatacgcatcggcaccccggcactgacctcccgcggattcggacccgacgaattcgatcaggtcgccgagctcatcgtcactaccttggaggccaccaccccgatgacggcctccaccggcaagcccggcaaggccaaataccaaattgccgacggtgtggcgcagaaggtccatgacgccgccgacgagctgctgggcaacttccccctctacccagggctggatttggcctga

SEQ ID NO: 80354 - protein, 491 aa, Propionibacterium acnes
MSDPRAVDPTARDIAEKLAPAYRTMLDAIAQVEPRIAEATRAELTDQRHSLKLIASENYASLPVLATMGTWFSDKYAEGTAGHRFYAGCQNVDTVETIAAEHACALFGAEHAYVQPHSGIDANLTAYWTILAHHIETPALSEFGARTVNDLTQVDWDTLRHRFNDQRAIGMSLDAGGHLTHGFRPNISGKMFDQRSYGTDPQTGLLDYDKVAELAREFKPLVIVAGYSAYPRRVNFAKMREIADEVGAVLMVDMAHFAGLVAGKVFTGDENPIPHAQVVTTTTHKSLRGPRGGMVLTTKDYADDVDRGCPMVLGGPLSHVMAAKAVALAEARTQTFRDYAQRVANNAKALAEGLMKRGVKLVTDGTDNHINLLDVTTSFGLTGRQAEAALLDAGVVTNRNSIPTDPNGAWYTSGIRIGTPALTSRGFGPDEFDQVAELIVTTLEATTPMTASTGKPGKAKYQIADGVAQKVHDAADELLGNFPLYPGLDLA

SEQ ID NO: 80355 - DNA, 1272 bp, Prochlorococcus marinus
  CDS (1)..(1272): transl_table=11
atgaatattcttcaaaatcttaaaaaaagtgatccagtaatatccaatttcattaactccgaaaaaaatagacaggaaactcaccttgagttaatagcaagtgagaattttgcatcgattgctgtcatgcaggctcaaggatcggtccttactaataaatacgcggaaggattacctcaaaagagatattacggtggatgcgaatttgttgatgaaatcgaagaattagctattcagagagcaaaaaaattatttaatgcaaattgggctaatgttcaacctcatagtggagcacaggcaaatgctgctgttttcttaagccttcttcaacctggcgatacaatcatgggaatggatttatctcatggtggacaccttactcatggatctccagtcaatatgagtggcaagtggtttaatgcagttcactatggtgtaaataaagaaactagtgagttaaattttgatgaaataagagagatcgcactagaaacaaaaccaaaattaatcatatgcggatattctgcttatccaagaacaattgattttgaatcatttagaaatattgcagatgaagttggtgcattcttaatggctgatattgcacacatcgcggggctcgtagcaagtaaacttcatccaaatcctctaccttattgtgatgtagttactacaactactcataagacattgagagggcctagaggaggacttatcttatgtaaagatggagaatttggaaagaaatttgataaatctgttttccctggaactcagggtggccccctagaacatattattgccgctaaagcagttgcatttggagaagccttacaaccagatttcgttaattattcccaacaagttataaaaaatgcgaaagtgttggcttccactttaataagtagaggtattgatattgttagtggagggactgataatcatattgttttactagatttaagaagtataaatatgactggaaaaattgctgatttgctagtaagcgcagtgaatatcacagctaataaaaatactgttccatttgatcctgaatcgccttttgttaccagtgggctaaggctgggtactgctgctttaactaccagaggctttaatgaaactgcttttgctgaagttggagaaattattgctgatagattacttaatccaaatgattcagtgattgaaagtcaatgtaaggacaaagtattagctttatgtaatcgttttcctctttatgaaggcaaacttgaagcatcaattaaatga

SEQ ID NO: 80356 - protein, 423 aa, Prochlorococcus marinus
MNILQNLKKSDPVISNFINSEKNRQETHLELIASENFASIAVMQAQGSVLTNKYAEGLPQKRYYGGCEFVDEIEELAIQRAKKLFNANWANVQPHSGAQANAAVFLSLLQPGDTIMGMDLSHGGHLTHGSPVNMSGKWFNAVHYGVNKETSELNFDEIREIALETKPKLIICGYSAYPRTIDFESFRNIADEVGAFLMADIAHIAGLVASKLHPNPLPYCDVVTTTTHKTLRGPRGGLILCKDGEFGKKFDKSVFPGTQGGPLEHIIAAKAVAFGEALQPDFVNYSQQVIKNAKVLASTLISRGIDIVSGGTDNHIVLLDLRSINMTGKIADLLVSAVNITANKNTVPFDPESPFVTSGLRLGTAALTTRGFNETAFAEVGEIIADRLLNPNDSVIESQCKDKVLALCNRFPLYEGKLEASIK

SEQ ID NO: 80357 - DNA, 1260 bp, Prochlorococcus marinus
  CDS (1)..(1260): transl_table=11
ttgcatacgattaattcagatctccgaaatacagatccagatatttcttttttaattaatcaagagctcttacggcaacaaacacatttagagctaattgctagtgagaactttgcttctgaggcagtaatggaagctcaaggatctgtcttaactaacaaatatgcagaaggtcttcctaataagcgttattacgggggctgcgagcatattgatgccattgaacaattagcaatcactcgagcacaaacacttttcaatgcagagtgggccaatgttcaacctcatagtggtgctcaagcaaattttgcagtgtttcttgctctattaaaccctggagacacaataatggggatggacctctcacatggtggtcatttaactcatggttctcctgtaaacgtaagcggcaaatggtttaacgctattcattacggtgtagatcaaactacaaaggttttgaactttgaacagataaggcaagttgccctaaaaaatcgaccaaaattaatcatctgtggattttctgcttatcctaggaccattgattttaaagcctttcgaagcatagctgatgaaatagatgcatatttactggcagacatagctcatattgctggactcgttgcatgtggagcccaccccaaccctgttccatattgtgatgtagttacaacgactacccacaaaactcttagaggtcctagagggggactaatcctatgcagagacaaagaatttgggaaaagatttgataaagctgttttcccaggaaatcaaggagggcctttggaacatgttattgctgcaaaagcagttgcctttggagaagcactgaaaccagaatttaaaacttatacttttcaagtaatttcaaatgctaaagccttagcaaaaaggattcaagaaagagggatatcaatcgtaagtgaaggaactgacaatcatattgttctactggatctaagaagtattgagatgacagggaaaaaagcagattctctaattagtgaagtcaacattacagctaataaaaatactgtcccttttgaccctgaatcaccttttgtcactagtggattaagactaggaactgctgctttgaccacaagagggtttactgaaaaagcgtttatagaagtggctgatgtaatagcagattgtcttttaaatccagaggatttatcaatcaaagaacaatgcaaagcaaaagtaatagatctatgtaatcgtttccccctttacaattcaaatcaataa

SEQ ID NO: 80358 - protein, 419 aa, Prochlorococcus marinus
MHTINSDLRNTDPDISFLINQELLRQQTHLELIASENFASEAVMEAQGSVLTNKYAEGLPNKRYYGGCEHIDAIEQLAITRAQTLFNAEWANVQPHSGAQANFAVFLALLNPGDTIMGMDLSHGGHLTHGSPVNVSGKWFNAIHYGVDQTTKVLNFEQIRQVALKNRPKLIICGFSAYPRTIDFKAFRSIADEIDAYLLADIAHIAGLVACGAHPNPVPYCDVVTTTTHKTLRGPRGGLILCRDKEFGKRFDKAVFPGNQGGPLEHVIAAKAVAFGEALKPEFKTYTFQVISNAKALAKRIQERGISIVSEGTDNHIVLLDLRSIEMTGKKADSLISEVNITANKNTVPFDPESPFVTSGLRLGTAALTTRGFTEKAFIEVADVIADCLLNPEDLSIKEQCKAKVIDLCNRFPLYNSNQ

SEQ ID NO: 80359 - DNA, 1290 bp, Prochlorococcus marinus
  CDS (1)..(1290): transl_table=11
atgacggatcgcttcttggcttctattaatgctgccctgacggattccgacccggcgattgcaggcttgatcgatcaggaaaggcaacgtcaggagacccatctagagctgatagccagtgagaacttcacttctcaagctgtgatgcaggctcagggttctgttctcaccaacaagtacgccgaaggtcttccccataagcgctattacggcggttgtgagcatgtcgatgcgattgaggagttggcgatcgagcgtgctcagcggctctttggtgcggcttgggccaacgtgcaacctcatagtggcgcgcaggccaacttcgccgtcttcctggcgctgttgcagcccggtgacaccatcatggggatggatctatcccatggggggcatctcactcatggttctcctgtcaatgtcagcggcaagtggttcaaggtcgttcattacggcgtggagcgtgatagtcagcagctcgacatggaggctgttcgtcagctggccctgaaagagcgtcctcaactgatcatctgcggctactcggcctatccccgcacgatcgattttgctgcttttcgcagcatcgctgatgaggtgggcgcttacttgttggcggacatggcacacattgccggccttgttgcggctggggtccatccgagtcctatcgcccactgtgatgtggtgacgacgaccacccacaagacattgcgtggccccagaggcggcttaatcctttgtcgtgatgcggactttggccgtaagtttgacaaggcagtgtttcctggcagtcagggcggccctttggaacatgtgattgcagccaaggctgtggccttaggagaagctcttcagccagagttccaggtttatagctgtcaggtggtggcgaatgcccaggttcttgctggtcgcattcaggagcgcgggattgcggtggtgagtggaggaacagataatcaccttgtcttgctggatttgcgcagcattgggatgaccgggaaggttgctgatttgcttgtcagtgaagtgaacatcaccgccaataagaacacagtgccctttgatcctgagtcgccttttgtgaccagtggtctgcgcttgggcacggcggccctcacaactcgtggctttgatgatgaggcattccgtgaggttgctgatgtgattgcagatcgtttgcttaaaccgcaagatgaatcgatcaaggcgcagtgcttggaacgggtgagacaactttgtggccgtttccctctctacagggatgtcctccagccagcgcttgcttga

SEQ ID NO: 80360 - protein, 429 aa, Prochlorococcus marinus
MTDRFLASINAALTDSDPAIAGLIDQERQRQETHLELIASENFTSQAVMQAQGSVLTNKYAEGLPHKRYYGGCEHVDAIEELAIERAQRLFGAAWANVQPHSGAQANFAVFLALLQPGDTIMGMDLSHGGHLTHGSPVNVSGKWFKVVHYGVERDSQQLDMEAVRQLALKERPQLIICGYSAYPRTIDFAAFRSIADEVGAYLLADMAHIAGLVAAGVHPSPIAHCDVVTTTTHKTLRGPRGGLILCRDADFGRKFDKAVFPGSQGGPLEHVIAAKAVALGEALQPEFQVYSCQVVANAQVLAGRIQERGIAVVSGGTDNHLVLLDLRSIGMTGKVADLLVSEVNITANKNTVPFDPESPFVTSGLRLGTAALTTRGFDDEAFREVADVIADRLLKPQDESIKAQCLERVRQLCGRFPLYRDVLQPALA

SEQ ID NO: 80361 - DNA, 1272 bp, Prochlorococcus marinus subsp
  CDS (1)..(1272): transl_table=11
atgaatattcttcaaaatcttaaagaaagtgatccaatcatatctaatttaattaattccgaaaaaaataggcaagaaacacatcttgaattgatagctagtgagaattttgcatcaatggctgtaatgcaggctcagggttcggttttaacaaataaatacgctgaaggtcttccacaaaaaagatattacggtggttgtgaatttgtagatgagatagaggaacttgcaatcgaaagagcaaaacaactttttgatgcagactgggcgaatgttcaaccccatagtggagcacaagcaaatgcagctgtttttctaagtttacttaaacctggtgacacaatacttggaatggatctatcgcatggaggacatttaacccacggatccccagtcaacatgagcggaaagtggttcaatgccgttcactatggagttgataaagaaactaataaattaaattttaatgaaattagagatattgcattagctacaaaaccaaaactaattatttgtggatattctgcttatccgagaaaaattgatttcgagtcgttcagaagaatcgctgatgaagttggagcttttttaatggctgatattgctcatatagcaggactagtagcaaccaaactccaccctaatccaataccgtattgtgatgttgtaactacgacaacacataagaccttgagaggtccaagaggaggattgatcttatgtaaagataaggaatttggaaagaaatttgataaatctgttttccctggaactcagggtggtcctttagaacatattatcgcagctaaagctgtcgcctttggagaagccttaaagcccaactttgttaattactcaaaacaggttattaataatgcaaaagttctgtcttcaactttaattaaaagaggaatagatattgttagtggaggaactgataatcatattgttttgcttgacttaagaagtattaatatgactggtaaagttgctgacttacttgtaagtgaagttaacataacagcaaataaaaatactgtcccgtttgatcctgaatcaccttttgtaaccagtgggttgagattgggaactgcagctttaactactagaggttttaatgatgatgcttttgttgaagttggtgaaattattgctgatagattactcaatccagatgatttattaacagaaaaaaaatgcaaggaaagggtattaactttatgtaatcgttttcctctttatgaagtcgaacttgaagcatcaatcaaatga

SEQ ID NO: 80362 - protein, 423 aa, Prochlorococcus marinus subsp
MNILQNLKESDPIISNLINSEKNRQETHLELIASENFASMAVMQAQGSVLTNKYAEGLPQKRYYGGCEFVDEIEELAIERAKQLFDADWANVQPHSGAQANAAVFLSLLKPGDTILGMDLSHGGHLTHGSPVNMSGKWFNAVHYGVDKETNKLNFNEIRDIALATKPKLIICGYSAYPRKIDFESFRRIADEVGAFLMADIAHIAGLVATKLHPNPIPYCDVVTTTTHKTLRGPRGGLILCKDKEFGKKFDKSVFPGTQGGPLEHIIAAKAVAFGEALKPNFVNYSKQVINNAKVLSSTLIKRGIDIVSGGTDNHIVLLDLRSINMTGKVADLLVSEVNITANKNTVPFDPESPFVTSGLRLGTAALTTRGFNDDAFVEVGEIIADRLLNPDDLLTEKKCKERVLTLCNRFPLYEVELEASIK

SEQ ID NO: 80363 - DNA, 1236 bp, Prochlorococcus marinus
  CDS (1)..(1236): transl_table=11
atgaaatgtgatccaagtattgcgaaattaataaacaatgaattatcaagacaagaaactcatttagagcttatcgcaagcgagaattttgcttctaaggccgtaatggaagcccaaggatcagtcctaacaaataaatatgctgaaggtctccctaacaaacgttattacggaggatgtgagtatgtagacggagttgagcaactagcaatagatagagcaaaaaacctttttggtgccaactgggcaaacgtccaaccacacagcggagctcaagctaactttgcagttttccttagccttctaaagccaggggacacaatcatgggaatggacttatctcatggaggacacctcacgcatggttcacctgtaaatgtaagcggcaaatggtttaaaacttgccattacgaagttgataaaaagactgaaatgctcgatatggatgcaataagaaaaaaagcaattgaaaatcaacctaaattaattatctgtggattctctgcctatccacgaaaaattgacttcaaagctttcagatcaatagctgatgaggtaaatgcttatttattagctgatattgctcatattgctggtttagtggcaagtggacttcacccaagtccaatcccatattgtgatgtagttacaacaactactcacaaaactcttagagggccaaggggtggactaatcctctcaaaagataaggagataggaaaaaagcttgataaagcagtatttcctggcacccaaggaggtcctttagaacatgtaatcgcagccaaggctgttgcattcaaagaagcttctgcacccgaattcaagatctatagccaaaaagtaatctcaaatgcaaaagttctttctaatcaacttcaaaaaagaggaatttcaattgtaagcaaaggaactgacaatcatatagttcttcttgaccttagaagcattggtatgacaggtaaagttgctgatcaattagtaagtgatattaaaataaccgcgaacaaaaacactgtaccttttgacccagagtccccatttgttactagtgggctaaggctaggttcagcagcccttacgactagaggttttaatgaacaagcctttggagatgttggtaatgtcattgcagatagactacttaaccctaatgatgaagatataaaggaaaagtcaatcaataaagtatctgaactttgcaataagtttcctttatatagtgaaaacatctaa

SEQ ID NO: 80364 - protein, 411 aa, Prochlorococcus marinus
MKCDPSIAKLINNELSRQETHLELIASENFASKAVMEAQGSVLTNKYAEGLPNKRYYGGCEYVDGVEQLAIDRAKNLFGANWANVQPHSGAQANFAVFLSLLKPGDTIMGMDLSHGGHLTHGSPVNVSGKWFKTCHYEVDKKTEMLDMDAIRKKAIENQPKLIICGFSAYPRKIDFKAFRSIADEVNAYLLADIAHIAGLVASGLHPSPIPYCDVVTTTTHKTLRGPRGGLILSKDKEIGKKLDKAVFPGTQGGPLEHVIAAKAVAFKEASAPEFKIYSQKVISNAKVLSNQLQKRGISIVSKGTDNHIVLLDLRSIGMTGKVADQLVSDIKITANKNTVPFDPESPFVTSGLRLGSAALTTRGFNEQAFGDVGNVIADRLLNPNDEDIKEKSINKVSELCNKFPLYSENI

SEQ ID NO: 80365 - DNA, 1284 bp, Pyrococcus abyssi
  CDS (1)..(1284): transl_table=11
atggcctacaaggagtatagggacaaggtgttacactttattgaagaacacgagaagtggaggagccatacaataaacttgatcgcaagtgagaacataacttctccaagcgttaacagggccgttgcctctggctttatgcacaagtacgcagagggatggccaaggcaaaggtattaccaaggttgtaagtacgttgatgaggtcgagctcattggagttgaactcttcactaagttattcaagagcgactatgcagatttaagaccaatctctggaactaacgctaatcaagcagtgttcttcgggttagggcagccaggtgataaggttatagttctccacacgagccatggtggacatataagccacatgccattcggggctgctggaatgcgtggtttagaggttcacacatggccattcgataacgaatccttcaacatagacgttgacaaggctgagaagatgataagagagctcgagccaaagatagttgtctttggaggttcattgttcccgttcccgcacccagttaaggagcttgccccagtggctaaggaagttggggcgttcgtagtttacgacgcagcccacgttctcggattaatagccggtggcgagttccaggacccacttagagagggagcagatataatgacagcatcaacccacaagaccttcccagggccacagggaggagtaatactgtacaagaaattcgccgacgatgaaacgatagcaaagctacagtgggcgatcttcccaggtgtgcttagcaaccaccacctccaccacatggctggaaaagtgataacggctgcagagatgctcgagtacggtgaagcgtacgcgaagcagatagttaagaacgcaaaggccctagctgaagccttagcagaggaaggatttaaggtgataggcgaagaccaaggttacaccaagagccatcaagtcatagttgacgtaagcgacctccacccagctggaggaggatgggcagctccactccttgaggaagccggaataattctcaacaagaacttacttccatgggatccactagagaaggttaacgagccaagtggactgagaattggagtccaggagatgacgagagtaggaatgatggaagacgagatgaaggagatagcgcacttcatgaagcgcgttctcttggacaaagaggatccaaagaaggtaaggaaggacgtctactacttcaggctcgagtaccagaaagtctactactccttcgactatggccttccaatgaaggagtga

SEQ ID NO: 80366 - protein, 427 aa, Pyrococcus abyssi
MAYKEYRDKVLHFIEEHEKWRSHTINLIASENITSPSVNRAVASGFMHKYAEGWPRQRYYQGCKYVDEVELIGVELFTKLFKSDYADLRPISGTNANQAVFFGLGQPGDKVIVLHTSHGGHISHMPFGAAGMRGLEVHTWPFDNESFNIDVDKAEKMIRELEPKIVVFGGSLFPFPHPVKELAPVAKEVGAFVVYDAAHVLGLIAGGEFQDPLREGADIMTASTHKTFPGPQGGVILYKKFADDETIAKLQWAIFPGVLSNHHLHHMAGKVITAAEMLEYGEAYAKQIVKNAKALAEALAEEGFKVIGEDQGYTKSHQVIVDVSDLHPAGGGWAAPLLEEAGIILNKNLLPWDPLEKVNEPSGLRIGVQEMTRVGMMEDEMKEIAHFMKRVLLDKEDPKKVRKDVYYFRLEYQKVYYSFDYGLPMKE

SEQ ID NO: 80367 - DNA, 1293 bp, Pyrobaculum aerophilum
  CDS (1)..(1293): transl_table=11
atgcttccgcgggaaatagaagagttgttaaatataatattgcaacataacacatggagacgtaaagagaccatcaacttaattgcaagcgagaacgtgatgtctccgttagcagagttagtctatgtaaacgatttcgctggcagatatgccgaaggcacggtgggcaataggtattaccagggaacgaagtatgtagacatattagaggactctttatcaaaaagatttgcaaaagtcttagacgcaaaatttgtagacgtgaggcctatctctggcactattgcaaacctggcaacgtaccacgcgttagtgccagagggcggaattgtggcctccctgcctgtaaaatacggcggccacataagtcacaacacagtaggcgggcttaaagcacttagagtaaaaacagtggagttgccctgggattttgagaattttaatatagacatagacgccgcgcggaaaattattgaagaaaagaggccaaacctcataatattaggcgcgtccctatacctcttcccccacccagtaagagaaatagcaaacgcggcgaaggccgtcggcgcttacgtcctccacgactcggcgcatgtctttggcttaataatagggggagtcttccccaacccgttaaaagaaggcgcacacgtaatcacgtcgtcaacacacaaaacgtttccaggcccgcagggaggattaatagcctcggtcacggacgaggagttaaacaacgccatccaaagggctgttttcccagtgtttacgtctaactatcacctacacagatacgccgctacgtatgtcacattaatagagatggaacacttcggtgcagagtacggcgcaagaatcgtggaaaacgccaaggccttggctgaggcgctggccgaggagggagtaacccccgtgggggagcggctcggctacacaaagacgcatcaggtggctgttgatgtctctaaattcggcggaggggataaagttgctaggctattagaggaggccaatataattgtcaataaaaacgcccttccttgggataaaagcgtcttaaaacccagcggcattagaatgggggtacaagaaatgacgcgtttcggcatggggaagggcgagatgaaggaaatagccaagttcatagcaagagtactaaaaggcgaggaccccactgcagtaaagcgtgaagttgttgaatttagaaaaacattcatagaaattaagtatggattcaaaatagataaagaaattattgataagatattttactcgttaaatttatatacataa

SEQ ID NO: 80368 - protein, 430 aa, Pyrobaculum aerophilum
MLPREIEELLNIILQHNTWRRKETINLIASENVMSPLAELVYVNDFAGRYAEGTVGNRYYQGTKYVDILEDSLSKRFAKVLDAKFVDVRPISGTIANLATYHALVPEGGIVASLPVKYGGHISHNTVGGLKALRVKTVELPWDFENFNIDIDAARKIIEEKRPNLIILGASLYLFPHPVREIANAAKAVGAYVLHDSAHVFGLIIGGVFPNPLKEGAHVITSSTHKTFPGPQGGLIASVTDEELNNAIQRAVFPVFTSNYHLHRYAATYVTLIEMEHFGAEYGARIVENAKALAEALAEEGVTPVGERLGYTKTHQVAVDVSKFGGGDKVARLLEEANIIVNKNALPWDKSVLKPSGIRMGVQEMTRFGMGKGEMKEIAKFIARVLKGEDPTAVKREVVEFRKTFIEIKYGFKIDKEIIDKIFYSLNLYT

SEQ ID NO: 80369 - DNA, 1284 bp, Pyrococcus furiosus
  CDS (1)..(1284): transl_table=11
atgacatataaggagtatagagacaaggttctaaactttatagaggagcatgaaaaatggagaagccacactataaacctcattgcaagtgaaaacataacatccccgagtgtaaacagagccgttgcttcaggcttcatgcacaagtatgctgagggctggccgaagcagaggtactatcagggatgtaaatacgttgatgaggttgagctcattggagtagagctattcacaaagttatttaagagtgattacgctgatttaagaccaatttctggaactaatgcaaatcaggcggtattctttggtcttggacaaccaggtgacaaggttatagttcttcacactagccacggaggtcacataagccacatgcccttcggagctgctggaatgagaggactagaagtacacacttggccatttgactttgagagctttaacatcgatgttgataaggcagagaaaatgataagggagttagaaccaaagatagtgatgtttggtggctcactattcccatttccacacccagtaaaggaactagctccagtggctaaggaggttggtgcctttgttgtctatgatgccgctcacgtactaggtctcatagctggaggagagttccaggatccacttagggaaggagcagacataatgacagcttcaacacacaagacattcccaggtcctcagggtggagttatactctacaaaaagtttgcagacgatgaaacaatagcaaagttacaatgggcaatattcccaggagtagtgagcaatcaccaccttcaccacatggctggtaaggttattacagcagcagaaatgttggagtatggtgaagcgtatgcaaagcagatagttaagaatgctaaggctcttgctgaagctttggctgaagaggggttcaaggttatcggtgaagatcaaggctatacaaagagccaccaagttatagtggacgtaagtgacctacacccagccggtggaggatgggctgctccacttcttgaagaagctggaataatcctcaacaagaacctacttccatgggatccacttgaaaaagtcaacgagcccagtggattaagaattggagttcaagagatgacaagagttggaatgatggaagatgaaatgagagaaatcgcccacttcatcaagagagttctaatagataaggaagatccaaagaaggtcagaaaggatgtctactacttcaggctagagtaccagaaggtttactactccttcgactatggcctaccaatgaaggagtga

SEQ ID NO: 80370 - protein, 427 aa, Pyrococcus furiosus
MTYKEYRDKVLNFIEEHEKWRSHTINLIASENITSPSVNRAVASGFMHKYAEGWPKQRYYQGCKYVDEVELIGVELFTKLFKSDYADLRPISGTNANQAVFFGLGQPGDKVIVLHTSHGGHISHMPFGAAGMRGLEVHTWPFDFESFNIDVDKAEKMIRELEPKIVMFGGSLFPFPHPVKELAPVAKEVGAFVVYDAAHVLGLIAGGEFQDPLREGADIMTASTHKTFPGPQGGVILYKKFADDETIAKLQWAIFPGVVSNHHLHHMAGKVITAAEMLEYGEAYAKQIVKNAKALAEALAEEGFKVIGEDQGYTKSHQVIVDVSDLHPAGGGWAAPLLEEAGIILNKNLLPWDPLEKVNEPSGLRIGVQEMTRVGMMEDEMREIAHFIKRVLIDKEDPKKVRKDVYYFRLEYQKVYYSFDYGLPMKE

SEQ ID NO: 80371 - DNA, 1284 bp, Pyrococcus horikoshii
  CDS (1)..(1284): transl_table=11
atgacctacagagagtatagggacaaggtattacactttattgaggagcatgagaagtggagaagccatacgataaatttgatcgcaagtgaaaacataacatcgccaagtgtcaatagggccgtggcctcaggttttatgcacaaatacgccgaaggatggccaaagcaaagatattatcagggatgtaagtacgttgatgaggtagaacttataggtgtagagctattcacaaagctgtttaagagtgattacgctgatttaaggcccgtttctggaacgaacgctaaccaagctgtattctttggcttaggtcagccaggagacaaagtaatagttcttcacacaagccatggaggacatataagccacatgcccttcggtgctgctggaatgagaggtttagaggttcacacatggccatttgactttgaaagcttcaacatcgatgtagataaggctgaaaagatgataagagagttagagccaaagatagtcgtctttggaggttcactgttcccattcccacatccagtaaaggaacttgccccagtggctaaggaggttggggccttcgtagtttatgatgcagcccacgtccttggattgatagccggaggagagttccaggatccacttagagagggagcagatataatgacagcttcaacccacaagaccttcccaggaccccagggtggagtaatactttacaagaagttcgcagatgatgagacgatagcaaagcttcagtgggcaatattcccgggagtagtgagcaaccaccacctccaccacatggccgggaaagtaattacagcagcagagatgttggagtacggtgaagcttacgcaaagcagatagtaaagaatgcaaaggccctagctgaggctttagccgaggaaggctttaaggttatcggagaagaccaaggatatacaaagagtcaccaagttatagtggatgtaagcgacttacacccagcaggtggaggatgggccgctccacttcttgaagaggccggaataatcctcaacaagaatctattaccatgggatccacttgagaaggtcaacgaaccaagtggattaagaattggagtccaggaaatgacgagagttggaatgatggaagatgagatgaaggagatagcccacttcatgaagagagtcctgatagacaaggaggatccaaagaaggtcagaaaagacgtttattacttcaggcttgaataccagaaggtttattactccttcgactatggactaccaatgaaggagtga

SEQ ID NO: 80372 - protein, 427 aa, Pyrococcus horikoshii
MTYREYRDKVLHFIEEHEKWRSHTINLIASENITSPSVNRAVASGFMHKYAEGWPKQRYYQGCKYVDEVELIGVELFTKLFKSDYADLRPVSGTNANQAVFFGLGQPGDKVIVLHTSHGGHISHMPFGAAGMRGLEVHTWPFDFESFNIDVDKAEKMIRELEPKIVVFGGSLFPFPHPVKELAPVAKEVGAFVVYDAAHVLGLIAGGEFQDPLREGADIMTASTHKTFPGPQGGVILYKKFADDETIAKLQWAIFPGVVSNHHLHHMAGKVITAAEMLEYGEAYAKQIVKNAKALAEALAEEGFKVIGEDQGYTKSHQVIVDVSDLHPAGGGWAAPLLEEAGIILNKNLLPWDPLEKVNEPSGLRIGVQEMTRVGMMEDEMKEIAHFMKRVLIDKEDPKKVRKDVYYFRLEYQKVYYSFDYGLPMKE

SEQ ID NO: 80373 - DNA, 1296 bp, Pyrococcus kodakaraensis
  CDS (1)..(1296): transl_table=11
atggctgaaggatatagagagtacagagacaaggttcttggctttattgaagaccacgagaactggaggaagcacacgataaacctcatcgcgagcgaaaacgtgacttctccgagcgttaccagggccgttgcctcaggttttatgcacaagtacgccgagggctggccgaagcagaggtactatcagggctgcaagtacgttgacgaggttgagctcatcggtgttgagctcttcaccaagctcttcggaagcgacttcgccgacctgagaccgatttctggaacaaacgccaaccaggcggtcttcttcgggctcacccagccgggcgacaaggcgatagttcttcacaccagccacggcggacacataagccacatgcccttcggtgccgccggaatgaggggtcttgaagtccacacctggcccttcgacaacgaggagttcaacatcgatgtcgacaaggccgagaagctcatccgcgaggtcgaacccaagatagtcgtcttcggcggttcgctcttcccgttcccgcaccctgtcaaggagctcgctccggtcgccaaagaggttggcgcctacgtcatgtacgacggtgcccacgtcctcggtctcatagctggaaagcagttccaggacccgctccgcgagggagccgacataatcacggcctcaactcacaagaccttccctgggccgcagggcggtgtcatcatttacaagcgcttcggcgagacggaagagatagccaagctccagtgggccatcttcccgggtgtcctcagcaaccaccacctccaccacatggcgggtaaggtaatcaccgccgccgagatgctcgagtacggtgagaagtacgcggcccagatagtcaagaacgccaaggcccttgccgaagccctggcggaggaaggcttcaaggtcatcggcgaggacaagggctacaccgagagccaccaggtcatcgttgacgtttcagacctccaccctgcagctggaggatgggcggccccgctgcttgaagaggccggcataatcctcaacaagaacctcctcccgtgggacccgcttgagaaggtcaacgagccgagcggccttaggattggagtccaggagatgaccagggttggaatgatggaggatgagatgaaggagatagcaaggttcatcaggcgcgtcctcatagacaaggaagaccctgccaaggtcaggagagacgtctacggcttccgcgccgagtaccagaaggtttactactccttcgaccacgggctcccgctcaggctcagggagtaa

SEQ ID NO: 80374 - protein, 431 aa, Pyrococcus kodakaraensis
MAEGYREYRDKVLGFIEDHENWRKHTINLIASENVTSPSVTRAVASGFMHKYAEGWPKQRYYQGCKYVDEVELIGVELFTKLFGSDFADLRPISGTNANQAVFFGLTQPGDKAIVLHTSHGGHISHMPFGAAGMRGLEVHTWPFDNEEFNIDVDKAEKLIREVEPKIVVFGGSLFPFPHPVKELAPVAKEVGAYVMYDGAHVLGLIAGKQFQDPLREGADIITASTHKTFPGPQGGVIIYKRFGETEEIAKLQWAIFPGVLSNHHLHHMAGKVITAAEMLEYGEKYAAQIVKNAKALAEALAEEGFKVIGEDKGYTESHQVIVDVSDLHPAAGGWAAPLLEEAGIILNKNLLPWDPLEKVNEPSGLRIGVQEMTRVGMMEDEMKEIARFIRRVLIDKEDPAKVRRDVYGFRAEYQKVYYSFDHGLPLRLRE

SEQ ID NO: 80375 - DNA, 1263 bp, Rhodopirellula baltica
  CDS (1)..(1263): transl_table=11
atgagcttcattcagtcacaagaccccgccatttgggacgcgatccaagccgaaacgactcgtcagcaagacggtttggaaatgatcgccagcgaaaactacaccagcccagcgatcatggaagccgttgggagcatcctgaccaacaaatacgcggagggttatcccggccgtcgttactacggcggttgcgagcacgtcgacgtcgtggagacgattgcgattgatcgagccaaggagttgttcggtgccgaagccgccaacgtccagcctcacagtggttcgcaagccaacgcggcggtgtatctgagctgcctcgaagtcggtgacaccgtgctgggattggatttggcccaaggcggccacctgactcacggcatgaagctgaacatgagcggccgactctacaacttcgtcaactacggcgtggacaaagtcaatcatcgcttggacttcgaccaaatcgtcaaattggctcgtgagcacaaacccaagctgatcgtcgctggtgcaagtgcttaccctcgcgaaattcctcacgatcgattcaaagaaatcgcggatgaggtcggcgcgaagctgatggtcgacatggcccactacgccggtttggtcgccgcaaaaattcacaacagcccagtgccgtatgcggactacgtaaccacgacgacccacaaaacgcttcgtgggcctcgcagtggcctgatcatgtgcaaagaagagcacctgaaactcgtcaaccgcaacgtgttccccggcactcagggtggcccgttgatgcacgtcgttgcgggcaaggcgatctgcttcgccgaggcgatgaccgaggaatacgcccattacgggcaagctgtggtcgacaacgcgaaaacgttggccgacaccttgctgagctgtggactgcgactggtcagcggcggaaccgacaaccacctgatgctggtcgatgtcaccgctgtggatctgggtggcaagaaagccgaagcggtcctcgatgcttgcggcatcacggtgaacatgaatatgatcccatttgaccaacgtaaaccgatggatccatctggtatccgaatcgggacgccggcactgaccacccgtggaatgggtggcgacgagatgaaacgaatcggccaatggatttacaatgcgttgtccgattccgacaacgcggcgcttcacgaatccatccgcaccgaaattcgcgaaatggtgcaggcattccctgtccctgccgccgctgaatctcccgccaccgttgcctga

SEQ ID NO: 80376 - protein, 420 aa, Rhodopirellula baltica
MSFIQSQDPAIWDAIQAETTRQQDGLEMIASENYTSPAIMEAVGSILTNKYAEGYPGRRYYGGCEHVDVVETIAIDRAKELFGAEAANVQPHSGSQANAAVYLSCLEVGDTVLGLDLAQGGHLTHGMKLNMSGRLYNFVNYGVDKVNHRLDFDQIVKLAREHKPKLIVAGASAYPREIPHDRFKEIADEVGAKLMVDMAHYAGLVAAKIHNSPVPYADYVTTTTHKTLRGPRSGLIMCKEEHLKLVNRNVFPGTQGGPLMHVVAGKAICFAEAMTEEYAHYGQAVVDNAKTLADTLLSCGLRLVSGGTDNHLMLVDVTAVDLGGKKAEAVLDACGITVNMNMIPFDQRKPMDPSGIRIGTPALTTRGMGGDEMKRIGQWIYNALSDSDNAALHESIRTEIREMVQAFPVPAAAESPATVA

SEQ ID NO: 80377 - DNA, 1296 bp, Rhodobacter sphaeroides
  CDS (1)..(1296): transl_table=11
atgaacgccccgcaccgcgacgacggcttctttaccgaaagcctctcttcccgcgatcccgagcttttcgcctcgatcaccggcgaactcggccgccagcgcgacgagatcgagctgatcgcctcggagaatatcgtgagccgcgccgtgatggaggcgcagggctcggtcatgacgaacaagtacgccgaaggctatgcgggcaagcgctactacggcggctgcgactatgtcgacgtggccgagacgctggccatcgagcgggcgaagcagctgttcggctgcgcctatgtgaacgtgcagccgaactcgggcagccaggccaaccagggcgtgttccaggcgctcatcaagccgggcgacaccattctgggcatggagctcgcctcgggcggccacctcacccacggggccgcgccgaaccagtccggcaagtggttcaacgcgatccagtatggcgtgcgccagcaggaccagctgatcgattacgatcaggtggcggcgctcgcgcgcgagcacaagcccaagctcatcatcgcgggcggctcggccatcccgcgccagatcgacttcgcccgcttccgggccatcgcggatgaggtgggcgcgctcctgatggtggacatggcccatttcgcgggcctcgtggcgggcggcgcccatccctcgcccttcccgcatgcggacgtggccaccaccacgacgcacaagacgctgcgcggtccgcgcggcggcatgatcctcacgaacagcgaggagatcgcgaagaaggtcaattcggccatcttcccgggcatccagggcggtccgctgatgcatgtgatcgcggccaaggcggtggccttcggcgaggcgctgcggcccgagttcaaggcctatgccgcgcaggtggtcaagaacgcgcaggcgctggcggacgagctgatgaagggcgggctcgacatcgtgacgggcggcaccgacacgcacctgatgctcgtggacctgcggcccaagggcgtgaagggcaatgcgaccgagaaggcgctgggccgcgcccacatcacctgcaacaagaacggcatcccgttcgaccccgagaagccgaccgtgacctcgggcgtccggctcggcacgcccgcgggcaccacccgcggcttcggtgaggcggagttccgcgagatcggccggctgatcgtcgaagtggtcgacgggctcgcggccaacggcgaagagggcaatgcggcggtggaagaggccgttaaggccaaggtcgcggcgctctgcgcccgcttcccgctctatccgacgctctga

SEQ ID NO: 80378 - protein, 431 aa, Rhodobacter sphaeroides
MNAPHRDDGFFTESLSSRDPELFASITGELGRQRDEIELIASENIVSRAVMEAQGSVMTNKYAEGYAGKRYYGGCDYVDVAETLAIERAKQLFGCAYVNVQPNSGSQANQGVFQALIKPGDTILGMELASGGHLTHGAAPNQSGKWFNAIQYGVRQQDQLIDYDQVAALAREHKPKLIIAGGSAIPRQIDFARFRAIADEVGALLMVDMAHFAGLVAGGAHPSPFPHADVATTTTHKTLRGPRGGMILTNSEEIAKKVNSAIFPGIQGGPLMHVIAAKAVAFGEALRPEFKAYAAQVVKNAQALADELMKGGLDIVTGGTDTHLMLVDLRPKGVKGNATEKALGRAHITCNKNGIPFDPEKPTVTSGVRLGTPAGTTRGFGEAEFREIGRLIVEVVDGLAANGEEGNAAVEEAVKAKVAALCARFPLYPTL

SEQ ID NO: 80379 - DNA, 1263 bp, Rickettsia conorii
  CDS (1)..(1263): transl_table=11
atgaatatttttaataataatttacacgaaacggataaagagattaatgaaataataaagcatgaaaagctacgtcaaagtagtgtaatcgagcttattgcatcagaaaatttcgtaagtcctgctgtgcttgaagctcaaggggcgcttctgactaacaaatatgccgaaggatacccaagtaagcgattctataacggttgcgaggaagtagataaagctgaaaatttagctatagaacgagtaaaaaaactctttaactgcaaatatgcaaatgtccaacctcattcaggatcacaagcaaatcaggctgtatatcttgctttattacagccgggtgatacggttcttggtatgtccttagatagcggtgggcatctaacgcacggtgcagctcctaatatgtctggtaaatggtttaacgccgtttcttatagcgtaaataaagagacttatttaatcgattatgatgagattgaacgcttagcggatttgcataaaccaaaattacttatagccggtttttctgcttatcctcgtaatattgattttgcaaaatttagagaaatcgtggataaagtaggagcttactttatggcagatattgctcatattgcaggacttgttgccacaggtgagcatcaaagccctattccttatgctcacgctgttacctctactactcataaaacacttagaggtccaagaggcggtttaattttatctaacgatgaagcgataggtcacaaaataaattctgcattatttccaggactacaaggtggtccgttaatgcatataatagctgcaaaagccgtagcttttttagaaaatttgcagcctgaatataaaagttatattcagcaggtaataagtaacgctaaagctttagcaagtagcttgcaagaaagaggatatgatatattaacaggtggtaccgataatcatattgttttagtggatttgcgtaaagacggaatcacgggtaagcttgccgcaaattctttggatagagcagggattacgtgtaataagaatgctatcccgtttgatgaaacttcgccttttatcacttcaggtattcgccttggtactcccgcatgtactactagaggttttaaagaaaaggattttgtattagtcggtcatatggtagcagatattttagacggcttaaaaaataatgaagataatagcgctcttgagcagaaagtattaaatgaagtgacaaaattaattgaattatttccgttttatggctaa

SEQ ID NO: 80380 - protein, 420 aa, Rickettsia conorii
MNIFNNNLHETDKEINEIIKHEKLRQSSVIELIASENFVSPAVLEAQGALLTNKYAEGYPSKRFYNGCEEVDKAENLAIERVKKLFNCKYANVQPHSGSQANQAVYLALLQPGDTVLGMSLDSGGHLTHGAAPNMSGKWFNAVSYSVNKETYLIDYDEIERLADLHKPKLLIAGFSAYPRNIDFAKFREIVDKVGAYFMADIAHIAGLVATGEHQSPIPYAHAVTSTTHKTLRGPRGGLILSNDEAIGHKINSALFPGLQGGPLMHIIAAKAVAFLENLQPEYKSYIQQVISNAKALASSLQERGYDILTGGTDNHIVLVDLRKDGITGKLAANSLDRAGITCNKNAIPFDETSPFITSGIRLGTPACTTRGFKEKDFVLVGHMVADILDGLKNNEDNSALEQKVLNEVTKLIELFPFYG

SEQ ID NO: 80381 - DNA, 1266 bp, Rickettsia felis
  CDS (1)..(1266): transl_table=11
atgaatatttttaataatcacttacacgaaacggataaagaaattgatgaaataatcaagcatgaaaagctgcgtcaaaatagcgtaattgagcttattgcatcagagaatttcgtaagtcccgcagtgcttgaagctcaaggatcgattctgactaataaatatgcggaagggtattcaggtaagcgtttctataacggttgtgaggaagtcgataaagctgagaatttagctatagagcgagtaaaaaaactctttaactgtaaatatgcaaatgtgcagtctcattccggttcacaagcaaatcaagctgtgtatcttgctttattacagcctggtgatacaattcttggtatgtctttagatagcggcgggcatctaacgcacggtgcagccccgaatatgtccggtaaatggtttaacgccgtttcttatagcgtaaataaagagacttatttaatcgattatgatgagattgaacgcttagcggatttgcataaaccaaaattacttatagccggtttttctgcttatcctcgtaatattgattttgcaagatttagagaaatagcggataaagtaggagcttactttatggcagatattgctcatattgccggacttgttgccacaggcgagcatcaaagccctattccttacactcatgctgttacctctaccactcacaaaacgctccgaggaccgcgaggcggtttaattttatctaacgacgaagagataggcaaaaagataaattctgcattatttccaggactacaaggcggtccgttaatgcatataatcgccgcaaaagccgtagcttttttagaaaatttgcagcctgaatataaaagctatattaagcaggtaataagtaatgctaaagctttagcaagtagcttgcaagaaagaggatatgatatattaacaggcggtaccgataatcatattgttttagtggatttgtgtaaagacgggattaccggaaagcttgctgctaattctttggatagagcagggattacatgtaataagaatgctatcccctttgatgaaacttcgccttttatcacttcaggtattcgtcttggcactccggcatgcactactagaggatttaaagaaaaggattttgtattagtcggtcatatggtagcagatattttagacggcttaaaaaataatgaagataatggtaaagccgagcaaaaagtactaactgaagtaacaaaactaattaaattatttccgttttatactcggtga

SEQ ID NO: 80382 - protein, 421 aa, Rickettsia felis
MNIFNNHLHETDKEIDEIIKHEKLRQNSVIELIASENFVSPAVLEAQGSILTNKYAEGYSGKRFYNGCEEVDKAENLAIERVKKLFNCKYANVQSHSGSQANQAVYLALLQPGDTILGMSLDSGGHLTHGAAPNMSGKWFNAVSYSVNKETYLIDYDEIERLADLHKPKLLIAGFSAYPRNIDFARFREIADKVGAYFMADIAHIAGLVATGEHQSPIPYTHAVTSTTHKTLRGPRGGLILSNDEEIGKKINSALFPGLQGGPLMHIIAAKAVAFLENLQPEYKSYIKQVISNAKALASSLQERGYDILTGGTDNHIVLVDLCKDGITGKLAANSLDRAGITCNKNAIPFDETSPFITSGIRLGTPACTTRGFKEKDFVLVGHMVADILDGLKNNEDNGKAEQKVLTEVTKLIKLFPFYTR

SEQ ID NO: 80383 - DNA, 1263 bp, Rickettsia prowazekii
  CDS (1)..(1263): transl_table=11
atgaatattttaaataataatttatatgaaatggataaagaaatttatgaaataatcaagaatgagaagattcgtcaaaataatgtaattgagcttattgcatcagagaattttgtaagttctgctgtattggaagctcaaggctcgattctgactaataaatatgcggaagggtatcccagtaagcgtttctataatggttgtgatgaagttgataaagctgaagtcttggctatagagcggataaagaaattatttaactgtaaatatgccaatgtgcaacctcattcaggctcgcaagcaaaccaaactgtgtatcttgctttattacaaccgtgtgatacaattcttggtatgtccttagatagcggtggacatctaacacatggtgcggcccctaatatatctggtaaatggtttaacactgtttcatatcatgtagatcaagaaacttatttaattgattatgatgaggttgaacgtttagctgtgttacataatccaaaattgcttatagcaggtttttctgcatatccgcgtaagattgattttgcaaaatttagaaaaatagcagataaagttggagcatatcttatggcagatattgctcatattgcagggcttgttgccacaggtgagcatcaaagtcctattccatatgcgcacgtagtaacctctacaactcataaaacgcttagagggccaaggggtggcttaatcttatctgatgatgaagagataggaaaaaaaataaattctgcattattcccagggttgcagggtggcccgttaatgcatataattgctgcaaaagcagtagcgtttttagaaaatttgcagcctgaatataaaaattatataaagcaggtaataagtaacgctaaagctttagcaattagcttacaagaaagaggttatgatatattaacaggtggtactgacaatcatattgttttagtggatttgcgtaaagacgggatcacaggtaagtgtgctgcaaattctttagatagagcagggattacgtgtaataagaatgctattccgtttgatacaacttcgccttttatcacttctggtattcgttttggtactcctgcatgtactactaaaggctttaaagaaaaggattttgtattaattggtcatatggtagcagagattttagatggcttaaagcataatgaagataatagtaaaactgaacagaaagtattaagtgaagtaaaaaagctaatgaaattatttccgttttatgactaa

SEQ ID NO: 80384 - protein, 420 aa, Rickettsia prowazekii
MNILNNNLYEMDKEIYEIIKNEKIRQNNVIELIASENFVSSAVLEAQGSILTNKYAEGYPSKRFYNGCDEVDKAEVLAIERIKKLFNCKYANVQPHSGSQANQTVYLALLQPCDTILGMSLDSGGHLTHGAAPNISGKWFNTVSYHVDQETYLIDYDEVERLAVLHNPKLLIAGFSAYPRKIDFAKFRKIADKVGAYLMADIAHIAGLVATGEHQSPIPYAHVVTSTTHKTLRGPRGGLILSDDEEIGKKINSALFPGLQGGPLMHIIAAKAVAFLENLQPEYKNYIKQVISNAKALAISLQERGYDILTGGTDNHIVLVDLRKDGITGKCAANSLDRAGITCNKNAIPFDTTSPFITSGIRFGTPACTTKGFKEKDFVLIGHMVAEILDGLKHNEDNSKTEQKVLSEVKKLMKLFPFYD

SEQ ID NO: 80385 - DNA, 1263 bp, Rickettsia typhi
  CDS (1)..(1263): transl_table=11
atgaatattttaaataataatttgtatggaatggataaagaaatttatgaaataatcaagaatgagaagcttcgtcaaaataacgtaattgagcttattgcatcagagaattttgtaagttctgctgtgcttgaagctcaaggctcgattctgactaataaatatgcggaagggtacccaagcaagcgtttttataatggttgtgatgaagttgataaagctgaagttttagctatagaacgtgcaaagaaattatttaactgtaaatatgcaaatgtgcaacctcattcaggctcgcaagcaaaccaagctgtgtatcttgctttattacaaccgtgtgatacaattcttggtatgtccttagatagtggtggacatctaacgcatggtgcagcccctaatatatctggtaaatggtttaacactgttgcatataatgtagataaagaaacttatttaattgattatgatgagattaaacgcttagctgtgttacataatccaaaattgcttatagcaggtttttctgcctatcctcgtaaaattgattttgcaagatttagagaaatagcggataaagttggagcatatcttatggcagatattgcacatattgcagggcttgttgctacaggagagcatcaaagccctattccatatgctcacgtagttacctctacaactcataaaacccttagagggccaaggggaggtttaatcttatctgattatgaagagataggtaaaaaaataaattctgcattattcccagggttacaaggtggtccactaatgcatgtaattgctgcaaaagcagtagcatttttagaaaatttgcagcctgaatataaatgttatatcaagcaggtaataagtaacgctaaagctttagcaattagcctgcaagaaagaggatatgatatattaacaggtggtactgacaatcatattgttttagtagatttgcgtaaagacgggatcaccggtaagtgtgctgcaaattctttagatagagcaggaattacttgtaataagaatgctattccgtttgatacaacttcaccttttgtcacttctggtattcgttttggcacttctgcatgtactactaaaggctttaaagaaaaggattttgtattaattggtcatatggtagcagagattttagacggcttaaagaataatgaagataatagtaaaactgaacagaaagtattgagtgaagtaaaaaagctaattaagttatttccattttatgactaa

SEQ ID NO: 80386 - protein, 420 aa, Rickettsia typhi
MNILNNNLYGMDKEIYEIIKNEKLRQNNVIELIASENFVSSAVLEAQGSILTNKYAEGYPSKRFYNGCDEVDKAEVLAIERAKKLFNCKYANVQPHSGSQANQAVYLALLQPCDTILGMSLDSGGHLTHGAAPNISGKWFNTVAYNVDKETYLIDYDEIKRLAVLHNPKLLIAGFSAYPRKIDFARFREIADKVGAYLMADIAHIAGLVATGEHQSPIPYAHVVTSTTHKTLRGPRGGLILSDYEEIGKKINSALFPGLQGGPLMHVIAAKAVAFLENLQPEYKCYIKQVISNAKALAISLQERGYDILTGGTDNHIVLVDLRKDGITGKCAANSLDRAGITCNKNAIPFDTTSPFVTSGIRFGTSACTTKGFKEKDFVLIGHMVAEILDGLKNNEDNSKTEQKVLSEVKKLIKLFPFYD

SEQ ID NO: 80387 - DNA, 1254 bp, Shewanella oneidensis
  CDS (1)..(1254): transl_table=11
atgctgaaaaaagatatgaatatcgcagattatgatccggaactgttcaacgcaattcagaacgaaactctgcgtcaagaagagcatattgagctgattgcttctgaaaactacaccagtccacgcgtgatgcaagcacaaggttcacaattaaccaacaagtacgccgaaggttatcctggcaagcgttactacggtggttgtgagtatgtggacgtagttgaaaccttagcgattgagcgtgcaaaacaactgtttggtgcgacttacgcaaacgtacaacctcactcaggttctcaagcaaacagcgccgtttatatggcattgttaaaaccaggcgataccgttttagggatgaatttagcccacggtggtcacttgacccacggttcacctgtaaacttctcaggtagactgtacaacatcattccttacggtatcgatgaatcaggcaaaatcgactatgacgaaatggaacgtctggccgtagaacacaaacctaagatgatgatcggtggtttctctgcttactcaggtattgttgactgggcaagaatgcgcgaaattgcagacaaaatcggtgcttatctgttcgttgatatggcgcacgtagcgggtcttattgctgctggcgtgtatccaaaccctgtgccacacgctcacgttgtgacttcaacgacccacaagaccttagcgggtcctcgtggtggtatcatcctgtctgctgccgatgatgaagagctatacaagaagctaaactctgcggtattccctggcggtcaaggtggtcctttgatgcacgttatcgcgggtaaagcggttgccttcaaagaagctctagagccagaattcaaaacctaccaacagcaagtggttaataatgctaaagctatggttgaagtgttccttgagcgcggttacaaaatcgtctctggcggaaccagcaaccacttaatgctagttgacctgattggtcgtgacttgaccggtaaagaagccgatgccgccttaggcagcgctaacattaccgtgaataaaaactcagtgccgaatgaccctcgttcaccattcgtgacttctggtgtacgtatcggtacccctgcgattacgcgccgtggctttaaagaagccgaagcgaaacaattaactggttggatctgtgacatcctcgacgatgcccataatcctgcggtcatcgagcgcgtaaaaggccaagtattggcactgtgcgctcgtttccctgtttacggttaa

SEQ ID NO: 80388 - protein, 417 aa, Shewanella oneidensis
MLKKDMNIADYDPELFNAIQNETLRQEEHIELIASENYTSPRVMQAQGSQLTNKYAEGYPGKRYYGGCEYVDVVETLAIERAKQLFGATYANVQPHSGSQANSAVYMALLKPGDTVLGMNLAHGGHLTHGSPVNFSGRLYNIIPYGIDESGKIDYDEMERLAVEHKPKMMIGGFSAYSGIVDWARMREIADKIGAYLFVDMAHVAGLIAAGVYPNPVPHAHVVTSTTHKTLAGPRGGIILSAADDEELYKKLNSAVFPGGQGGPLMHVIAGKAVAFKEALEPEFKTYQQQVVNNAKAMVEVFLERGYKIVSGGTSNHLMLVDLIGRDLTGKEADAALGSANITVNKNSVPNDPRSPFVTSGVRIGTPAITRRGFKEAEAKQLTGWICDILDDAHNPAVIERVKGQVLALCARFPVYG

SEQ ID NO: 80389 - DNA, 1296 bp, Silicibacter pomeroyi
  CDS (1)..(1296): transl_table=11
atgaacgcgagccaccaggataccggatttttcacagaggcgctttcggagcgtgatcccgagctgttcggggcgatcacgtccgagctggggcgtcagcgcgacgagatcgagctgatcgcgtcggaaaacatcgtttccgccgccgtgatgcaggcgcagggctcggtgatgaccaacaaatacgccgaaggctaccccggccggcgctattacggcggctgccagtatgtcgacatcgccgagaacctggcgatcgagcgggccaagcagctgtttggctgcggctttgccaatgtgcagcccaactcgggcagccaggccaaccagggcgtgttccaggcgctgatcaagccgggcgacaccatcctgggcatgagcctggacgcgggcggccacctgacccatggcgccgcgcccaaccagtcgggcaaatggttcaacgcggtgcaatacggcgtgcgccagcaggacaacctgctggattacgaccaggtcgaggcgctggccaaggagcaccggcccaagctgatcatcgccggcggctcggcgattccgcgccagatcgattttgcccggatgcgggagattgcggatatggtcggggcctacctccatgtcgatatggcgcatttcgccggtctggttgcggcgggcgagcacccgagcccgtttccgcacgcgcatgtggccaccacgaccacgcacaagaccctgcgcgggccccgtggcggtatgatcctcaccaatgatgaagatatcgctaagaaggtgaattcggcgatctttcccggtatccagggcggcccgctgatgcatgtgatcgcggccaaggcggtggcctttggcgaggcgctgcgccctgaattcaagacgtatattcaacaggttatcgccaatgcccaagcgctgagcgaccagttgatcaagggcggtctggacacggtgacccatggcaccgacacccatgtggtgctggtcgacctgcgccccaagggggtcaagggcaacgccaccgaaaaggctctggggcgcgcgcatatcacctgcaacaagaacggcgtgccgtttgatccggaaaagccgacggtgaccagcggcatccgcctgggcagccccgcgggcaccacgcgcggctttgccgagaccgaattccgccagatcgccgactggatcatcgaggtggtcgatggcctggccgccaatggcgaagacgccaacgaggccgtcgaggacaaggtcaaagcccaggtcgcagccctctgcgcaaaattccctatctatccaaacctttga

SEQ ID NO: 80390 - protein, 431 aa, Silicibacter pomeroyi
MNASHQDTGFFTEALSERDPELFGAITSELGRQRDEIELIASENIVSAAVMQAQGSVMTNKYAEGYPGRRYYGGCQYVDIAENLAIERAKQLFGCGFANVQPNSGSQANQGVFQALIKPGDTILGMSLDAGGHLTHGAAPNQSGKWFNAVQYGVRQQDNLLDYDQVEALAKEHRPKLIIAGGSAIPRQIDFARMREIADMVGAYLHVDMAHFAGLVAAGEHPSPFPHAHVATTTTHKTLRGPRGGMILTNDEDIAKKVNSAIFPGIQGGPLMHVIAAKAVAFGEALRPEFKTYIQQVIANAQALSDQLIKGGLDTVTHGTDTHVVLVDLRPKGVKGNATEKALGRAHITCNKNGVPFDPEKPTVTSGIRLGSPAGTTRGFAETEFRQIADWIIEVVDGLAANGEDANEAVEDKVKAQVAALCAKFPIYPNL

SEQ ID NO: 80391 - DNA, 1239 bp, Staphylococcus aureus
  CDS (1)..(1239): transl_table=11
atgtcttatatcaccaagcaagataaagttatcgcagaagcaatcgagagagaatttcagagacaaaatagcaacatagagttaatcgcatcggaaaattttgtatcggaagcggttatggaagcacaaggttcagtgttgactaataagtatgctgaaggctatccaggacgccgatattatggtggctgtgagtttgtagatgttactgaaagcatcgcaattgatcgtgctaaagcattgtttggagctgaacatgtcaatgttcaaccacattcaggttcacaagcgaacatggctgtttacttagttgcattagaaatgggcgacacagttttaggtatgaatttgagtcatggtggtcacttgacacatggagcgcctgttaattttagtggtaaattctacaatttcgttgaatatggagtagataaagacacagaacgaatcaattatgatgaagttcgtaaattagcgttagagcataagcctaagcttattgtggcaggagcatcagcatattcaagaacaattgacttcaaaaagtttaaagaaatcgcagatgaagtaaacgctaagttaatggtagacatggcacatattgcaggattagtagcggcaggtttacatccaaatccagtagaatatgctgattttgtaacaactacaacacacaaaacattacgcggaccacgtggtggtatgattttatgtaaggaagaatataaaaaagacatagataaaacaattttccctggtattcaaggtggacctcttgagcatgttattgcagcaaaagcagttgcttttggagaagcgttagaaaataatttcaaaacgtatcaacaacaagtggttaaaaacgcaaaagttcttgcagaagcattaattaatgaaggatttagaattgtttctggcggtacagataatcacttagtagctgttgatgtaaaagggtctataggacttactggtaaagaagctgaagagactttagattcagttggtatcacatgtaacaaaaataccattccgttcgatcaagaaaaaccttttgtaacgagtggtatacgtttaggtacacctgctgcaacaacgcgtggatttgatgaaaaagcttttgaggaagttgcaaaaatcatcagtttagcattgaaaaatagtaaagatgaagaaaaattacaacaagctaaagaacgcgttgcgaaattaacagctgaatatcctctatatcaataa

SEQ ID NO: 80392 - protein, 412 aa, Staphylococcus aureus
MSYITKQDKVIAEAIEREFQRQNSNIELIASENFVSEAVMEAQGSVLTNKYAEGYPGRRYYGGCEFVDVTESIAIDRAKALFGAEHVNVQPHSGSQANMAVYLVALEMGDTVLGMNLSHGGHLTHGAPVNFSGKFYNFVEYGVDKDTERINYDEVRKLALEHKPKLIVAGASAYSRTIDFKKFKEIADEVNAKLMVDMAHIAGLVAAGLHPNPVEYADFVTTTTHKTLRGPRGGMILCKEEYKKDIDKTIFPGIQGGPLEHVIAAKAVAFGEALENNFKTYQQQVVKNAKVLAEALINEGFRIVSGGTDNHLVAVDVKGSIGLTGKEAEETLDSVGITCNKNTIPFDQEKPFVTSGIRLGTPAATTRGFDEKAFEEVAKIISLALKNSKDEEKLQQAKERVAKLTAEYPLYQ

SEQ ID NO: 80393 - DNA, 1239 bp, Staphylococcus epidermidis
  CDS (1)..(1239): transl_table=11
atgtcttatatcgagaaaaaggataaagttgtttacgatgctattcaaaaggagtttcaacgacaaaatagtaatattgaactcattgcatcagaaaatttcgtatcacaagcagttatggaagcccaaggttcagtattaacgaataaatatgctgagggttatcctgggcgtcgttattatggagggtgtgagcatgtagatgtaactgagtccattgccattgaaagagcaaaagctttatttggagcagaacatgttaatgttcaaccccattcaggttctcaagctaatatggctgtgtatttggttgctttagaaatgggcgatactgtgttaggtatgaatttgagtcatggtggtcatttaacacatggggcaactgtcaattttagtggtaaattttatcattttgttgaatatggtgtggaccaagaaaatgaattaataaactatgatgaagtgagacgtttagcaattgagcatcaacctaaattaattgtagctggtgcttcagcatattcaagaactattgactttaaaaaatttaaagaaattgctgatgaagtaggagctaaattgatggtagatatggcacatattgctggtttagtagctgctggtttacatcctaatcctgtagaatatgctgattttgtgactactacaactcataaaactttacgcggtccacgtggtggtatgattttatgtaaagaagaatataaaaaagatatagataaaacaatcttcccaggtattcaaggcggtccattagaacatgtcatcgccgcaaaagctgttgcatttggagaagctttgaacgacgattttaaagattatcaaaatcaagtcattaaaaatgcacaagctttagctcaaacattaattgaagaaggcttcagagttgtatctggcggaacagacaatcatttagttgcagttgatgttaaaggttctatcaatatgactggtaaattagctgaagagacacttgataaagtaggaattacatgtaataagaatactattccatttgataaagaaaaaccgtttgtaacaagtggtgttagactaggaacaccagcagctacaactcgtggttttgatgaatctgcatttgtggaagtagcaaaaattattagtttagcattaaataactatgataatgatactaaactaaatgaagctaaagagagagttcacgcactcacatctaaatatccattatataattaa

SEQ ID NO: 80394 - protein, 412 aa, Staphylococcus epidermidis
MSYIEKKDKVVYDAIQKEFQRQNSNIELIASENFVSQAVMEAQGSVLTNKYAEGYPGRRYYGGCEHVDVTESIAIERAKALFGAEHVNVQPHSGSQANMAVYLVALEMGDTVLGMNLSHGGHLTHGATVNFSGKFYHFVEYGVDQENELINYDEVRRLAIEHQPKLIVAGASAYSRTIDFKKFKEIADEVGAKLMVDMAHIAGLVAAGLHPNPVEYADFVTTTTHKTLRGPRGGMILCKEEYKKDIDKTIFPGIQGGPLEHVIAAKAVAFGEALNDDFKDYQNQVIKNAQALAQTLIEEGFRVVSGGTDNHLVAVDVKGSINMTGKLAEETLDKVGITCNKNTIPFDKEKPFVTSGVRLGTPAATTRGFDESAFVEVAKIISLALNNYDNDTKLNEAKERVHALTSKYPLYN

SEQ ID NO: 80395 - DNA, 1257 bp, Streptococcus agalactiae serotype III
  CDS (1)..(1257): transl_table=11
atgatttttgataaagacaattttaaagaatttgaccaagaactttggcaggctattcatgatgaggaaattcgccaacaaaataatattgaattaattgcatcagaaaacgttgtttcaaaagctgttatggcagcacaaggttctgttttgacaaataaatatgccgaagggtatcctagtcatcgttattatggaggaacagattgtgttgatgtagttgaaagtttagctatagaacgagctaagacgttatttaatgctgagtttgctaatgttcaaccacattctggtagtcaggctaatgcagcagcttacatggctttaatcgagccgggagatactgtcttagggatggacttagcagcaggtgggcacttaacacatggcgcttcagttagcttctcaggaaaaacttatcattttgtttcttattctgttgatcctaagacggagatgctagactatgataacattttgaaaatagcacaggaaacgcagcctaaattaattgttgcaggggcatcggcttattctcgcattattgattttgaaaaatttcgtcaaatagcagacgcagtagatgcttacttaatggttgatatggctcacattgcaggtttagttgcttctggtcatcaccctagtcctattccttatgctcatgtaacgacaacgacaacacataagactctacgtggacctagaggtggtttgattttaaccaatgatgaagcaattgctaaaaaaattaattctgcagtctttccaggactccaaggtggaccattagaacatgtaattgctgcaaaagctgtagctttgaaagaagccctagatccttcctttaaaatatacggtgaggatattattaaaaatgctcaagccatggctaaagtttttaaagaagatgatgactttcatttgatttctgatggtactgataatcatttgttcttagtagacgtcacaaaagttattgagaatggcaaaaaggcacaaaatgttcttgaagaagtcaatatcactcttaacaagaactctataccgtttgagcgactatcaccatttaaaacatcaggtattcgaattggtactccagcaattactagtcgaggaatgggagttgaagaatctcgaagaatcgctgaattaatgattaaggcactcaaaaatcatgaaaatcaagatatcctcacagaagttcgtcaagaaattaaatcattaacggacgctttccccttgtatgagaattaa

SEQ ID NO: 80396 - protein, 418 aa, Streptococcus agalactiae serotype III
MIFDKDNFKEFDQELWQAIHDEEIRQQNNIELIASENVVSKAVMAAQGSVLTNKYAEGYPSHRYYGGTDCVDVVESLAIERAKTLFNAEFANVQPHSGSQANAAAYMALIEPGDTVLGMDLAAGGHLTHGASVSFSGKTYHFVSYSVDPKTEMLDYDNILKIAQETQPKLIVAGASAYSRIIDFEKFRQIADAVDAYLMVDMAHIAGLVASGHHPSPIPYAHVTTTTTHKTLRGPRGGLILTNDEAIAKKINSAVFPGLQGGPLEHVIAAKAVALKEALDPSFKIYGEDIIKNAQAMAKVFKEDDDFHLISDGTDNHLFLVDVTKVIENGKKAQNVLEEVNITLNKNSIPFERLSPFKTSGIRIGTPAITSRGMGVEESRRIAELMIKALKNHENQDILTEVRQEIKSLTDAFPLYEN

SEQ ID NO: 80397 - DNA, 1263 bp, Streptomyces avermitilis
  CDS (1)..(1263): transl_table=11
atgtcgcttctgaacacgcctctgcacgagctcgacccggacgtcgccgccgccgtcgacgccgagctgaaccgtcagcagtccaccctcgagatgatcgcctcggagaacttcgctccggtcgcggtcatggaggcccagggctcggtcctcaccaacaagtacgccgagggctacccgggccgccgctactacggcggctgcgagcacgtcgatgtggtcgagcagatcgccatcgaccgggtcaaggagctgttcggcgccgagcacgccaacgtccagccgcactcgggcgcccaggccaacgcggccgccatgttcgcgctgctcaagcccggcgacacgatcatgggtctgaacctcgcgcacggcgggcacctgacccacggcatgaagatcaacttctccggcaagctgtacaacgtggtcgcgtaccacgtggacgagaccaccggccaggtggacatggccgaggtcgagaagctggccaaggagtccaggccgaagctgatcgtggccggctggtcggcgtacccgcgccagttggacttcgccgcgttccgccggatcgcggacgaggtcggcgcgtacctgatggtcgacatggcgcacttcgccggcctggtggcggcgggtctgcacccgaaccccgtgccgcacgcccatgtcgtgaccacgaccacgcacaagacgctgggcggcccgcgcggtggcgtgatcctgtcgacggccgaactggccaagaagatcaactccgcggtcttcccgggtcagcagggtggtccgctggagcacgtgatcgccgccaaggccgtctccttcaaggtcgccgcctccgacgacttcaaggagcgccagcagcgcacgctggacggcgcccgcatcctggccgagcgtctggtccgggacgacgtcaaggccgtgggcgtggacgtcctctcgggcggcacggacgtgcacctggtcctcgtcgacctgcgcgactccgagctggacggccagcaggccgaggaccgcctccacgaggtcggcatcacggtcaaccgcaacgccatcccgaacgacccgcgcccgccgatggtgacgtccggcctgcgcatcggtacgccggccctcgccacccgcggcttccaggccgcggacttcaccgaggtcgcggacatcatcgccgaggcgctgaagccgtcctacgacgcggacgccctcaaggcccgggtgacggcactggcggacaagcacccgctgtatcccggtctgaagtag

SEQ ID NO: 80398 - protein, 420 aa, Streptomyces avermitilis
MSLLNTPLHELDPDVAAAVDAELNRQQSTLEMIASENFAPVAVMEAQGSVLTNKYAEGYPGRRYYGGCEHVDVVEQIAIDRVKELFGAEHANVQPHSGAQANAAAMFALLKPGDTIMGLNLAHGGHLTHGMKINFSGKLYNVVAYHVDETTGQVDMAEVEKLAKESRPKLIVAGWSAYPRQLDFAAFRRIADEVGAYLMVDMAHFAGLVAAGLHPNPVPHAHVVTTTTHKTLGGPRGGVILSTAELAKKINSAVFPGQQGGPLEHVIAAKAVSFKVAASDDFKERQQRTLDGARILAERLVRDDVKAVGVDVLSGGTDVHLVLVDLRDSELDGQQAEDRLHEVGITVNRNAIPNDPRPPMVTSGLRIGTPALATRGFQAADFTEVADIIAEALKPSYDADALKARVTALADKHPLYPGLK

SEQ ID NO: 80399 - DNA, 1263 bp, Streptomyces coelicolor
  CDS (1)..(1263): transl_table=11
atgtcgcttctgaacacacccctgcacgagctggacccggacgtcgccgccgccgtcgacgccgagctggaccgccagcagtccaccctcgagatgatcgcgtcggagaacttcgccccggtcgcggtcatggaggcccagggctcggtcctcaccaacaagtacgccgagggctaccccggccgccgctactacggcggctgcgagcacgtcgacgtggtcgagcagatcgccatcgaccgggtcaaggcgctcttcggcgccgagcacgccaacgtgcagccgcactcgggcgcccaggccaacgcggccgcgatgttcgcgctgctcaagcccggcgacacgatcatgggtctgaacctcgcgcacggcgggcacctgacccacggcatgaagatcaacttctccggcaagctctacaacgtggtcccctaccacgtcggcgacgacggccaggtcgacatggccgaggtggagcgcctggccaaggagaccaagccgaagctgatcgtggcgggctggtcggcctacccgcgtcagctggacttcgccgcgttccgcaaggtcgcggacgaggtcggcgcgtacctgatggtcgacatggcgcacttcgccggtctggtcgcggcgggcctgcacccgaacccggtcccgcacgcccacgtcgtcaccacgaccacccacaagacgctgggcggtccgcgcggcggtgtgatcctctccacggccgagctggccaagaagatcaactccgccgtcttccccggtcagcagggtggcccgctggagcacgtggtggccgccaaggccgtcgccttcaaggtcgccgcgagcgaggacttcaaggagcgccagggccgtacgctggagggtgcccgcatcctggccgagcgcctggtgcgggacgacgcgaaggccgcgggcgtctccgtcctgaccggcggcacggacgtccacctggtcctggtggacctgcgcgactccgagctggacggacagcaggccgaggaccgcctccacgaggtcggcatcacggtcaaccgcaacgccgtcccgaacgacccgcgcccgccgatggtgacctccggtctgcgcatcggtacgccggccctggcgacccgcggcttcaccgccgaggacttcgccgaggtcgcggacgtgatcgccgaggcgctgaagccgtcctacgacgcggaggccctcaaggcccgggtgaagaccctggccgacaagcacccgctgtacccgggtctgaacaagtag

SEQ ID NO: 80400 - protein, 420 aa, Streptomyces coelicolor
MSLLNTPLHELDPDVAAAVDAELDRQQSTLEMIASENFAPVAVMEAQGSVLTNKYAEGYPGRRYYGGCEHVDVVEQIAIDRVKALFGAEHANVQPHSGAQANAAAMFALLKPGDTIMGLNLAHGGHLTHGMKINFSGKLYNVVPYHVGDDGQVDMAEVERLAKETKPKLIVAGWSAYPRQLDFAAFRKVADEVGAYLMVDMAHFAGLVAAGLHPNPVPHAHVVTTTTHKTLGGPRGGVILSTAELAKKINSAVFPGQQGGPLEHVVAAKAVAFKVAASEDFKERQGRTLEGARILAERLVRDDAKAAGVSVLTGGTDVHLVLVDLRDSELDGQQAEDRLHEVGITVNRNAVPNDPRPPMVTSGLRIGTPALATRGFTAEDFAEVADVIAEALKPSYDAEALKARVKTLADKHPLYPGLNK

SEQ ID NO: 80401 - DNA, 1263 bp, Streptococcus mutans
  CDS (1)..(1263): transl_table=11
atgatttttgataaagataattatgaagagtacgatagagaagtctgggaagctattcacgcagaagaaaagcgacagcaaaacaatattgaattaattgcctctgaaaatgtagtttctaaagcagtcatgaaggcgcaggggtctattttgactaataaatatgctgaaggttatcctggccgtcgttattatggcggtacagactatgttgatgtagttgagagtttggctatcgaacgtgctaaaaaactttttggtgctaaatatgctaatgttcaaccccactctggtagtcaagcgaatgctgcagcttatatggcacttatcaagcccggtgatactgttatgggcttagatttggctgctggtggtcatttgacacatggctccccagttagtttttctgggcaaacctataacttcatagcttacaatgttgatcctgaaacagaagttttgaattatgaacaaattttaaaacaggctgaagaagtgcagcctaagttaattgttgctggggcatctgcttattctcatatcattgattttaaaaaattccgtgacattgcagaccaagttggtgcaaaacttatggttgacatggcccacattgctggcttggttgctgccggcttgcatccaaatcctctaccttatgctcatattacaacaacaacgactcataaaactcttcgtggccctcgcggtgggctcgtcttgaccaatgatgaagatttagctaaaaaaatcaattctgctatcttccctggtttgcaaggtggtcctttggaacatattgttgcggccaaggctatcactttcaaggaaaatttagatcctgcttttaaagtttatgcgcaaaaaattattgaaaattgccaagcaatggtagaagttttcaatgctcacgaaaaattccgtgttgtttctggtgctagtgaaaaccatcttttcctcgttgatgtcacacaagttgttgaaaacggtaaagtggctcagaatattttagatgatgttcatatcacattgaataaaaattctattccttttgaaaagctgtcaccgtttaaaacttcaggtattcgcattggaacggcagcagtaacagcgcgtggttttggtcctgaagaatgccgtaaggtggctgaattgattgttaaaacccttgaaaataccgaaaatgaagcagtgttagaagaagtgcgtcaagaagttaaacttttgacagatgctttcccactttacgagaatcttgtatga

SEQ ID NO: 80402 - protein, 420 aa, Streptococcus mutans
MIFDKDNYEEYDREVWEAIHAEEKRQQNNIELIASENVVSKAVMKAQGSILTNKYAEGYPGRRYYGGTDYVDVVESLAIERAKKLFGAKYANVQPHSGSQANAAAYMALIKPGDTVMGLDLAAGGHLTHGSPVSFSGQTYNFIAYNVDPETEVLNYEQILKQAEEVQPKLIVAGASAYSHIIDFKKFRDIADQVGAKLMVDMAHIAGLVAAGLHPNPLPYAHITTTTTHKTLRGPRGGLVLTNDEDLAKKINSAIFPGLQGGPLEHIVAAKAITFKENLDPAFKVYAQKIIENCQAMVEVFNAHEKFRVVSGASENHLFLVDVTQVVENGKVAQNILDDVHITLNKNSIPFEKLSPFKTSGIRIGTAAVTARGFGPEECRKVAELIVKTLENTENEAVLEEVRQEVKLLTDAFPLYENLV

SEQ ID NO: 80403 - DNA, 1257 bp, Streptococcus pneumoniae
  CDS (1)..(1257): transl_table=11
atgatttttgacaaagatgattttaaagcatatgatgctgatctctggaatgctattgccaaagaagaagaacgccaacaaaataatatcgagttaattgcttcggaaaacgtagtttccaaggctgttatggcagctcaagggtctatcttgacaaataaatatgccgagggttacccaggacgccgttattatggtggaactgatgtagtagacgttgtagagactcttgctattgaacgcgcaaaagaaattttcggtgctaaatttgccaatgttcaaccacattcaggaagccaagctaactgtgcggcttacatgtccttgattgagccaggtgatacggttatgggaatggatttggcatcaggtggtcatttgactcatggggctcctgttagcttctctggtcaaacctacaactttgtttcttatagtgttgatcctaaaacggaactcttagactttgatgctatcttgaaacaagcccaagaagtaaaaccaaaactgattgtagctggtgcttcagcctattctcaaattatcgatttttcaaaattccgtgaaatcgcagatgctgtcggtgcgaagctcatggtggacatggcccatatcgctggcttggttgcggctggccttcatccaagcccagttccatacgctcatatcacaacaacaacgacccacaaaacccttcgtggacctcgtggtggtttgattttgaccaatgacgaagaacttgctaaaaaaatcaattcagctattttcccaggtattcagggcggtcctttagagcatgttgtggcggctaaggcagtttccttcaaagaagttttggatccagccttcaaggaatatgctgccaatgtaattaagaacagcaaggctatggcagatgtcttcttgcaagaccctgatttccgtattatttcaggtggaactgaaaaccatctcttccttgttgatgtgactaaagttgtagaaaacggcaaagttgctcaaaacttgttggatgaagtcaatattaccttaaataaaaactcaatcccttacgaaagcttgtcaccattcaagacaagtgggattcgtatcggagcagcagccattactgcacgtggatttggtgaagaagaaagtcgcaaagtggctgaactcatcattaaaacccttaagaattcagaaaatgaggctgtattagaagaagtgagaagtgcagtcaaagaattgacagatgccttcccattatacgaggactaa

SEQ ID NO: 80404 - protein, 418 aa, Streptococcus pneumoniae
MIFDKDDFKAYDADLWNAIAKEEERQQNNIELIASENVVSKAVMAAQGSILTNKYAEGYPGRRYYGGTDVVDVVETLAIERAKEIFGAKFANVQPHSGSQANCAAYMSLIEPGDTVMGMDLASGGHLTHGAPVSFSGQTYNFVSYSVDPKTELLDFDAILKQAQEVKPKLIVAGASAYSQIIDFSKFREIADAVGAKLMVDMAHIAGLVAAGLHPSPVPYAHITTTTTHKTLRGPRGGLILTNDEELAKKINSAIFPGIQGGPLEHVVAAKAVSFKEVLDPAFKEYAANVIKNSKAMADVFLQDPDFRIISGGTENHLFLVDVTKVVENGKVAQNLLDEVNITLNKNSIPYESLSPFKTSGIRIGAAAITARGFGEEESRKVAELIIKTLKNSENEAVLEEVRSAVKELTDAFPLYED

SEQ ID NO: 80405 - DNA, 1257 bp, Streptococcus pneumoniae
  CDS (1)..(1257): transl_table=11
atgatttttgacaaagatgattttaaagcatatgatgctgatctctggaatgctattgccaaagaagaagaacgccaacaaaataatatcgagttaattgcttcggaaaacgtagtttccaaggctgttatggcagctcaagggtctatcttgacaaataaatatgccgagggttacccaggacgccgttattatggtggaactgatgtagtagacgttgtagagactcttgctattgaacgcgcaaaagaaattttcggtgctaaatttgctaatgtccaaccacattcaggaagccaagctaactgtgcggcttacatgtccttgattgagccaggtgatacggttatgggaatggatttggcagcaggtggacacttgacccacggagctccagttagcttctctggtcaaacctacaactttctttcctatagtgtggatcctgaaacggaacttttggactttgatgctatcttgaaacaagcccaagaagtaaaaccaaaactgattgtagctggtgcttcagcatattctcaaattatcgatttttcaaaattccgtgaaatcgcagatgctgtcggtgcgaagctcatggtggacatggcccatatcgctggtttggttgcggctggccttcatccaagcccagttccatacgctcatatcacaacaacaacgacccacaaaacccttcgtggacctcgtggtggtttgattttgaccaatgacgaagaacttgctaaaaaaatcaattcagctattttcccaggtattcagggcggtcctttagagcatgttgtggcggctaaggcagtttccttcaaagaagttttggatccagccttcaaggaatatgctgccaatgtaattaagaacagcaaggctatggcagatgtcttcttgcaagaccctgatttccgtattatttcaggtggaactgaaaaccatctcttccttgttgatgtgactaaggttgtagaaaacggaaaagttgctcaaaacttgctggatgaagtcaatattaccctaaataaaaattcaatcccttacgaaaccttgtcgccattcaagacaagtgggattcgtatcggagcagcagctattactgcacgtggatttggtgaagaagaaagtcgcaaagtggctgaactcatcattaaaacccttaagaattcagaaaatgaggctgtattagaagaagtgagaagtgcagtcaaagaattgacagatgccttcccattatacgaggactaa

SEQ ID NO: 80406 - protein, 418 aa, Streptococcus pneumoniae
MIFDKDDFKAYDADLWNAIAKEEERQQNNIELIASENVVSKAVMAAQGSILTNKYAEGYPGRRYYGGTDVVDVVETLAIERAKEIFGAKFANVQPHSGSQANCAAYMSLIEPGDTVMGMDLAAGGHLTHGAPVSFSGQTYNFLSYSVDPETELLDFDAILKQAQEVKPKLIVAGASAYSQIIDFSKFREIADAVGAKLMVDMAHIAGLVAAGLHPSPVPYAHITTTTTHKTLRGPRGGLILTNDEELAKKINSAIFPGIQGGPLEHVVAAKAVSFKEVLDPAFKEYAANVIKNSKAMADVFLQDPDFRIISGGTENHLFLVDVTKVVENGKVAQNLLDEVNITLNKNSIPYETLSPFKTSGIRIGAAAITARGFGEEESRKVAELIIKTLKNSENEAVLEEVRSAVKELTDAFPLYED

SEQ ID NO: 80407 - DNA, 1302 bp, Sulfolobus acidocaldarius
  CDS (1)..(1302): transl_table=11
atggataaaattcctgaggagttagaaaagattcttcagatcacaagagaacagaataggtggagaaggctagagactataaatctcattccttctgagaatgtaatgagtcctctagctgagtcagtttatatgagcgattttatgtatagatacgctgaagggaaaccttttaaaagatattatcaaggtactaaatacgctgacgaaattgaagaattagcaatgaagcttgtttctgaaatatcctcttctaagtatgcagacttaagagctgttagtggaacaatagcaaatgcaggcgtttttagggttcttgccgattcaggagataaggctgtaattgctcctgttcaggctggtgcgcatgtgagtcatacaagatttggtacattaggtgcattgggtatagagcaaattgaaatgccttatgatcaagaatcaatgaatgtggatgtagataaagctataaaacttattgaagaggtaaaacctaagtttgtgacattaggcggtagtttatatctatttccgcatcctgtaaaagaactagctcctcatgttcatgcagtaggagctaagcttgtgtatgattcagctcacgtatatggacttattgtaggtaaggcttggcataatcccttggaagaaggtgcggatgtcgtaactgcatctactcataaaacatttcctggtcctcaaggcgggctcatagttactaacgatgactctttatataagaaagtgagtgatactattttcccttggtttgtcagtaatcatcatcttcataggttgccaagtactgcaataacagcattagaaatgaagtatttcggaaaggagtatgcccaacagatagtgaagaatgctaaagcattggctgaagctttagcagcagaaggatttaaggtaataggtgaacatttaggttttaccaaaagtcaccaagtagcaatagatgtaagaaacttgggaggaggtgctaaggtagctaagctattcgaggaagctaatattatagctaataagaacttgctcccgtacgatccacctagtgcagtaaaagatcctagtggtgtaagattgggagttcaggaaatgacacgatttgggatgaaagaagaagaaatgagaattatagctaggctaatgagagaagtagcgattgaaaataaagacgtcaaggaagtaaagaaaaaagtaacagagtttagaaaagagttcttagaggtaaaatatacattcactaatgtagatttggcaaagtactccagcaaggtaatatcattacttatctaa

SEQ ID NO: 80408 - protein, 433 aa, Sulfolobus acidocaldarius
MDKIPEELEKILQITREQNRWRRLETINLIPSENVMSPLAESVYMSDFMYRYAEGKPFKRYYQGTKYADEIEELAMKLVSEISSSKYADLRAVSGTIANAGVFRVLADSGDKAVIAPVQAGAHVSHTRFGTLGALGIEQIEMPYDQESMNVDVDKAIKLIEEVKPKFVTLGGSLYLFPHPVKELAPHVHAVGAKLVYDSAHVYGLIVGKAWHNPLEEGADVVTASTHKTFPGPQGGLIVTNDDSLYKKVSDTIFPWFVSNHHLHRLPSTAITALEMKYFGKEYAQQIVKNAKALAEALAAEGFKVIGEHLGFTKSHQVAIDVRNLGGGAKVAKLFEEANIIANKNLLPYDPPSAVKDPSGVRLGVQEMTRFGMKEEEMRIIARLMREVAIENKDVKEVKKKVTEFRKEFLEVKYTFTNVDLAKYSSKVISLLI

SEQ ID NO: 80409 - DNA, 1302 bp, Sulfolobus solfataricus
  CDS (1)..(1302): transl_table=11
atgtcacttcctaaagaattagaaaaagttcttgaaattactaaggcacagaacgtatggagaaggacgcagactttgaaccttattgcatctgaaaacgtaatgagtccactagctgaaagtgtgtatatgagtgacttcatgtccagatatgcagaaggtaaaccatacaagagatactatcaagggaccaagtatactgatgaaatcgagactcttactatggagttgatgaatgagataacaaactcaaaggattgtgatctaagacctactagcggtaccatagcaaatgcggctgtgtttagagttttagctgagcctggagataaggcattaatagcaccagtccaagctggtgcccatgtcagtcataccaaatttggaacattgggagctttgggtattcaacatattgaaatgccatttgatgaggaaaacattaacgtagatgtagataaagcaataaagatgatagaagaagttaaaccaaaattcgtagtgctaggaggcagtctttacctatttcctcatcctactaaggaattagctcaacacgttcacgctgtaggagctaaattggtttacgatgctgcacatgtttatgggttgatagagggtaaagtttggagtaacccactaaaagatggagcggatattatgactgtctctacgcataagacttttcctggtcctcaaggaggagcgattttctctgatggttcagaagtttttaaacaagtctcaaagacaatattcccatggtttgttagtaatcatcatttgcatagattaccagctactgcagtaactgccattgagatgaaatattttggcgaaagttatgctaatcaaatactaaggaattcgaaggctctagcagaggctttagctgaaagaggatttaaggtaattggagaaaatttaggttatactaagagtcatcaagtagcggtagatgttagacaattcggtgggggaaataagatagctaagctattagaggacgcaaatatcatagtaaataaaaatctattgccctatgataagccagaagatgtttccgatccaagtggcttaagaataggggtacaagagatgacaagatatgggatgaaagaaggtgaaatggaggagatagctgagctatttaagaaagttattatagacaaaaaagatgttaacgaagttaaaaaagaggtaattgagatgagaaggaatttcttggaggttaagtatacattcgatgatatgaaagatttagaaaagtactcgtcaaaatcattaaaattgatcatctaa

SEQ ID NO: 80410 - protein, 433 aa, Sulfolobus solfataricus
MSLPKELEKVLEITKAQNVWRRTQTLNLIASENVMSPLAESVYMSDFMSRYAEGKPYKRYYQGTKYTDEIETLTMELMNEITNSKDCDLRPTSGTIANAAVFRVLAEPGDKALIAPVQAGAHVSHTKFGTLGALGIQHIEMPFDEENINVDVDKAIKMIEEVKPKFVVLGGSLYLFPHPTKELAQHVHAVGAKLVYDAAHVYGLIEGKVWSNPLKDGADIMTVSTHKTFPGPQGGAIFSDGSEVFKQVSKTIFPWFVSNHHLHRLPATAVTAIEMKYFGESYANQILRNSKALAEALAERGFKVIGENLGYTKSHQVAVDVRQFGGGNKIAKLLEDANIIVNKNLLPYDKPEDVSDPSGLRIGVQEMTRYGMKEGEMEEIAELFKKVIIDKKDVNEVKKEVIEMRRNFLEVKYTFDDMKDLEKYSSKSLKLII

SEQ ID NO: 80411 - DNA, 1302 bp, Sulfolobus tokodaii
  CDS (1)..(1302): transl_table=11
atgagtcaaattcctaaagagcttgaaaaagtaattgagctaacaagagaacaaaatagatggagaagaacagaggtaataaatttaatagcttctgaaaacgtaatgagccctttagctgaaacggtttatatgagtgactttatgtcaagatatgcagaaggtaagccatataaaagatattatcaaggaacaaagtatgttgatgaagttgaaacattagctatgcaattaatgaatgaaattactaatactaaattctgtgatttacgagctactagtgggactatagcaaatgctgctgtgtttagagtactagctaaccctggtgaaaaggcattaattgctccagttcaagctggggcccatgtaagtcatactaaatttggcacattgggagctttaggcatagaacatattgaacttccttatgatgctgataaaatgaatgtagatgtagataaagccataaagatgattgaacagattaagcctaaatttattgtaatgggaggaagtttatatttatttcctcatccagttaaagaattagcccctcatgcacatgctgttggagctaaagtagtctatgatgctgctcatgtttatggtttaataactggaaaagcgtggcataatccattagaagaaggagcagatattatgacttcttcaacgcataaaactttccctggacctcaaggtggtgctgtattttcaaatgaagaagaaatatttaagaaagttgctgacacaatatttccttggtttgttagtaatcatcatttacataggttaccagccactgctgttactgctcttgaaatgaagtattttggtgaagattatgcaaaacaaataactaaaaatgcaaaggcttttgctgaggcattagcagctgaaggttttaaggttataggagagcatttaggttatactcagagccatcaagtagtgctggatgttagaaacttaggtggaggtgctaagatagctaaattgttcgaagatgctaacataataactaataaaaacttattaccttatgatccacctagtgctgtaaaagatcctagtggtataaggttaggagtacaagaaatgaccaggtttggtatgaaagaagaagaaatgagagaaatagcaaagctaatgagagaagtggcaattgatggtaaagatccaaatgaagtaaagaaaaaagtaattgaatttagaaagaattatttagaggtcaaatacacattcagcgtcgatttatcaaagtattctaatggaaaaatgctaccattacttatctaa

SEQ ID NO: 80412 - protein, 433 aa, Sulfolobus tokodaii
MSQIPKELEKVIELTREQNRWRRTEVINLIASENVMSPLAETVYMSDFMSRYAEGKPYKRYYQGTKYVDEVETLAMQLMNEITNTKFCDLRATSGTIANAAVFRVLANPGEKALIAPVQAGAHVSHTKFGTLGALGIEHIELPYDADKMNVDVDKAIKMIEQIKPKFIVMGGSLYLFPHPVKELAPHAHAVGAKVVYDAAHVYGLITGKAWHNPLEEGADIMTSSTHKTFPGPQGGAVFSNEEEIFKKVADTIFPWFVSNHHLHRLPATAVTALEMKYFGEDYAKQITKNAKAFAEALAAEGFKVIGEHLGYTQSHQVVLDVRNLGGGAKIAKLFEDANIITNKNLLPYDPPSAVKDPSGIRLGVQEMTRFGMKEEEMREIAKLMREVAIDGKDPNEVKKKVIEFRKNYLEVKYTFSVDLSKYSNGKMLPLLI

SEQ ID NO: 80413 - DNA, 1239 bp, Symbiobacterium thermophilum
  CDS (1)..(1239): transl_table=11
atggatgcactgaagcggtatgatcccgaggtcttcgcggccattcagcaggaggtcgagcggcagcagcgcaacattgagctgatcgcctcggagaacttcgtgcccaaggcggtcctcgaggcggcgggcacggtgctcaccaacaagtacgccgagggctatcccggccggcggtactacggcggctgcgagtacgtggacatcgtggagaacatcgcccgggagcggctgaaggcggccttcggcgcggagcacgtcaacgtccagccgcactcgggggccaacgccaacacggcggtctacttcgccttcctccagcccggcgatacggtgctgggcatgaacctggcccagggcggccacctgacccacggctcgccggtcaacttcagcggcaggacttacaacttcgtgccctacggcctggacccggagaccgagcggatcaacatggaccaggtggcggagctggcccggcagcaccggcccaagctcatcgtcgccggctactcggcctacccgcgggtcctggacttcaagcggttccgggagatcgccgaagaggtgggcgccatcctgatggtggacatggcccacttcgccggcctggcggccacgggctactacccgaacccggtggagcacgcgcacgtggtcaccaccaccacccacaagacgctgcgcgggccgcggggcggggcgatcctctgcaagaaggagttcgccaaggagatcgacaaggcggtcttcccgggcatgcagggcggccccctgatgcacatcatcgccgccaaggcggtggccttcaagcagctctccgacccggactacagggcatactgcggccaggtggtgaagaacgccaaggccctggcccaggcgctgctggagcggggctaccggctggtcaccggcggcaccgacaaccacctgatgctggtggacctgcggcccaagggcatcaccggccgggacgcggagcacctgctggacagggtctcgatcacggtcaacaagaacgccatccccaacgaccccgagaagccgatggtgaccagcggcatccgcatcggcaccccggccatgaccacccgggggatgaaggaggccgagatggtccagatcgccgacctcatcgaccgggccatcacccaccggaacgacgaggcggagctggaccggatccgggcggaggtgcacgagctcacggcccggttcccgctctacgccgactag

SEQ ID NO: 80414 - protein, 412 aa, Symbiobacterium thermophilum
MDALKRYDPEVFAAIQQEVERQQRNIELIASENFVPKAVLEAAGTVLTNKYAEGYPGRRYYGGCEYVDIVENIARERLKAAFGAEHVNVQPHSGANANTAVYFAFLQPGDTVLGMNLAQGGHLTHGSPVNFSGRTYNFVPYGLDPETERINMDQVAELARQHRPKLIVAGYSAYPRVLDFKRFREIAEEVGAILMVDMAHFAGLAATGYYPNPVEHAHVVTTTTHKTLRGPRGGAILCKKEFAKEIDKAVFPGMQGGPLMHIIAAKAVAFKQLSDPDYRAYCGQVVKNAKALAQALLERGYRLVTGGTDNHLMLVDLRPKGITGRDAEHLLDRVSITVNKNAIPNDPEKPMVTSGIRIGTPAMTTRGMKEAEMVQIADLIDRAITHRNDEAELDRIRAEVHELTARFPLYAD

SEQ ID NO: 80415 - DNA, 1254 bp, Syntrophus aciditrophicus
  CDS (1)..(1254): transl_table=11
atgtcagctttaatgaaaaccgatcctgaaatagccgaggccatccgtcttgaaacccggaggcaggcgggaaaactggaactcatcgcgtcggaaaactttgtcagcgaggctgttctcgaagcccagggatgcatcatgaccaacaagtacgcggaaggatatcccggaaaacgatactatggcggctgtgaatatgtcgacatcgcggaaaatctggcgatcgaacggtgcaaggcgctgttcggcgcggattacgtcaacgtccagcctcactcgggcacccaggccaacatggcggtttatttttccgccctttccgtgggggataccatcctggggatgaatctcgctcatggcgggcacttgtctcacggcagtccggccaacttctccggcaagttctacaatgtggtcccttacggcgtagaccgggaaacggaaacgatcgattacaaccaagtggaagacctcgccctgcagcacaaacccaggatgatcgtcgtcggcgccagcgcctatccccggaccatcgatttcgagaagttccgggccattgcggataaagtcggcgctctcgtcatggccgacatcgcacacatcgccggtctggtggcgacgggtctgcacccctctcctgtccccgtctgcgaatacgtcacctcgacgacccataaaaccctccgtggcccccgcgggggcttggtcatgtgccaggcgtcctaccagaaaacgctcagcagccgggtctttcccggtgttcagggcggtccactgatgcatatcatcgccgccaaagcggtggccttcaaggaagcccttacggatgaattcaaggattaccagagccagatcgtgaagaacgcccaggcgctggccaaagagctgatcggccggggatatcgcctcgtttccggggggacggacaaccatcttcttcttatggatttgaccgacaagggtctgacaggaaaggaagcgcaggaatcgctggattcggcgggaataactgtcaacaagaacggcatccccttcgacacccggggtcccatggtgaccagcggaatccggatcggcacgcccgccctgaccagccggggaatgaaggaagaagaaatgcggacgatagcccgcctgattgccgaggttctcgaacatcgggacaacgaaaaacatctgatggctgtcaaagaggaggtcggccggctctgtcaaaatttccccctttatgccgagcggatcgcgagcgcatga

SEQ ID NO: 80416 - protein, 417 aa, Syntrophus aciditrophicus
MSALMKTDPEIAEAIRLETRRQAGKLELIASENFVSEAVLEAQGCIMTNKYAEGYPGKRYYGGCEYVDIAENLAIERCKALFGADYVNVQPHSGTQANMAVYFSALSVGDTILGMNLAHGGHLSHGSPANFSGKFYNVVPYGVDRETETIDYNQVEDLALQHKPRMIVVGASAYPRTIDFEKFRAIADKVGALVMADIAHIAGLVATGLHPSPVPVCEYVTSTTHKTLRGPRGGLVMCQASYQKTLSSRVFPGVQGGPLMHIIAAKAVAFKEALTDEFKDYQSQIVKNAQALAKELIGRGYRLVSGGTDNHLLLMDLTDKGLTGKEAQESLDSAGITVNKNGIPFDTRGPMVTSGIRIGTPALTSRGMKEEEMRTIARLIAEVLEHRDNEKHLMAVKEEVGRLCQNFPLYAERIASA

SEQ ID NO: 80417 - DNA, 1278 bp, Synechococcus elongatus
  CDS (1)..(1278): transl_table=11
atgacccatattgattggcttgtgcaaacggatccgttggtcgctgaaatggtacagcgggaagtccagcggcagcagcaacacctcgaactgattgccagtgaaaactttacttcccctgcggtgatggccgctcaagggacagttctcaccaataaatacgccgagggattgccgggcaaacgctactacggtggctgcgagtttgtggatgaagtggagcaactggccatcgatcgcgccaaggaactctttggtgctgcccacgccaacgttcagcctcactccggtgcccaagccaattttgccgtctttttggccctcctcaatcccggggacacgattatggggatggatttgtcccacggtggccatctaacccacggttcccccgtcaacgtttccggtaaatggtttaacgtcgttcactatggtgttcatcctgaaacggaacgcctcgatatggatcaggtgcgggatttagcacggcagcaccgtcccaagctaattatctgtggctattccgcctatcctcgcgtcattccctttgctgagtttcgccaaattgccgatgaagtgggtgcctatctcatggctgatattgcccacattgccggtttagtcgccagtggttaccatcccaatcccgtccccctctgcgatgtcgtgacaaccaccacccataaaaccctgcgcggtcctcgcggcggcctgattctgacccgtgatgaagacttaggcaaaaagttggataaagcggtttttcccggtacccaaggggggccactggagcatgtgattgccgctaaggccgtggcctttggtgaggctctcaaaccagaattcaaagcctattgtgggcaagtgattcgcaacgcccaagccctcgctgcggggctgcaagcgcggcaactgcgccttgtttcaggaggcaccgataaccatttgatgctcattgacctgcgatcggtgaatctaacgggcaaagaggccgatcgccttatgggggaaatccatatcaccaccaataaaaacaccattccctttgaccccgcctccccttttgttaccagtggtctgcgtttgggaacgccagccttgacaacccgtggcttcacagaagtcgagtttgcagaagtagctgaaatcattagcgatcgcctgcatgccccagaggatgaagccatcaaaaatcgctgccgcgagcgggtggctgccctctgcgctcaatttcccctctatccccacttgcaattcccgcaaccagtgctagcctaa

SEQ ID NO: 80418 - protein, 425 aa, Synechococcus elongatus
MTHIDWLVQTDPLVAEMVQREVQRQQQHLELIASENFTSPAVMAAQGTVLTNKYAEGLPGKRYYGGCEFVDEVEQLAIDRAKELFGAAHANVQPHSGAQANFAVFLALLNPGDTIMGMDLSHGGHLTHGSPVNVSGKWFNVVHYGVHPETERLDMDQVRDLARQHRPKLIICGYSAYPRVIPFAEFRQIADEVGAYLMADIAHIAGLVASGYHPNPVPLCDVVTTTTHKTLRGPRGGLILTRDEDLGKKLDKAVFPGTQGGPLEHVIAAKAVAFGEALKPEFKAYCGQVIRNAQALAAGLQARQLRLVSGGTDNHLMLIDLRSVNLTGKEADRLMGEIHITTNKNTIPFDPASPFVTSGLRLGTPALTTRGFTEVEFAEVAEIISDRLHAPEDEAIKNRCRERVAALCAQFPLYPHLQFPQPVLA

SEQ ID NO: 80419 - DNA, 1290 bp, Synechococcus sp
  CDS (1)..(1290): transl_table=11
atgagcgacagcactgcttcttcgatcaacaaaggtcttgcggccgccgatcccgccattgcagccctaattgagaaggagcagcagcgtcaggaaacccacctggagctgatcgccagcgaaaatttcgcctcccgggccgtcatggacgcccagggttcagttctgacgaacaagtacgccgaggggctccccagcaagcggtattacggcggttgtgagcacgttgatgccatcgaagagctggcgatcgaacgggccaaggaactcttcggtgcggcctgggcgaatgtgcagccccacagtggtgcccaggccaatttcgctgtcttcctggcgctgcttcagccgggagacacgatcatgggattggacctttcccatggcggtcacctgacccatggctcgccggtaaatgtgagcggaaagtggttcaacgtggtccagtacggcgtcgatcgcgagacccagcggctggacatggaggccatccggcagctggctctggagcacaagccgaagctgatcgtctgtggcttttcggcctacccccgcaccattgatttcgccgccttccgcgccattgccgatgaagtgggtgcgttcctgctcgccgatatggctcatatcgctggtctggtggcggcaggcgtgcatcccagccccgttccccactgtgatgtggtcaccaccaccacccacaagaccctgcgcggtccccgtggtggtctgatcctctgccgtgatgccgacttcgccaagaaattcgacaaggctgtgttccccggcagtcagggcggacctttggaacacgtcatcgcggccaaggcggtggccttcggcgaggccctgcaaccagcgttcaagacctatagccagcacgtggtggcgaatgcagccgctctggcagagcgtttgatcgcccgcggcatcgacgtcgtcagcggtggcaccgacaaccacgtggtgttgcttgaccttcgctctgtcggcatgaccggcaaggtggctgatctcctcgtcagtgatgtccacatcacggccaataagaacacggtgccgtttgatcccgaatcccccttcgtcaccagcggcctgcgcctgggtaccgcagcacttaccacccggggctttgatgccggtgcgttccgcgaggtggctgatgtcatcgccgaccgcctcctgaaccctgaggatgacgctgttcagcagcagtgcctgcgtcgggttgaggcgctttgccaacgcttcccgctctatgccgctgcgcgtcagccagcgcttgcctga

SEQ ID NO: 80420 - protein, 429 aa, Synechococcus sp
MSDSTASSINKGLAAADPAIAALIEKEQQRQETHLELIASENFASRAVMDAQGSVLTNKYAEGLPSKRYYGGCEHVDAIEELAIERAKELFGAAWANVQPHSGAQANFAVFLALLQPGDTIMGLDLSHGGHLTHGSPVNVSGKWFNVVQYGVDRETQRLDMEAIRQLALEHKPKLIVCGFSAYPRTIDFAAFRAIADEVGAFLLADMAHIAGLVAAGVHPSPVPHCDVVTTTTHKTLRGPRGGLILCRDADFAKKFDKAVFPGSQGGPLEHVIAAKAVAFGEALQPAFKTYSQHVVANAAALAERLIARGIDVVSGGTDNHVVLLDLRSVGMTGKVADLLVSDVHITANKNTVPFDPESPFVTSGLRLGTAALTTRGFDAGAFREVADVIADRLLNPEDDAVQQQCLRRVEALCQRFPLYAAARQPALA

SEQ ID NO: 80421 - DNA, 1284 bp, Synechocystis sp
  CDS (1)..(1284): transl_table=11
gtgaatcaaaccaacctcgactttttagccaccagcgaccccgcccttgcggccatcattgaccgggaattacaacggcaacgcacccacattgaattgattgccagcgaaaatttcacttcagcagcagtaatggcggcccagggttccgtcttaaccaataagtatgccgaaggtctgccgggtaaacgctattacggcggctgtgaatttgtggaccaagcggaaacgctagccatcagtcgagtcaaagagttatttggggctgcccacgccaacgtccaaccccactccggggcccaggccaattttgccgtatttttaaccctgctccagcccggcgacaccattatgggcatggacctttcccacggcggccatttaacccacggttcccctgtcaacgtttctggtaaatggttcgaagtggcccactacggtgtggaaaaggaaacgggtcggttagattacgacaaaatccgccaacaggctctggaagttaaacccaaactgttgatttgtggctactctgcctatccccgacaaatcgagtttgataaattccgggcgatcgccgacgaagtgggagcatacctaatggcagacattgcccacattgccggtttagtggcttcaggacaccatcccagtcccttgccctattgcgatgtcgtcaccaccaccacccataaaaccctgcggggtccccggggtggtttgatcatgaccaataatgaggaattaggcaaaaaattcgacaaatccgtctttcctggcacccagggcggccctttggagcacgtcattaccgctaaagcagtggcctttggggaagcgctgaaaccagaatttaaggtttattctggccaggtaatcgccaacgcccaagccatggccgaccagttacaaaaacggggctttgacctggtatccggcggcaccgataaccatttaatgttggtagacctgcgctcaatcgccatgaccggcaaagtgggcgatcaactgttgggagaaatcaacatcaccgccaacaaaaacacggtgccctttgaccccgaatctccctttgtcaccagtggtttgcgcctgggctcccctgccatgaccaccaggggtatgcaggaagacgaattccgcaccattgccaacatcattgccgatcgcctgttgtccccggaagatgaaggcgtaaaagcggattgtctgcgccgggtcagtgaactttgtgctggtttccccctctatgatcatctccgcattcccgtagcggtgatcgcctga

SEQ ID NO: 80422 - protein, 427 aa, Synechocystis sp
MNQTNLDFLATSDPALAAIIDRELQRQRTHIELIASENFTSAAVMAAQGSVLTNKYAEGLPGKRYYGGCEFVDQAETLAISRVKELFGAAHANVQPHSGAQANFAVFLTLLQPGDTIMGMDLSHGGHLTHGSPVNVSGKWFEVAHYGVEKETGRLDYDKIRQQALEVKPKLLICGYSAYPRQIEFDKFRAIADEVGAYLMADIAHIAGLVASGHHPSPLPYCDVVTTTTHKTLRGPRGGLIMTNNEELGKKFDKSVFPGTQGGPLEHVITAKAVAFGEALKPEFKVYSGQVIANAQAMADQLQKRGFDLVSGGTDNHLMLVDLRSIAMTGKVGDQLLGEINITANKNTVPFDPESPFVTSGLRLGSPAMTTRGMQEDEFRTIANIIADRLLSPEDEGVKADCLRRVSELCAGFPLYDHLRIPVAVIA

SEQ ID NO: 80423 - DNA, 1311 bp, Thermoplasma acidophilum; identical to SEQ ID NO: 79709
  CDS (31)..(1311): transl_table=11

SEQ ID NO: 80424 - protein, 426 aa, Thermoplasma acidophilum
MSYEDAEYIREMAMKHSEMFGEGIALIASENVMSPLAKEVMISDLESRYAEGLPHHRYYQGNYYVDLIEDRTNELLSKLFRTSQTDPRPISGTNANSAAIYALAGPGDLVATPSLSGGGHISAAEFGILGMRSVRTINYPYDMDTMTIDPDQASKMIIKEKPKVCLFGQSVFMFPAPLKEMAEAFHEVGCKVWYDGAHVLGLIAGGRFQDPLREGADIVTGSTHKTFPGPQHGVILGNTDDETWKAVRRAVFPGVLSNHHLNAMAALGITAAEELEFGKRYADDIISNAKVLAEELYANGFNVLAEKRGFTESHTMAVDVSKNGGGKYVAETLEKCGIILNKNLLPWDDNKKSQNPSGIRIGVQEATRVGMGKSEMKEIASLITRAIIRHEDPEKIKAEVKQLKSGFREVKYCYGKMDGYSYIKLI

SEQ ID NO: 80425 - DNA, 1272 bp, Thermobifida fusca
  CDS (1)..(1272): transl_table=11
atgaccgcccagagcacttcgctcacccagtcgctggctcagctcgaccctgaggtcgcggcagccgtggacgccgagctcgcccgccagcgcgacaccttggagatgatcgcctccgaaaactttgcgccccgggcggtgctggaggcgcaaggcacggtgctgaccaacaagtacgcggaaggctacccgggccgccgctactacggcgggtgtgagcacgtggacgtcatcgaacagctggccatcgaccgtgccaaggccctgttcggtgccgagcacgccaacgtgcagccgcactcgggcgctcaggcgaacaccgccgtgtactttgcgctgctgcagccgggcgacaccatcctgggcctggacctcgcacacggcgggcacctcacccacggcatgcggatcaactactccggcaagatcctcaacgccgtggcctaccacgtacgcgagtccgacggcctgatcgactacgacgaggtcgaagcgctagccaaggagcaccagccgaaactgatcatcgcgggctggtcggcgtacccgcgccagttggactttgcccggttccgggagatcgccgaccagacaggcgccctcctcatggtggatatggcgcatttcgcgggtctggtcgcggctggactgcaccccaacccggtcccctacgccgacgtagtgaccaccaccacccacaagaccttgggcgggccgcgaggcgggctcatcctggccaaggaggagctgggcaagaagatcaactcggcggtgttcccggggatgcagggcggtccgctccagcacgtcatcgctgccaaggccgtagcgttgaaggtcgcggccagcgaagagttcgctgagcggcagcggcgcaccctttccggcgcgaagatcctcgccgagcggctcacccagcctgacgcggccgaggccggtattcgggtgctgaccggcggcaccgacgtccacctggtcctggtcgacctggtcaactcggaactcaacggcaaagaggcggaggaccggctgcacgagatcggtatcacggtcaaccgcaacgcggtccccaacgacccgcggccgcccatggtcacgtcgggactgcggatcggcaccccggctctcgccacccgcggtttcggcgacgccgacttcgctgaggtcgccgacatcatcgctgaggcgctcaagccgggcttcgacgcggcgaccctgcgctcccgcgtccaggcgctggccgccaagcacccgctctaccctggactgtga

SEQ ID NO: 80426 - protein, 423 aa, Thermobifida fusca
MTAQSTSLTQSLAQLDPEVAAAVDAELARQRDTLEMIASENFAPRAVLEAQGTVLTNKYAEGYPGRRYYGGCEHVDVIEQLAIDRAKALFGAEHANVQPHSGAQANTAVYFALLQPGDTILGLDLAHGGHLTHGMRINYSGKILNAVAYHVRESDGLIDYDEVEALAKEHQPKLIIAGWSAYPRQLDFARFREIADQTGALLMVDMAHFAGLVAAGLHPNPVPYADVVTTTTHKTLGGPRGGLILAKEELGKKINSAVFPGMQGGPLQHVIAAKAVALKVAASEEFAERQRRTLSGAKILAERLTQPDAAEAGIRVLTGGTDVHLVLVDLVNSELNGKEAEDRLHEIGITVNRNAVPNDPRPPMVTSGLRIGTPALATRGFGDADFAEVADIIAEALKPGFDAATLRSRVQALAAKHPLYPGL

SEQ ID NO: 80427 - DNA, 1284 bp, Thermotoga maritima
  CDS (1)..(1284): transl_table=11
gtgtggaagcatgtaaaacaggttgatcccgaaatatacgaagttcttgtgaacgagttgaagcgtcaggagtacggcctggagctgatcgcctctgagaacttcgcgtcactcgctgtcatagaaaccatgggaagcatgctcaccaacaagtatgcggaaggatacccgaagaagagatactacggtggctgcgagtgggtggatcgagcagaagaacgtgctatagagagagcgaagaggttgtttggagccaaatttgcgaacgttcagccgcactccggttctcaggcgaacatggcggtttatctggcactcgcccagcccggagacacgatcatgggaatgtccctgtcacacgggggacatctcacccatggagcaccggtgaatttctcagggaagatcttcaaggtggtaccttacggagtcaatctggaaacggaaacgatagattacgatgaggtcagaagactcgctctggaacacaagccgaagataatcgttgcgggtggaagtgcttacgccaggatcatcgatttcaaaagattcagagagatagccgatgaggtgggagcatatttgatggtggatatggctcactttgccggactcgtcgctgctggaattcatccaaatcccttggaatacgcccacgtggtgacttccaccacacacaagactctcaggggccccagaggtggtttgatactcacgaacgatccggagatcgccaaagccgtggataaaactatcttccccggtatccagggtggtcctctcatgcacgtcatagcggcgaaagctgtctgtttcaaagaagccatgacggaggagttcaaagagtaccagaagcaggtggtcaaaaatgctaaaaagatggctgaagagttccagaaacgaggttacaggatcgtttctggaggaactgatacacacctgttcctggtggatctcacaccaaaagacataacgggtaaagcggcggaaaaggccctggaaagctgtggtatcacagtgaacaaaaacaccattcccaacgaaaagagatctccgttcgtggcgagcggtatcagaataggaacacccgctgttacaacccgcggaatgaaggaagaagagatggaagagatcgccgagatgatagatctggttctttcgaacgtgatcgatgaaaacggaacggtgaaaccagaggtgagggaagaggtttcaaagaaggtaagggagctctgcgaaaggtttcctctgtaccgtgacaagatcgaaggggtggaaatatga

SEQ ID NO: 80428 - protein, 427 aa, Thermotoga maritima
MWKHVKQVDPEIYEVLVNELKRQEYGLELIASENFASLAVIETMGSMLTNKYAEGYPKKRYYGGCEWVDRAEERAIERAKRLFGAKFANVQPHSGSQANMAVYLALAQPGDTIMGMSLSHGGHLTHGAPVNFSGKIFKVVPYGVNLETETIDYDEVRRLALEHKPKIIVAGGSAYARIIDFKRFREIADEVGAYLMVDMAHFAGLVAAGIHPNPLEYAHVVTSTTHKTLRGPRGGLILTNDPEIAKAVDKTIFPGIQGGPLMHVIAAKAVCFKEAMTEEFKEYQKQVVKNAKKMAEEFQKRGYRIVSGGTDTHLFLVDLTPKDITGKAAEKALESCGITVNKNTIPNEKRSPFVASGIRIGTPAVTTRGMKEEEMEEIAEMIDLVLSNVIDENGTVKPEVREEVSKKVRELCERFPLYRDKIEGVEI

SEQ ID NO: 80429 - DNA, 1272 bp, Thermus thermophilus; identical to SEQ ID NO: 79811
  CDS (49)..(1272): transl_table=11

SEQ ID NO: 80430 - protein, 407 aa, Thermus thermophilus
MVSTLKRDEALFELIALEEKRQREGLELIASENFVSKQVREAVGSVLTNKYAEGYPGARYYGGCEAIDRVESLAIERAKALFGAAWANVQPHSGSQANMAVYMALMEPGDTLMGMDLAAGGHLTHGSRVNFSGKLYKVVSYGVRPDTELIDLEEVRRLALEHRPKVIVAGASAYPRFWDFKAFREIADEVGAYLVVDMAHFAGLVAAGLHPNPLPYAHVVTSTTHKTLRGPRGGLILSNDPELGKRIDKLIFPGIQGGPLEHVIAGKAVAFFEALQPEFKEYSRLVVENAKRLAEALARRGYRIVTGGTDNHLFLVDLRPKGLTGKEAEERLDAVGITVNKNAIPFDPKPPRVTSGIRIGTPAITTRGFTPEEMPLVAELIDRALLEGPSEALREEVRRLALAHPMP

SEQ ID NO: 80431 - DNA, 1242 bp, Thermoanaerobacter tengcongensis
  CDS (1)..(1242): transl_table=11
atggatattgaaataataagaaaaacagacccagaaatcgcagaagtcatattaaaagaactcaacagacagagaaacaaaatagagcttatagcctctgaaaactttgtgagcagggccgtaatggaagcaatgggtacccctctcacaaataaatacgcagaagggtatcccggaaggcgttattacggtggctgtgaatatgtagatatggcagaggaacttgcaagggaaaggcttaaaaagcttttcggagcggaacacgcaaatgtgcagcctcactcgggagctcaggcaaatatggcagcttattttgcacttctaaaacctggagatactgtactaggaatggatttagctcacggcggacatttaacccatggaagcaaagtcaatttttctgggcaaatatataactttgtatcctatggcgtaagagaagatacaggatacatagactatgaccaagtagaagacctagcaaaaaagcataaaccaaaactaattgtagctggcgctagtgcttatccaagaataattgactttaagaaatttagagaaattgcagacaaggtaggagcatatctgatggtagacatggctcacattgccgggcttgtcgcagcaggtttacacccaaatcctgttccttatgcagacgtagtgacaactactactcataagactttaagaggacctagaggaggagctatactctgtaaacaagaacacgcaaaagccatcgacaaagcccttttccctggaacacaaggtggacccttaatgcatattatagcagcaaaagctgtatgttttaaagaagccctttcagatgagtttaaagaatatcaaaaaaggattgtagaaaacgcaaaagctttagcaaatgcattaatggaaagaggaataaatttggtatccggcggtactgacaaccacttaatgctattagatttgcgaaacacaggaataacaggaaaggaattggaaactagattagatgaagtaaacataacttgcaataaaaacgctataccttttgatccattaggaccaaatgtaacctctggcgtaagattaggtacacctgcagttaccaccagaggaatgaaaccggaagacatggtagaaatagcagatataatagctaatatgataaaagatgaaaattacaaagaaaaagcgaaagaaagggtagcaaaactacttgaaaaataccctctctacccagacctcttataa

SEQ ID NO: 80432 - protein, 413 aa, Thermoanaerobacter tengcongensis
MDIEIIRKTDPEIAEVILKELNRQRNKIELIASENFVSRAVMEAMGTPLTNKYAEGYPGRRYYGGCEYVDMAEELARERLKKLFGAEHANVQPHSGAQANMAAYFALLKPGDTVLGMDLAHGGHLTHGSKVNFSGQIYNFVSYGVREDTGYIDYDQVEDLAKKHKPKLIVAGASAYPRIIDFKKFREIADKVGAYLMVDMAHIAGLVAAGLHPNPVPYADVVTTTTHKTLRGPRGGAILCKQEHAKAIDKALFPGTQGGPLMHIIAAKAVCFKEALSDEFKEYQKRIVENAKALANALMERGINLVSGGTDNHLMLLDLRNTGITGKELETRLDEVNITCNKNAIPFDPLGPNVTSGVRLGTPAVTTRGMKPEDMVEIADIIANMIKDENYKEKAKERVAKLLEKYPLYPDLL

SEQ ID NO: 80433 - DNA, 1281 bp, Thermoplasma volcanium
  CDS (1)..(1281): transl_table=11
atggcatatcaagacgcattaagtattagggagctggcccagcagcataatgccctgtttggggacagcgtggccctgatagcatctgagaatgttatgagcccgctggctagggaagtaatgataagtgatctggaatcaagatatgcagaggggcttcctcatcataggtattaccagggaaacaactttgtagatctgatagaggacaaaacgaatgaacttctttcaaaactctttaaaactgaacagactgacccaaggccaatatctggaacaaatgcgaactcagctgctatatatgcactggcaaagcctggagatcttgttgctgttcccgccttatctggtggtggccacataagtgcggcagaatttggcatactgggtatgcgcggcgttcgcacaataagctatccttatgataagaatactatgacagtagatcccgatgaagcctcaaagatcataaaaagggaaaagccaaaggtatgcctatttgggcaatctgtatttatgttccccgtaccactgaaggagatgaagggcgctttcgatgaagtaggttgtaaagtatggtatgatggcgctcatgttctaggcttgatagctggtagaaagttccaagatcctcttagggaaggggcagatattgttaccggcagcactcacaagacgtttccagggcctcagcacggtgtaatcttaggaaacaccgacagtgaaacatggaaatcggttagaagggccgtttttccaggagttctcagcaaccaccacctgaatgcaatggcagcgcttggcataacagctgctgaggaattagaattcggtgaaaaatacgcatctgatataattgacaatgcaaaggctcttgcgggtgaactttatagtctcggctttaaggtattagccgaagagaggggatttactgaatcacatactatggccgttgacgttacccaaaatggcggcggaaaatatgttgcggagacgcttgaagcctctggcattatacttaataagaacctgctcccatgggatgacaacaagaaatcgcagaatccaagtggtataagaataggcgtacaagaggtaacgcgtacaggcatgggcaagtctgagatgaaggagatagcttcgcttatttacagggccatagtaaaaaaagaggaaccgtcaaaaataaaggaagaggtaaaggatcttaaatcaagctttaggcatgtgaagtactgctatggggacgttgatgcgtacgaatatataaaattaatttaa

SEQ ID NO: 80434 - protein, 426 aa, Thermoplasma volcanium
MAYQDALSIRELAQQHNALFGDSVALIASENVMSPLAREVMISDLESRYAEGLPHHRYYQGNNFVDLIEDKTNELLSKLFKTEQTDPRPISGTNANSAAIYALAKPGDLVAVPALSGGGHISAAEFGILGMRGVRTISYPYDKNTMTVDPDEASKIIKREKPKVCLFGQSVFMFPVPLKEMKGAFDEVGCKVWYDGAHVLGLIAGRKFQDPLREGADIVTGSTHKTFPGPQHGVILGNTDSETWKSVRRAVFPGVLSNHHLNAMAALGITAAEELEFGEKYASDIIDNAKALAGELYSLGFKVLAEERGFTESHTMAVDVTQNGGGKYVAETLEASGIILNKNLLPWDDNKKSQNPSGIRIGVQEVTRTGMGKSEMKEIASLIYRAIVKKEEPSKIKEEVKDLKSSFRHVKYCYGDVDAYEYIKLI

SEQ ID NO: 80435 - DNA, 1245 bp, Thiobacillus denitrificans
  CDS (1)..(1245): transl_table=11
atgttcaaccgccaagacaccctcgccaaaaccgatcccgacctgtgggccgcgatccagcaggaagaccgccgccagcaggatcacatcgagctgatcgcgtcggagaactacacgagcccggcggtgatgcaggcgcagggctcgcagctcaccaacaagtacgccgagggctatcccggcaagcgctactacggcggctgcgaatacgtcgacatcgtcgaacagctcgcgatcgatcgcgtcaaggcgctgttcggcgccgaggcggcgaacgtacagccgaactcgggctcgcaggcgaaccaggccgtgttcatggccttcctgaagcccggcgacacgatcatgggcatgagcctcgccgagggcggccacctgacgcacggcatggcgctcaacatgagcggcaaatggttcaacgtcgtcgcctacggcctcaacgaaaaggaagagatcgactacgaagcgatggaacggctcgcgcgcgagcacaagccgaaactgatcatcgccggcgcctcggcctacgcgctcaggatcgacttcgagcgcttcgccaagatcgcgaaggaaatcggtgcgatcttcatggtcgacatggcgcactacgcgggcctgatcgccgccggcctctaccccaacccggtgccgcacgccgacgtcgtcacttcgaccacgcacaagacgctgcgcggcccgcgcggcggcatcatcctgatgaaggccgaacacgagaaggcgatcaacagcgcgatctttcccggcctgcagggcggcccgctcatgcacgtcatcgccggcaaggcgaccgcgttcaaggaagcggcgaccaaggacttcaagcgctaccaggaacaggtgatcgataacgcgctcgtgatgtgcaaggtactcgtcgagcgcggcctccggatcatctcgggccgcaccgagagccacgtgttcctcgtcgacctgcgcgcgaagaacctgaccggcaaggaagccgaggcgctcctgggccgcgcgcacatcaccgtcaacaagaacgcgatccccaacgatccgcagaagccctttgtcacgagcggcatccgcatcggcacgccggcgatgacgacgcgcggcttcaccgaactcgaagccgagcagctcgcccacctgatcgccgacgtccttgacgcgccgaacgacgaggccgtcgtcgagcgtgtgaagggtgaagtggcgaagctgacggcgaagtttccggtttacggctga

SEQ ID NO: 80436 - protein, 414 aa, Thiobacillus denitrificans
MFNRQDTLAKTDPDLWAAIQQEDRRQQDHIELIASENYTSPAVMQAQGSQLTNKYAEGYPGKRYYGGCEYVDIVEQLAIDRVKALFGAEAANVQPNSGSQANQAVFMAFLKPGDTIMGMSLAEGGHLTHGMALNMSGKWFNVVAYGLNEKEEIDYEAMERLAREHKPKLIIAGASAYALRIDFERFAKIAKEIGAIFMVDMAHYAGLIAAGLYPNPVPHADVVTSTTHKTLRGPRGGIILMKAEHEKAINSAIFPGLQGGPLMHVIAGKATAFKEAATKDFKRYQEQVIDNALVMCKVLVERGLRIISGRTESHVFLVDLRAKNLTGKEAEALLGRAHITVNKNAIPNDPQKPFVTSGIRIGTPAMTTRGFTELEAEQLAHLIADVLDAPNDEAVVERVKGEVAKLTAKFPVYG

SEQ ID NO: 80437 - DNA, 1725 bp, Treponema pallidum
  CDS (1)..(1725): transl_table=11
gtgaataattccgcactccgtgcgtacctgagtacgcgtgctcctgaccagatacatagtgcttttgttgcgtatttggccaatcttgatttagttgcgcaccagtttccgcagattgcttctgatattgtgcaggagctgatagatcagcggtcgtatgtaaagttaatcgcaagtgagaattacagctctcttgcggtgcaagcggcgatggctaacttgttgactgataaatacgcagaagggttcccccatcatcgctactatggcgggtgtcagaatgttgattctattgagtctgccgccgctgcagaagcatgcgcgctctttggtgctgagcacgcatatgtccagccgcactccggtgcagatgcgaatcttgttgcattctgggctatcctttcgcggcaaattgaaatgccaaccctttcttctcttggtgtcaccgccgctacgcatctgagtgaggaacagtgggaagtactgcgccagaaaatgggtaatcaaaaacttatggggttagattatttttcaggcggtcacctgacccacgggtaccgccaaaatgtttcaggacgaatgtttcgtgtggtgtcctacgcggtggaccgagacacaggactgctcgattacgctgcaatcgaggcacaggcaaagcgggaaagaccacttattttacttgccggatacagcgcgtatcctcgttccattaatttccgcatctttcgggaaattgcagacaaagtgggcgcagtactcatggctgatatggctcactttgctggactggttgcaggcggtgtttttacgggagacgaggatccagtgcgctggtctcatatcgtgaccagtaccacacacaaaacgttgcgcgggccacgcggtgcctttattttgtgtaaaaaagaatttgcagaggcggtggataagggctgtccgcttgtgctcggcggcccgctgccacatgtgatggcagcaaaggcggttgcgtttcgtgaagctcgaaatgctgcttttaaaacctatgcgcacgcagtccgtgataatgcgcgtgcgctggcagatgcctgcatacaacaggggatgcagctgcagacaggggggacggataaccatctgctattgcttgacgtgcgtccgtttggactgacaggtcgtcaggcagagcgcgcgctgatagactgcggagtgacgctcaaccgtaactcgctcccctttgacccaaacggcgcatggctcaccagcggactgcgcatcggaacccccgcggtaacgagccttggaatggggcctgaggaaatgaaaagaatagcgcgcctgatcgcgcgcgtgctcggcgctgcaacgcctgtgcggacaaagacaggtgcgctaagcaaatcggcggccgaggtgcccggcgaggttagaagctcagtctgctcggaagtgcgggagctgctcgcacgcttcacgttgtaccctgaactcgacgaacccttcttgcgcgcacactttacgcgtcgccctgcgggacaaaacacctgccgacgaagggacttgaacccttacggggttaccccaacagattttgagtctgtcgtgtctgccagtttcaccacgtcggcccgcgcgcagcctatcacacgaggaacaaaaggtacagctgttcatgtagtcttcttgcgtgaggccccgtgtctcccattgagggagccgttatttttctcccatgaggagttttag

SEQ ID NO: 80438 - protein, 574 aa, Treponema pallidum
MNNSALRAYLSTRAPDQIHSAFVAYLANLDLVAHQFPQIASDIVQELIDQRSYVKLIASENYSSLAVQAAMANLLTDKYAEGFPHHRYYGGCQNVDSIESAAAAEACALFGAEHAYVQPHSGADANLVAFWAILSRQIEMPTLSSLGVTAATHLSEEQWEVLRQKMGNQKLMGLDYFSGGHLTHGYRQNVSGRMFRVVSYAVDRDTGLLDYAAIEAQAKRERPLILLAGYSAYPRSINFRIFREIADKVGAVLMADMAHFAGLVAGGVFTGDEDPVRWSHIVTSTTHKTLRGPRGAFILCKKEFAEAVDKGCPLVLGGPLPHVMAAKAVAFREARNAAFKTYAHAVRDNARALADACIQQGMQLQTGGTDNHLLLLDVRPFGLTGRQAERALIDCGVTLNRNSLPFDPNGAWLTSGLRIGTPAVTSLGMGPEEMKRIARLIARVLGAATPVRTKTGALSKSAAEVPGEVRSSVCSEVRELLARFTLYPELDEPFLRAHFTRRPAGQNTCRRRDLNPYGVTPTDFESVVSASFTTSARAQPITRGTKGTAVHVVFLREAPCLPLREPLFFSHEEF

SEQ ID NO: 80439 - DNA, 1263 bp, Wigglesworthia glossinidia brevipalpis
  CDS (1)..(1263): transl_table=11
atgaatatatattacaagaatttcaaaaaatacgacacaaagatatacaacattattaaaaaagaaataataagacaagaagaacatattgagctaattgcttctgaaaattatgctagtaaatatgtaatgcaaatgcaaggttctttgttaacaaataaatatgcagaagggtatcctaaaaataggtattatagaggatgtaaatatattgatgaaatcgaagatttagctataaaaagagcaaagaaattatttaatgtagattacgtaaatgtacaaccccattctgggtctcaagctaattttgcagtttactctgctttattaaatccaggagatttggttttaggaatgaaattaaatcacggagggcatttaacccatggatctaaagctaatttttctggcaaaatgtataaatttatatcatatggagtaaatggagaaggaaaattagattataataaattattaaatttagcaaattattatcgtccaaaaatgattgttggtggattctcttcatattcaggttttattaattggaaaaaaatgagatttatttcagacaaagttggagcatatttatttgcagatatatcacatgtagcaggtttaatagttgcaggaatttatccaaatgctattccttatgcgcatgttgttactacaactactcataaaactttatctggaccaagaggtggattgatcctagccaaagaaggagatgatgaattctataaaaaattagattctgcagttttcccaggaacgcaaggaggtcctctaatgcatattattgctgctaaagcagttgcttttaaagaagctatgactttaaaatttaaaaaatatcaacatcaattagtaaaaaattctaaatcaatggtagaaatttttttgaaaagaaaatttcatgttgtttctggtggaactaaaaatcatttatttattttaaatttatctaatattggattaaaaggtgatttagcgtctgaaattttagaaaaagcaaatattactgtaaataaaaattccataccaaatgataaattaaatccaaaaataacttctggtataagaattggaactcctgctattactaaaaggggatttaaagaaatagaatccaaaaaagttgcagaatggatatgcgatatattagaaaatattaacgataagaaattaattaataatattaaaattaaagtaataaatttatgctataaatacccagtttataaatcatttaagtaa

SEQ ID NO: 80440 - protein, 420 aa, Wigglesworthia glossinidia brevipalpis
MNIYYKNFKKYDTKIYNIIKKEIIRQEEHIELIASENYASKYVMQMQGSLLTNKYAEGYPKNRYYRGCKYIDEIEDLAIKRAKKLFNVDYVNVQPHSGSQANFAVYSALLNPGDLVLGMKLNHGGHLTHGSKANFSGKMYKFISYGVNGEGKLDYNKLLNLANYYRPKMIVGGFSSYSGFINWKKMRFISDKVGAYLFADISHVAGLIVAGIYPNAIPYAHVVTTTTHKTLSGPRGGLILAKEGDDEFYKKLDSAVFPGTQGGPLMHIIAAKAVAFKEAMTLKFKKYQHQLVKNSKSMVEIFLKRKFHVVSGGTKNHLFILNLSNIGLKGDLASEILEKANITVNKNSIPNDKLNPKITSGIRIGTPAITKRGFKEIESKKVAEWICDILENINDKKLINNIKIKVINLCYKYPVYKSFK

SEQ ID NO: 80441 - DNA, 1278 bp, Wolbachia pipientis wMel
  CDS (1)..(1278): transl_table=11
atgatgagtgttttaaaaaaaatctgtggctctaaaaatagtttaaagtcttttgataacgaggtttatcagtctatagaaaaagaattacaacgccaaaaatcacaattgcaattaattgcatcagaaaattttgcaagcaaagcggtaatggaggcacaaggctcttttctgactaataaatacgcagaaggttatccaggtaaaagatattactgtggttgtgagcatgtggacaaaattgaaagtctggctatagaaagactttgtaagttgtttggtgttaaatttgcaaacgttcaacctcattctggttctcaggcaaaccaggcggtatttgcttcactgcttactccaggcgatacaatacttggattatcactgagttgcggtgggcatctaactcatggtgcggcaccaagcctttctggtaaatggtttaagtcaattcaatatacagtgaataaagacacttatctgctcaatatggatgagatagaaaagctggcgctggagcataaaccgaaattgatcatagctggtgcttctgcttatccaagaaaaatggacttcaaacgctttcgcgagattgcagataaagttggtgcttatttgcttgcagacattgctcactatgcagggcttattgcagcgggcgaatatccatcccctgctgaatatgcacatgttatgacttccacgactcacaaaactttgcgtggtcctcgtggtggaatagtgatgaccaatgatgaagcattacacaaaaaaattcaatccgcagtttttccaggattgcagggcgggccacttatgcatgtgatagctgcaaaagctgttgcatttaaagaagcattagcaccagagtttaagacttatagcaagaaagtcgtggaaaatgcgaaagtgctggctcaagaattgcaaaagcatggacttgacattataaccggtggcactgactctcatatagtgctagttgacttaagatcgcagaaattaactggaaaagacgttgtagatagccttgagagagccggtattacctgtaataaaaactctgtaccatttgatacagcaaagccgaccatcacttcagggctccgttttggcaccgctgctgagacaacacgcggacttgaggcagaaaattttaaagagatagctggtctaataaatgaagtaattcaaggattaatcagcggaaatagctcaagtgtcgaaaaagcagtaaaagctaaagttgaaaggatttgtagtaattttcctatttattaa

SEQ ID NO: 80442 - protein, 425 aa, Wolbachia pipientis wMel
MMSVLKKICGSKNSLKSFDNEVYQSIEKELQRQKSQLQLIASENFASKAVMEAQGSFLTNKYAEGYPGKRYYCGCEHVDKIESLAIERLCKLFGVKFANVQPHSGSQANQAVFASLLTPGDTILGLSLSCGGHLTHGAAPSLSGKWFKSIQYTVNKDTYLLNMDEIEKLALEHKPKLIIAGASAYPRKMDFKRFREIADKVGAYLLADIAHYAGLIAAGEYPSPAEYAHVMTSTTHKTLRGPRGGIVMTNDEALHKKIQSAVFPGLQGGPLMHVIAAKAVAFKEALAPEFKTYSKKVVENAKVLAQELQKHGLDIITGGTDSHIVLVDLRSQKLTGKDVVDSLERAGITCNKNSVPFDTAKPTITSGLRFGTAAETTRGLEAENFKEIAGLINEVIQGLISGNSSSVEKAVKAKVERICSNFPIY

SEQ ID NO: 80443 - DNA, 1251 bp, Wolinella succinogenes
  CDS (1)..(1251): transl_table=11
atgaattacgcactagaaaccaatgacaaagagatttttgacctcattcatgaagagcttgatcgacaaaacacccaccttgagatgattgccagcgaaaacttcacctttcctgcggtcatggaggcgatggggagcgtgctcactaataagtatgctgagggctatccctataagcgctattacggcggttgtgagtttgttgatagagtcgaagagattgcgattgagcgagccaagaagctctttggatgtggttttgccaatgttcagccccacgcggggagccaagccaatgtcgcagtctataatgctctacttaagccctacgacaaaattttgggaatggatctaagccatgggggacatctcacgcatggagccaaagtgagtgtgacgggtcagacctatcagagcttcttttatggggtggagctggatggctatatcaactatgacaaggttgaagagatcgctaaaatcgtgaaacctcagatgattgtctgcggatttagtgcctatgccagggagcttgatttcaaacgattccgagagattgccgatagcgtgggcgctctgctcttgggtgatgtggcgcatgtggcgggattgattgtggcgggtgagtatcccaatcccttcccccactgccatattgtcaccaccaccacccacaagacgcttcgaggacctaggggtgggatgattctcaccaacgacgaagagatcgccaagaagattgacaaggcggtattccctggaatgcaaggggggcctttgatgcatgtgattgcagccaaggcggtgggctttggagagaatcttaagcctgagtggaaagagtatgccaagcaggtcaaagccaatgccaaagtgctcgctaaagtgctcatggccagaggctacacgctcgtgagtggaggcacagataatcatttgattctagtctctctgctggacaaagagtttagcggcaaagatgccgacagggcactaggcgaggcaggaatcacggtcaacaaaaacaccgttcctggagagactcgaagtccttttgtgaccagcggagtgagaatcggaagcgccgcgcttaccgctaggggcatgagagagaaggagtttgagttcattgcaaccaaaattgccgatgttctagatgatgtcaataacgccgctaaacacgcggagatcaaaaaagagatcgctgagtttgccaagggattccctgtctacaccaaggctattttttaa

SEQ ID NO: 80444 - protein, 416 aa, Wolinella succinogenes
MNYALETNDKEIFDLIHEELDRQNTHLEMIASENFTFPAVMEAMGSVLTNKYAEGYPYKRYYGGCEFVDRVEEIAIERAKKLFGCGFANVQPHAGSQANVAVYNALLKPYDKILGMDLSHGGHLTHGAKVSVTGQTYQSFFYGVELDGYINYDKVEEIAKIVKPQMIVCGFSAYARELDFKRFREIADSVGALLLGDVAHVAGLIVAGEYPNPFPHCHIVTTTTHKTLRGPRGGMILTNDEEIAKKIDKAVFPGMQGGPLMHVIAAKAVGFGENLKPEWKEYAKQVKANAKVLAKVLMARGYTLVSGGTDNHLILVSLLDKEFSGKDADRALGEAGITVNKNTVPGETRSPFVTSGVRIGSAALTARGMREKEFEFIATKIADVLDDVNNAAKHAEIKKEIAEFAKGFPVYTKAIF

SEQ ID NO: 80445 - DNA, 1254 bp, Xanthomonas axonopodis pv
  CDS (1)..(1254): transl_table=11
atgttctcgcgcgatgtccgactggaaacctacgaccccgaactggccaaggccatcgctgctgaagccggccgccaggaggatcacgtcgagctgatcgccagcgaaaactactgcagcccgttggtgatggaagcgcagggcagccagctgaccaacaagtacgccgaaggctatccgggcaagcgctactacggcggctgcgagttcgtggatattgccgaacaactggcgatcgagcgcatcaagcaggtatttggcgccgattacgcgaacgtccagccgcacagcggttcgcaggccaatcaggcggtgtatctggcactgctgcagccgggcgacaccatcctggggatgagcctggcgcatggcggccacctgacccacggcgcgaaggtcaacgtctccggcaagctgttcaacgcggtgcagtacggcgtcaacgagcagggcctgatcgattacgacgaggtccagcgcctggcgaccgagcacaagccgaagatggtggtggccggtttctctgcgtattcgcagaagatcgactgggcccgcttccgcgccatcgccgacagcgtcggtgcctacctgttcgtggacatggcgcacatcgccggcctggtcgccgccggggtgtatcccagcccgatggaacatgcgcacgtggtcacctcgaccacgcacaagacactgcgtggcccgcgtggcggcatcatcgtcgccaagggcgccagcgaagagctgcagaaaaagctgcagtcgatcgtgttccccggcatccagggcggcccgctgatgcatgtcatcgcggccaaggcggtggcgttcaaggaggcgctggagccggcgttcaagacctatcagcaacaagtggtcaagaacgcccaggcgatggccaatacgctgatcgcgcgcggctacaagatcgtttccggcggcaccgagaaccatctgatgctggtggacatgatcggtcgcgacgtctccggcaaggatgccgaagccgcgcttggcaaggcgcacatcaccgtcaacaagaattcggtccccaacgacccgcgctcgccgttcgtcacctccggtctgcgcctgggcaccccggcgatcaccacgcgcggttaccaggaacaggacagcatcgatctggccaactggatcgccgacgtgctcgacgcgccaaccgacgaagccgtgctggcgaaggtgcgcgacgcggtgactgcgcagtgcaagcgctatccggtgtatggctga

SEQ ID NO: 80446 - protein, 417 aa, Xanthomonas axonopodis pv
MFSRDVRLETYDPELAKAIAAEAGRQEDHVELIASENYCSPLVMEAQGSQLTNKYAEGYPGKRYYGGCEFVDIAEQLAIERIKQVFGADYANVQPHSGSQANQAVYLALLQPGDTILGMSLAHGGHLTHGAKVNVSGKLFNAVQYGVNEQGLIDYDEVQRLATEHKPKMVVAGFSAYSQKIDWARFRAIADSVGAYLFVDMAHIAGLVAAGVYPSPMEHAHVVTSTTHKTLRGPRGGIIVAKGASEELQKKLQSIVFPGIQGGPLMHVIAAKAVAFKEALEPAFKTYQQQVVKNAQAMANTLIARGYKIVSGGTENHLMLVDMIGRDVSGKDAEAALGKAHITVNKNSVPNDPRSPFVTSGLRLGTPAITTRGYQEQDSIDLANWIADVLDAPTDEAVLAKVRDAVTAQCKRYPVYG

SEQ ID NO: 80447 - DNA, 1275 bp, Xylella fastidiosa; identical to SEQ ID NO: 79703
  CDS (22)..(1275): transl_table=11

SEQ ID NO: 80448 - protein, 417 aa, Xylella fastidiosa
MFPRDARLDMYDPELAKAIAAEVMRQEDHVELIASENYCSTLVMQVQGSQLTNKYAEGYSGKRYYGGCECVDIAEQLAIERAKQLFGADYANVQPHSGSQANQAVYFALLQPGDTILGMSLAHGGHLTHGANVNVSGKLFNAVQYGVNGQGLIDYEAVESLALEHRPKMVVAGFSAYSQKIDWARFRAIADQVGAYLLVDMAHVAGLVAACVYPNPLPHAHVVTSTTHKTLRGPRGGIIVAQAPQEALVKKLQSIVFPGIQGGPLMHVIAAKAVAFKEALEPAFKVYQQQVVKNAKAMAETLMLRGYKIVSGGTENHLMLVDMIGRDVSGKDAEGALGQAHITVNKNAVPDDPRSPFVTSGLRLGTPAVTTRGYQEQDCVDLAHWIADVLDAPADATVIAAVREKVAAQCRKYPVYR

SEQ ID NO: 80449 - DNA, 1254 bp, Yersinia pestis
  CDS (1)..(1254): transl_table=11
atgttaaagcgtgaaatgaacattgccgattacgatgcagatctgtggcgtgcaatggagcaagaagtcgtgcgtcaggaagaacacatcgaactgattgcgtctgagaactacaccagcccgcgtgttatgcaagcgcagggatctcagttaacgaacaaatatgctgaaggctatccaggcaagcgttattacggtggctgtgaatatgttgatgttgttgaacaattggcaatcgatcgcgctaaagcattatttggtgctgattacgcaaacgttcaacctcattctggttcgcaagctaacgttgctgtttactccgcgctgctgaaacccggtgacaccgtattggggatgaatctggcacacggcggtcacttgacgcatggttcaccagtgaacttctccggcaaactctacaacatcgtcccttatggtattgatgagtcgggtcaaattgattatgaagatctggcacgtcaggcagaaatacataaacccaaaatgattatcggtggcttctccgcctattctggtatcgttgattgggcaaaaatgcgtgaaattgccgacagcattgacgcatggttctttgttgatatggctcatgttgctggtctggttgctgcgggggtttatcctaacccggttccacatgcccacatcgttaccaccacgacgcacaagactctggctggcccacgtggcggtttgattctggcgaaagggggcgatgaagacttgtacaaaaaactgaactcttctgttttccctggtaaccagggtggcccattgatgcatgttatcgcaggtaaagcggtcgcgctgaaagaagcaatggaacctgagtttaaaatttaccaacagcaagtggctaaaaatgcgaaagccatggtggcggtgttcttggagcgcggttacaaagtggtttctggtggtacggataaccacctgttcttgctagatttggtggataaagacatcaccggtaaagacgctgatgcggctttaggccgtgcgaatatcaccgtgaacaaaaacagcgtacctaacgatccgaagagcccgtttgtgacatctggtgtgcgtattggtagcccagcgatcacccgccgtggcttcaaagaagcggaatcccgtgaattggctggctggatgtgtgatgtgttagataacatcaacgatgaagcgaccattgagcgtgtgaaacagaaagttctggctatctgcgctcgtttaccggtttacgcataa

SEQ ID NO: 80450 - protein, 417 aa, Yersinia pestis
MLKREMNIADYDADLWRAMEQEVVRQEEHIELIASENYTSPRVMQAQGSQLTNKYAEGYPGKRYYGGCEYVDVVEQLAIDRAKALFGADYANVQPHSGSQANVAVYSALLKPGDTVLGMNLAHGGHLTHGSPVNFSGKLYNIVPYGIDESGQIDYEDLARQAEIHKPKMIIGGFSAYSGIVDWAKMREIADSIDAWFFVDMAHVAGLVAAGVYPNPVPHAHIVTTTTHKTLAGPRGGLILAKGGDEDLYKKLNSSVFPGNQGGPLMHVIAGKAVALKEAMEPEFKIYQQQVAKNAKAMVAVFLERGYKVVSGGTDNHLFLLDLVDKDITGKDADAALGRANITVNKNSVPNDPKSPFVTSGVRIGSPAITRRGFKEAESRELAGWMCDVLDNINDEATIERVKQKVLAICARLPVYA

SEQ ID NO: 80451 - DNA, 1290 bp, Zymomonas mobilis
  CDS (1)..(1290): transl_table=11
atgactaaagaaacggcatctttctttaccgatcgcttggctgcggctgatccagatgtgttgacagcgatcaatcatgaattgaaccgccagcgcaagcagatcgagcttatcgcttctgaaaatattgtcagccgtgctgttctggaagcgcaaggctctgtctttaccaataaatatgctgaaggctatcccggcaagcgctattatcagggttgcgccccttccgatgagatcgaaacgctggctatcgaacgcgccaagaaattattcggcagcgaattcgtcaatgttcagccacattccggcgctcaggcaaatggtgccgttcttttagcggtcgcgaagcccggcgataccattatgggtctgtctttggatgccggtgggcatttgacccatggtgccaaggcggccatgtctggcaaatggttcaatgcagttcagtatgcggtgcatcctgaaacccagttgatcgattacgatcaggtgcgcgatctggctttgaaaaacaagccgcgcgttatcattgcgggtggctcagcctatccccgtcatatcgattttgccttcttccgtaaggttgccgatgaagtcggagctacctttatggttgacatggcgcattttgcaggtctggttgctggcggtgttcatccttcacctgtgccacatgcgcatatcacgaccacgacaacgcataagaccttgcggggcccgcgcggtggtatgatcttgaccgatgatccggctttggcaaagaaaatcaattcggctgtcttccctggcatgcagggtggccccttgatgcatgtcatcgcggcaaaagcagttgctttcggtgaggccttgcagccttctttcaaagaatatgcaaaagctgttgtcgaaaatgctcaagccttggcagctcgcttgaaagaacgcggtagcgatctcgtaacgggtggcacggatacgcatctggctttggttgatcttcggcctttgggtgtgactggccgtgatgctgattgtgctttggaacgcgccggtatcacctgcaacaaaaatggtattcctttcgatccgttaccgccagttaaaacctccggtatccgtctgggatcgcctgcggcgacgacccgcggtttccgtaaagcggaattccttcaggtcgctgatatgattgctgatgttcttgatgcgttgagcagcaagggcgaacaaggtgatccggcggttgaaaccgctgttcgtcagcgtgtcgaagcgctctgtgatcgcttcccactttatccggaattgtaa

SEQ ID NO: 80452 - protein, 429 aa, Zymomonas mobilis
MTKETASFFTDRLAAADPDVLTAINHELNRQRKQIELIASENIVSRAVLEAQGSVFTNKYAEGYPGKRYYQGCAPSDEIETLAIERAKKLFGSEFVNVQPHSGAQANGAVLLAVAKPGDTIMGLSLDAGGHLTHGAKAAMSGKWFNAVQYAVHPETQLIDYDQVRDLALKNKPRVIIAGGSAYPRHIDFAFFRKVADEVGATFMVDMAHFAGLVAGGVHPSPVPHAHITTTTTHKTLRGPRGGMILTDDPALAKKINSAVFPGMQGGPLMHVIAAKAVAFGEALQPSFKEYAKAVVENAQALAARLKERGSDLVTGGTDTHLALVDLRPLGVTGRDADCALERAGITCNKNGIPFDPLPPVKTSGIRLGSPAATTRGFRKAEFLQVADMIADVLDALSSKGEQGDPAVETAVRQRVEALCDRFPLYPEL

SEQ ID NO: 80453 - DNA, 1413 bp, Candida albicans
  CDS (1)..(1413): transl_table=12
atgtctgcttacgctttatctcaatctcatagacaattgactgaaggtcatttaaaagatactgatcctgaagttgatcaaatcattaaagatgaaattgatagacaacaacattccattgttttaattgcttcagaaaatttcactactactgctgttttcgatgccttgggaactccaatgtgtaataaatactctgaaggttatcctggtgctagatattatggtggtaatgaacatattcatagaatggaacttttgtgtcaagaaagagctttaaaagcttttggtttaactccagataaatggggggttaatgttcaaactttgagtggatctccagctaatttacaagtttatcaagccattatgaaacctcatgaaagattaatggggttggatttaccccatggtggtcatttatctcatggttatcaaaccgattcaagaaaaatttctgctgtttccacttattttgaaaccatgccttacagagttgatttagaaactggattgattgattatgatatgttggaaaaaactgctgttttgtatagaccaaaagttttagttgctggtacttctgcttattgtagattaattgattacaaaagaatgagagagattgctgataaagttggtgcttaccttgttgttgatatggctcatatttccggtttaattgctgctggtgttatcccatcaccatttgaatacgctgatattgtcaccaccactactcataaatcattaagaggtccaagaggtgccatgattttctttagaagaggggtaagatcagttaatccaaagactggtcaagaaatcttgtatgatttagaaaacccaattaacttctcagtgttcccaggtcatcaaggtggtccacataatcatactattgctgccttggctactgctttgaaacaagctaatactccagaatttaaagaatatcaagaacaagttttgaaaaatgctaaagctttagaaagtgaattcaccaaaaaaggttataaattagtttctgatggtactgattctcatatggttttggtgtctttaaaagataaacaaattgatggtgctagagttgaaactgtttgtgaaaaaatcaatattgctttgaataagaattccattcctggagataaatccgctttagttccaggtggggttagaattggtgccccagctatgactacaagaggtttaggtgaagaagatttcaagaaaatcgttagttatattgattttgctgtcaattatgctaaggaagttcaatcacaattaccaaaagatgctaataaattgaaagatttcaaaaatgctgtttctggtgatctggaaaaacttaaagctgttagagatgaaatttatcaatgggctggttctttcccattagcagtataa

SEQ ID NO: 80454 - protein, 470 aa, Candida albicans
MSAYALSQSHRQLTEGHLKDTDPEVDQIIKDEIDRQQHSIVLIASENFTTTAVFDALGTPMCNKYSEGYPGARYYGGNEHIHRMELLCQERALKAFGLTPDKWGVNVQTLSGSPANLQVYQAIMKPHERLMGLDLPHGGHLSHGYQTDSRKISAVSTYFETMPYRVDLETGLIDYDMLEKTAVLYRPKVLVAGTSAYCRLIDYKRMREIADKVGAYLVVDMAHISGLIAAGVIPSPFEYADIVTTTTHKSLRGPRGAMIFFRRGVRSVNPKTGQEILYDLENPINFSVFPGHQGGPHNHTIAALATALKQANTPEFKEYQEQVLKNAKALESEFTKKGYKLVSDGTDSHMVLVSLKDKQIDGARVETVCEKINIALNKNSIPGDKSALVPGGVRIGAPAMTTRGLGEEDFKKIVSYIDFAVNYAKEVQSQLPKDANKLKDFKNAVSGDSEKLKAVRDEIYQWAGSFPLAV

SEQ ID NO: 80455 - DNA, 1383 bp, Encephalitozoon cuniculi
  CDS (1)..(1383)
atgacagatgcaagagaaaagggcttctggacaggcccgctggagatggcagaccccgagctccatgccctgatctgcggagaggtcgagaggcagaagaagacaataaacctgatagcaagcgagaactatgcgcatcagagcgcgatggaggcctgtgggtctgtcctcaccaacaagtattcagaaggcagggtgggagagcgatactacggggggacgcactgggtcgacaggatcgagctcctctgccagaagagggctctcgagctcttcgggctggatcctgacgtctggggcgtcaatgtccagccatactcggggagcccagccaactttgcaatctacacggccgttgtccctccgggcgggaggatcatgggccttgacctgccgtctggaggacacctgacccatggatacaagacgaagaccaggaagatatctgcctcaagcgtctacttcgactcaaggccatacacagtggggagcaacggcctcatcgactacgagggcctcgagaagaccttcacggactttctgccgcacatcctgatctgcggatacagcgcatactccagagacatcgactacaagaggctgcagtcgatagccggcaggaacggtgcctttctgtttgcagacatctcgcacatctcgccgctggttgcgtctgggctgatgaacagcccgttcgagcactgcgacattgtcatgacgacaacgcagaaggggctccggggacctcgaggggcgctcatcttctacaggagggccgtgacaaagaatggggagactgtggatctggatgcccggatcaactttgccgtgtttccgatgctgcagggaggcccccacaaccacacgattgcagggattgcctctgcacttctccatgcaggaactcccgagtttgcggagtacacaaggcgcgtggtggagaactcgagggagctgtgcagccgcttgcagtctctgggccttgacatcctgacggggggaacggacaaccacatgctccttgtggatctccggagcacgggtgtcgacggggcggctgtggagcacatgtgcgatgccctgggcatcagcctgaacagaaacgccattgtcggaaactccagcccgctgagcccgtctggaatacgtgtgggcacatatgcagtcactgccaggggatttggccccgaggagatgagggaggttggagacataatcggcggggtagtcaagctctgcagggagatgacgggcggcaggaagatgtcgaaggccgatctccacagagtgacgtccgatgcccgggtcatgggcagcgagcaggttttagtgctgagaagaagagtgtgtgccctggcagaggcatatcccatctacgaatga

SEQ ID NO: 80456 - protein, 460 aa, Encephalitozoon cuniculi
MTDAREKGFWTGPLEMADPELHALICGEVERQKKTINLIASENYAHQSAMEACGSVLTNKYSEGRVGERYYGGTHWVDRIELLCQKRALELFGLDPDVWGVNVQPYSGSPANFAIYTAVVPPGGRIMGLDLPSGGHLTHGYKTKTRKISASSVYFDSRPYTVGSNGLIDYEGLEKTFTDFLPHILICGYSAYSRDIDYKRLQSIAGRNGAFLFADISHISPLVASGLMNSPFEHCDIVMTTTQKGLRGPRGALIFYRRAVTKNGETVDLDARINFAVFPMLQGGPHNHTIAGIASALLHAGTPEFAEYTRRVVENSRELCSRLQSLGLDILTGGTDNHMLLVDLRSTGVDGAAVEHMCDALGISLNRNAIVGNSSPLSPSGIRVGTYAVTARGFGPEEMREVGDIIGGVVKLCREMTGGRKMSKADLHRVTSDARVMGSEQVLVLRRRVCALAEAYPIYE

SEQ ID NO: 80457 - DNA, 1443 bp, Neurospora crassa
  CDS (1)..(1443)
atgtctacctactccctctccgagactcacaaggccatgctcgagcatagcttggtcgagtccgacccccaggtcgccgagatcatgaagaaggaggttcagcgccagcgcgagtccatcatcctcatcgcctccgagaacgtcacctcgcgtgccgtcttcgatgccctcggctcccccatgtccaacaagtactcggagggtcttcccggcgcccgctactatggtggcaaccagcacatcgacgagatcgaggttctctgccagaaccgtgcccttgaggccttccacctcgaccccaagcagtggggtgtcaatgttcagtgcttgtccggcagccctgccaacctccaggtctaccaggccatcatgcccgtccacggcagactcatgggtcttgacctcccccacggtggccatctttcccacggttaccagaccccccagcgcaagatctctgctgtctctacctacttcgagaccatgccctaccgcgtcaacattgacactggtctcatcgactacgataccctcgagaagaacgcccagctcttccgccccaaggtcctcgtcgccggtacctctgcctactgccgtctgattgactacgagcgcatgcgcaagattgccgactccgttggcgcttaccttgtcgtcgatatggctcacatttccggcctcattgcctccgaggttatcccctcgcccttcctctacgccgatgtcgtcaccaccaccactcacaagtctctccgtggccctcgtggcgccatgatcttcttccgccgcggtgtccgctccgttgacgccaagaccggcaaggagaccctctacgaccttgaggacaagatcaacttctccgtcttccctggtcaccagggtggcccccacaaccacaccatcaccgcccttgccgttgccctcaagcaggctgcctcccccgagttcaaggagtaccagcagaaggtcgttgccaacgccaaggctctcgagaagaagctcaaggagctcggctacaagctcgtctctgacggcactgactctcacatggtcctcgttgaccttcgccccatcggcgtcgatggtgcccgtgttgagttcctccttgagcagatcaacattacctgcaacaagaacgccgttcccggcgacaagagcgccctcacccccggcggtctccgtattggtacccccgctatgacctcccgtggcttcggcgaggccgacttcgagaaggtcgccgtcttcgtcgatgaggctgtcaagctctgcaaggagatccaggcttccctccccaaggaggctaacaagcagaaggacttcaaggccaagatcgccaccagcgatattccccgcatcaacgagctcaagcaggagattgccgcctggagcaacaccttccccctccccgttgagggctggagatacgatgccggtctctaa

SEQ ID NO: 80458 - protein, 480 aa, Neurospora crassa
MSTYSLSETHKAMLEHSLVESDPQVAEIMKKEVQRQRESIILIASENVTSRAVFDALGSPMSNKYSEGLPGARYYGGNQHIDEIEVLCQNRALEAFHLDPKQWGVNVQCLSGSPANLQVYQAIMPVHGRLMGLDLPHGGHLSHGYQTPQRKISAVSTYFETMPYRVNIDTGLIDYDTLEKNAQLFRPKVLVAGTSAYCRLIDYERMRKIADSVGAYLVVDMAHISGLIASEVIPSPFLYADVVTTTTHKSLRGPRGAMIFFRRGVRSVDAKTGKETLYDLEDKINFSVFPGHQGGPHNHTITALAVALKQAASPEFKEYQQKVVANAKALEKKLKELGYKLVSDGTDSHMVLVDLRPIGVDGARVEFLLEQINITCNKNAVPGDKSALTPGGLRIGTPAMTSRGFGEADFEKVAVFVDEAVKLCKEIQASLPKEANKQKDFKAKIATSDIPRINELKQEIAAWSNTFPLPVEGWRYDAGL

SEQ ID NO: 80459 - DNA, 1419 bp, Schizosaccharomyces pombe
  CDS (1)..(1419)
atgaagtgttctaataaagttctaacgataattaagttactcaaagcaccattggcagaatgtgatccgacagtgtataagattttggaatctgagaaaagccgtcagaaagagtcgatagctttaattgctagcgaaaactttacttcaagagctgtgatggatgcactcggaagtattatgcaaaacaaatatagtgaaggctatcctggtgcaagatattatggtggtaatgaatttatagatcaagctgaaagactatgtcaaacgagagctttagaagcttttcatttggatggggaaaaatggggagtaaatgtacaaccccattctgggtctccggccaacttacaggcttatcaagcagtaatgaagccacacgatcgcctaatgggtttagatttaccccatggcggtcatttatctcatggtttctctactccccagaaagctatttcagctgtctcgacttatttttccaccatgccatataacgtaaataaggaaactggtattattgactatgatagtttggaaaaggctgcgatacaatttcgtcctaaagttatagttgcaggcgctagtgcttatgcacgactcgttgattacaagcgtatgcgtaaaattacggaaatgtgcaatgcctatttgctttgtgatatggctcacatatccggtttagtagctgccggtgtaattccttctccgtttgaatacgccgatattgttactacgacgactcataagtctttacgtggaccgagaggagctatgatattttatcgaaaaggtactcgttctcacgataaacgtggtaatccaattttatatgaattagaggataaaatcaatttctcagtttttcctggacatcaaggcggcccccataatcatacaattactgcgttagctgtcgcccttggacaagcaaaaactcctgaattctatcaataccaaaaggacgttctaagtaacgccaaggcaatggccaatgcatttattactcgtggctataagttagtttcaggtggcacggatactcacttggttcttgttgatttgaccgacaaaggtgtagatggtgcccgtgtcgaacgtattttagagcttgtaaatatttctgccaacaagaatactgtgcccggagataagtctgctttaattccacgtggattacgtctgggaactccagcttgcactactcgcggttttgatgagaaggattttgagagagtggtagagctaattgatgaagttgtatctttgaccaagaaaataaatgaagctgctttgaaggaaggaaaatcgaagtttagagacttcaaagcatatgtgggtgatggttctaaattctctgaaatcgccaaactgaagaaagaagttataacttgggctggaaaatttgatttccccgtttaa

SEQ ID NO: 80460 - protein, 472 aa, Schizosaccharomyces pombe
MKCSNKVLTIIKLLKAPLAECDPTVYKILESEKSRQKESIALIASENFTSRAVMDALGSIMQNKYSEGYPGARYYGGNEFIDQAERLCQTRALEAFHLDGEKWGVNVQPHSGSPANLQAYQAVMKPHDRLMGLDLPHGGHLSHGFSTPQKAISAVSTYFSTMPYNVNKETGIIDYDSLEKAAIQFRPKVIVAGASAYARLVDYKRMRKITEMCNAYLLCDMAHISGLVAAGVIPSPFEYADIVTTTTHKSLRGPRGAMIFYRKGTRSHDKRGNPILYELEDKINFSVFPGHQGGPHNHTITALAVALGQAKTPEFYQYQKDVLSNAKAMANAFITRGYKLVSGGTDTHLVLVDLTDKGVDGARVERILELVNISANKNTVPGDKSALIPRGLRLGTPACTTRGFDEKDFERVVELIDEVVSLTKKINEAALKEGKSKFRDFKAYVGDGSKFSEIAKLKKEVITWAGKFDFPV

SEQ ID NO: 80461 - DNA, 1410 bp, Saccharomyces cerevisiae
  CDS (1)..(1410)
atgccttacactctatccgacgctcatcataagttgatcacctctcatttggtggacaccgaccctgaagtggactccattatcaaggatgaaattgaaagacaaaagcactccatcgatttgattgcttctgaaaatttcacctcaacctccgttttcgatgcccttggaactccattgtccaacaaatactctgaaggttatccaggtgctcgttactacggtggtaatgaacacattgacagaatggaaattctatgtcaacaaagagctttgaaagctttccatgttactccagacaaatggggtgttaacgtccaaactttatctggttctcctgctaacttgcaggtttatcaagctattatgaagcctcatgaaagattgatgggtctatacctaccagatggtggtcatttgtctcacggttacgctactgaaaacagaaaaatttctgctgtttccacatacttcgaatctttcccatacagagttaacccagaaaccggtattatcgactacgatactttagaaaagaacgccatcctatatagaccaaaggttcttgttgctggtacttcagcatactgtcgtttaattgactacaagagaatgagagaaatcgccgacaaatgtggtgcttacttgatggtagacatggcccacatttctggtttgatcgccgcaggtgtcatcccatctcctttcgaatacgctgatatcgttaccaccaccactcacaagtctttgagaggtccacgtggtgctatgattttcttcagaagaggtgtgagatctatcaaccctaagaccggtaaggaagttctatacgacttggaaaacccaattaacttctctgttttcccaggtcaccaaggtggtccacacaaccataccattgctgctttggccactgctttgaagcaagctgccactccagaattcaaggaataccaaactcaagtcttgaagaatgctaaggctttggaaagtgaatttaagaacttgggctacagattagtttccaacggtaccgattctcacatggttctagtatccttgagagaaaagggtgttgatggtgctcgtgttgaatacatttgtgaaaagattaacattgctttgaacaaaaactctattccaggtgacaaatctgctttggttccaggtggtgtccgtattggggctccagccatgaccactagaggaatgggtgaagaagatttccacagaattgttcaatacattaacaaggctgtagaattcgctcaacaagttcaacaaagcttgccaaaggatgcttgtagattaaaggacttcaaagccaaggtcgacgaaggctctgatgttttgaacacctggaaaaaggaaatttacgactgggctggcgaatacccattggctgtgtaa

SEQ ID NO: 80462 - protein, 469 aa, Saccharomyces cerevisiae
MPYTLSDAHHKLITSHLVDTDPEVDSIIKDEIERQKHSIDLIASENFTSTSVFDALGTPLSNKYSEGYPGARYYGGNEHIDRMEILCQQRALKAFHVTPDKWGVNVQTLSGSPANLQVYQAIMKPHERLMGLYLPDGGHLSHGYATENRKISAVSTYFESFPYRVNPETGIIDYDTLEKNAILYRPKVLVAGTSAYCRLIDYKRMREIADKCGAYLMVDMAHISGLIAAGVIPSPFEYADIVTTTTHKSLRGPRGAMIFFRRGVRSINPKTGKEVLYDLENPINFSVFPGHQGGPHNHTIAALATALKQAATPEFKEYQTQVLKNAKALESEFKNLGYRLVSNGTDSHMVLVSLREKGVDGARVEYICEKINIALNKNSIPGDKSALVPGGVRIGAPAMTTRGMGEEDFHRIVQYINKAVEFAQQVQQSLPKDACRLKDFKAKVDEGSDVLNTWKKEIYDWAGEYPLAV

SEQ ID NO: 80463 - DNA, 1404 bp, Schizosaccharomyces pombe
  CDS (1)..(1404)
atgtcttccaacgacagtattatgttgactcctcttaaggaacaggatcccactgttgccgaaattatgagacacgaagctgatcgtcaacgttcttctgttgttcttatcgcctctgagaacttcacctctcgtgctgttatggatgctcttggaagtgtcatgagcaacaagtattcagagggttatcctggtgctcgttactatggtggtaacaagtttatcgatcaaattgaaactctttgccaagagcgtgcacttgctgccttcaatcttgatcctgctaaatggggtgtcaacgttcaatgtctttccggttcccccgctaacatgcaagtttatcaagccattatgcctcctcacggtcgtttaatgggtcttgacttgccttcaggtggccatctttctcacggttatcaaactgataccaagaagattagtgctgtttctacttactttgagtctatgccctaccgtgttgatcctaacaccggtttgattgactatgacatgttggagcacgacgctcagttattccgtcccaagatccttgttgctggtacttctgcttattgccgtctcattgactacgctcgtatgcgacaaattgctgacagcgttaacgcatacttggtcgttgacatggctcatatttctggtcttgtctcagctggtgttatcccttccccctttgaatatgctgatgttgttactaccaccactcacaagtctctacgtggacctcgtggtgctatgatcttcttccgtcgtggtcttcgtaagcatgacaagaagggtaaccccatttactatgacttggaggataagatcaacttctccgttttccctggccatcaaggtggtccccacaaccacaccatcactgctttggctgttgcattgaagcaatgccaagagcccgcttacaaggagtatcaagctcaagttgttaaaaatgctaaggtctgcgaagaggaattcaaaaagcgtggttacaaacttgctgctgacggtactgacagtcacatggttttggttgatgtcaagagcaagggtgttgacggtgctcgtgctgagcgcgtgttggaattgatcaacattgttaccaacaagaatactgtaccttctgacaaatctgctttctctccctctggtattcgtgtcggaacccctgccatgactactcgtggattcaaggaacaagactttgttcgtgttgttgactacattgaccgtgctcttacttttgccgccaacttacaaaaggagcttcccaaggacgccaacaagctcaaagacttcaaggctaaacttggtgaaggtgaacaataccccgagcttgttcaacttcaaaaagaagtcgctgagtgggcttctagcttccctcttgctgataagtggtaa

SEQ ID NO: 80464 - protein, 467 aa, Schizosaccharomyces pombe
MSSNDSIMLTPLKEQDPTVAEIMRHEADRQRSSVVLIASENFTSRAVMDALGSVMSNKYSEGYPGARYYGGNKFIDQIETLCQERALAAFNLDPAKWGVNVQCLSGSPANMQVYQAIMPPHGRLMGLDLPSGGHLSHGYQTDTKKISAVSTYFESMPYRVDPNTGLIDYDMLEHDAQLFRPKILVAGTSAYCRLIDYARMRQIADSVNAYLVVDMAHISGLVSAGVIPSPFEYADVVTTTTHKSLRGPRGAMIFFRRGLRKHDKKGNPIYYDLEDKINFSVFPGHQGGPHNHTITALAVALKQCQEPAYKEYQAQVVKNAKVCEEEFKKRGYKLAADGTDSHMVLVDVKSKGVDGARAERVLELINIVTNKNTVPSDKSAFSPSGIRVGTPAMTTRGFKEQDFVRVVDYIDRALTFAANLQKELPKDANKLKDFKAKLGEGEQYPELVQLQKEVAEWASSFPLADKW

SEQ ID NO: 80465 - DNA, 1554 bp, Arabidopsis thaliana
  CDS (1)..(1554)
atggcgatggccatggctcttcgaaggctttcttcttcaattgacaaacccattcgtcctcttattcgatccacttcatgttacatgtcttctttgcccagtgaagctgttgatgagaaggaaagatctcgtgtcacttggccaaaacagcttaacgcacctttagaggaggttgatcctgagattgctgacattattgagcatgagaaagctagacaatggaagggacttgaacttattccatctgagaacttcacatctgtgtcggtgatgcaagctgttgggtctgtcatgactaacaaatacagtgaaggctatcctggtgccagatactatggaggaaatgagtatatagacatggcagaaaccttatgccagaagcgcgctcttgaagctttccggttagatcctgaaaagtggggagtgaatgttcaacctttgtctggatctcctgccaacttccatgtgtacactgcattgttaaagcctcatgaaagaatcatggcacttgatcttcctcatggtggtcatctttctcatggttatcagactgacaccaagaagatatcagctgtgtctatcttctttgaaacaatgccctatagattggacgagagcactggctacatcgactacgatcagatggagaaaagtgctactcttttcaggccaaaattgattgttgctggtgcaagtgcttatgctagattgtatgactatgcccgcatcagaaaggtctgtaacaagcaaaaagctgtaatgctagcagatatggcacacatcagtggtttggttgctgctaatgtaatcccttcaccgttcgactatgctgatgttgtaaccaccacaactcacaagtcacttcgtggaccccgtggagccatgattttcttcagaaagggtgttaaggaaattaacaagcaagggaaagaggttttgtatgattttgaagacaagatcaaccaagctgtcttccctggtcttcaaggtggtccacacaaccacactatcacaggactagctgttgctttgaaacaggcaactacttcagagtacaaagcataccaagaacaagtcctgagtaacagtgcaaagtttgctcagactctaatggagagaggatatgaacttgtttctggtggaactgacaaccatctggttctagtgaatctaaagcccaagggaattgatggatctagagttgagaaagtgttggaagctgttcacattgcatccaacaaaaacactgttcctggagatgtttctgccatggttcctggtggaatcagaatgggtactcctgctctcacttccagaggctttgttgaggaagactttgccaaagtagctgaatacttcgacaaagctgtgacaatagctctcaaagtcaaatctgaagctcaaggaaccaagttgaaggatttcgtgtcagcaatggaatcctcttcaaccatccaatccgagattgcgaaactgcgccatgaagtcgaggaattcgctaagcagttcccaacaattgggtttgagaaagaaaccatgaagtacaagaactaa

SEQ ID NO: 80466 - protein, 517 aa, Arabidopsis thaliana
MAMAMALRRLSSSIDKPIRPLIRSTSCYMSSLPSEAVDEKERSRVTWPKQLNAPLEEVDPEIADIIEHEKARQWKGLELIPSENFTSVSVMQAVGSVMTNKYSEGYPGARYYGGNEYIDMAETLCQKRALEAFRLDPEKWGVNVQPLSGSPANFHVYTALLKPHERIMALDLPHGGHLSHGYQTDTKKISAVSIFFETMPYRLDESTGYIDYDQMEKSATLFRPKLIVAGASAYARLYDYARIRKVCNKQKAVMLADMAHISGLVAANVIPSPFDYADVVTTTTHKSLRGPRGAMIFFRKGVKEINKQGKEVLYDFEDKINQAVFPGLQGGPHNHTITGLAVALKQATTSEYKAYQEQVLSNSAKFAQTLMERGYELVSGGTDNHLVLVNLKPKGIDGSRVEKVLEAVHIASNKNTVPGDVSAMVPGGIRMGTPALTSRGFVEEDFAKVAEYFDKAVTIALKVKSEAQGTKLKDFVSAMESSSTIQSEIAKLRHEVEEFAKQFPTIGFEKETMKYKN

SEQ ID NO: 80467 - DNA, 1494 bp, Ashbya gossypii
  CDS (1)..(1494)
atgtttattcgtcggttgcataccagttcgcgaaggttaacatgcggcgaggctcttcgtgcgtgccagcaaacaggcgctagaagtgctaatggccagctgatgctgtcgcagcatgtacaggaattcgacccggagatgtacgatatattaactaaggaacgctcaagacagaagcgtagtatcactttgattccaagcgagaacttcacatcagtggctgttatgaacttgctcggaagtgaaatgcaaaacaagtactcggaagggtatccgggtcagcggtattatgggggtaaccagtacatcgatatggcagagtccctgtgccaaaagcgcgctctggagctatatgggctagatcccgccaaatggggcgtcaatgtacagtcattgtccggagcaccagcgaacctctatgcttactcagccattatggaggttggcgatcgcatgatgggtctagatcttcctcacggtggccatctgtcccacggttaccagctacaaaatggaaacaaaatttcgtacatctccaagtacttccagaccatggcgtaccgtgtggaccctgccacaggcttggtcgactatgataccctgtctgagacctcgaaactcttcagacctaaggtgattgttgctggtacatcagcatatgcgcgggtcctggattataagcggtttagggagattgccgatgcctgtggcgcgtatctcctctctgatatggcgcatgtttctggtttggttgcagctggtgtgcacccatctcccttcgagtactccgacattgtcaccactaccacacacaaatccctaagaggaccaagaggtgccatgattttctaccggaaaggcattagaaaggtgaccaagaagggaaccgagatcatgtatgacttggacaagcgcatcaacttctcggttttcccagctcaccagggcgggccacataaccataccatttccgcacttgccgtcgcgttgaagcaggctgctactccagagttcaagaactatcaaaccgctgtggtagagaatgccaaagtttttggcgaagaactaagtaagcgtggctttagtcttgtctccggaggaactgatacacatctgctattgatcgacttgtcccccatgggcattgacgggtctaggcttgaaactatactggaacgactaaatattgcggccaacaagaacaccatcccaggcgacaagtccgctctatatccttctggcctgagagtcggtacgcctgcaatgaccacccgtgggtttggcccggccgaatttggccgggttgcagcgtatatcaacgaggctgttaaactggcaattggcttaaagtcacaagagccagtagacgctaaggacgccaagaccaggttggctcacttcaaaagtttttgcgcagaatcggaacaggtaaccaagctggccaacgaggtggcagactgggttgcacagtaccctgtgccaggagaattgtaa

SEQ ID NO: 80468 - protein, 497 aa, Ashbya gossypii
MFIRRLHTSSRRLTCGEALRACQQTGARSANGQLMLSQHVQEFDPEMYDILTKERSRQKRSITLIPSENFTSVAVMNLLGSEMQNKYSEGYPGQRYYGGNQYIDMAESLCQKRALELYGLDPAKWGVNVQSLSGAPANLYAYSAIMEVGDRMMGLDLPHGGHLSHGYQLQNGNKISYISKYFQTMAYRVDPATGLVDYDTLSETSKLFRPKVIVAGTSAYARVLDYKRFREIADACGAYLLSDMAHVSGLVAAGVHPSPFEYSDIVTTTTHKSLRGPRGAMIFYRKGIRKVTKKGTEIMYDLDKRINFSVFPAHQGGPHNHTISALAVALKQAATPEFKNYQTAVVENAKVFGEELSKRGFSLVSGGTDTHLLLIDLSPMGIDGSRLETILERLNIAANKNTIPGDKSALYPSGLRVGTPAMTTRGFGPAEFGRVAAYINEAVKLAIGLKSQEPVDAKDAKTRLAHFKSFCAESEQVTKLANEVADWVAQYPVPGEL

SEQ ID NO: 80469 - DNA, 1482 bp, Candida albicans
  CDS (1)..(1482): transl_table=12
atgctttcatctacgttacgtcgttctgtgagagctcaatccaagaatttgccagcttttgcaagaagaacctatgccgtttctccatctgctcaagcattaatttctaaatccgttcaagatgttgaccctgagatggcggatattttgaatcaagaaagaaccagacaaaagaactcaattactttgattccatcagagaattttacctctaaagcagttatggatttgttgggttcagaaatgcaaaacaaatattctgaagggtaccctggagaaagatattatgggggtaatgaaataatcgataaagctgaagcattatgtcaaaaaagagctttagaagcatttggattggacccatctcaatggggggttaatgtacagccattatctggtgctccagccaatttgtatgcttatagtgcaattttagaagttggtgacagaattatgggtttagatttacctcatggtggtcatttgtctcatggatatcaaaccaagactaccaagatttcctacatttccaaatacttccaaaccatgccatatagattaaatgaagaaactggtataattgattacgatactttagaaaaaaacgctcaattgtttagacctaaagtaattgttgctggtgcttcagcttattctcgtgtcattgactacaaaagaatgagacaattgctgataaggttgggagcttatttattgtccgatatggcccacatctctgggttagtttctgctgttgttactgattcaccattcccatattctgatattgtcaccactactacccataaatcgttgagaggaccaagaggagccatgattttctttagaaaaggaatcagaaaggttaccacaaagggtaaagaaattccttatgaattggaaagaaagatcaattttctcgttttcccagggcatcaaggtggtccacataatcatactatttctgctttagcagttgctttaaaacaatgtactgaaccagaatatgttaaataccaacaagaagttgtttctaatgccaaacattttgctgatgcattagtctccaagggtttcaaattggtttccgatggtactgatactcatttgatcttggttgatttaagatcaagaaatattgatggtgctagagtcgaagctgttttggaaagagccaacatagctgccaataaaaacaccgttcctggtgatgtatcagctcttttcccatcaggtttaagagttggtactccagctatgaccactagaggatttgggccagaagagtttgataaagttgctgaattcatcgatcaagccgttaacattgccattgaattaaaagctcaagaacaaggtaaagtaccaaaagaattattggcatcatttaaaaaattagctgatgaaagtgataaagttaaacaattagataaagaagttgtcagttgggtcagtaaatatcctgtcccaggtgaattgtaa

SEQ ID NO: 80470 - protein, 493 aa, Candida albicans
MLSSTLRRSVRAQSKNLPAFARRTYAVSPSAQALISKSVQDVDPEMADILNQERTRQKNSITLIPSENFTSKAVMDLLGSEMQNKYSEGYPGERYYGGNEIIDKAEALCQKRALEAFGLDPSQWGVNVQPLSGAPANLYAYSAILEVGDRIMGLDLPHGGHLSHGYQTKTTKISYISKYFQTMPYRLNEETGIIDYDTLEKNAQLFRPKVIVAGASAYSRVIDYKRMRQLSIRLGAYLLSDMAHISGLVSAVVTDSPFPYSDIVTTTTHKSLRGPRGAMIFFRKGIRKVTTKGKEIPYELERKINFLVFPGHQGGPHNHTISALAVALKQCTEPEYVKYQQEVVSNAKHFADALVSKGFKLVSDGTDTHLILVDLRSRNIDGARVEAVLERANIAANKNTVPGDVSALFPSGLRVGTPAMTTRGFGPEEFDKVAEFIDQAVNIAIELKAQEQGKVPKELLASFKKLADESDKVKQLDKEVVSWVSKYPVPGEL

SEQ ID NO: 80471 - DNA, 1458 bp, Candida glabrata
  CDS (1)..(1458)
atgatgttgctacgtgccgctagagtgcccgtgttgggcagacgctttctttcccagcaacaattgatctcgaagcatgtgcaagaggtggaccccgagatgttccgcatcctcagcgatgagaggagcagacagaagcactctgtcacgctgatcccttctgagaacttcacgtcgaaggccgtcatggacctgctgggctctgagatgcagaacaagtactccgagggctaccccggcgagaggtactacggtggtaaccagttcatcgataaagctgagtcgctgtgccaggcccgtgccctggacctgtatggccttgaccctgagaagtggggggtcaatgtgcaggccctgagcggtgcccctgccaacctgtacgcttactccgcggtcatggaggtcggcgaccgtctgatgggtctcgacttgccccacggtgggcacttgtctcacggataccaattgccttccggaactaagatctcctacatctcaaagtacttcaacaccatgccataccacgtcaacaccgagaccggtatcattgactatgacactttggccatgacctctaagctgttcagaccaaaggtcatcgtcgcaggtacgtccgcatactcgaggaagctggactacgctaggttcagaaagatcgccgacggctgcggtgcctacttgctgagcgacatggcccacatctccggtctggtggccgccaatgtcatagactccccattcgagcactccgacatagtcaccaccaccacccacaaatccctaagaggcccccgtggtgctatgatattctacagaaagggtatcaagaaagtcaacaagaagactggcaaggagaccccattcactttcgacaagaccatcaacttctcagtgttcccaggccaccaaggtggcccacacaaccacaccatttctgcattggctgtggcattaaagcaagcaaagacccccgagttcgtcgagtaccagaagcaagtggtctccaacgcaaaggccttcggtgacgagctattgaagcgtggcttcgagctagtgtccggcggtaccgataatcacttgcttttgctaaacctgtccaacatgggcatcgacggtgctcgtttggaggctatcctggagaagattaacatcgccgcaaacaagaacaccatcccaggtgacaagtccgcgctgttcccatcaggtttgagagtaggtaccccagccatgactaccagaggcttccaagaacaagacttcaagaaggtcgctgagtacatcgacaacgccgttaaactatccattgctctgaagtcccaggagtccgcagacgctaaggacgtcagatcaaagctaaacagcttcaagcagttgtgtgaccagtctgaaccagtgcaaaaattagccgaagaagtgtcctcatgggtaggcacattcccagttcctggcgaattgtag

SEQ ID NO: 80472 - protein, 485 aa, Candida glabrata
MMLLRAARVPVLGRRFLSQQQLISKHVQEVDPEMFRILSDERSRQKHSVTLIPSENFTSKAVMDLLGSEMQNKYSEGYPGERYYGGNQFIDKAESLCQARALDLYGLDPEKWGVNVQALSGAPANLYAYSAVMEVGDRLMGLDLPHGGHLSHGYQLPSGTKISYISKYFNTMPYHVNTETGIIDYDTLAMTSKLFRPKVIVAGTSAYSRKLDYARFRKIADGCGAYLLSDMAHISGLVAANVIDSPFEHSDIVTTTTHKSLRGPRGAMIFYRKGIKKVNKKTGKETPFTFDKTINFSVFPGHQGGPHNHTISALAVALKQAKTPEFVEYQKQVVSNAKAFGDELLKRGFELVSGGTDNHLLLLNLSNMGIDGARLEAILEKINIAANKNTIPGDKSALFPSGLRVGTPAMTTRGFQEQDFKKVAEYIDNAVKLSIALKSQESADAKDVRSKLNSFKQLCDQSEPVQKLAEEVSSWVGTFPVPGEL

SEQ ID NO: 80473 - DNA, 1746 bp, Flaveria pringlei
  CDS (34)..(1587)
tgagaattgaaacaacttaacagttggttgacaatggcgatggcgttagctcttcgtaggctctcatcttctgcagacaaaccgttgcaacgcctcttcaatggcggtcatctctactctatgtcgtcgttgcctagtgaagctgtgtacgagaaggaacggcctggtgtcacttggccgaagcagttgaatgctccgcttgaggttgtggatcctgagatcgcggatattattgagcttgaaaaggctcggcaatggaagggtcttgaactcataccatcagagaactttacctctctatcagtgatgcaagcagttggatccgtgatgaccaacaaatacagtgaagggtatccaggagctagatactatggtggaaatgagtatattgacatggcggaaacgttgtgtcaaaagcgtgcattggaagcctttcggttggatcctgcaaaatggggagtgaatgtgcagcctctttcaggatcaccagctaatttccatgtctacactgcattattaaaggctcatgacagaatcatggcacttgatcttcctcatggtgggcatctgtcacatggttatcagaccgacacaaagaaaatatctgcggtatctatatttttcgagactatgccttacagattgaatgaaagcactggctatatcgattatgaccagttggagaaaagtgcaacactcttcaggccaaaattgattgttgctggtgcaagtgcttatgctcgattatatgactatgctcgaatccgcaaggtttgtgacaagcaaaaagctattatgttggcagatatggcacacattagtgggttggttgcagctggtgtcatcccatccccttttgactatgcagatgttgtgaccaccacaacccacaagtcactccgaggaccacgtggtgccatgattttctttaggaaaggactgaaagaagtcaacaaacaaggcaaagaggtcttctatgattatgaagacaaaatcaaccaggccgtctttcctggacttcaaggaggtccacacaatcacacaatcactggattggcagttgcattgaaacaggcaacaacagcagaatacaaggcgtaccaagaacaagttatgagtaatagtgccaagtttgcagagactctagttaagagtggatatgaacttgtttctggtggaacagagaaccacttagttttggttaatttgaaaaataagggaattgatggttcaaaggttgaaaaggtgttggaggctgttcacattgcagccaataaaaacactgttcctggtgatgtctctgccatggttcctggtggcatcagaatgggaacccctgctctcacctctaggggatttgttgaagaggactttgctaaagttgcctacttctttgaccttgctgtaaaattggctgtgaagatcaagggtgaagccaaagggacaaagttgaaggactttgtgactgcaatggagtccagtgccatccaatcagaaatctcaaagctacgccatgacgtggaggaatacgcgaaacaattcccgacaatcggatttgagaaagaaaccatgaaatacaaaaactaaggaatcatacaagccgggtgccatgaagatggaagtggatgcttccatttcaaaccagtatctattctagaatgtgggttataaggctttttctgtatgatgaatcttctgtatatgtaaatcaatgcagcatttcaataaacttttcatttaatcttg

SEQ ID NO: 80474 - protein, 517 aa, Flaveria pringlei
MAMALALRRLSSSADKPLQRLFNGGHLYSMSSLPSEAVYEKERPGVTWPKQLNAPLEVVDPEIADIIELEKARQWKGLELIPSENFTSLSVMQAVGSVMTNKYSEGYPGARYYGGNEYIDMAETLCQKRALEAFRLDPAKWGVNVQPLSGSPANFHVYTALLKAHDRIMALDLPHGGHLSHGYQTDTKKISAVSIFFETMPYRLNESTGYIDYDQLEKSATLFRPKLIVAGASAYARLYDYARIRKVCDKQKAIMLADMAHISGLVAAGVIPSPFDYADVVTTTTHKSLRGPRGAMIFFRKGLKEVNKQGKEVFYDYEDKINQAVFPGLQGGPHNHTITGLAVALKQATTAEYKAYQEQVMSNSAKFAETLVKSGYELVSGGTENHLVLVNLKNKGIDGSKVEKVLEAVHIAANKNTVPGDVSAMVPGGIRMGTPALTSRGFVEEDFAKVAYFFDLAVKLAVKIKGEAKGTKLKDFVTAMESSAIQSEISKLRHDVEEYAKQFPTIGFEKETMKYKN

SEQ ID NO: 80475 - DNA, 1584 bp, Neurospora crassa
  CDS (1)..(1584)
atgtcgagcttccagagcacagctgctgtgcgcgcctgcgcccgccgagcggcttctaccacctccgccgcgactctggcctcgacaacatgtcgcgccgccgcttcccggatacaattgcagggacagagaagcgcagggctggtacctaagagctggacgaggttctcctcgtcttcgattgctaatgacaatcagcaaaaggagaagcaaagacagaagcagttcatcaacctgatcccttccgagaacttcacatcccaggccgtcctcgatgctctaggaagccccatgcagaacaagtactctgaaggctatcccggagcgcgttattacggcggcaacgagttcatcgatgcttccgaaaggttatgccaggaccgagccctcgagacctttggcttggatcccaaggaatggggtgtcaacgtgcaagcgctctccggtgctcctgcgaacctctacgtctactcggccctcatggacacccacgaccgcttgatgggccttgacctcccccacggcggccatctttcgcacggttatcagactcccaccaaaaagatctccttcatctccaagtacttcgagacccttccctaccgtctcgatgagaagacgggctacatcgactacaacaagctcgaggagctggccatcacctaccgccccaagatcatcgtcgccggcgcctccgcttacagccgcctgatcgactacgcccgcctccgcgagatctgcgacaaggtcaacgcctacctcatggccgacatggcccacatctccggtctcgtggccgccaaggtcatgcccggccccttcacccacgccgacatcgtcaccaccaccagccacaagtccctccgcggcccccgcggcgccatgatcttcttccgccgcggcgtccgccgcaccaacaagaagggcgaggaggagctgtacaacctcgagacccccatcaacgcctccgtcttccccggccaccagggcgggccccacaaccacaccatcgccgccctcgccgtcgccctcaagcaggcccagacgcccgagttccgcgcctaccagagccaggtcctcgccaacgccacggcgctcgccgcccgcctcggcgagcccaaggacaagaacggcctgggctacaccattgtcagcggcggcaccgacaaccatctcgtcctgatcgacctcaagccgcagggcatcgacggcagccgcgtcgagcgcgtgctggaactcgtcggcgtcgctgccaacaagaataccgtccccggcgacaagtcggcgctgacgcctggcggtctacgcatcggcacgcccgccatgaccacgcgcgggttcacggaagaggactttgcgcgcgtggctgacatcatcgatcgcgccgtgaccattgctgtgcgcatcaacaaggcggccaaagaggatgcggtgaagaagggcaacgagaaggcggcgaaccgcgtcaagacgtttatggattacttgggcaatggcgagacggacccggagattgtccagctcaggagcgaggtggagagttgggtgggcacgtacccttgcccttgggaccagtcgtcttag

SEQ ID NO: 80476 - protein, 527 aa, Neurospora crassa
MSSFQSTAAVRACARRAASTTSAATLASTTCRAAASRIQLQGQRSAGLVPKSWTRFSSSSIANDNQQKEKQRQKQFINLIPSENFTSQAVLDALGSPMQNKYSEGYPGARYYGGNEFIDASERLCQDRALETFGLDPKEWGVNVQALSGAPANLYVYSALMDTHDRLMGLDLPHGGHLSHGYQTPTKKISFISKYFETLPYRLDEKTGYIDYNKLEELAITYRPKIIVAGASAYSRLIDYARLREICDKVNAYLMADMAHISGLVAAKVMPGPFTHADIVTTTSHKSLRGPRGAMIFFRRGVRRTNKKGEEELYNLETPINASVFPGHQGGPHNHTIAALAVALKQAQTPEFRAYQSQVLANATALAARLGEPKDKNGLGYTIVSGGTDNHLVLIDLKPQGIDGSRVERVLELVGVAANKNTVPGDKSALTPGGLRIGTPAMTTRGFTEEDFARVADIIDRAVTIAVRINKAAKEDAVKKGNEKAANRVKTFMDYLGNGETDPEIVQLRSEVESWVGTYPCPWDQSS

SEQ ID NO: 80477 - DNA, 1803 bp, Pisum sativum
  CDS (22)..(1578)
atggacctttctatctctaacatggctatggcaatggcgcttcgtaagctttcatcttccgtcaacaaatcttcacgtcctctcttttctgcttcatctctttactacaagtcttctttgcctgatgaagctgtttacgacaaagagaatccacgtgttacgtggccaaagcaattgaattctccacttgaggttattgatcctgaaattgctgatataattgagcttgaaaaagctagacagtggaaggggctggaactgataccatcagagaattttacttctttatctgttatgcaagctgttggctctgtcatgacaaacaaatacagtgaaggttatcctggggcaagatattatggaggaaatgagtatattgacatggcagaaacactatgccagaagcgtgccttggaagcatttcggttggatcctgctaaatggggagtgaatgtgcagcctctgtctggttcgccttcaaactttcaagtttacactgcattgttgaaacctcatgatagaatcatggcacttgatctccctcatggagggcatctttctcatggataccagaccgacaccaaaaagatatctgcagtctctatattttttgagacaatgccatataggttggatgaaagcacaggatacattgactatgaccagctagagaaatcggctacactcttcaggccaaagttaatagttgccggtgctagtgcctatgcaaggctgtatgattatgcacgcatacgcaaggtttgcgataaacagaaagctgtgttgttagcagatatggcacatatcagtggattggttgcagctggtgttatcccttcaccttttgattatgcagatgtagtgacaaccacaactcacaagtcacttcgcggcccacgtggagctatgatatttttcaggaagggattaaaagaagtcaacaaacaaggaaaagaggtgttctatgactatgaggacaaaatcaatcaagctgtcttccccggactgcaaggtggtcctcacaaccataccattacaggtttagctgttgcattgaagcaggctacaactccagagtatagagcatatcaagagcaggttctcagcaatagctcaaagtttgcaaaggctctgagtgagaaaggctatgatcttgtttccggtgggactgagaatcatttagttttggtgaatctgaagaacaagggtattgatgggtccagagttgagaaagtgttggaattagtacatattgctgctaataaaaacacagttccaggagatgtgtctgctatggttcctggtggcatcaggatgggaactcctgcgcttacttcaaggggatttgttgaggaggatttcgttaaggtagcagagtattttgatgcagctgtgagtttggccttgaaggttaaggcagaaagcaaaggaacaaaattaaaggacttcgtggaagcattgcagacatcctcttacgtgcaatcagagatttccaagcttaagcatgatgttgaggagtttgcaaaacaatttccaaccattggttttgaaaaagcaaccatgaagtacaacaaataagtaaaagaaagtttccatcagtggctgttaacactatgatggtcaagcccttcaaggtgatcagttttatgcttaatggaagaggagattatatatagcagatgaaaatcattaggatggaacttttttatgtatggaacttgcaaaacttgatcagatatcttcttgcaatgtatagatacatatatttataatttattaaatgtgaattgcgacttgcgagct

SEQ ID NO: 80478 - protein, 518 aa, Pisum sativum
MAMAMALRKLSSSVNKSSRPLFSASSLYYKSSLPDEAVYDKENPRVTWPKQLNSPLEVIDPEIADIIELEKARQWKGLELIPSENFTSLSVMQAVGSVMTNKYSEGYPGARYYGGNEYIDMAETLCQKRALEAFRLDPAKWGVNVQPLSGSPSNFQVYTALLKPHDRIMALDLPHGGHLSHGYQTDTKKISAVSIFFETMPYRLDESTGYIDYDQLEKSATLFRPKLIVAGASAYARLYDYARIRKVCDKQKAVLLADMAHISGLVAAGVIPSPFDYADVVTTTTHKSLRGPRGAMIFFRKGLKEVNKQGKEVFYDYEDKINQAVFPGLQGGPHNHTITGLAVALKQATTPEYRAYQEQVLSNSSKFAKALSEKGYDLVSGGTENHLVLVNLKNKGIDGSRVEKVLELVHIAANKNTVPGDVSAMVPGGIRMGTPALTSRGFVEEDFVKVAEYFDAAVSLALKVKAESKGTKLKDFVEALQTSSYVQSEISKLKHDVEEFAKQFPTIGFEKATMKYNK

SEQ ID NO: 80479 - DNA, 1745 bp, Solanum tuberosum
  CDS (6)..(1562)
ctgcaatggctatggcaatagctcttcggaggctttccgctacagttgacaaaccggttaagagtctctacaatggtggctctctctattacatgtcatcactgcctaatgaagctgtatacgacaaagaaaaatctggggtagcttggccaaagcaactgaatgctccactagaggttgttgatcctgagattgctgacattattgagcatgagaaagcacgccaatggaaggggctcgaactcattccatcagaaaatttcacttctgtttcggtgatgcaagcagttggatcagtcatgactaacaagtacagtgaaggatatcctggtgccagatactatgggggaaatgagtacatagacatggcagaaaccttatgccagaaacgtgctttggaagcattcaggttggatcctgcaaaatggggagtgaatgtgcagcctctatcaggatcacccgctaattttcaagtttacactgcattattaaaacctcatgagagaatcatggctcttgatcttcctcatggtggacatctttctcatggatatcagactgatacaaagaagatatctgcagtctctatattctttgagacaatgccatacagactcgatgagagcactggctatattgactatgaccagctcgagaaaagtgccacactctttcggccaaaattgattgttgctggtgctagtgcctacgcacgtctttatgactatgacagaatccgaaaggtttgcaacaaacagaaagctattttgttagcagatatggcacacattagtggattggttgcagctggagttatcccatcaccatttgattatgctgatgttgtcactaccacaacccacaagtcccttcgtggccctcgtggtgctatgattttttacaggaagggtgttaaagaggttaacaagcaaggcaaggaggttttctacgactatgaagacaaaattaaccaggcagtctttcctggacttcaaggtggtccccacaatcacaccatcactggcttggcagttgccttgaaacaggccactactccagaatacagagcttaccaagagcaagttctcagcaactcctcaaaatttgcccaggctttaggggagaagggctatgaacttgtctctggaggaaccgataatcacttggttttggtgaacatgaaaaacaagggtattgatggttccagggttgaaaaagtcttggaagctgtacatattgcagccaacaagaacaccgttcctggagatgtatctgccatggtccctggtggcatcagaatgggaactcctgcactcacttctcggggatttcttgaggaagattttgttaaagttgctgatttctttgatgctgctgtgaagatagcagtgaaagtaaaggctgaaactcaagggacaaagttgaaagactttgtagcaacactagaatccagtgctccaatcaagtctgaaattgcaaaactccgtcatgatgtggaggagtatgctaagcagttccctacaattgggtttgagaaagaaaccatgaagtacaaaaactaagaggtacatacacaaggcacctaatatccagattcataaaggtgaaaggggaagaaaatccaaccatgacttgctttcaagtacatgttctcatgcttataatatgtaaagaaatctagcagatgttggttcccatgtatgcagtttgtatatttaacacttacagtccaactgaggtccttt

SEQ ID NO: 80480 - protein, 518 aa, Solanum tuberosum
MAMAIALRRLSATVDKPVKSLYNGGSLYYMSSLPNEAVYDKEKSGVAWPKQLNAPLEVVDPEIADIIEHEKARQWKGLELIPSENFTSVSVMQAVGSVMTNKYSEGYPGARYYGGNEYIDMAETLCQKRALEAFRLDPAKWGVNVQPLSGSPANFQVYTALLKPHERIMALDLPHGGHLSHGYQTDTKKISAVSIFFETMPYRLDESTGYIDYDQLEKSATLFRPKLIVAGASAYARLYDYDRIRKVCNKQKAILLADMAHISGLVAAGVIPSPFDYADVVTTTTHKSLRGPRGAMIFYRKGVKEVNKQGKEVFYDYEDKINQAVFPGLQGGPHNHTITGLAVALKQATTPEYRAYQEQVLSNSSKFAQALGEKGYELVSGGTDNHLVLVNMKNKGIDGSRVEKVLEAVHIAANKNTVPGDVSAMVPGGIRMGTPALTSRGFLEEDFVKVADFFDAAVKIAVKVKAETQGTKLKDFVATLESSAPIKSEIAKLRHDVEEYAKQFPTIGFEKETMKYKN

SEQ ID NO: 80481 - DNA, 1698 bp, Saccharomyces cerevisiae
  CDS (226)..(1698)
atgattctctccgttatctgctggttcttagtccactgtctgttctgtcccccttctgtccaagagatagaatataaaaaagactcattatttttttttaggtacttcgcttattggtggtcaatgagaaaaaaaatactaaaagccatcgcctcttggagaagagcaaactatcaaaaatcatcaagccgacatttccacatcgagtctcatagtctttcaatcatgtttcccagagcttctgcattggccaaatgtatggcaactgttcatcgtcgtgggctactcaccagtggtgcacaatcgctagtctccaaaccagtctcggagggagatccagagatgtttgacatcttgcaacaagaacgtcacagacaaaaacactctatcacccttatcccatcagaaaacttcacctcgaaggccgttatggatttgctaggttctgagctccaaaacaagtattctgaaggttatccaggtgaaagatactacggaggtaacgaaatcatcgataagtccgaatccttgtgtcaagcaagagctctggaactgtacggattagaccctgccaagtggggagttaatgttcaaccattaagcggggcacctgccaatttgtatgtttactccgctatcatgaacgttggtgaaagattaatgggattggatttgccagatggtggtcacttgtctcacgggtaccaacttaagtcaggaacgccaatttctttcatttccaaatacttccaaagtatgccataccatgtcgaccacactacggggctaatcgattacgataacttgcaagtattggccaaggcattcagaccaaaggtgatcgtggccggtacttccgcgtactcgagattaatagactacgctagattcaaggaaatttcccaaggatgcggcgcatatttgatgagtgatatggcacacatatccggtttggtggcagccaatgttgtcccatctccatttgaacattccgatatagttaccacaaccactcacaagtccttgagaggcccaagaggtgctatgattttcttcagaaagggtatcaagtctgtcaccaaaaagggcaaggaaatcccatatgagttagaaaagaaaatcaacttctcagttttcccaggacatcaaggtggtcctcacaaccatactatcggtgcaatggcagtggcattaaagcaagcgatgtctccagaattcaaagaataccaacaaaaaattgtcgacaacagcaaatggtttgctcaggaactaaccaagatgggttataagttggtttccggcggtaccgataaccacttgattgttattgacttatccggtactcaggtagacggtgctcgtgtcgagacaattttaagtgccttgaacattgctgctaacaagaacaccatcccaggtgataagagtgctcttttcccctctggtctaagaatcggtactccagcaatgaccacgagaggatttggccgtgaagagttttctcaagtcgcaaagtacattgattctgccgttaagctcgctgaaaatttgaaaactttggaaccaacaacgaaactagatgcaagatcaagactcaatgagttcaagaagttgtgtaatgaatctagtgaagtcgctgctttgtctggcgagatttccaagtgggtcggtcaataccctgtcccaggtgatatctaa

SEQ ID NO: 80482 - protein, 490 aa, Saccharomyces cerevisiae
MFPRASALAKCMATVHRRGLLTSGAQSLVSKPVSEGDPEMFDILQQERHRQKHSITLIPSENFTSKAVMDLLGSELQNKYSEGYPGERYYGGNEIIDKSESLCQARALELYGLDPAKWGVNVQPLSGAPANLYVYSAIMNVGERLMGLDLPDGGHLSHGYQLKSGTPISFISKYFQSMPYHVDHTTGLIDYDNLQVLAKAFRPKVIVAGTSAYSRLIDYARFKEISQGCGAYLMSDMAHISGLVAANVVPSPFEHSDIVTTTTHKSLRGPRGAMIFFRKGIKSVTKKGKEIPYELEKKINFSVFPGHQGGPHNHTIGAMAVALKQAMSPEFKEYQQKIVDNSKWFAQELTKMGYKLVSGGTDNHLIVIDLSGTQVDGARVETILSALNIAANKNTIPGDKSALFPSGLRIGTPAMTTRGFGREEFSQVAKYIDSAVKLAENLKTLEPTTKLDARSRLNEFKKLCNESSEVAALSGEISKWVGQYPVPGDI

SEQ ID NO: 80483 - DNA, 1779 bp, Flaveria pringlei
  CDS (25)..(1578)
cctagagcgagagaaaaactaacaatggcgatggcatcggctcttcgtaggctctcatcttcttcaaacaaaccgttgcagcgtctgttcaatggcggtcatctatattcaatgtcatcgttgcctagtgaagctgtgtatgagaaagaaaggcctggcgtcacttggccgaaacagttgaacgctccacttgaggttggggatcctgagattgctgatattattgagcttgaaaaggctcggcaatggaagggtcttgaactcatactctcagagaactttacctccctgtcagtgatgcaagcagttggatctgtgatgactaacaaatacagtgaagggtatccgggtgctagatactatggtggaaatgagtacattgacatggcggaaaccttgtgtcagaagcgtgccttggaagcctttcggttagatgctgcaaaatggggagtgaatgtgcaacctctttcagggtcaccagcaaatttccatgtctatactgcattattaaaggctcatgacagaatcatggcacttgatcttcctcatggtggccatctgtcacatggttatcagactgatacaaagaagatatctgcagtatccatatttttcgagactatgccttacagattgaacgagagcaccggctatattgattatgaccagttggagaaaagtgccacacttttcaggccaaaactgatagttgctggcgcaagtgcttatgctagattatatgactatgcacgtattcgtaaggtttgtgacaagcaaaaagccattttgttagcagatatggcacacattagtgggttggtagcagctggtgtcatcccatccccatttgactatgcagatgttgtgaccacaaccacccacaagtcacttcggggcccacgaggcgccatgattttcttcaggaaaggggtgaaagaagtcaacaaacaaggcaaagaggttctctatgattatgaagacaaaatcaaccaggctgtctttcctgggcttcaaggtggcccacacaatcacacaatcactggattggcagttgcattgaaacaggcaacaacagcagaatataaggcatatcaagagcaagtcatgagtaattgtgccaaatttgcagagactctagttaagagcggatatgaacttgtttccgggggaacagagaaccacttagtgttggtcaatttgaagaataagggaattgatggttcaagggttgaaaaggtgttggaagctgttcacattgcagccaataaaaacactgttcctggtgatgtgtctgccatggttcctggtggcatcagaatgggaacccctgctctcacttctaggggatttgttgaagaggattttgctaaagttgcctacctctttgaccttgctgtaaaattggctgtgaagatcaagggtgaagcccaagggacaaagttgaaggactttgtggctgcaatgcagtccagtgccttccaatcagaaatttcaaagctacgccacgacgtggaggagtatgccaaacaattcccaacaatcgggtttgagaaagaaaccatgaaatacaaaaactgaggaatcatacaagccaggtatcattaaggtggaggtgaggtgaagacaatgcttccatttggaagtggggagccatgtatctagaatgaatgtgattataaggcttttgtgtatgaaatcaagttgtaaccatctgtatatgtaaatcaactcgactgatgttttctataaacaaataaaactttctataatttttaaaat

SEQ ID NO: 80484 - protein, 517 aa, Flaveria pringlei
MAMASALRRLSSSSNKPLQRLFNGGHLYSMSSLPSEAVYEKERPGVTWPKQLNAPLEVGDPEIADIIELEKARQWKGLELILSENFTSLSVMQAVGSVMTNKYSEGYPGARYYGGNEYIDMAETLCQKRALEAFRLDAAKWGVNVQPLSGSPANFHVYTALLKAHDRIMALDLPHGGHLSHGYQTDTKKISAVSIFFETMPYRLNESTGYIDYDQLEKSATLFRPKLIVAGASAYARLYDYARIRKVCDKQKAILLADMAHISGLVAAGVIPSPFDYADVVTTTTHKSLRGPRGAMIFFRKGVKEVNKQGKEVLYDYEDKINQAVFPGLQGGPHNHTITGLAVALKQATTAEYKAYQEQVMSNCAKFAETLVKSGYELVSGGTENHLVLVNLKNKGIDGSRVEKVLEAVHIAANKNTVPGDVSAMVPGGIRMGTPALTSRGFVEEDFAKVAYLFDLAVKLAVKIKGEAQGTKLKDFVAAMQSSAFQSEISKLRHDVEEYAKQFPTIGFEKETMKYKN

SEQ ID NO: 80485 - DNA, 1587 bp, Oryza sativa
  CDS (1)..(1587)
atggcgatggcttcgcaccacctcgcccagccgcccacgcgcgcggctctctcctcgcgccccacctacccgctctccagccatcaccactcctcccgtctccagctcccgctcgtcagcggggcgcggcgcagcaggctgtcccccgcggtggcgacgtccccggtcgccgccccagcgatggacgccgtggccgactgggggctgaccactctggaggaggctgacccggaggtgtacgacctcgtcgagcgcgagaagcggcggcagcgcgcgggcgtcgagctcatcgcgtcggagaacttcacctcgctcgccgtcatggaggcgctgggctcgccgctcaccaacaagtactccgagggcatgccggggtcccgctactacggaggcaacgaggtcatcgacgaggtggaggagctctgccgcgcccgcgcgctcgccgccttccacctcgaccccgaggcctggggcgtcaacgtgcagccctactccggctcgccggcgaacttcgccgcctacaccgggctgctccaaccccacgagcggatcatggggctcgatttgccgtccggcggccacctcacgcacggctactacaccgccggcggcaaaaagatctccgccacgtccatctacttcgagagcctgccgtacaaggtgagctccgagacaggatacgtcgattatgataagctggaggagaaggccatggattttcggcccaagctcatcatctgcggcgggagcgcgtacccgcgggattgggattacgccaggttcagggccatcgcggataagtgcggcgccatgttgctctgcgacatggctcacatcagtggcctagttgccgcgcaggaggctgcaaatccttttcaatattctgatgtggttaccaccaccacccacaagagtctccgagggccaagatctggtatgatcttctacaggaagggcctgaagcctcccaagaaaggccagcctgagggcgctctgtatgactacgaggacaggatcaacttcgcagtgtttccgtcgctccaagggggccctcacaaccaccaaattgctgcgctagcggttggtttgaagcagactatgtcacctggattcaagtcttatattaagcaggtcaaggccaatgctgttgcccttggtaaccatttgatgagtaagggctacaaattggttactgacggaacagagaaccatcttgttctctgggatctgcgccctcttggcttgactgttgagaaggtctgtgatttgtgcagcattacactgaacaaaaatgctgtctttggggatagcagtgcaatgtcacctggtggtgtccgcattggtacacctgccatgacatcaaggggtttggtagaggaggactttgtacagatcgccgagttccttcaccaggcagtgaccatctgcttggatgttcagaaggagcgtggcaagcttctcaagtacttcaacgagggcctggagaacaacaaggacattgaggacctcagggcggaggtggagaagtttgccacttcattcgagatgcctggcttcagggtatccgacatgaagtacaaggattag

SEQ ID NO: 80486 - protein, 528 aa, Oryza sativa
MAMASHHLAQPPTRAALSSRPTYPLSSHHHSSRLQLPLVSGARRSRLSPAVATSPVAAPAMDAVADWGLTTLEEADPEVYDLVEREKRRQRAGVELIASENFTSLAVMEALGSPLTNKYSEGMPGSRYYGGNEVIDEVEELCRARALAAFHLDPEAWGVNVQPYSGSPANFAAYTGLLQPHERIMGLDLPSGGHLTHGYYTAGGKKISATSIYFESLPYKVSSETGYVDYDKLEEKAMDFRPKLIICGGSAYPRDWDYARFRAIADKCGAMLLCDMAHISGLVAAQEAANPFQYSDVVTTTTHKSLRGPRSGMIFYRKGLKPPKKGQPEGALYDYEDRINFAVFPSLQGGPHNHQIAALAVGLKQTMSPGFKSYIKQVKANAVALGNHLMSKGYKLVTDGTENHLVLWDLRPLGLTVEKVCDLCSITLNKNAVFGDSSAMSPGGVRIGTPAMTSRGLVEEDFVQIAEFLHQAVTICLDVQKERGKLLKYFNEGLENNKDIEDLRAEVEKFATSFEMPGFRVSDMKYKD

SEQ ID NO: 80487 - DNA, 1416 bp, Linum usitatissimum
  CDS (1)..(1416)
atggatccagtcaaggtatggggaaacactcctttgcaaaccgtggaccctgagatccacgacctcatcgagaaggagaagcgccgtcaatgccgcgggatcgagctcatcgcctccgagaacttcacctccttcgccgtcatcgaagccctcggcagcgccctcaccaacaagtactccgagggcatgcccggaaatcgctactacggcggcaacgagtacatcgatcagatcgagaacctctgcgtatcccgcgccttgaccgctttccacttggacgacaccaagtggggcgtcaatgtccagccttactccggctcccctgccaatttcgccgcctacaccgccattctcaagccccatgatcgtatcatgggattggatctcccatctggtggtcatctgactcatggatactacacctccagcgggaagaagatctccgcaacttccatttacttcgagagcttgccttacaaggtgaattccagcactggctacatcgactacgataagctggaagagaaggctttggatttcaggccacggttgatcatctgtggtggcagtgcttaccctagggactgggattacgctagatttagggctattgctgataaatgcggtgctcttttgctctgcgatatggctcacattagcggcctagttgctgctcaggaagctgccaacccctttgagttctgtgacattgtcacaaccaccacccacaagagtttgaggggtcccagagctggtatgatcttctaccgcaagggacctaagccagccaacaagaagggtcagcctcaaggcaactatgaattcgaggacaacatcaacttctctgtcttccctgccctccagggaggcccccataatcaccagatcggtgcccttgctgttgcattgaagcaggccgcgacccctgcattcaaggcctatgccaagcaagtgaaggccaatgctgttgctgttgggaactatttgatgagcaaaggctacaccttggtcactggaggaactgagaaccaccttgttctgtgggatctgagacctcttgggttgactggtaacaaggtcgagaaggtttgcgatctctgtaacatcactgtgaacaagaatgcagtgttcggagacagcagtgcattgtccccaggaggcgtgagagttggggcacctgccatgacttcaagagggttgttggagaaagactttgagcaaatcggagagttcctccaccgtgctgtggccttaacactgagcatccagaaggaatatgggaagttactgaaggacttcaacaagggcctggagaacaacaaagagatcgaagcattgaaagctgatgttgagaaatttgcaggttcatttgatatgcctggtttcctcatgtctgagatgaagtaccaggagtaa

SEQ ID NO: 80488 - protein, 471 aa, Linum usitatissimum
MDPVKVWGNTPLQTVDPEIHDLIEKEKRRQCRGIELIASENFTSFAVIEALGSALTNKYSEGMPGNRYYGGNEYIDQIENLCVSRALTAFHLDDTKWGVNVQPYSGSPANFAAYTAILKPHDRIMGLDLPSGGHLTHGYYTSSGKKISATSIYFESLPYKVNSSTGYIDYDKLEEKALDFRPRLIICGGSAYPRDWDYARFRAIADKCGALLLCDMAHISGLVAAQEAANPFEFCDIVTTTTHKSLRGPRAGMIFYRKGPKPANKKGQPQGNYEFEDNINFSVFPALQGGPHNHQIGALAVALKQAATPAFKAYAKQVKANAVAVGNYLMSKGYTLVTGGTENHLVLWDLRPLGLTGNKVEKVCDLCNITVNKNAVFGDSSALSPGGVRVGAPAMTSRGLLEKDFEQIGEFLHRAVALTLSIQKEYGKLLKDFNKGLENNKEIEALKADVEKFAGSFDMPGFLMSEMKYQE

SEQ ID NO: 80489 - DNA, 1554 bp, Brassica napus
  CDS (1)..(1554)
atggcgatggctatggctcttcggaggctttcttcttcagttgacaaacctattcgtcctcttatcagatcatcttcatgctacatgtcttctttaccaagtgaagctgttgatgacaaggagaggtctcgtgtcacttggccaaaacagcttaacgcatctttggaggaagttgatcctgagattgctgacattattgagcatgagaaagctagacaatggaagggacttgaactcattccatctgagaatttcacatctgtctcggtgatgcaagctgttggctctgtgatgactaacaagtacagtgaagggtaccctggtgctagatactatggaggaaatgagtacatagacatggcagagactttatgccaaaagcgcgctcttgaggctttcagattagatcctgaaaagtggggagtgaatgtgcaacccttgtctggatctcctgccaacttccatgtctacactgcattgctcaaacctcatgagagaatcatggcacttgatcttcctcatggtggtcatctttctcatggttatcagactgacaccaagaagatatctgctgtgtctatcttctttgagacaatgccttatcgcttggacgagagcactggctacattgactatgatcagatggagaaaagtgctactcttttcaggccaaaactgattgttgctggtgcgagtgcttatgctcgattgtatgactatgcccgcatccgaaaggtgtgtaacaagcaaaaagctgtgatgctagcagatatggcacacatcagtggtttggttgctgctggtgtaatcccttcaccgttcgactatgcagatgttgtgaccaccacaactcacaagtcacttcgtggaccccgtggagccatgattttctacagaaagggtgttaaggaaattaacaaacaagggaaagaggttttgtatgattttgaagacaagataaatcaagctgtcttccctggtcttcaaggtggtccacataaccacactattacaggactagctgttgctttaaaacaggcaactacttcagagtacaaagcataccaagagcaagtcctgagtaactctgcaaagttcgctcagactctgatggagaaaggttatgaacttgtttctggtggaaccgacaaccatctggttctagtgaacctgaagcccaagggaattgatggatctagagttgagaaagtgttggaagctgttcacattgcatcaaacaaaaacactgttcctggagatgtttctgccatggttcctggtggaatcagaatgggtacacctgctctcacttccagaggctttgttgaggaagactttgctaaagtagctgaatactttgacaaagctgtaacgttggctctcaaagtcaaatctgaagctcaagggaccaagctgaaagactttgtgtcagcaatggaagcttcttcaaccattcaatcagagattgctaagctgcgccatgaagttgaggaatttgctaaacagtttccaacaattgggtttgagaaagaaaccatgaagtacaagaactaa

SEQ ID NO: 80490 - protein, 517 aa, Brassica napus
MAMAMALRRLSSSVDKPIRPLIRSSSCYMSSLPSEAVDDKERSRVTWPKQLNASLEEVDPEIADIIEHEKARQWKGLELIPSENFTSVSVMQAVGSVMTNKYSEGYPGARYYGGNEYIDMAETLCQKRALEAFRLDPEKWGVNVQPLSGSPANFHVYTALLKPHERIMALDLPHGGHLSHGYQTDTKKISAVSIFFETMPYRLDESTGYIDYDQMEKSATLFRPKLIVAGASAYARLYDYARIRKVCNKQKAVMLADMAHISGLVAAGVIPSPFDYADVVTTTTHKSLRGPRGAMIFYRKGVKEINKQGKEVLYDFEDKINQAVFPGLQGGPHNHTITGLAVALKQATTSEYKAYQEQVLSNSAKFAQTLMEKGYELVSGGTDNHLVLVNLKPKGIDGSRVEKVLEAVHIASNKNTVPGDVSAMVPGGIRMGTPALTSRGFVEEDFAKVAEYFDKAVTLALKVKSEAQGTKLKDFVSAMEASSTIQSEIAKLRHEVEEFAKQFPTIGFEKETMKYKN

SEQ ID NO: 80491 - DNA, 1530 bp, Brassica napus
  CDS (1)..(1530)
atggcgttggctcttcgcagactctcctcttccctcaagaagcccatcttctccaatggcggttccttccgttctatgtcgtctacgccagcctcggagagatctcgttccacttggataagccaactcaacgcacctctggaagaaatcgatcccgaaatcgcagatatcatcgagctcgagaaggctaggcaatggaagggatttgagcttataccgtcagagaacttcacatctgcctcggtgatggaagctgtgggctctgttatgactaacaagtatagtgaaggttaccctggtgctagatactatggaggcaatgagtacattgacatggctgagtcattatgtcaaaaacgcgcacttgaagcttttcacttagatccttccaaatggggagtcaatgtgcagtctttatcaggatcaccagctaacttccaagtttacactgcattgctgaagcctcacgaaagaatcatggcacttgacttgcctcatggtggccatctttctcatggttatcagactgacacgaagaaaatatctgctgtatccatcttttttgagacaatgccatacagattggacgagaacactggttacattgattatgatcagctagagaaaagtgccgtgcttttcagacctaaactgattgttgcaggtgcaagtgcttatgctcgtctatatgactatgcacgtattcgtaaggtctgtgacaagcaaaaggcggatatgctggctgacatggctcatattagtgggttggttgctgctggtgtgataccttctcctttcgagtatgcagatgttgttaccactacaactcacaaatcgcttcgtggtccaagaggggctatgatattctttacgaaggggttgaaagaggttaacaaacaaggaaaagaggtcatgtatgactatgaagacagaattaacgcagctgtttttcctggactgcaaggtggtccacataatcacacaataacaggtctagcagttgctctgaagcaggtgaaaacaccagagtataaggcctaccaggatcaagttctccgcaactgctcaaagtttgcagagactttgctatcaaaaggatatgacttagtatctggaggcactgacaatcatttagtcttggtgaacttgaaaaacaagggaatagatggatcaagagtggaaaaagtattagaatcagtacatattgcagcaaacaaaaacactgttccgggtgacgtttccgctatggttccaggcggcatccgtatgggaacaccagctctcacatcaagaggattcattgaggaagattttgcaaaagtagctgaatacttcgatttagccgtcaagatagccttgaagatcaaggcagagtctcaaggaacaaagctgaaggactttgtagcaacgatgcaatcaaatgagaagttacagtcagagatggcaaagctgcgtgagatggttgaagaatatgctaaacagttcccaaccattgggttcgagaaagagacgatgagatacaaagagtag

SEQ ID NO: 80492 - protein, 509 aa, Brassica napus
MALALRRLSSSLKKPIFSNGGSFRSMSSTPASERSRSTWISQLNAPLEEIDPEIADIIELEKARQWKGFELIPSENFTSASVMEAVGSVMTNKYSEGYPGARYYGGNEYIDMAESLCQKRALEAFHLDPSKWGVNVQSLSGSPANFQVYTALLKPHERIMALDLPHGGHLSHGYQTDTKKISAVSIFFETMPYRLDENTGYIDYDQLEKSAVLFRPKLIVAGASAYARLYDYARIRKVCDKQKADMLADMAHISGLVAAGVIPSPFEYADVVTTTTHKSLRGPRGAMIFFTKGLKEVNKQGKEVMYDYEDRINAAVFPGLQGGPHNHTITGLAVALKQVKTPEYKAYQDQVLRNCSKFAETLLSKGYDLVSGGTDNHLVLVNLKNKGIDGSRVEKVLESVHIAANKNTVPGDVSAMVPGGIRMGTPALTSRGFIEEDFAKVAEYFDLAVKIALKIKAESQGTKLKDFVATMQSNEKLQSEMAKLREMVEEYAKQFPTIGFEKETMRYKE

SEQ ID NO: 80493 - DNA, 1416 bp, Brassica napus
  CDS (1)..(1416)
atggatccagtctcagcctggggaaacacccctcttgtcaccgtcgatccagagatccacgatctcatcgaaaaggagaagcgtcgtcaatgccgcggaatcgaactcatcgcctccgagaacttcacttccttcgccgtcatcgaagctctcggaagcgcactcaccaacaaatactccgaaggcatgcctggcaaccgttactacggaggtaacgagttcatcgaccagatcgagaatctctgccagtcacgcgctctcgaagccttccgtctcgattccgcatcatggggcgtcaatgttcagccctactccggatctccggccaatttcgccgcctacaccgccttgcttcagcctcacgatcgtatcatgggcctcgatctaccttcaggtggtcatctcacgcatggatactatacgtccggtgggaagaagatctctgctacttcgatctactttgagagccttccgtataaggtcaacttcaccactggttacattgattacgataagctcgaggagaaggccatggatttcaggcctaagttgctcatctgtggtggtagtgcctaccctagggattgggattacgctagattgagagctgttgctgataaggttggagctctcttgctctgtgacatggctcacatcagtggactcgttgctgctcaggaagctgcaaacccatttgagtactgtgacgttgtgacaaccacaacccacaagagtttgaggggtccaagggctggtatgatcttctacaggaagggcccaaaaccaccaaagaagggacaacccgagggtgcagtctatgactttgaggacaaaatcaactttgctgtgttccctgcgcttcaaggtggtcctcacaaccaccagatcggtgctctagctgttgcgttgaagcaggctaacactcctggtttcaaggtctatgcgaaacaggtgaaagccaatgctgttgcccttgcaaactacctgatgggtaagggatacagtatcgtaaccggtggaactgagaaccaccttgttctttgggatcttcgccctcttggattgaccggtaacaaggttgagaagctttgcgatctgtgcaacattactttgaacaagaatgctgtctttggagacagcagtgctcttgctcctggaggtgtaagaatcggtactcctgcgatgacatcaaggggattggtggagaaggactttgagatgataggagagttcttgagccgatcagtgacactgacattgaacatccagaaggagcatggtaaactgttgaaggacttcaacaagggtttggtgaacaacaaagagatcgaggagctcaaggctgatgtcgagaagttctcagcctcctatgagatgcctggattcctcatgtctgcgatgaagtaccaggattag

SEQ ID NO: 80494 - protein, 471 aa, Brassica napus
MDPVSAWGNTPLVTVDPEIHDLIEKEKRRQCRGIELIASENFTSFAVIEALGSALTNKYSEGMPGNRYYGGNEFIDQIENLCQSRALEAFRLDSASWGVNVQPYSGSPANFAAYTALLQPHDRIMGLDLPSGGHLTHGYYTSGGKKISATSIYFESLPYKVNFTTGYIDYDKLEEKAMDFRPKLLICGGSAYPRDWDYARLRAVADKVGALLLCDMAHISGLVAAQEAANPFEYCDVVTTTTHKSLRGPRAGMIFYRKGPKPPKKGQPEGAVYDFEDKINFAVFPALQGGPHNHQIGALAVALKQANTPGFKVYAKQVKANAVALANYLMGKGYSIVTGGTENHLVLWDLRPLGLTGNKVEKLCDLCNITLNKNAVFGDSSALAPGGVRIGTPAMTSRGLVEKDFEMIGEFLSRSVTLTLNIQKEHGKLLKDFNKGLVNNKEIEELKADVEKFSASYEMPGFLMSAMKYQD

SEQ ID NO: 80495 - DNA, 1590 bp, Brassica napus
  CDS (1)..(1590)
atgcaagcttgttgtggaggtacttcaatggggtctcttcagcaacctgtacgggttcaaagacctgtctttgctccaataacctccccagtgactaaattctcccagcaactgaagctcagtttcccgagaccttgcccttctttgtttctgagaaaaagctcggtctttgaaaggagagcgtcttcagtctcagcacctgatgtggagactaccagcaatgagatcccattcgaggactacggtcgtcgtgaagtggatccagaggtcgatgagataatcaccaaggagaaaaacagacagttcaggagcttggagcttattgcgtccgagaatttcacttctcgagctgttatggagactgttggatcatgccttaccaacaagtactccgagggtcttcctggtaaaaggtactatggtggcaatgagtttatagatcagttggagacactttgccagaaccgtgctttagcaaccttccggttagattctaccaaatggggtgcgaatgatcagccgttatctggttcacctgcaaactttgctgtctacaccgccatactcaagcctcatgatcgtatcatgggtttggatttacctcatggtggacatctatcacatgggttcatgactgccaaaagacgtgtgtctggaacttcgatatactttgagtccatgccttatcggcttgatgaatcaacaggcattgtggactatgatatgctcgagaaaactgctgtactgttccgaccaaagcttataattgcaggagctagtgcgtacagccgagactttgactatcctcgcatgaggaagatcgcagactcagttggtgcttttctgatgatggatatggctcacatcagtggacttgtggctgcttctgtggtagctgatccttttgagtattgtgatattgttacaacaaccactcacaagtctttgagaggtccaagaggtggaatgatcttcttcaagaaggatccagttaatggggttgaacttgaatctgcaattaacaacgctgtcttccctggtctgcagggtggacctcataaccacacaattggaggattagcagtctgcttgaaacacgcacagtcgccagaattcaaggcttaccagaaaagagttgtggctaactgtagagctctagctaaccgattggttgaactcgggtttaagctggtttctggtggcagcgacaaccacctggtcctcgtggatcttagaccattgggaatggatggtgcacgggtcgagaaaatcttagacatggcatctattacactcaacaagaactctgtccctggggacaagagtgcgttggttccagggggaataaggataggaacgcctgcaatgacgacaagaggactgtcagagaaagactttgtggtggttgctgacttgatcaaggaaggtgtggagataacaatggaagccaagaagctggtttcaggaacaaagcttggagagttcaccaagcttgtgacatctcctgagttcccattgagagagaaagtggagactctcaaggagagaggcgaatcattcacccatcgtttccccattcctggagtgtga

SEQ ID NO: 80496 - protein, 529 aa, Brassica napus
MQACCGGTSMGSLQQPVRVQRPVFAPITSPVTKFSQQLKLSFPRPCPSLFLRKSSVFERRASSVSAPDVETTSNEIPFEDYGRREVDPEVDEIITKEKNRQFRSLELIASENFTSRAVMETVGSCLTNKYSEGLPGKRYYGGNEFIDQLETLCQNRALATFRLDSTKWGANDQPLSGSPANFAVYTAILKPHDRIMGLDLPHGGHLSHGFMTAKRRVSGTSIYFESMPYRLDESTGIVDYDMLEKTAVLFRPKLIIAGASAYSRDFDYPRMRKIADSVGAFLMMDMAHISGLVAASVVADPFEYCDIVTTTTHKSLRGPRGGMIFFKKDPVNGVELESAINNAVFPGLQGGPHNHTIGGLAVCLKHAQSPEFKAYQKRVVANCRALANRLVELGFKLVSGGSDNHLVLVDLRPLGMDGARVEKILDMASITLNKNSVPGDKSALVPGGIRIGTPAMTTRGLSEKDFVVVADLIKEGVEITMEAKKLVSGTKLGEFTKLVTSPEFPLREKVETLKERGESFTHRFPIPGV

SEQ ID NO: 80497 - DNA, 1554 bp, Brassica napus
  CDS (1)..(1554)
atggcgatggctatggctcttcggaggctttcttcttcagttgacaaacctattcgtcctcttatcagatcatcttcatgctacatgtcttctttaccaagtgaagctgttgatgacaaggagaggtctcgtgtcacttggccaaaacagcttaacgcatctttggaggaagttgatcctgagattgctgacatcattgagcatgagaaagctagacaatggaagggacttgaactcattccatctgagaatttcacatctgtctcggtgatgcaagctgttggctctgtgatgactaacaagtacagtgaagggtaccctggtgctagatactatggaggaaatgagtacatagacatggcggaaaccttgtgccagaagcgtgctcttgaagctttccggttagaccctgagaagtggggagtgaatgtgcaacctttgtctggatcacctgccaacttccatgtgtacactgcattgttgaagcctcatgagagaatcatggcacttgatcttcctcatggtggtcatctttctcatggttaccagactgacaccaagaagatatctgctgtgtctatcttttttgaaactatgccctaccgcttggacgagagcactggcttcatcgactacgaccagatggagaagagtgctactcttttcaggccaaaactgattgttgctggtgcaagtgcttatgctcgattgtatgactatgcccgcatccgaaaggtgtgtaacaagcaaaaagctgtgatgctagcagatatggcacacataagcggtttggttgcagctggtgtaatcccttcaccgttcgaatatgcagatgttgtaaccaccacaactcacaagtcacttcgtggacctcgtggtgccatgattttctacagaaagggtgttaaggaaattaacaaacaagggaaagaggttatgtatgattttgaagacaagatcaatcaagctgtcttccctggtcttcaaggtggtccacacaaccacactattacaggactagctgttgctttaaaacaggcaactacttcagagtacaaagcataccaagagcaagtcctcagtaactctgcaaagtttgctcagactctgatggagaaaggttatgaacttgtttctggtggaactgacaaccatctggttctagtgaacctgaagcccaagggaattgatggatctagagttgagaaagtactggaagctgttcacattgcatccaacaaaaacactgttcctggagatgtttctgccatggttcctggtggaatcagaatgggtactcctgctctcacttccagaggctttgttgaggaagactttgccaaagtagctgagtactttgacaaagctgtgaagttggctctcaaagtcaaatctgaagctcaaggaaccaaactgaaagattttgtgtcagcaatggaatcatcttcagccattcaatcagagattgccaagctgcgccacgacgtggaggagttcgctaagcagttcccaactattgggtttgagaaagaaaccatgaagtacaagaactga

SEQ ID NO: 80498 - protein, 517 aa, Brassica napus
MAMAMALRRLSSSVDKPIRPLIRSSSCYMSSLPSEAVDDKERSRVTWPKQLNASLEEVDPEIADIIEHEKARQWKGLELIPSENFTSVSVMQAVGSVMTNKYSEGYPGARYYGGNEYIDMAETLCQKRALEAFRLDPEKWGVNVQPLSGSPANFHVYTALLKPHERIMALDLPHGGHLSHGYQTDTKKISAVSIFFETMPYRLDESTGFIDYDQMEKSATLFRPKLIVAGASAYARLYDYARIRKVCNKQKAVMLADMAHISGLVAAGVIPSPFEYADVVTTTTHKSLRGPRGAMIFYRKGVKEINKQGKEVMYDFEDKINQAVFPGLQGGPHNHTITGLAVALKQATTSEYKAYQEQVLSNSAKFAQTLMEKGYELVSGGTDNHLVLVNLKPKGIDGSRVEKVLEAVHIASNKNTVPGDVSAMVPGGIRMGTPALTSRGFVEEDFAKVAEYFDKAVKLALKVKSEAQGTKLKDFVSAMESSSAIQSEIAKLRHDVEEFAKQFPTIGFEKETMKYKN

SEQ ID NO: 80499 - DNA, 1416 bp, Glycine max
  CDS (1)..(1416)
atggatccagtgagcgtgtggggtaacacgcccttggcgacggtggatcccgagatccatgacctcatcgagaaggagaagcaccgccaatgccgcggcatcgagctcatcgcctccgagaacttcacctccttcgcagtcatcgaggccctcggcagcgccctcaccaacaaatactccgagggcatgcccggcaaccgctactacggcggcaacgaattcatcgaccagatcgaaaacctctgccgctcacgcgccctccaggccttccacctcgacgcccaatcctggggcgtcaatgtgcagccctactccggctcccctgccaacttcgccgcctacaccgccgtcctcaacccccacgaccgcatcatggggctggatctcccctccggcggccacctcacccacggctactacacctccggcggcaagaagatctccgccacctccatttacttcgagagcctcccttacaaagtaaactccaccaccggctacatcgactacgaccgcttggaggaaaaagccctagacttcaggcccaaattgataatctgcggtggcagcgcttaccctcgcgattgggactacaaacgcttcagggaaattgcggataagtgcggggcattgcttctctgcgacatggcgcacactagcggccttgtggccgcgcaggaagtgaacagccccttcgagtattgcgacattgtgaccaccaccacgcataagagcttgcggggtccacgggcggggatgatcttttaccggaagggcccgaagccgccgaagaaggggcagccggagaacgcggtttatgatttcgaggacaagatcaactttgcggtgttcccttcgctgcagggtgggccccacaaccaccagatcggggctcttgccgtggcgctgaagcaggccgcgtcgcccgggtttaaggcctacgccaagcaggttaaggccaacgccgttgcgcttgggaattacttgatggggaaagggtacagtcttgtcactggaggcacggagaaccatcttgtcttgtgggatctcagacctcttggattgactgggaataaggtggagaaactctgtgatctctgcaacattactgttaataagaacgcagtttttggtgatagcagtgccttggcccccggtggagtgcgaattggggcccctgccatgacttctaggggtttggttgaaaaggactttgagcagattggtgagttccttcaccgtgctgtgactctcacactggagatccagaaggagcatggcaaacttctcaaggatttcaacaagggcctcgtcaacaacaaggccattgaagatctcaaagctgatgttgagaagttctctgccacatttgacatgcctggcttcctggtatctgaaatgaagtacaaggattag

SEQ ID NO: 80500 - protein, 471 aa, Glycine max
MDPVSVWGNTPLATVDPEIHDLIEKEKHRQCRGIELIASENFTSFAVIEALGSALTNKYSEGMPGNRYYGGNEFIDQIENLCRSRALQAFHLDAQSWGVNVQPYSGSPANFAAYTAVLNPHDRIMGLDLPSGGHLTHGYYTSGGKKISATSIYFESLPYKVNSTTGYIDYDRLEEKALDFRPKLIICGGSAYPRDWDYKRFREIADKCGALLLCDMAHTSGLVAAQEVNSPFEYCDIVTTTTHKSLRGPRAGMIFYRKGPKPPKKGQPENAVYDFEDKINFAVFPSLQGGPHNHQIGALAVALKQAASPGFKAYAKQVKANAVALGNYLMGKGYSLVTGGTENHLVLWDLRPLGLTGNKVEKLCDLCNITVNKNAVFGDSSALAPGGVRIGAPAMTSRGLVEKDFEQIGEFLHRAVTLTLEIQKEHGKLLKDFNKGLVNNKAIEDLKADVEKFSATFDMPGFLVSEMKYKD

SEQ ID NO: 80501 - DNA, 1416 bp, Glycine max
  CDS (1)..(1416)
atggatccagtaagcgtgtggggtaacacgcccttggcgacggtggatcccgagatccatgacctcatcgagaaggagaagcgccgtcaatgccgcggaatcgagctcatcgcctccgagaacttcacctccttcgccgtcatcgaggccctcggcagcgctctcacgaacaaatactccgagggcatgccgggcaaccgctactacggcggcaatgaatacatcgaccagatcgaaaacctctgccgctcacgcgccctccaagccttccacctcgacgcccaatcctggggcgtcaacgtccagccctactccggctcccctgccaacttcgccgcctacaccgccgtcctcaacccccacgaccgcatcatggggctggatctcccctccggcggccacctcacccacggctactacacctccggcggcaagaagatctccgccacctccatttacttcgagagcctcccttacaaagtaaactccaccaccggctacatcgactacgaccgcttggaggaaaaagccctagacttcaggcccaaattgataatctgcggtggcagcgcttaccctcgcgattgggactacaaacgcttcagggaaattgcggataagtgcggggcattgcttctctgcgacatggcgcacactagcggccttgtggccgcgcaggaagtgaacagccccttcgagtattgcgacattgtgaccaccaccacgcataagagcttgcggggtccacgggcggggatgatcttttaccggaagggcccgaagccgccgaagaaggggcagccggagaacgcggtttatgatttcgaggacaagatcaactttgcggtgttcccttcgctgcagggtgggccccacaaccaccagatcggggctcttgccgtggcgctgaagcaggccgcgtcgcccgggtttaaggcctacgccaagcaggttaaggccaacgccgttgcgcttgggaattacttgatggggaaagggtacagtcttgtcactggaggcacggagaaccatcttgtcttgtgggatctcagacctcttggattgactgggaataaggtggagaaactctgtgatctctgcaacattactgttaataagaacgcagtttttggtgatagcagtgccttggcccccggtggagtgcgaattggggcccctgccatgacttctaggggtttggttgaaaaggactttgagcagattggtgagttccttcaccgtgctgtgactctcacactggagatccagaaggagcatggcaaacttctcaaggatttcaacaagggcctcgtcaacaacaaggccattgaagatctcaaagctgatgttgagaagttctctgccacatttgacatgcctggcttcctggtatctgaaatgaagtacaaggattag

SEQ ID NO: 80502 - protein, 471 aa, Glycine max
MDPVSVWGNTPLATVDPEIHDLIEKEKRRQCRGIELIASENFTSFAVIEALGSALTNKYSEGMPGNRYYGGNEYIDQIENLCRSRALQAFHLDAQSWGVNVQPYSGSPANFAAYTAVLNPHDRIMGLDLPSGGHLTHGYYTSGGKKISATSIYFESLPYKVNSTTGYIDYDRLEEKALDFRPKLIICGGSAYPRDWDYKRFREIADKCGALLLCDMAHTSGLVAAQEVNSPFEYCDIVTTTTHKSLRGPRAGMIFYRKGPKPPKKGQPENAVYDFEDKINFAVFPSLQGGPHNHQIGALAVALKQAASPGFKAYAKQVKANAVALGNYLMGKGYSLVTGGTENHLVLWDLRPLGLTGNKVEKLCDLCNITVNKNAVFGDSSALAPGGVRIGAPAMTSRGLVEKDFEQIGEFLHRAVTLTLEIQKEHGKLLKDFNKGLVNNKAIEDLKADVEKFSATFDMPGFLVSEMKYKD

SEQ ID NO: 80503 - DNA, 1767 bp, Zea mays
  CDS (1)..(1767)
atggatctctcgcggcccacatcgtcggacctctcgctcgggctccactctcacggtcacgcccacgcccacgctcgcaggcacgcggtagccgcgccgctgcgcctgttcgacgacgcggaggagccgaagccggagcgcgtcgtggccggagaggccgacgcggagagggatgacgaggacgggggcgaccagcacttctccctcctcgggcactccctcttcgtcaagcgcccgcgccgcgccggcaacggcggcgggggcggagagacgtcatcctgctcgtccacgtccgcggcgcttcgccctgccaagcgacaggcgacgggggagggcagcggcgcagatctggagacccgccgcgccgcggtccgcgcctggggcaatcagtcgctggcggaggccgacccggacgtgcactcgctgatggagcaggagttggaccgccaggtgcgaggcatcgagctcatagcgtcggaaaacttcgtctgccgcgcggtgctcgatgcactcggcagccacctcactaacaagtactccgagggggccccgggtgctcgctactacggcgggaatcagcacatcgacgccatcgaacggctctgccatgagcgcgctctcaccgccttcggtctcgaccctgcctgctggggcgtcaacgtgcagccctactcgtgcacgtctgccaacttggctgtctacactgggctccttcaacccaaggaccgcatcatggggctggagccaccgtcgggcggccatgttagccatggttactacacgcccagtggcaagaaggtgtcaggtgcctctattttcttcgagagcatgtcgtacaaggtgaacccacagactgggtatattgattacgacaagcttgaagaaagagcaatggatttccaccctaaaattctcatctgtggtgggagctcttaccccagagagtgggactttgcacggatgagattgattgctgataagtgtggtgcggtgcttctttgcgacatggcacatatcagtgggcttgtcgcagcaaaggaatgccgtagccctttcgactactgtgatgttgttacgtcaactactcacaagaatcttaggggccctagaggtggtataatattcttcaggaaagggaaaaatttaaggaaacgagctggatctttttctcaaggagatgagaatgaatatgacttcgaggataggataaattttggtgttttcccttcaatgcaaggagggccccataataatcatattgctggcttggctataactctgaagcaggtagcaacttctgaatataaagcatacattcaacaagtcaagaaaaatgctcaggctttggcatcagctttgatcagaagaaaatgcagattggttacaggtggcacagataatcacttggtactttgggacctcagaactcttggcttgactggcaagatcttcgagaaggtttgtgaggcatgccacatatctgtcaacaagacaccaatttatggagataatggctcgatatcgccaggtggtgtgcggattggaacacctgcaatgactactagaggttgcttagaagaggacttcgaggtgattgcagacttcctcataagggctactcaaattgctaacaatgttctgaaagaacatggcaaagtgcaaaaggagtttctaagaggcctacagaacaataatgatgttatagaactccgaaatcaggttgaggcatttgcgtcacagtttgcgatgccaggttttgatgtatga

SEQ ID NO: 80504 - protein, 588 aa, Zea mays
MDLSRPTSSDLSLGLHSHGHAHAHARRHAVAAPLRLFDDAEEPKPERVVAGEADAERDDEDGGDQHFSLLGHSLFVKRPRRAGNGGGGGETSSCSSTSAALRPAKRQATGEGSGADLETRRAAVRAWGNQSLAEADPDVHSLMEQELDRQVRGIELIASENFVCRAVLDALGSHLTNKYSEGAPGARYYGGNQHIDAIERLCHERALTAFGLDPACWGVNVQPYSCTSANLAVYTGLLQPKDRIMGLEPPSGGHVSHGYYTPSGKKVSGASIFFESMSYKVNPQTGYIDYDKLEERAMDFHPKILICGGSSYPREWDFARMRLIADKCGAVLLCDMAHISGLVAAKECRSPFDYCDVVTSTTHKNLRGPRGGIIFFRKGKNLRKRAGSFSQGDENEYDFEDRINFGVFPSMQGGPHNNHIAGLAITLKQVATSEYKAYIQQVKKNAQALASALIRRKCRLVTGGTDNHLVLWDLRTLGLTGKIFEKVCEACHISVNKTPIYGDNGSISPGGVRIGTPAMTTRGCLEEDFEVIADFLIRATQIANNVLKEHGKVQKEFLRGLQNNNDVIELRNQVEAFASQFAMPGFDV

SEQ ID NO: 80505 - DNA, 1416 bp, Zea mays
  CDS (1)..(1416)
atggacaacgtggaggagtgggggctgaggccgctggccgaggtcgacccggaggtgtacgacctaatcgagcgcgagaagcggcggcagcgagcgggtatcgagctcatcgcatcggagaacttcacctcgctcgctgtcatggaggcgctgggctccccgctcaccaacaagtactcggagggcatgccgggggcgcgctactacggcggcaacgaggtcatcgacgaaatcgaggagctctgccggacccgcgcgctcgccgccttccacctcgaccccgcccgctggggcgtcaacgtgcagccctactcggggtcccccgccaatttcgcggcatacacggggctgctccagccgaacgacaggatcatggggctcgacctgccgtccgggggccacctcacccacgggtactacacggcgagtggaaagaagatttctgcaacctccatctacttccagagcctgcccgataaggggagctccgacaccgggtacgtcgactacgataagctggaggaaaaggccatggatttccgccccaagcttatcatctgtggcggtagtgcatgccctcgggagtgggattacgccaggttcagggccatcgcagacaagtgcggggccatgttgctctgcgacatggctcatatcagtggtctcgttgctgcgcaggaggctttgaatccttttgaattctctgatgtggttaccactacgacccacaaaagtcttcgagggccaaggtctggtatgattttctacaggaagggcccaaagcctccaaaaaaaggccagcctgagggtgctctgtatgactacgaggacaagatcaactttgctgtgttcccgtcactccagggggggcctcacaatcaccaaattgctgctctagctgtagccttgaaacaggccatgtcacctggattcaaggcctatatccagcaggtcaaggcaaacacagtttcccttggtaaccatttgatgagtaagggctacaagttggttactgatggaacagagaaccaccttgttctctgggatctgcgccctcttggcttgactggcaataaagttgagatgctatgtgacctatgcaacattacactgaacaaaaatgctgtctttggtgacagcagtgcattatcacctggcggtgtgcgcattggtacacctgctatgacctcaaggggtttggttgagaaggacttcgtgcagattgccgagtaccttcaccgagctgtgaccatctgcttgagcatccaggcggagcatggcaagattctcaaggacttcaagaagggcttggtgcaaaacaaggacatagagaacctgagggcggaggtcgagaagttcgccacttcatttgacatgcctggcttcagggtgtctgacatgaagtacacagactag

SEQ ID NO: 80506 - protein, 471 aa, Zea mays
MDNVEEWGLRPLAEVDPEVYDLIEREKRRQRAGIELIASENFTSLAVMEALGSPLTNKYSEGMPGARYYGGNEVIDEIEELCRTRALAAFHLDPARWGVNVQPYSGSPANFAAYTGLLQPNDRIMGLDLPSGGHLTHGYYTASGKKISATSIYFQSLPDKGSSDTGYVDYDKLEEKAMDFRPKLIICGGSACPREWDYARFRAIADKCGAMLLCDMAHISGLVAAQEALNPFEFSDVVTTTTHKSLRGPRSGMIFYRKGPKPPKKGQPEGALYDYEDKINFAVFPSLQGGPHNHQIAALAVALKQAMSPGFKAYIQQVKANTVSLGNHLMSKGYKLVTDGTENHLVLWDLRPLGLTGNKVEMLCDLCNITLNKNAVFGDSSALSPGGVRIGTPAMTSRGLVEKDFVQIAEYLHRAVTICLSIQAEHGKILKDFKKGLVQNKDIENLRAEVEKFATSFDMPGFRVSDMKYTD

SEQ ID NO: 80507 - DNA, 1773 bp, Zea mays
  CDS (1)..(1773)
atggatctctcgcggcccacatcgtcagacctctcgctcgggctccactcgcacggtcacgcccacgcccacgctcgcaggcacgcggcagccgcgccgctgcgcctgttcgacgacgcggaggagccgaagccggagcgcctcggggccggagaggccgacgcggagagggacgacgaggacgggggcgaccagcacttctccctcctcgggcactccctctgcgtcaagcgcccgcgccgcgccggcaacggcggcgggggtgggggcggagagacgtcatcctgctcgtccacgtccccggcgctgcgccccgccaagcgacaggcgacgggggaagacagcggcgcagatctggagacccgccgcgccgcggtccgcgcctggggcaaccagtcgctggcggaggccgacccggacgtgcactcgctgatggagcaggagctggaccgccaggtgcgaggcatcgagctcatagcgtcggaaaacttcgtctgccgcgcggtgctcgatgcactcggcagccacctcaccaacaagtactccgagggggccccgggtgctcgctactacggcgggaatcagcacatcgacgccatcgaacggctctgccatgagcgcgccctcaccgccttcggtctcgaccctgcctgctggggcgtcaacgtgcagccctactcgtgcacgtctgccaacttggctgtctacactgggctccttcaacccaaggaccgcatcatggggctggagccaccgtcgggcggccatgttagccatggttactacacgcccagtggcaagaaggtgtcaggtgcctctattttcttcgagagcatgtcgtacaaggtgaacccacagactgggtatattgattacgacaagcttgaagaaagagcaatggatttccaccctaaaattctcatctgtggtgggagctcttaccccagagagtgggactttgcacggatgagattgattgctgataagtgtggtgcggtgcttctttgcgacatggcacatatcagtgggcttgtcgcagcaaaggaatgccgtagccctttcgactactgtgatgttgttacgtcaactactcacaagaatcttaggggccctagaggtggtataatattcttcaggaaagggaaaaatttaaggaaacgagctggatctttttctcaaggagatgagaatgaatacgacttcgaggataggataaattttggtgttttcccttcaatgcaaggagggccccataataatcatattgctggcttggctataactctgaagcaggtagcaacttctgaatataaagcatacattcaacaagtcaagaaaaatgctcaggctttggcatcagctttgatcagaagaaaatgcagatgggtaacaggtggcacagataatcacttagtactttgggacctcagaactcttggcttgactggcaagatcttcgagaaggtttgcgaggcatgccacatatctgtcaacaagacaccaatttatggagataatggctcgatatcgccaggtggtgtgcggattggaacacctgcaatgactactagaggttgcttagaagaggacttcgaggtgattgcagacttcctcataagggctactcaaattgctaacaatgttctgaaagaacatggcaaagtgcaaaaggagtttctaagaggcctacagaacaataatgatgttatagaactccgaaatcaggttgaggcatttgcgtcacagtttgcgatgccaggttttgatgtatga

SEQ ID NO: 80508 - protein, 590 aa, Zea mays
MDLSRPTSSDLSLGLHSHGHAHAHARRHAAAAPLRLFDDAEEPKPERLGAGEADAERDDEDGGDQHFSLLGHSLCVKRPRRAGNGGGGGGGETSSCSSTSPALRPAKRQATGEDSGADLETRRAAVRAWGNQSLAEADPDVHSLMEQELDRQVRGIELIASENFVCRAVLDALGSHLTNKYSEGAPGARYYGGNQHIDAIERLCHERALTAFGLDPACWGVNVQPYSCTSANLAVYTGLLQPKDRIMGLEPPSGGHVSHGYYTPSGKKVSGASIFFESMSYKVNPQTGYIDYDKLEERAMDFHPKILICGGSSYPREWDFARMRLIADKCGAVLLCDMAHISGLVAAKECRSPFDYCDVVTSTTHKNLRGPRGGIIFFRKGKNLRKRAGSFSQGDENEYDFEDRINFGVFPSMQGGPHNNHIAGLAITLKQVATSEYKAYIQQVKKNAQALASALIRRKCRWVTGGTDNHLVLWDLRTLGLTGKIFEKVCEACHISVNKTPIYGDNGSISPGGVRIGTPAMTTRGCLEEDFEVIADFLIRATQIANNVLKEHGKVQKEFLRGLQNNNDVIELRNQVEAFASQFAMPGFDV

SEQ ID NO: 80509 - DNA, 1767 bp, Zea mays
  CDS (1)..(1767)
atggatctctcgcggcccacatcgtcggacctctcgctcgggctccactctcacggtcacgcccacgcccacgctcgcaggcacgcggtagccgcgccgctgcgcctgttcgacgacgcggaggagccgaagccggagcgcgtcggggccggagaggccgacgcggagagggatgacgaggacgggggcgaccagcacttctccctcctcgggcactccctctgcgtcaagcgcccgcgccgcgccggcaacggcggcgggggcggagagacgtcatcctgctcgtccacgtccgcggcgcttcgccctgccaagcgacaggcgacgggggagggcagcggcgcagatctggagacccgccgcgccgcggtccgcgcctggggcaatcagtcgctggcggaggccgacccggacgtgcactcgctgatggagcaggagctggaccgccaggtgcgaggcatcgagctcatagcgtcggaaaacttcgtctgccgcgcggtgctcgatgcactcggcagccacctcactaacaagtactccgagggggccccgggtgctcgctactacggcgggaatcagcacatcgacgccatcgaacggctctgccatgagcgcgctctcaccgccttcggtctcgaccctgcctgctggggcgtcaacgtgcagccctactcgtgcacgtctgccaacttggctgtctacactgggctccttcaacccaaggaccgcatcatggggctggagccaccgtcgggcggccatgttagccatggttactacacgcccagtggcaagaaggtgtcaggtgcctctattttcttcgagagcatgtcgtacaaggtgaacccacagactgggtatattgattacgacaagcttgaagaaagagcaatggatttccaccctaaaattctcatctgtggtgggagctcttaccccagagagtgggactttgcacggatgagattgattgctgataagtgtggtgcggtgcttctttgcgacatggcacatatcagtgggcttgtcgcagcaaaggaatgccgtagccctttcgactactgtgatgttgttacgtcaactactcacaagaatcttaggggccctagaggtggtataatattcttcaggaaagggaaaaatttaaggaaacgagctggatctttttctcaaggagatgagaatgaatacgacttcgaggataggataaattttggtgttttcccttcaatgcaaggagggccccataataatcatattgctggcttggctataactctgaagcaggtagcaacttctgaatataaagcatacattcaacaagtcaagaaaaatgctcaggctttggcatcagctttgatcagaagaaaatgcagattggttacaggtggcacagataatcacttagtactttgggacctcagaactcttggcttgactggcaagatcttcgagaaggtttgcgaggcatgccacatatctgtcaacaagacaccaatttatggagataatggctcgatatcgccaggtggtgtgcggattggaacacctgcaatgactactagaggttgcttagaagaggacttcgaggtgattgcagacttcctcataagggctactcaaattgctaacaatgttctgaaagaacatggcaaagtgcaaaaggagtttctaagaggcctacagaacaataatgatgttatagaactccgaaatcaggttgaggcatttgcgtcacagtttgcgatgccaggttttgatgtatga

SEQ ID NO: 80510 - protein, 588 aa, Zea mays
MDLSRPTSSDLSLGLHSHGHAHAHARRHAVAAPLRLFDDAEEPKPERVGAGEADAERDDEDGGDQHFSLLGHSLCVKRPRRAGNGGGGGETSSCSSTSAALRPAKRQATGEGSGADLETRRAAVRAWGNQSLAEADPDVHSLMEQELDRQVRGIELIASENFVCRAVLDALGSHLTNKYSEGAPGARYYGGNQHIDAIERLCHERALTAFGLDPACWGVNVQPYSCTSANLAVYTGLLQPKDRIMGLEPPSGGHVSHGYYTPSGKKVSGASIFFESMSYKVNPQTGYIDYDKLEERAMDFHPKILICGGSSYPREWDFARMRLIADKCGAVLLCDMAHISGLVAAKECRSPFDYCDVVTSTTHKNLRGPRGGIIFFRKGKNLRKRAGSFSQGDENEYDFEDRINFGVFPSMQGGPHNNHIAGLAITLKQVATSEYKAYIQQVKKNAQALASALIRRKCRLVTGGTDNHLVLWDLRTLGLTGKIFEKVCEACHISVNKTPIYGDNGSISPGGVRIGTPAMTTRGCLEEDFEVIADFLIRATQIANNVLKEHGKVQKEFLRGLQNNNDVIELRNQVEAFASQFAMPGFDV

SEQ ID NO: 80511 - DNA, 26 bp, Artificial sequence
  primer
atgttaaagcgtgaaatgaacattgc

SEQ ID NO: 80512 - DNA, 23 bp, Artificial sequence
  primer
ttatgcgtaaaccgggtaacgtg

SEQ ID NO: 80513 - protein, 613 aa, Artificial sequence
  consensus sequence
  Variant (2)..(10): Xaa in position 2 to 10 is any amino acid
  Variant (11)..(34): Xaa in position 11 to 34 is any or no amino acid
  Variant (36)..(37): Xaa in position 36 to 37 is any amino acid
  Variant (40)..(43): Xaa in position 40 to 43 is any amino acid
  Variant (51)..(52): Xaa in position 51 to 52 is any amino acid
  Variant (54)..(55): Xaa in position 54 to 55 is any amino acid
  Variant (57)..(58): Xaa in position 57 to 58 is any amino acid
  Variant (60)..(60): Xaa in position 60 is any amino acid
  Variant (63)..(64): Xaa in position 63 to 64 is any amino acid
  Variant (69)..(69): Xaa in position 69 is any amino acid
  Variant (72)..(72): Xaa in position 72 is any amino acid
  Variant (75)..(75): Xaa in position 75 is any amino acid
  Variant (81)..(83): Xaa in position 81 to 83 is any amino acid
  Variant (84)..(84): Xaa in position 84 is any or no amino acid
  Variant (86)..(87): Xaa in position 86 to 87 is any amino acid
  Variant (89)..(89): Xaa in position 89 is any amino acid
  Variant (91)..(93): Xaa in position 91 to 93 is any amino acid
  Variant (95)..(98): Xaa in position 95 to 98 is any amino acid
  Variant (100)..(100): Xaa in position 100 is any amino acid
  Variant (101)..(108): Xaa in position 101 to 108 is any or no amino acid
  Variant (113)..(113): Xaa in position 113 is any amino acid
  Variant (116)..(117): Xaa in position 116 to 117 is any amino acid
  Variant (118)..(119): Xaa in position 118 to 119 is any or no amino acid
  Variant (122)..(130): Xaa in position 122 to 130 is any amino acid
  Variant (132)..(132): Xaa in position 132 is any amino acid
  Variant (133)..(171): Xaa in position 133 to 171 is any or no amino acid
  Variant (173)..(175): Xaa in position 173 to 175 is any amino acid
  Variant (177)..(178): Xaa in position 177 to 178 is any amino acid
  Variant (180)..(180): Xaa in position 180 is any amino acid
  Variant (181)..(181): Xaa in position 181 is any or no amino acid
  Variant (186)..(186): Xaa in position 186 is any amino acid
  Variant (189)..(192): Xaa in position 189 to 192 is any amino acid
  Variant (193)..(214): Xaa in position 193 to 214 is any or no amino acid
  Variant (216)..(222): Xaa in position 216 to 222 is any amino acid
  Variant (223)..(225): Xaa in position 223 to 225 is any or no amino acid
  Variant (227)..(233): Xaa in position 227 to 233 is any amino acid
  Variant (235)..(238): Xaa in position 235 to 238 is any amino acid
  Variant (239)..(243): Xaa in position 239 to 243 is any or no amino acid
  Variant (245)..(246): Xaa in position 245 to 246 is any amino acid
  Variant (248)..(249): Xaa in position 248 to 249 is any amino acid
  Variant (251)..(251): Xaa in position 251 is any amino acid
  Variant (255)..(258): Xaa in position 255 to 258 is any amino acid
  Variant (260)..(263): Xaa in position 260 to 263 is any amino acid
  Variant (265)..(265): Xaa in position 265 is any amino acid
  Variant (269)..(270): Xaa in position 269 to 270 is any amino acid
  Variant (273)..(276): Xaa in position 273 to 276 is any amino acid
  Variant (278)..(278): Xaa in position 278 is any amino acid
  Variant (281)..(282): Xaa in position 281 to 282 is any amino acid
  Variant (285)..(285): Xaa in position 285 is any amino acid
  Variant (287)..(287): Xaa in position 287 is any amino acid
  Variant (289)..(292): Xaa in position 289 to 292 is any amino acid
  Variant (293)..(295): Xaa in position 293 to 295 is any or no amino acid
  Variant (297)..(302): Xaa in position 297 to 302 is any amino acid
  Variant (303)..(303): Xaa in position 303 is any or no amino acid
  Variant (306)..(306): Xaa in position 306 is any amino acid
  Variant (311)..(311): Xaa in position 311 is any amino acid
  Variant (319)..(319): Xaa in position 319 is any amino acid
  Variant (321)..(324): Xaa in position 321 to 324 is any amino acid
  Variant (325)..(354): Xaa in position 325 to 354 is any or no amino acid
  Variant (357)..(358): Xaa in position 357 to 358 is any amino acid
  Variant (363)..(364): Xaa in position 363 to 364 is any amino acid
  Variant (366)..(366): Xaa in position 366 is any amino acid
  Variant (369)..(370): Xaa in position 369 to 370 is any amino acid
  Variant (373)..(376): Xaa in position 373 to 376 is any amino acid
  Variant (378)..(381): Xaa in position 378 to 381 is any amino acid
  Variant (383)..(384): Xaa in position 383 to 384 is any amino acid
  Variant (386)..(391): Xaa in position 386 to 391 is any amino acid
  Variant (394)..(409): Xaa in position 394 to 409 is any amino acid
  Variant (410)..(425): Xaa in position 410 to 425 is any or no amino acid
  Variant (429)..(430): Xaa in position 429 to 430 is any amino acid
  Variant (432)..(433): Xaa in position 432 to 433 is any amino acid
  Variant (435)..(435): Xaa in position 435 is any amino acid
  Variant (437)..(439): Xaa in position 437 to 439 is any amino acid
  Variant (440)..(446): Xaa in position 440 to 446 is any or no amino acid
  Variant (448)..(451): Xaa in position 448 to 451 is any amino acid
  Variant (452)..(453): Xaa in position 452 to 453 is any or no amino acid
  Variant (455)..(458): Xaa in position 455 to 458 is any amino acid
  Variant (460)..(461): Xaa in position 460 to 461 is any amino acid
  Variant (465)..(466): Xaa in position 465 to 466 is any amino acid
  Variant (468)..(472): Xaa in position 468 to 472 is any amino acid
  Variant (473)..(480): Xaa in position 473 to 480 is any or no amino acid
  Variant (482)..(482): Xaa in position 482 is any amino acid
  Variant (484)..(484): Xaa in position 484 is any amino acid
  Variant (486)..(487): Xaa in position 486 to 487 is any amino acid
  Variant (489)..(489): Xaa in position 489 is any amino acid
  Variant (491)..(491): Xaa in position 491 is any amino acid
  Variant (494)..(518): Xaa in position 494 to 518 is any amino acid
  Variant (519)..(604): Xaa in position 519 to 604 is any or no amino acid
  Variant (606)..(612): Xaa in position 606 to 612 is any amino acid
DXXXXXXXXXXXXXXXXXXXXXXXXXXXXXXXXXEXXRQXXXXELIASENXXSXXVXXAXGSXXTNKYXEGXPGXRYYGGXXXXDXXEXLXXXRXXXXFXXXXXXXXXNVQPXSGXXXXANXXXXXXXXXPXXXXXXXXXXXXXXXXXXXXXXXXXXXXXXXXXXXXXXXXDXXXGXXLXXGGHLXHGXXXXXXXXXXXXXXXXXXXXXXXXXXYXXXXXXXXXXDXXXXXXXAXXXXXXXXXPXXIXXGXSAYXXXXDXXXXRXIADXXGAXXXXDXAHXXGLXAXGXXXXXXXPXXXXXXXVTXTTHKXLRGPRGGXIXXXXXXXXXXXXXXXXXXXXXXXXXXXXXXXXXXFPXXQGGPXXHXIAXXAVXXXXAXXXXFXXYXXXXXXNAXXXXXXXXXXXXXXXXXXXXXXXXXXXXXXXXGGTXXHXXLXDXXXXXXXXXXGXXXXXXLXXXXIXXNKNXXPXXXXXXXXXXXXXGXRXGXXAXTXRGXXXXXXXXXXXXXXXXXXXXXXXXXXXXXXXXXXXXXXXXXXXXXXXXXXXXXXXXXXXXXXXXXXXXXXXXXXXXXXXXXXXXXXXXXXXXXXXXXXXXXXXXXXXXXXXVXXXXXXXP

SEQ ID NO: 80514 - protein, 25 aa, Artificial sequence
  protein pattern
  Variant (3)..(3): Xaa in position 3 is any amino acid
  Variant (4)..(4): Xaa in position 4 is Phe, Leu or Met
  Variant (5)..(5): Xaa in position 5 is Gln, Ser or Thr
  Variant (9)..(9): Xaa in position 9 is Ala, Cys or Ser
  Variant (12)..(14): Xaa in position 12 to 14 is any amino acid
  Variant (15)..(15): Xaa in position 15 is any or no amino acid
  Variant (17)..(17): Xaa in position 17 is Phe or Tyr
  Variant (19)..(19): Xaa in position 19 is any amino acid
  Variant (21)..(24): Xaa in position 21 to 24 is any amino acid
GSXXXNKYXEGXXXXRXYXGXXXXD

SEQ ID NO: 80515 - protein, 19 aa, Artificial sequence
  protein pattern
  Variant (2)..(2): Xaa in position 2 is any or no amino acid
  Variant (4)..(4): Xaa in position 4 is any or no amino acid
  Variant (7)..(7): Xaa in position 7 is any or no amino acid
  Variant (10)..(10): Xaa in position 10 is Asn, Ser or Thr
  Variant (12)..(12): Xaa in position 12 is any amino acid
  Variant (16)..(16): Xaa in position 16 is Ala, Gly or Ser
  Variant (17)..(17): Xaa in position 17 is Ala or Gly
  Variant (18)..(18): Xaa in position 18 is any amino acid
  Variant (19)..(19): Xaa in position 19 is Ile or Val
VXTXTTXHKXLXGPRXXXX

SEQ ID NO: 80516 - protein, 11 aa, Artificial sequence
  protein pattern
  Variant (5)..(5): Xaa in position 5 is any amino acid
  Variant (7)..(7): Xaa in position 7 is Cys or Gly
  Variant (8)..(8): Xaa in position 8 is Ala, Ser, Thr or Val
  Variant (9)..(10): Xaa in position 9 to 10 is any amino acid
NVQPXSXXXXN

SEQ ID NO: 80517 - protein, 9 aa, Artificial sequence
  protein pattern
  Variant (2)..(2): Xaa in position 2 is Leu or Met
  Variant (4)..(4): Xaa in position 4 is Ala or Pro
  Variant (8)..(8): Xaa in position 8 is any amino acid
  Variant (9)..(9): Xaa in position 9 is Ala, Cys, Pro, Thr or Val
EXIXSENXX

SEQ ID NO: 80518 - protein, 20 aa, Artificial sequence
  protein pattern
  Variant (3)..(5): Xaa in position 3 to 5 is any or no amino acid
  Variant (9)..(10): Xaa in position 9 to 10 is any amino acid
  Variant (12)..(12): Xaa in position 12 is any amino acid
  Variant (13)..(13): Xaa in position 13 is Ile or Val
  Variant (14)..(14): Xaa in position 14 is Ala, Gly or Thr
  Variant (15)..(15): Xaa in position 15 is Ala or Gly
  Variant (16)..(16): Xaa in position 16 is any amino acid
  Variant (18)..(18): Xaa in position 18 is any amino acid
  Variant (19)..(19): Xaa in position 19 is Ala, Cys, Gly or Ser
  Variant (20)..(20): Xaa in position 20 is Phe, Leu or Met
FPXXXGGPXXHXXXXXAXXX

SEQ ID NO: 80519 - protein, 10 aa, Artificial sequence
  protein pattern
  Variant (2)..(2): Xaa in position 2 is Ala, Asp, Pro or Ser
  Variant (3)..(3): Xaa in position 3 is any amino acid
  Variant (8)..(8): Xaa in position 8 is Ser or Thr
LXXGGHLXHG

SEQ ID NO: 80520 - protein, 10 aa, Artificial sequence
  protein pattern
  Variant (2)..(2): Xaa in position 2 is Ile or Met
  Variant (5)..(5): Xaa in position 5 is any amino acid
  Variant (6)..(6): Xaa in position 6 is Ala or Ser
  Variant (9)..(9): Xaa in position 9 is Ile or Val
DXAHXXGLXA

SEQ ID NO: 80521 - DNA, 1122 bp, Escherichia coli
  CDS (1)..(1122): transl_table=11
atggttgctgaattgaccgcattacgcgatcaaattgatgaagtcgataaagcgctgctgaatttattagcgaagcgtctggaactggttgctgaagtgggcgaggtgaaaagccgctttggactgcctatttatgttccggagcgcgaggcatctatgttggcctcgcgtcgtgcagaggcggaagctctgggtgtaccgccagatctgattgaggatgttttgcgtcgggtgatgcgtgaatcttactccagtgaaaacgacaaaggatttaaaacactttgtccgtcactgcgtccggtggttatcgtcggcggtggcggtcagatgggacgcctgttcgagaagatgctgaccctctcgggttatcaggtgcggattctggagcaacatgactgggatcgagcggctgatattgttgccgatgccggaatggtgattgttagtgtgccaatccacgttactgagcaagttattggcaaattaccgcctttaccgaaagattgtattctggtcgatctggcatcagtgaaaaatgggccattacaggccatgctggtggcgcatgatggtccggtgctggggctacacccgatgttcggtccggacagcggtagcctggcaaagcaagttgtggtctggtgtgatggacgtaaaccggaagcataccaatggtttctggagcaaattcaggtctggggcgctcggctgcatcgtattagcgccgtcgagcacgatcagaatatggcgtttattcaggcactgcgccactttgctacttttgcttacgggctgcacctggcagaagaaaatgttcagcttgagcaacttctggcgctctcttcgccgatttaccgccttgagctggcgatggtcgggcgactgtttgctcaggatccgcagctttatgccgacatcattatgtcgtcagagcgtaatctggcgttaatcaaacgttactataagcgtttcggcgaggcgattgagttgctggagcagggcgataagcaggcgtttattgacagtttccgcaaggtggagcactggttcggcgattacgcacagcgttttcagagtgaaagccgcgtgttattgcgtcaggcgaatgacaatcgccagtaa

SEQ ID NO: 80522 - protein, 373 aa, Escherichia coli
MVAELTALRDQIDEVDKALLNLLAKRLELVAEVGEVKSRFGLPIYVPEREASMLASRRAEAEALGVPPDLIEDVLRRVMRESYSSENDKGFKTLCPSLRPVVIVGGGGQMGRLFEKMLTLSGYQVRILEQHDWDRAADIVADAGMVIVSVPIHVTEQVIGKLPPLPKDCILVDLASVKNGPLQAMLVAHDGPVLGLHPMFGPDSGSLAKQVVVWCDGRKPEAYQWFLEQIQVWGARLHRISAVEHDQNMAFIQALRHFATFAYGLHLAEENVQLEQLLALSSPIYRLELAMVGRLFAQDPQLYADIIMSSERNLALIKRYYKRFGEAIELLEQGDKQAFIDSFRKVEHWFGDYAQRFQSESRVLLRQANDNRQ

SEQ ID NO: 80523 - DNA, 1125 bp, Proteus mirabilis
  CDS (1)..(1125): transl_table=11
atggctgaagaattacaaaatttgcgagagcaaattgatcaggtggataaaacattgctttctttactcgccaaaagaatgcaattggtagcagaagtgggagaagttaaaaatcgccacgggttacctatctatgcaccagatagagaagccgcaatgcttgcttctcgacgtaatgaagcagaaaaaatgggtatttctgctgatttaattgaagatgttttacgtcgagtaatgagagagtcatatagcaaagaaaatgataaaggctttaaaacacttaatccccaattaggcaaaattgtcattgtgggggggaacggaaaaatggggagacttttttctcgtctctttacactttctggctatcaagtggaaagtcttgaagcggatgagtggcaaagtaaatctccggctatttttgcggatgctggtatggtgataatcagtgtcccaatccatttaacggttgatgttattgagcaattaccgcccttgccagaaaattgtttattggtagatttagcctcaatcaagcaagcgcctttagaggcgatgttaaaagcacataatggccctgttttaggactacatccaatgtttggtccagatgtgccaagtttagcaaaacaagttatcgcttattgtgaagggcgagatttatcacattttgagtggttgcttgagcaacttatggtgtggggagcaagagtagaggctattactgcacaagagcacgataaaaatatgagttttatccaagcattgcgacattttactacttttgcatatgggcaacatttggtgaaagagaatgtcgatttagccagtttattaagattatcttctcccatctatcgtttagagctagcgatgattggtaggctctttgctcaagatccacaattatatgccgatattattttatcttcacaagaaaacattaacttgatccgtagatatcatcattcattaggtgaagctatagccttattagatataaacacaaaagatgaatttattggctcatttaataatgtaagtgattggttcggtgattatgcttcacaatttatgaaagagagtggtgcgttattacaaaaagccaatgatagccggatttag

SEQ ID NO: 80524 - protein, 374 aa, Proteus mirabilis
MAEELQNLREQIDQVDKTLLSLLAKRMQLVAEVGEVKNRHGLPIYAPDREAAMLASRRNEAEKMGISADLIEDVLRRVMRESYSKENDKGFKTLNPQLGKIVIVGGNGKMGRLFSRLFTLSGYQVESLEADEWQSKSPAIFADAGMVIISVPIHLTVDVIEQLPPLPENCLLVDLASIKQAPLEAMLKAHNGPVLGLHPMFGPDVPSLAKQVIAYCEGRDLSHFEWLLEQLMVWGARVEAITAQEHDKNMSFIQALRHFTTFAYGQHLVKENVDLASLLRLSSPIYRLELAMIGRLFAQDPQLYADIILSSQENINLIRRYHHSLGEAIALLDINTKDEFIGSFNNVSDWFGDYASQFMKESGALLQKANDSRI

SEQ ID NO: 80525 - DNA, 1122 bp, Klebsiella pneumoniae subsp. pneumoniae MGH 78578
  CDS (1)..(1122): transl_table=11
atggttgctgaactgaccgcgttacgcgatcaaattgatgaagtggataaagcgttgcttagcctgctggctaagcgtctggagctggtggccgaagtcggcgaggtgaagagccagtatggcctgccgatttacgtcccggagcgcgagtcggcgatgctcgcctcccgacgtgaagaggcggctgcgctcggcgtaccaccggatctgatcgaggacgttctgcgtcgcgtgatgcgggaatcctattccagcgaaaacgacaaaggcttcaaaaccctgcagccgaatctgcggccggtggtgatcgtcggcggcggtgggcagatggggcgtctgtttgagaagatgttaacgctgtccggctaccaggtgcgtattctggaaaaaaacgattgggcccgggcggcggatatcgtcgccgatgccggcatggttatcgtcagcgtaccgattcacaccaccgtggagacgatcggcaggctgccgccccttccggcggattgcattctggttgaccttgcctcggtgaaagcggagccgctgcaggcgatgctggcggcgcatcagggcccggttcttggcctgcacccgatgttcggtccggacagcggcagcctggcgaagcaggtggtggtctattgtgatggccgccagccggaggcctatcagtggttcctcgaacaaatccaggtttggggcgcgcggctgcaccgcatcagcgccgttgagcacgatcagaacatggcctttattcaggcgctgcgccactttgccaccttcgcctatggcctgcacctggcggaagagaatgtacgtcttgagcaactgctggcgctctcgtcacccatttaccgactggagctggcgatggtaggccgtctgtttgcccaggatccgcagctgtacgccgatattattatgtcatcggaaaacaacctggcgctgattaagcgctactaccagcgtttcggcgaagcgatcggcctgctggagcagggcgataagcaggcgtttatcgacagcttccgtaaagtcgaacactggtttggcgattacgctcagcgtttccagagcgagagccgcacgctgctgcgtcaggcgaacgataatcggcagtaa

SEQ ID NO: 80526 - protein, 373 aa, Klebsiella pneumoniae subsp. pneumoniae MGH 78578
MVAELTALRDQIDEVDKALLSLLAKRLELVAEVGEVKSQYGLPIYVPERESAMLASRREEAAALGVPPDLIEDVLRRVMRESYSSENDKGFKTLQPNLRPVVIVGGGGQMGRLFEKMLTLSGYQVRILEKNDWARAADIVADAGMVIVSVPIHTTVETIGRLPPLPADCILVDLASVKAEPLQAMLAAHQGPVLGLHPMFGPDSGSLAKQVVVYCDGRQPEAYQWFLEQIQVWGARLHRISAVEHDQNMAFIQALRHFATFAYGLHLAEENVRLEQLLALSSPIYRLELAMVGRLFAQDPQLYADIIMSSENNLALIKRYYQRFGEAIGLLEQGDKQAFIDSFRKVEHWFGDYAQRFQSESRTLLRQANDNRQ

SEQ ID NO: 80527 - DNA, 1128 bp, Vibrio cholerae O1 biovar eltor str. N16961
  CDS (1)..(1128): transl_table=11
atggccgtagagttgaatcagttacgcgaccaaatcgatgaagtcgataagcagatggtggagctactggcgcgccgtctggcattggtggagcaggtcgggcaagtgaaaagtcgatatgggttaccgatttatgctcccgatcgtgaagcggcaatgctcgcttcacgtcgagcggaagcggaaagcaaaggtgttccgccccaactgattgaagatattttgcgccgaaccatgcgtgaatcctacgccagtgaaaaggactccggctttaaatgccttaatcctgagttacgttccgtggtgatcgtcggtggtaacggtcagcttgggcgactatttggccgtatgtttaaactctctggctatcaagtcaaagtgctgggcagccaagattgggacaaagcggatgaactgctcagtgatgctggcttagtggtggtcacggtacctatccatttgacgctcggtgttatcgaaaagctgcgccagttaccggacgattgcattttgtgcgatctcacctcaatcaaagccaagccgcttgccgccatgctacaagtgcacaaaggtccagtggttgggctgcaccctatgtttggtccagacgttccaagcttggcgaagcaggtgattgtttactgtgatggtcgaggcaatgaacactaccaatggctcttgcaacagtttgctatttggggcgcaagcttgtgccagattgatgcggatgaacatgatcgtggtatgacacttattcaagcactgcgccacttcacttcctttgcttatggcttgcatctgaccaaagagaacccgaacttggcacaactgctgaaactcagttcaccgatttaccgtttagagcttgccatggtcggacggctatttgggcaagatccccatctgtacggcgatattattctctcatcaccagaaaatattgagatgatccagcgttttcatcgctgcttaagcgatgcggttgagttggtgagcgcgggcgataaggcgagttttgtggctcaatttgaacgagttagccagtggtttggtgattattcacagcagtttatgcatgagagccaaaacttgctcaaacaagcgaatgatgcgatccacagaggttaa

SEQ ID NO: 80528 - protein, 375 aa, Vibrio cholerae O1 biovar eltor str. N16961
MAVELNQLRDQIDEVDKQMVELLARRLALVEQVGQVKSRYGLPIYAPDREAAMLASRRAEAESKGVPPQLIEDILRRTMRESYASEKDSGFKCLNPELRSVVIVGGNGQLGRLFGRMFKLSGYQVKVLGSQDWDKADELLSDAGLVVVTVPIHLTLGVIEKLRQLPDDCILCDLTSIKAKPLAAMLQVHKGPVVGLHPMFGPDVPSLAKQVIVYCDGRGNEHYQWLLQQFAIWGASLCQIDADEHDRGMTLIQALRHFTSFAYGLHLTKENPNLAQLLKLSSPIYRLELAMVGRLFGQDPHLYGDIILSSPENIEMIQRFHRCLSDAVELVSAGDKASFVAQFERVSQWFGDYSQQFMHESQNLLKQANDAIHRG

SEQ ID NO: 80529 - DNA, 1125 bp, Pasteurella multocida subsp. multocida str. Pm70
  CDS (1)..(1125): transl_table=11
gtggatacgttaaataagttaagaacacagattgatcaagttgatcgtcagttattacagcttttagcacagcgacttgagttagtgaaacaagtcggtgaagtcaagcatcaacaaggtctgccgatttatgtgccagaacgtgaagcggagatgctcaacgcccgccgtgcggaagctgaaacgttaggggtatctgctgatttaattgaagatgtattacgtcgtatcatgcgagaatcttatgcgcgggaaaaccaatttggttttaaaaccgtgaatccggcgatcaaaaaaatcgtgatcgtaggtgggggagggaaacttggtagcttgtttgcacgttatttcacattgtctggttactatgttgagattttagagcaacaggattggcaaagtgcggacaagattttgaacgaaacagatgtgattgttgtttcggtaccgatcgccaaaaccgtcgaaacaattaaacgtttgaagccttatttgacagataatatgctgttggtggatttaacttcagttaagcgtgcaccattacaagcgatgttagacgtgcacgctggcgcggtattaggtttacatccaatgtttggtccggatatcgccagcatggcaaaacaagtgattgtacgctgtgatggtcgttttgaatcacgttatcaatggctgatcacccaaatacaaatttggggggcaaaattctaccaagttgaggcgactgaacacgatcatagtatgacgtatgtacaagcgttgcgacacttttccacttttgctaatggcttacatttatcaaaacaaccggttcaattagcgaatttattggcactttcttcgccaatttattgcttagaattggcgatgattgggcgtttatttgcgcaagatgcagaactttatgccgatattattttagataagcctgaaaatctcgcggtcattgagagtttaaagcaaagttatgaagaaagtttggcattttttacccatggtgataagcaggcattcattgacagctttgaacaagttaaacaatggtttggtgaatactcggagcagtttctgaaagaaagtcgccagttgctccaacaagcaaatgattatcgacaaatttaa

SEQ ID NO: 80530 - protein, 374 aa, Pasteurella multocida subsp. multocida str. Pm70
MDTLNKLRTQIDQVDRQLLQLLAQRLELVKQVGEVKHQQGLPIYVPEREAEMLNARRAEAETLGVSADLIEDVLRRIMRESYARENQFGFKTVNPAIKKIVIVGGGGKLGSLFARYFTLSGYYVEILEQQDWQSADKILNETDVIVVSVPIAKTVETIKRLKPYLTDNMLLVDLTSVKRAPLQAMLDVHAGAVLGLHPMFGPDIASMAKQVIVRCDGRFESRYQWLITQIQIWGAKFYQVEATEHDHSMTYVQALRHFSTFANGLHLSKQPVQLANLLALSSPIYCLELAMIGRLFAQDAELYADIILDKPENLAVIESLKQSYEESLAFFTHGDKQAFIDSFEQVKQWFGEYSEQFLKESRQLLQQANDYRQI

SEQ ID NO: 80531 - DNA, 1122 bp, Escherichia coli O157:H7 EDL933
  CDS (1)..(1122): transl_table=11
atggttgctgaattgaccgcattacgcgatcaaattgatgaagtcgataaagcgctgctgaatttattagcgaagcgtctggaactggttgctgaagtgggcgaggtgaaaagccgctttggactgcctatttatgttccggagcgagaggcatctatgttggcctcgcgtcgtgcagaggcggaagctctgggtgtaccgccagatctgattgaggatgttttgcgtcgggtgatgcgtgaatcttactccagtgaaaacgacaaaggatttaaaacgctttgtcctgcgttacgcccggtagttatcgttggcggcggcggtcagatgggacgtctgttcgagaagatgctgacactctcgggttatcaggtgcggattctggagcaacatgactgggatcgagcggctgatattgttgccgatgccggaatggtgattgttagtgtgccaatccacgttactgagcaagttattggcaaattaccgcctttaccgaaagattgtattctggttgatctggcatcagtgaaaaatggaccattacaggccatgctggcggcgcacgatggcccggtactggggttacacccaatgttcggtccggacagcggtagcctggcaaagcaagttgtggtctggtgtgatggacgtaaaccggaagcataccaatggtttctggagcaaattcaggtctggggcgctcggttgcatcgtattagcgccgtcgagcacgatcagaatatggcgtttattcaggcactgcgccactttgctacttttgcttacgggctgcacctggcagaagaaaatgttcagcttgagcaacttctggcgctctcttcgccgatttaccgccttgagctggcgatggtcgggcgactgttcgctcaggatccgcagctttatgccgacattattatgtcgtcagagcgtaatctggcgttaatcaaacgttactataagcgtttcggcgaggcgattgagttgctggagcagggcgataagcaggcgtttattgacagtttccgcaaggtggagcactggttcggcgattacgcacagcgttttcagagtgaaagccgcgtgttattgcgtcaggcgaatgacaatcgccagtaa

SEQ ID NO: 80532 - protein, 373 aa, Escherichia coli O157:H7 EDL933
MVAELTALRDQIDEVDKALLNLLAKRLELVAEVGEVKSRFGLPIYVPEREASMLASRRAEAEALGVPPDLIEDVLRRVMRESYSSENDKGFKTLCPALRPVVIVGGGGQMGRLFEKMLTLSGYQVRILEQHDWDRAADIVADAGMVIVSVPIHVTEQVIGKLPPLPKDCILVDLASVKNGPLQAMLAAHDGPVLGLHPMFGPDSGSLAKQVVVWCDGRKPEAYQWFLEQIQVWGARLHRISAVEHDQNMAFIQALRHFATFAYGLHLAEENVQLEQLLALSSPIYRLELAMVGRLFAQDPQLYADIIMSSERNLALIKRYYKRFGEAIELLEQGDKQAFIDSFRKVEHWFGDYAQRFQSESRVLLRQANDNRQ

SEQ ID NO: 80533 - DNA, 1122 bp, Salmonella typhimurium LT2
  CDS (1)..(1122): transl_table=11
atggttgctgaattgaccgcattacgcgatcaaatagatgatgtcgataaagcgttgttgaatttactggctaagcgcctggaactggttgccaaagtcggcgaggtgaaaagccgttttggcctgcctatttacgtgccggagcgtgaggcctctatgctggcttcacgacgggcggaagcagaagcgatcggtgtcccgcccgatctcattgaagatgtcctgcgccgggtaatgcgtgaatcttactccagcgaaaatgataaggggttcaaaacgctttgtccttctctgcgtccggtcgtcattgtgggcggcggcggacagatggggcgtctgtttgaaaaaatgctcacgctgtcgggctatcaggtccgtattctggaacagcaggactggccgcgcgccagggacattgtcgccgatgccggaatggtgatcgtcagcgtgccgattcatgttactgaacaggtcatagcgcaactgccgcccctgccgtccgactgtattctggtcgatctggcatcggtgaaaagcggtccgttgcaggcaatgttggcggcccatgatggccccgtgttgggcttgcatccgatgtttggtccggacagcgggagcctggcgaagcaggtggtggtctggtgtgacgggcgtcaaccggaagcgtatcagtggttccttgagcaaatccaggtgtggggcgcgcggttgcatcgaattagcgctgtcgagcacgatcagaacatggcttttatccaggcgttgcgccactttgctaccttcgcttatgggctgcatctggcggaagagaacgtccagcttgagcagcttctggcgctatcatcgccgatttatcgactggagctggcgatggtcgggcgtctgttcgcccaggacccgcaactgtatgcggacattattatgtcgtcggagcgcaatctggcgcttatcaagcgttactataaacgttttggcgatgcgatcgggttactggaacagggtgataagcaggcttttatcgacagttttcgcaaagttgaacactggtttggcgattatgccagacgcttccagaatgaaagccgtgtgttattgcgtcaggcgaatgacagccgaccataa

SEQ ID NO: 80534 - protein, 373 aa, Salmonella typhimurium LT2
MVAELTALRDQIDDVDKALLNLLAKRLELVAKVGEVKSRFGLPIYVPEREASMLASRRAEAEAIGVPPDLIEDVLRRVMRESYSSENDKGFKTLCPSLRPVVIVGGGGQMGRLFEKMLTLSGYQVRILEQQDWPRARDIVADAGMVIVSVPIHVTEQVIAQLPPLPSDCILVDLASVKSGPLQAMLAAHDGPVLGLHPMFGPDSGSLAKQVVVWCDGRQPEAYQWFLEQIQVWGARLHRISAVEHDQNMAFIQALRHFATFAYGLHLAEENVQLEQLLALSSPIYRLELAMVGRLFAQDPQLYADIIMSSERNLALIKRYYKRFGDAIGLLEQGDKQAFIDSFRKVEHWFGDYARRFQNESRVLLRQANDSRP

SEQ ID NO: 80535 - DNA, 1122 bp, Shigella flexneri 2a str. 301
  CDS (1)..(1122): transl_table=11
atggttgctgaattgaccgcattacgcgatcaaattgatgaagtcgataaagcgctgctgaatttattagcgaagcgtctggaactggttgctgaagtgggcaaggtgaaaagccgctttggactgcctatttatgttccggagcgcgaggcatctatgttggcctcgcgtcgtgcagaggcggaagctctgggtgtaccgccagatctgattgaggatgttttgcgtcgggtgatgcgtgaatcttactccagtgaaaacgacaaaggatttaaaacactttgtccgtcactgcgtccggtggttatcgtcggcggtggcggtcagatgggacgcctgttcgagaagatgctgacactatcgggttatcaggtgcggattctggagcaacatgactgggatcgagcggctgatattgttgccgatgccggaatggtgattgttagtgtgccaatccacgttactgagcaagttatcggcaaattaccgcctttaccgaaagattgtattctggttgatctggcatcagtgaaaaatggaccattacaggccatgctggcggcgcacgatggcccggtactggggttacacccgatgttcggcccggacagcggtagcctggcaaagcaagttgtggtctggtgtgatggacgtaagccggaagcataccaatggtttctggagcaaattcaggtctggggcgctcggttgcatcgtattagcgctgtcgagcacgatcagaatatggcgtttattcaggctctgcgccactttgctacttttgcttacgggctgcacctggcagaagaaaatgttcagcttgagcaacttctggcgctctcttcgccgatttaccgccttgagctggcgatggtcgggcgactgtttgctcaggatccgcagctttatgccgacatcattatgtcgtcagagcgtaatctggcgttaatcaaacgttactataagcgtttcggcgaggcgattgagttgctggagcagggcgataagcaggcgtttattgacagtttccgcaaggtggagcactggttcggcgattacgcacagcgttttcagagtgaaagccgcgtgttattgcgtcaggcgaatgacaatcgccagtaa

SEQ ID NO: 80536 - protein, 373 aa, Shigella flexneri 2a str. 301
MVAELTALRDQIDEVDKALLNLLAKRLELVAEVGKVKSRFGLPIYVPEREASMLASRRAEAEALGVPPDLIEDVLRRVMRESYSSENDKGFKTLCPSLRPVVIVGGGGQMGRLFEKMLTLSGYQVRILEQHDWDRAADIVADAGMVIVSVPIHVTEQVIGKLPPLPKDCILVDLASVKNGPLQAMLAAHDGPVLGLHPMFGPDSGSLAKQVVVWCDGRKPEAYQWFLEQIQVWGARLHRISAVEHDQNMAFIQALRHFATFAYGLHLAEENVQLEQLLALSSPIYRLELAMVGRLFAQDPQLYADIIMSSERNLALIKRYYKRFGEAIELLEQGDKQAFIDSFRKVEHWFGDYAQRFQSESRVLLRQANDNRQ

SEQ ID NO: 80537 - DNA, 1140 bp, Shewanella oneidensis MR-1
  CDS (1)..(1140): transl_table=11
atgaatgaaaaaaccacatccgaattagaacatcttcgaggactgatcgacggtgtcgatcagcaattgctgcatttactgcgtaaacgcttagatttagtcgcccaagtcggcacggtaaagcacgctgcaggattacccatttatgcaccacagcgtgaagcggcaatgctggcaaaacgccgtgaagaagcccaaaccatgggcattgcgccacaattgattgaagatattttacgtcgcctaatgcgtgaatcctatcttaatgaaaaggatgttggctttaagcaagtcaagaatgatttaggttcggtagttatagtgggcggtaaaggccagcttggcgggctgtttcaacaaatgctgagactgtcaggttatcaagtgaaagtgctcgataaagatgattggcaacaagcggaatgcttatttgccgatgctggattggtattagtgacagtgcctattgccatcacctgcgacattatccgtgaaaagctaactcagttaccacgggactgtattctagccgatttaacctccatcaagacggaacccatgcaggcgatgttggccgctcataaggggcctgttgtcggctttcatccgatgtttggtccagatgtcggtagcttagctaagcaggttgtggtggtgtgtcatgggcgcgaagctgataaataccaatggttactcgaacaaattgccatttggggcgcacggattgtcgaagctgagcctgaatgtcacgataatgcgatgcaactggtgcaggcgatgcgccatttctcaacctttgtctatggcttaaatctttgcaaagaagaggcggatatagagactttattgaaatttagctcgccaatctaccgcttagagttagcgatggtgggccgtttatttgcccaaagcccggagctttacgctgatattatttttgctcagcaggagagccagcatgcgattggcgattatctggataactatcgcgaagccttagaattgctgaaacggggcgatagagaggagtttatcaatcagttccaaatggttgccaagtggtttggtgattttgcaccgcagtttcagcgcgaaagtcgcatgatgctgcaatcggtaagtgatatgaaaacgaactga

SEQ ID NO: 80538 - protein, 379 aa, Shewanella oneidensis MR-1
MNEKTTSELEHLRGLIDGVDQQLLHLLRKRLDLVAQVGTVKHAAGLPIYAPQREAAMLAKRREEAQTMGIAPQLIEDILRRLMRESYLNEKDVGFKQVKNDLGSVVIVGGKGQLGGLFQQMLRLSGYQVKVLDKDDWQQAECLFADAGLVLVTVPIAITCDIIREKLTQLPRDCILADLTSIKTEPMQAMLAAHKGPVVGFHPMFGPDVGSLAKQVVVVCHGREADKYQWLLEQIAIWGARIVEAEPECHDNAMQLVQAMRHFSTFVYGLNLCKEEADIETLLKFSSPIYRLELAMVGRLFAQSPELYADIIFAQQESQHAIGDYLDNYREALELLKRGDREEFINQFQMVAKWFGDFAPQFQRESRMMLQSVSDMKTN

SEQ ID NO: 80539 - DNA, 1128 bp, Vibrio vulnificus CMCP6
  CDS (1)..(1128): transl_table=11
atggcagttgaactgaacgcattgcgtgaacagattgatgcagtagacaaacagatgttggagctattggctcagcgcttggcattggtagagcaagttggccatgtgaaaagccaacatggcttaccgatttatgcacccgatagagaagcggcgatgctggcttctcgtcgtgcagaagccgaaaaaatcggtgtgccaccacagcttattgaagatattttgcgacgtaccatgcgcgaatcttatgccagtgaaaaagactccggttttaaatgtttgaatcctgagctgcgctctgtggtaattattggcggccatggtcaattaggtggcctgtttgctcgcatgtttaccctctcgggttaccaggtcaaaatcttaggcagtaaggattggcacctcgctgatgagatattggatggggcaggattggtggtggttaccgtgccgattcatttaacccaaggagtgattgaaaagctgacccaactaccatcggattgcatcttgtgtgaccttacttcgatcaagtcgaagccgctgaaaaccatgctcgatgtgcactctgggccggttgttggtttgcaccctatgtttggtcccgatgtgccgagtttagccaagcaagtgattgtctactgtgatggtcgaggtgctgagcaatatcagtggttactgcagcagtttaagatttggggggcaagcttgtgccaaattgaggccagcgaacacgaccatggcatgacgttaattcaagcgttaaggcactttacgtcctttgcgtacggcatgcatttgagtcaggaaaatccaagtctcgataaactgctgaaactgagctcgcctatttaccgtcttgagttagcgatggtagggcgtctgtttgcccaagatccaaacttgtatggcgacattattctttcgtcgcaagagaacatcgacatgatcaagcgtttccatcgccgctttggcgaggcactagagatgttagatcagcacgataaagcgcgttttgttgaacgtttcacgcaagtgagtgattggtttggggggtattcgcagcagtttatggcggaaagccaaaatttactcaaacaagcgaatgacaacttgcatcgtgattaa

SEQ ID NO: 80540 - protein, 375 aa, Vibrio vulnificus CMCP6
MAVELNALREQIDAVDKQMLELLAQRLALVEQVGHVKSQHGLPIYAPDREAAMLASRRAEAEKIGVPPQLIEDILRRTMRESYASEKDSGFKCLNPELRSVVIIGGHGQLGGLFARMFTLSGYQVKILGSKDWHLADEILDGAGLVVVTVPIHLTQGVIEKLTQLPSDCILCDLTSIKSKPLKTMLDVHSGPVVGLHPMFGPDVPSLAKQVIVYCDGRGAEQYQWLLQQFKIWGASLCQIEASEHDHGMTLIQALRHFTSFAYGMHLSQENPSLDKLLKLSSPIYRLELAMVGRLFAQDPNLYGDIILSSQENIDMIKRFHRRFGEALEMLDQHDKARFVERFTQVSDWFGGYSQQFMAESQNLLKQANDNLHRD

SEQ ID NO: 80541 - DNA, 1128 bp, Vibrio parahaemolyticus RIMD 2210633
  CDS (1)..(1128): transl_table=11
atggcagttgaacttaacgcattgcgcgatcagattgatgcagtcgacaaacaaatgcttgagcttttggctcagcgtttagagctggtagaaaaagttggggaagtaaaaagtgaacacggtttgcctatttacgcccctgatcgtgaagcggcgatgctggcgtctcgccgagcagaagctgagaaaatgggtgtcccacctcagcttatcgaagacattcttcgtcgtaccatgcgtgagtcttatgccagtgagaaagattccggttttaagtgtttgaacccagaattacgttcagtggtcattattggtggtaatggccagttaggcggtctgtttggccgcatgttcaagctatcaggttaccaagtgaaagttttgggtagcaaagattggggtcgtgcggatgagattctcaaagacgcaggcttagtggttgtcaccgtaccgattcacctgacggaaggggtgattgaaaaactgggcaacttgccacaagactgcattctgtgtgacctgacgtctatcaagtcaaagccgctgcaagcgatgttgaatgtgcacgctggacctgtggttggtttacacccgatgttcggccctgatgttcctagccttgccaagcaggtgattgtttactgtgatggacgtggtaaagagcaataccaatggttgttgcaacagtttggtatttggggcgcgagcttgtgtcagattgatgcgcaagagcacgatcatggcatgacgttaatccaagcgctgcgccacttcacgtcatttgcttacggaatgcaccttagcaaagagaacccgaatattgagcaactgttgaaactgagctcgccaatctaccgtcttgaattggcaatggtggggcgtctgtttggtcaggatccaaatctctacggtgacatcattctcgcatcgcaagagaacatcgatatgatcaagcgtttccatcaacgctttggggaagcgcttgcgattttagacagcaaagacaaggctaaatttgtagaaagttttgagcaggtgagtgattggtttggccaatactctcagcaatttatgaacgagagccaaaacttactgaaacaggcgaatgacaatatccatcgtggataa

SEQ ID NO: 80542 - protein, 375 aa, Vibrio parahaemolyticus RIMD 2210633
MAVELNALRDQIDAVDKQMLELLAQRLELVEKVGEVKSEHGLPIYAPDREAAMLASRRAEAEKMGVPPQLIEDILRRTMRESYASEKDSGFKCLNPELRSVVIIGGNGQLGGLFGRMFKLSGYQVKVLGSKDWGRADEILKDAGLVVVTVPIHLTEGVIEKLGNLPQDCILCDLTSIKSKPLQAMLNVHAGPVVGLHPMFGPDVPSLAKQVIVYCDGRGKEQYQWLLQQFGIWGASLCQIDAQEHDHGMTLIQALRHFTSFAYGMHLSKENPNIEQLLKLSSPIYRLELAMVGRLFGQDPNLYGDIILASQENIDMIKRFHQRFGEALAILDSKDKAKFVESFEQVSDWFGQYSQQFMNESQNLLKQANDNIHRG

SEQ ID NO: 80543 - DNA, 1134 bp, Candidatus Blochmannia floridanus
  CDS (1)..(1134): transl_table=11
atgatggatagattaaattttttacgtagtgaaattgataaaatagatcaaagtttgttaaatttattatctaaaagattatcattagtttctcaggtaggtgaaattaaaagtcaacttggtttatttatttatgatccggaaagagaaaagatgattttatctcaaagaaaacaggaagcattaaaattaggtatttctcctaatttggtcagagatatattacgtcgaattatgcgagagtcttattcttatgaaaatgaaaaaggatttaaaaagttatatccaagttctaggccagtggtgattattgggggtaatggccgaatgggacaatttttctttaaaatgttaactttatcaggatatcaagtaagaattttagatcaagatgattggatacatgctaagtctatattaactaatgttggtgtagtgtttattagtgtacctatttattcggtaatcaaagtaattaatcaattacctcatttatcgaatgattgtattatcgtggatttgtcttctgtaaaaaagagttctttaacagctatattaaagattcatactggaccagttttaggattacatccaatgtttagtccggatactactattaccgctagtatgataaaaaaagttgtaatttgttgtgacggtcgttatcctcaagaatatcaatggttattgcagcagttaaaattatggggagcaaaagtatattattgtaattttattgaacatgataagtatatgagttttatacaaagtttatgtcattttacaatttttgttatgggatatcatttgtttaaagaaaatattgatttaaaaaaaattttatctttttcttccccaatgtttcaattggaattaatattaataggccgattatttacacaaaatcctcaattatatgcagatattattatgtcatctaaaaataatattattgtaattaagcgttattataaaagattaggaaaaatgttaatgttattggaacaaaataataaagaagaatttataaatcaatttaaaaaaattaaatgttggttagatagttatgctggtatttttttaaaagatagctcaaatttattaaaatatattaatgatattcaggaatattaa

SEQ ID NO: 80544 - protein, 377 aa, Candidatus Blochmannia floridanus
MMDRLNFLRSEIDKIDQSLLNLLSKRLSLVSQVGEIKSQLGLFIYDPEREKMILSQRKQEALKLGISPNLVRDILRRIMRESYSYENEKGFKKLYPSSRPVVIIGGNGRMGQFFFKMLTLSGYQVRILDQDDWIHAKSILTNVGVVFISVPIYSVIKVINQLPHLSNDCIIVDLSSVKKSSLTAILKIHTGPVLGLHPMFSPDTTITASMIKKVVICCDGRYPQEYQWLLQQLKLWGAKVYYCNFIEHDKYMSFIQSLCHFTIFVMGYHLFKENIDLKKILSFSSPMFQLELILIGRLFTQNPQLYADIIMSSKNNIIVIKRYYKRLGKMLMLLEQNNKEEFINQFKKIKCWLDSYAGIFLKDSSNLLKYINDIQEY

SEQ ID NO: 80545 - DNA, 1122 bp, Photorhabdus luminescens subsp. laumondii TTO1
  CDS (1)..(1122): transl_table=11
atggcggctgaattatctcaattgcgggataagattgatgaagtggataaagctttgctgggcttgctggcaaagcgtctggaattggttgcagagattggtgaggtaaaaagtcagaatgggctgtcaatttatgcacctgacagagaaatggcgatgcttgcttcacgtcggcaggaggccgaagagtttggtgttccaccggatttaattgaggatattctgcgccgcattatgcgggagtcttataccagtgagaataacaaagggtttaaaacgctttgccctcaattggggccgatagtcattgttggtggcttgggcaaaatggggaaactatttggccgtttgttaactttgtctggttatgaagtcagaaatctggaaccacaagattggcctaacgcggaacaaattctggcgggagtggggatggtgattatcagtgtacctattcatttgacagaagaagttattcgccgtttaccgccattacctgaccattgcattttggtggacttagcgtccgttaaacagcagccattacaggctatgcttgatgtgcataaaggtccagtgttgggattacatcctatgtttgggccggatgtcggtagtttggtaaaacaagttgttgtttactgtgacggacgtcaagaggaagcttatcaatggtttttagaacagttgttaatttggggggcttgcttgcatcaaatgagccctgaacagcatgataaaaacatgagctttattcaggcgttgcgccatttcacgacatttgcttatgggcaacatctcgcacaggaaggggcggatttacaacaactgttatcaatatcttcacctatttaccgtttggaattgatcatggtcgggcgcttatttgcgcaagatccccagctctacgcggatattattatgtcatcaccagagaatattgatcttatacgccgttatcatcaaagttttggacaagcgttagagatattggaaagccaggacaaacgggcttttgtcagcagttttgaagatgttagtgaatggtttggtgattatgcacctcgttttatgagggaaagcagggtattgcttcaacaagcgaatgatagtcgccaataa

SEQ ID NO: 80546 - protein, 373 aa, Photorhabdus luminescens subsp. laumondii TTO1
MAAELSQLRDKIDEVDKALLGLLAKRLELVAEIGEVKSQNGLSIYAPDREMAMLASRRQEAEEFGVPPDLIEDILRRIMRESYTSENNKGFKTLCPQLGPIVIVGGLGKMGKLFGRLLTLSGYEVRNLEPQDWPNAEQILAGVGMVIISVPIHLTEEVIRRLPPLPDHCILVDLASVKQQPLQAMLDVHKGPVLGLHPMFGPDVGSLVKQVVVYCDGRQEEAYQWFLEQLLIWGACLHQMSPEQHDKNMSFIQALRHFTTFAYGQHLAQEGADLQQLLSISSPIYRLELIMVGRLFAQDPQLYADIIMSSPENIDLIRRYHQSFGQALEILESQDKRAFVSSFEDVSEWFGDYAPRFMRESRVLLQQANDSRQ

SEQ ID NO: 80547 - DNA, 1128 bp, Vibrio vulnificus YJ016
  CDS (1)..(1128): transl_table=11
atggcagttgaactgaacgcattgcgtgaacagattgatgcagtagacaaacagatgttggcgctattggctcagcgcttggcattggtagagcaagttggccatgtgaaaagccaacatggcttaccgatttatgcacccgatagagaagcggcgatgctggcctctcgtcgtgcagaagccgaaaaaatcggcgtacctccacagctcattgaggacattttgcgccgaaccatgcgtgaatcttatgccagtgagaaagattctgggtttaaatgtctcaatccggacttgcgttctgtggtgatcattggtggtcatggccagttgggtggtctgtttgctcgcatgtttaccctctcgggttaccaggtcaaaatcttaggcagtaaggattggcaccgcgctgatgagatattggatggggcaggattggtggtggttaccgtgccgattcatttaacccaaggggtgattgaaaagctgacccaactgccatcggattgcattttgtgtgacctcacttcgatcaagtcgaagccgctgaaaaccatgctcgatgtgcactctgggccggttgttggtttgcaccctatgtttggtcccgatgtgccgagtttagccaagcaagtgattgtctactgtgatggtcgaggtgctgagcaatatcagtggttactgcagcagtttaagatttggggggcaagcttgtgccaaattgaggccagcgaacacgaccacggcatgacgttaattcaagcattaaggcactttacttcctttgcctatggcatgcatttgagtcaggaaaatccaagtctcgataaactgctgaaactgagctcgcccatttaccgtcttgagttagcgatggtagggcgtctgtttgcccaagacccaaacttgtatggcgacattattctttcgtcgcaagagaacatcgacatgatcaagcgtttccatcgccgctttggcgaggcactagagatgttagatcagcacgataaagcgcgttttgttgaacgtttcacgcaagtgagtgattggtttggggggtattcgcagcagtttatggcggaaagccaaaacttactcaaacaagcgaatgacaacttgcatcgtgattaa

SEQ ID NO: 80548 - protein, 375 aa, Vibrio vulnificus YJ016
MAVELNALREQIDAVDKQMLALLAQRLALVEQVGHVKSQHGLPIYAPDREAAMLASRRAEAEKIGVPPQLIEDILRRTMRESYASEKDSGFKCLNPDLRSVVIIGGHGQLGGLFARMFTLSGYQVKILGSKDWHRADEILDGAGLVVVTVPIHLTQGVIEKLTQLPSDCILCDLTSIKSKPLKTMLDVHSGPVVGLHPMFGPDVPSLAKQVIVYCDGRGAEQYQWLLQQFKIWGASLCQIEASEHDHGMTLIQALRHFTSFAYGMHLSQENPSLDKLLKLSSPIYRLELAMVGRLFAQDPNLYGDIILSSQENIDMIKRFHRRFGEALEMLDQHDKARFVERFTQVSDWFGGYSQQFMAESQNLLKQANDNLHRD

SEQ ID NO: 80549 - DNA, 1122 bp, Erwinia carotovora subsp. atroseptica SCRI1043
  CDS (1)..(1122): transl_table=11
atggtagctgaactgaccgcattacgtgatcagatagatgaggtagataaggagcttgtcgcgctcttatcacgtcggttgcgtttggtggcggaagtgggtgaagtgaaaagccgctatggtttgcccatttatgcgcccgatcgtgaagcggccatgctcagctcacgtcgtaacgaggcggcgtcgatgggggttccaccggatcttattgaagatatcctgcggcgcaccatgcgcgaatcctattccagcgaaaacgacaaaggttttaaaacgctgtgtccacaattgcgtccggtcgtcatcattggtggccgtggtcaaatgggcaatttgtttgagaagatgctgacgctatcgggatatcaggtgaggatcctggagcaagatgactggccgcgcgctgatgagctgttgtctgatgcaggtatggtgattgtcagcgtgccgattcacgttaccgaacaggttattgccagtctgcctatcttgccggatgactgtattctggtcgatctggcatcggtaaaaaatggcccgcttcaggcgatgctggcggcgcataatggtccggtactcggtttgcaccctatgtttgggccagacagcggcagccttgccaaacaggttgtcgtttattgcgatggccgacagccggaggcctatcagtggttactggaacagattcaggtatggggcgcgcgtctgcatcgcattagcgcagttgaacacgatcagaacatgatgttcattcaagcgctgcgccacttcgctacatttgcctatggcctgcatttagcggaagagaatgtgcagcttgaacagctattagcactgtcatcgccaatctatcgattggaattgatcatggttggtaggttgtttgcgcaggatccgcagctttatgccgacattattatgtcttcagaggataatttggcgttgattaagcgttactacaaacgttttggcgaagccattgagttactggagcaaacagataaagcggaatttattagcagcttcaaaaaagttgaacactggttcggcgattatgccaagcgttttcaggcggagagccgagtgcttttacgtcaggcaaacgacattcgccaataa

SEQ ID NO: 80550 - protein, 373 aa, Erwinia carotovora subsp. atroseptica SCRI1043
MVAELTALRDQIDEVDKELVALLSRRLRLVAEVGEVKSRYGLPIYAPDREAAMLSSRRNEAASMGVPPDLIEDILRRTMRESYSSENDKGFKTLCPQLRPVVIIGGRGQMGNLFEKMLTLSGYQVRILEQDDWPRADELLSDAGMVIVSVPIHVTEQVIASLPILPDDCILVDLASVKNGPLQAMLAAHNGPVLGLHPMFGPDSGSLAKQVVVYCDGRQPEAYQWLLEQIQVWGARLHRISAVEHDQNMMFIQALRHFATFAYGLHLAEENVQLEQLLALSSPIYRLELIMVGRLFAQDPQLYADIIMSSEDNLALIKRYYKRFGEAIELLEQTDKAEFISSFKKVEHWFGDYAKRFQAESRVLLRQANDIRQ

SEQ ID NO: 80551 - DNA, 1131 bp, Mannheimia succiniciproducens MBEL55E
  CDS (1)..(1131): transl_table=11
gtggaagcactcaaagaaatcagagccgaaatcgatcaattggatcgagagttgttagaagtttttgccaaacgtttagcgttagtcaaaaaggtcggagaaattaaacatcaacaaggtttgccgatttatgtaccggaacgcgaagcagatatgctggcggctcggcgttcagaagcggaaaaaatgggcatacctgcggatttaattgaagatgtgttacgtcgtgttatgcgggagtcttacgctaacgaacatgaacacggttttaaaaccgttaatccggcgattaaaaaaattgttattgtaggcggtaaaggcaaattaggcggcttattcgggcgttttctgacggcttcaggctactttgtggaagcgttgggaagcaaagattgggacaacgcaaaggctattttggccggtgcaaatgcggtaatcgtttgtgtgcctatcgtaaaaaccttggaaaccattgaacgcttaaaaccttatttaacggaagatatgttattgacggatctaacctccgtaaaacgccgcccgttggaaaaaatgctggaaattcatcaaggcgcggtcgtaggcttgcatccgatgtttgggcccgatatcgcaagcatggcaaaacaggtggttgtacgttgcgacgggcgttatccggagcgttatcaatggctgttggaacaaattcaaatgtggggcgcgcgaatttatcaggcggatgccgccgagcatgaccacagcatgacctatattcaagcattacgtcattttgccacctttgccaacggtttacatctttcaagacaaccggtgaaattagctaatttattagccttatcttcaccgatttatcgtctggaacttgcgatgatcgggcgtttgtttgcgcaagacggtagtttatatgccgatattattatggataagccggaaaacctggaagtaatcgaaagtttaaaacaaagctatgaagacagcttaaaattctttgaaaacggtgatagagaaggctttattaaaacctttaacaaagtgagagaatggttcggcgattattcggaacaatttatgaaagaaagccgtcaactgctgcaacaagctaacgattatcgtcataatagtctctga

SEQ ID NO: 80552 - protein, 376 aa, Mannheimia succiniciproducens MBEL55E
MEALKEIRAEIDQLDRELLEVFAKRLALVKKVGEIKHQQGLPIYVPEREADMLAARRSEAEKMGIPADLIEDVLRRVMRESYANEHEHGFKTVNPAIKKIVIVGGKGKLGGLFGRFLTASGYFVEALGSKDWDNAKAILAGANAVIVCVPIVKTLETIERLKPYLTEDMLLTDLTSVKRRPLEKMLEIHQGAVVGLHPMFGPDIASMAKQVVVRCDGRYPERYQWLLEQIQMWGARIYQADAAEHDHSMTYIQALRHFATFANGLHLSRQPVKLANLLALSSPIYRLELAMIGRLFAQDGSLYADIIMDKPENLEVIESLKQSYEDSLKFFENGDREGFIKTFNKVREWFGDYSEQFMKESRQLLQQANDYRHNSL

SEQ ID NO: 80553 - DNA, 1125 bp, Haemophilus influenzae 86-028NP
  CDS (1)..(1125): transl_table=11
atggaagtccttaaagatttacgttctgaaattgattcgcttgatcgcgaacttatccaactttttgctaaacgtcttgagttggtttctcaagtcggtaaagtgaaacatcaacatggattacctatttatgcgccagagcgtgaaatagcaatgctccaagcacgtcgtttagaggctgaaaaagcaggcatttcagccgatttaattgaagatgttctacgccgttttatgcgtgaatcctatgccaatgaaaaccaatttggttttaaaactatcaattctgatattcacaaaattgttatcgtgggcggttatggtaaattaggtggcttatttgcccgttatttacgtgcatctggctatccaatttctattttagatcgcgaagattgggcggtggctgaaagtattttagcgaatgctgatgtcgtgatcgtttccgtccccatcaatattactttggaaacgattgagcgactaaaaccttatttaacagaaaatatgttgcttgcagatttaacttctgttaagcgtgaaccgctagcgaaaatgcttgaagttcattctggtgcagttttaggtttacatccaatgtttggtgcagacattgcaagtatggcaaaacaagtggttgtacgttgtgatggacgttttcctgaacgttatgaatggttacttgagcaaattcaaatttggggcgcaaaaatttatcaaaccaatgccacagaacacgatcacaatatgacttatatacaagccttgcgccatttttcgacttttgcgaatggtttacacctttccaaacagcccattaatctcgctaatttattggcgctttcttctcctatttatcgcttagaacttgcgatgatcggtcgcttatttgcgcaagatgcagagctttacgcagatattattatggataagccagaaaatttagcggtaattgaaacgctaaaacaaacttacgacgaagccttaactttctttgaaaagaatgatcgtcaaggttttattgatgctttccacaaggtgcgtgactggtttggcgattattctgaacaattcttaaaagaaagccgtcagctattacagcaggcaaatgatttgaaacaagggtag

SEQ ID NO: 80554 - protein, 374 aa, Haemophilus influenzae 86-028NP
MEVLKDLRSEIDSLDRELIQLFAKRLELVSQVGKVKHQHGLPIYAPEREIAMLQARRLEAEKAGISADLIEDVLRRFMRESYANENQFGFKTINSDIHKIVIVGGYGKLGGLFARYLRASGYPISILDREDWAVAESILANADVVIVSVPINITLETIERLKPYLTENMLLADLTSVKREPLAKMLEVHSGAVLGLHPMFGADIASMAKQVVVRCDGRFPERYEWLLEQIQIWGAKIYQTNATEHDHNMTYIQALRHFSTFANGLHLSKQPINLANLLALSSPIYRLELAMIGRLFAQDAELYADIIMDKPENLAVIETLKQTYDEALTFFEKNDRQGFIDAFHKVRDWFGDYSEQFLKESRQLLQQANDLKQG

SEQ ID NO: 80555 - DNA, 1146 bp, Colwellia psychrerythraea 34H
  CDS (1)..(1146): transl_table=11
atgaaaaattcagatcccgattttgataaaaagttaacaagtttacgtgacgaaattgatgaaattgatagtgatttagtcaaattattgcaaagacgccttgctgttaccagtaaagttggtcaactaaaaagtggtgttggcagacccatttatgatgctaaacgcgaggcgagtttatttgctaaacgtcgccagcaggcaagtgaggctggtctatcacctgacttaattgaagatgttttacgccgtttaatgcgtgactcttatgtcagtcaagatgctagtggttatcgctgcgttaacccagaatgtaaaaaggttgtggtagtgggcggtaaagggcaattaggctctgtttttgtcgacctttttcaacgttctgattaccaagttgctattattgagcaaaatgattggcccaacagtgaagctattttagctgatgcgagcttagtcattgttgctgtgcctattcgcctgacgactatggttattaatcatcttaataacttaccaaaagagtgtattcttgccgatttaaccagtattaaagagtcgcctttgtttgaaatgaaaaaggtacatgctggtcctgttgttggcttacaccctatgtttggtccagatgtcacaggcttaattaaacaaaccattattagttgtgaagggcgtaaccctgaacaatatcaatggctcattgagcagtttgaagtgtggggcgctaaaatttatccggtgcaagcgcatgaacatgaccaagcgatgtcaatggtacaagttatgcgacatttctctactatcgcttacggctatcacttgatgagtgaaggggctgatattgagaacctagtagcgatgagttcacctatctatcgattagagttgattatggtagggcgattatttgctcaagatcctaccctttatgcggatattatttttgctaacaaagataatgtcagcatgatgaaacgctttgcttaccgatttttagaactacttgaagatgtcagccttgatgataaagatgcctttgttgatatgtttaataatgtttcgggttggtttggtgattatgccggagattttctcgaagaaagtaaatcgatgttattaaaagctaatgagctgaaaaaacattaa

SEQ ID NO: 80556 - protein, 381 aa, Colwellia psychrerythraea 34H
MKNSDPDFDKKLTSLRDEIDEIDSDLVKLLQRRLAVTSKVGQLKSGVGRPIYDAKREASLFAKRRQQASEAGLSPDLIEDVLRRLMRDSYVSQDASGYRCVNPECKKVVVVGGKGQLGSVFVDLFQRSDYQVAIIEQNDWPNSEAILADASLVIVAVPIRLTTMVINHLNNLPKECILADLTSIKESPLFEMKKVHAGPVVGLHPMFGPDVTGLIKQTIISCEGRNPEQYQWLIEQFEVWGAKIYPVQAHEHDQAMSMVQVMRHFSTIAYGYHLMSEGADIENLVAMSSPIYRLELIMVGRLFAQDPTLYADIIFANKDNVSMMKRFAYRFLELLEDVSLDDKDAFVDMFNNVSGWFGDYAGDFLEESKSMLLKANELKKH

SEQ ID NO: 80557 - DNA, 1125 bp, Haemophilus somnus 129PT
  CDS (1)..(1125): transl_table=11
atggacgttttaaaaaatttaagaacagaaattgattgcttagatcgtgaattactacaccttttttctcaacgcttagaattagtcagaaaagtaggcaaagtgaaacatcaatatggattaccgatttatgtacctgaacgtgaaaatgaaatgttacaggctcgtcgcaatgaagcggaaaagttaggtgtttcaccggatttaattgaagatgttttgcgtcgtttgatgcgggaatcttatactagagaaaatcaatacggttttaaaacagcaaatcctgaaataaaaaaaatcgtcattgttggaggaaagggaaaattaggggcattatttgctcgttatttgtcttcttctggttatcaaattgctgtcttagagaaacaggattggcaaagtgcggataaaattttacaaaatgcaaatgtagttattgtttgtgtcccaattgcacaaactttaaatgtgattgaccgtctgaagccttatctaaccgaaaatatgctattaacagatttaacctcagtcaaacgtcaaccgttggaaaaaatgttacaagtgcatcaaggtgcggtattgggattacatccaatgtttggtccggatattaccaatatggcaaagcaagttgtagtacgttgtgacggtcgctaccctgaaaaataccaatggtttttggaacaaattcaaatgtggggagcgaaaatttatcaagttgatgcaaccgaacatgataaaagtatgacgtatgtacaagccttacgtcatttttcaacctttgcaaatggtttgcatttatcaaaacaacctattgagttggcacaattgcttgccctatcttcacccatttatcgtcttgaattagccatgatcggacgtttatttgctcaagatgcggaactttatgcagatattattatggacaaatcggagaatttggaagtgattaagagtctaaaacaaagctatgaagaaagtctaaatttctttgaacataataataagcagggatttattgactgttttaatcaagtgcgggaatggtttggtgagtattcagagcaatttttgaaagaaagtcggcaattattacaacaggcaaatgattacaaaagtatttga

SEQ ID NO: 80558 - protein, 374 aa, Haemophilus somnus 129PT
MDVLKNLRTEIDCLDRELLHLFSQRLELVRKVGKVKHQYGLPIYVPERENEMLQARRNEAEKLGVSPDLIEDVLRRLMRESYTRENQYGFKTANPEIKKIVIVGGKGKLGALFARYLSSSGYQIAVLEKQDWQSADKILQNANVVIVCVPIAQTLNVIDRLKPYLTENMLLTDLTSVKRQPLEKMLQVHQGAVLGLHPMFGPDITNMAKQVVVRCDGRYPEKYQWFLEQIQMWGAKIYQVDATEHDKSMTYVQALRHFSTFANGLHLSKQPIELAQLLALSSPIYRLELAMIGRLFAQDAELYADIIMDKSENLEVIKSLKQSYEESLNFFEHNNKQGFIDCFNQVREWFGEYSEQFLKESRQLLQQANDYKSI

SEQ ID NO: 80559 - DNA, 1140 bp, Shewanella sp. MR-4
  CDS (1)..(1140): transl_table=11
atgaacgaaaaaaccacaactgaattagaacaccttcgaggtctcatcgatggtgtcgaccaacaattgctgcatttactacgtaaacgcttagatttagtcgctcaggtgggaacggtaaaacacgccgcaggcctgccaatttatgcgccgcaacgcgaagcggctatgctggcaaaacgccgcgaagaagccaagaacatgggcatagcgccacaactgattgaagatattttgcgccgcttgatgcgtgaatcctatctcaacgagaaggatgtcggctttaagcaagtaaaaaacgatctcggttcagtcgtgattgttggtggtaagggtcagcttggtggactgttccaacaaatgctgacgctctcgggttatcaggttaaagtgcttgataaagacgactggcagcaggcggaaaccttatttgccgacgccggattggtactggtgactgtgcctatcgccatcacctgcgacattatccgtgagaaactgacccaattaccgcaggaatgtatcttagccgacttaacctcaatcaagactgaacctatgaatgccatgttggccgctcacaaggggcctgttgtcggctttcatcccatgtttggcccagatgtcggcagtttggctaagcaggtggtggtggtgtgccatggccgcgaagccgataaataccaatggttgctcgagcaaattggaatttggggcgcacggattgtagaagctgagcctgaacgtcacgacaatgcgatgcaattggtacaggcgatgcgccacttctcgacctttgtgtatggcttgaacctttgcaaagaagaagcggatattgaaaccctgctgcaatttagctcacctatctatcgcttagaactcgccatggtcgggcgcttgtttgcccaaagcccggagctttatgccgatattatttttgcccagcaggatagccagcatgcgattggcgattatttggataactatcgcgaagcattagagctattaaagcggggcgatagggacgcgtttatcagccagttccaaacggtagcaaaatggtttggtgattttgctcctcagtttcagcgtgaaagtcgcatgatgctgcaatcggtcagtgatatgaaaacgaactga

SEQ ID NO: 80560 - protein, 379 aa, Shewanella sp. MR-4
MNEKTTTELEHLRGLIDGVDQQLLHLLRKRLDLVAQVGTVKHAAGLPIYAPQREAAMLAKRREEAKNMGIAPQLIEDILRRLMRESYLNEKDVGFKQVKNDLGSVVIVGGKGQLGGLFQQMLTLSGYQVKVLDKDDWQQAETLFADAGLVLVTVPIAITCDIIREKLTQLPQECILADLTSIKTEPMNAMLAAHKGPVVGFHPMFGPDVGSLAKQVVVVCHGREADKYQWLLEQIGIWGARIVEAEPERHDNAMQLVQAMRHFSTFVYGLNLCKEEADIETLLQFSSPIYRLELAMVGRLFAQSPELYADIIFAQQDSQHAIGDYLDNYREALELLKRGDRDAFISQFQTVAKWFGDFAPQFQRESRMMLQSVSDMKTN

SEQ ID NO: 80561 - DNA, 1140 bp, Shewanella sp. ANA-3
  CDS (1)..(1140): transl_table=11
atgaacgaaaaaaccacaactgaattagaacaccttcgcggactcatcgatggtgtcgaccagcaattgctgcatttactgcgtaaacgcttagatttagtcgcgcaggtgggcacggttaaacacgccgcaggcctgccgatttatgcgccgcaacgtgaagcggcaatgttggcaaaacgccgcgaagaagccaaaaccatgggcattgcgccgcaactgattgaagatattttgcgccgtttgatgcgtgagtcctacctcaatgagaaggatgttggctttaagcaagtgaaaaacgatctcggttcggtcgtgattgttggtggtaagggccagcttggtggattgtttcaacaaatgctgtcgctctcgggttaccaggtcaaagtgctggataaagacgactggcagcaagctgaaaccttatttgccgacgccggattggtattggtgactgtgcctatcgccatcacctgcgacattatccgtgagaaactgacccaattaccgcaggaatgtatcttagccgacttaacctcgatcaagactgaacccatgaatgccatgttggccgctcacaaagggcccgttgtcgggtttcatcccatgtttggcccagatgtcggcagtttggctaagcaggttgtagtggtgtgccatgggcgtggagccgataaataccaatggctgctggaacaaattgggatttggggcgcgcggattgtcgaagcagaacctgaacgtcacgacaatgcgatgcagctggtacaggcgatgcgtcacttctcgacctttgtgtatggcttgaatctttgcaaagaagaagcggatattgaaaccctgctgcaatttagctcacctatctatcgcttagagctcgccatggtagggcgtttgtttgcccaaagccccgaactctatgccgatattatttttgcccagcaggatagccagcatgcaattggcgattatttggataactaccgtgaggcattagagctattaaagcggggcgatagggacgcgtttatcagccagttccaaacggttgcaaaatggtttggtgattttgcaccgcagtttcagcgtgaaagtcgcatgatgctgcaatcggtcagtgatatgaaaacaaactga

SEQ ID NO: 80562 - protein, 379 aa, Shewanella sp. ANA-3
MNEKTTTELEHLRGLIDGVDQQLLHLLRKRLDLVAQVGTVKHAAGLPIYAPQREAAMLAKRREEAKTMGIAPQLIEDILRRLMRESYLNEKDVGFKQVKNDLGSVVIVGGKGQLGGLFQQMLSLSGYQVKVLDKDDWQQAETLFADAGLVLVTVPIAITCDIIREKLTQLPQECILADLTSIKTEPMNAMLAAHKGPVVGFHPMFGPDVGSLAKQVVVVCHGRGADKYQWLLEQIGIWGARIVEAEPERHDNAMQLVQAMRHFSTFVYGLNLCKEEADIETLLQFSSPIYRLELAMVGRLFAQSPELYADIIFAQQDSQHAIGDYLDNYREALELLKRGDRDAFISQFQTVAKWFGDFAPQFQRESRMMLQSVSDMKTN

SEQ ID NO: 80563 - DNA, 1080 bp, Nostoc punctiforme PCC 73102
  CDS (1)..(1080): transl_table=11
atgcctctgaaatcctcttattcagatcagcttaaaaaaactgaccagagcttgatcgccttacttagcgatcgcatatcattattagcatcagaacagccttctttagatgaacaactggctagtgtcgctcccctactcgctcaagctggtattcctgagtctgtttgggcaggtgtagtaaatagttgtcatgccagccttacccctaaatctgctataaaccatgccagtcctcgacaagttaccatcatcggtggacgcggcaggatgggaagattatttcaagagcagctttcgctagtaggtcataatgttagcattcttgaacatgaagattgggaatatgcagagcaactgttaagtcaagcagaattagtattagtaagtgttcctattgaacatacggttgatgttatcaagcgggcagcaaaatatcttgcctcaaatacagctttgtgtgacatcacaagtattaaaacacagccaactcaagcaatgctcgaacaccattgtggtcccgtcatgggtttacatccaatgtttgggccaaatattaaatcgtttttgggacaaaaggtggtcgtgtgtccaggtcgaaatgatgattcatttcaatggttattagactttcttaaaagtaaaggtggtgaattaattgtttgcacgcctgaagaacacgatcggatgatggtgattattcaagcaacgcagcatttttgtagatttagtctgggcgttttcttagcacaagcaagggtggagatagagcagagtttaacaatgtcaactcctaattatcgtcaagaaattgatattgtgaaacgtttgtttgctcaaaatcctaatttatgtgttgatattatgctagctactgaagaaagatgtaatgctattagttttttagctaatacttacagccgtttggctagactggtggctaggaaggatagagaggcattaattaaagagtttgaaaatactcaaagtttttttgaagggaaaattaacagttttctccagcctttaaatacaacggctctcaaaagagattttaagccacagaatattggcatttga

SEQ ID NO: 80564 - protein, 359 aa, Nostoc punctiforme PCC 73102
MPLKSSYSDQLKKTDQSLIALLSDRISLLASEQPSLDEQLASVAPLLAQAGIPESVWAGVVNSCHASLTPKSAINHASPRQVTIIGGRGRMGRLFQEQLSLVGHNVSILEHEDWEYAEQLLSQAELVLVSVPIEHTVDVIKRAAKYLASNTALCDITSIKTQPTQAMLEHHCGPVMGLHPMFGPNIKSFLGQKVVVCPGRNDDSFQWLLDFLKSKGGELIVCTPEEHDRMMVIIQATQHFCRFSLGVFLAQARVEIEQSLTMSTPNYRQEIDIVKRLFAQNPNLCVDIMLATEERCNAISFLANTYSRLARLVARKDREALIKEFENTQSFFEGKINSFLQPLNTTALKRDFKPQNIGI

SEQ ID NO: 80565 - DNA, 1137 bp, Haemophilus somnus 2336
  CDS (1)..(1137): transl_table=11
atgaaaatagctatggacgttttaaaaaatttaagaacagaaattgattgcttagatcgtgaattactacaccttttttctcaacgcttagaattagtcagaaaagtaggcaaagtgaaacatcaatatggattaccgatttatgtacctgaacgtgaaaatgaaatgttacaggctcgtcgcaatgaagcggaaaagttaggtgtttcaccggatttaattgaagatgttttgcgtcgtttgatgcgggaatcttatactagagaaaatcaatacggttttaaaacagcaaatcctgaaataaaaaaaatcgtcattgttggaggaaagggaaaattaggggcattatttgctcgttatttgtcttcttccggttatcaaattgctgtcttagagaaacaggattggcaaagtgcggataaaattttacaaaatgcaaatgtagttattgtttgtgtcccaattgcacaaactttaaatgtgattgaccgtctaaagccttatctaaccgaaaatatgctattaacagatttaacctcagtcaaacgtcaaccgttggaaaaaatgttacaagtgcatcaaggtgcggtattaggattacatccaatgtttggtccggatattaccaatatggcaaagcaagtggtagtacgttgtgacggtcgctaccctgaaaaataccaatggtttttggaacaaattcaaatgtggggagcgaaaatttatcaagttgatgcaaccgaacatgataaaagtatgacgtatgtacaagccttacgtcatttttcaacctttgcaaatggtttgcatttatcaaaacaacctattgagttggcacaattgcttgccctatcttcacccatttatcgtcttgaattagccatgatcggacgtttatttgctcaagatgcggaactttatgcagatattattatggacaaatcggagaatttggaagtgattaagagtctaaaacaaagctatgaagaaagtctaaatttctttgaacataataacaagcaggggtttattgactgttttaatcaagtgcgggaatggtttggtgagtattcagagcaatttttgaaagaaagtcggcaattattacaacaggcgaatgattacagaagcatttga

SEQ ID NO: 80566 - protein, 378 aa, Haemophilus somnus 2336
MKIAMDVLKNLRTEIDCLDRELLHLFSQRLELVRKVGKVKHQYGLPIYVPERENEMLQARRNEAEKLGVSPDLIEDVLRRLMRESYTRENQYGFKTANPEIKKIVIVGGKGKLGALFARYLSSSGYQIAVLEKQDWQSADKILQNANVVIVCVPIAQTLNVIDRLKPYLTENMLLTDLTSVKRQPLEKMLQVHQGAVLGLHPMFGPDITNMAKQVVVRCDGRYPEKYQWFLEQIQMWGAKIYQVDATEHDKSMTYVQALRHFSTFANGLHLSKQPIELAQLLALSSPIYRLELAMIGRLFAQDAELYADIIMDKSENLEVIKSLKQSYEESLNFFEHNNKQGFIDCFNQVREWFGEYSEQFLKESRQLLQQANDYRSI

SEQ ID NO: 80567 - DNA, 1140 bp, Pseudoalteromonas tunicata D2
  CDS (1)..(1140): transl_table=11
atgtcatcaccccttcaaatacaactgactgaattacgtgatcaaatcgatcagtgtgatacacaattagttgaaatgcttgcgcgacgcaataaattaacagagcaggtcggtcagttaaaaaaagaatttggttcaccagtttatgtgcctgcccgtgaagcccaactaataactgcgcgcagagagcaagccaatcaatatggtgtgaatcctgatttagttgaagatattttacgtcgtatgatgcgagagtcgtatcaaaatcagcaagccgagctcgcttgtgttgcccctgatatctcaccttgtgtcatcgtgggtggagaaggtgcgatgggcagattatttgctcgccagcttagtcgctcaggcattgaagtgcgcatcttagacaaagcacaacaagcagatcagcaagccattcttgatggtgctaagttagtgttaatttctgtgccaattaatgcagtagttaatgtagttgcaaagctccctaaactagctgcggattgtttgttagttgatattaccagtgtgaaacaaaaaccgcttgaagccatgctcagtcaccatcaaggggaagttttaggcttacatccaatgtttggccctgatattgaacattgggtgaaacaaacgattgttgtatgccaaggacgcggtggcgaaaaaagtactcaattactcaaccagcttgctatctggggcagtcagttagtcgaaatgccagcagacaaacatgatgaagcaatgcaaattgtgcaagtgatgcgccatctaaccacttttgtttatggccaatttttagcaaaacaaccacatagccttgatgaaattaaactgtgctcatcaccaatatatcagttagagcttatgatggttggacgcttatttgctcagtcgccagagctttataccgacattatgatggctcaatttgataatgttgcacctttgctaacatcttaccaagagacttatcaagctacgttagataagcttaaagagggtgataaagagggattaatggctgctttttctgaagctaaaacgtttttctctgattcggcgcagcactttttaactcaaagcaaagcgttacttaataaagcaaatgatgccaaagtgcttgattaa

SEQ ID NO: 80568 - protein, 379 aa, Pseudoalteromonas tunicata D2
MSSPLQIQLTELRDQIDQCDTQLVEMLARRNKLTEQVGQLKKEFGSPVYVPAREAQLITARREQANQYGVNPDLVEDILRRMMRESYQNQQAELACVAPDISPCVIVGGEGAMGRLFARQLSRSGIEVRILDKAQQADQQAILDGAKLVLISVPINAVVNVVAKLPKLAADCLLVDITSVKQKPLEAMLSHHQGEVLGLHPMFGPDIEHWVKQTIVVCQGRGGEKSTQLLNQLAIWGSQLVEMPADKHDEAMQIVQVMRHLTTFVYGQFLAKQPHSLDEIKLCSSPIYQLELMMVGRLFAQSPELYTDIMMAQFDNVAPLLTSYQETYQATLDKLKEGDKEGLMAAFSEAKTFFSDSAQHFLTQSKALLNKANDAKVLD

SEQ ID NO: 80569 - DNA, 1131 bp, Photobacterium sp. SKA34
  CDS (1)..(1131): transl_table=11
atggttgctgagttaagcaaattaagagatcaaattgatgatgtagatcgtcaaatggttgagctattggctcaacgactcgcgttagttgagcaggtcggcgtcgtgaaaagtcagcatggcttacctatttatgccccagatcgtgaagccgcaatgttggcatctcgtcgtgaagaggcggaacgtcaaggggtaccagcggatcttatcgaagatgtacttcgtcgaacgatgcgtgaatcttattcgagcgaaaatgattctggctttaaatgtttaaatccacaattgcgaccaattgttattgttggtggtcatggtcagttagggaaattgttttgtcgtttgtttgaactgtcgggttaccaagttaaaacattaggtagccaagactgggatcgtgccgatgaaatattgcatgatgcaggtatggtcgttgtttctgttcctatccatttaacagagatggtgattgcaaaactcgataatttacctaaagactgtttacttgctgatttaacatcgattaaaagtggtccattacaagcgatgttagaagtgcataaaggacctgtggttgggttacacccaatgtttggtcctgatattccaagtcttgcgaaacaggttattgtgtactgtgatggacgaaatccagaaagttaccaatgggtgttggagcagtttcaaatttggggcgcatcactgaatcgaattagtgcgattgaacatgatcaggggatgaccttgatccaagcattacgtcactttacgtcgtttgtttatggtgttcaccttgctgaagaagatccaaagttagagcaattaatgtcgttaagttcacctatctatcgcttagaactcgcgatggtaggacgtttgtttgctcaagatgcgcaattgtacggtgatattattatgtcagcgccacagaatattgcgatgatcaaacgtttccatcagcgctttggtgaagcaattgaaatgctagatgctcaagataaagatgcgtttaagcaagcttttggtcaagtatcaggatggtttggcgattacgccgaacattttttatcagagagccagggactgcttaggcaggcgaacgattcaactcaccgtaaatcgtag

SEQ ID NO: 80570 - protein, 376 aa, Photobacterium sp. SKA34
MVAELSKLRDQIDDVDRQMVELLAQRLALVEQVGVVKSQHGLPIYAPDREAAMLASRREEAERQGVPADLIEDVLRRTMRESYSSENDSGFKCLNPQLRPIVIVGGHGQLGKLFCRLFELSGYQVKTLGSQDWDRADEILHDAGMVVVSVPIHLTEMVIAKLDNLPKDCLLADLTSIKSGPLQAMLEVHKGPVVGLHPMFGPDIPSLAKQVIVYCDGRNPESYQWVLEQFQIWGASLNRISAIEHDQGMTLIQALRHFTSFVYGVHLAEEDPKLEQLMSLSSPIYRLELAMVGRLFAQDAQLYGDIIMSAPQNIAMIKRFHQRFGEAIEMLDAQDKDAFKQAFGQVSGWFGDYAEHFLSESQGLLRQANDSTHRKS

SEQ ID NO: 80571 - DNA, 1128 bp, Vibrio sp. Ex25
  CDS (1)..(1128): transl_table=11
atggcagttgaacttaacgcattgcgcgatcagattgatgcagtcgacaagcaaatgttggagctattagctcagcgtttggcgctcgtagagaaagttggggaagtaaaaagcgaacatggtttgcctatttatgcccctgatcgtgaagcggcgatgctggcttctcgccgagcagaagctgagaaaatgggaattcctccacagcttattgaagatattctgcgtcgtaccatgcgtgagtcttatgccagtgaaaaagactccggttttaagtgtttgaaccctgaattacgctcagtggtcattattggtggtaatggccagttaggcggcctgtttgggcgtatgtttaagttatctggttatcaagtcaaagtgcttggtagcaaagactgggatcgtgcggatgacatcctaaaagatgcgggcttggtggtggttactgtgccaattcacctaacagaaggtgtgattgaaaagctaggtaatctgccacaagactgtattctgtgtgacctgacttctataaaatctaagccactgcaagcaatgttgaatgtgcaccaaggaccggtggttggtttacacccaatgtttggcccagatgtgccgagccttgccaagcaggtgattgtgtactgtgatgggcgtggaaatgatcaataccaatggttgctgcaacagtttggtatttggggcgcgagcttgtgccagattgatgcgcaagagcacgatcatggcatgacgttaatccaagcgctgcgtcacttcacctcatttgcttacggcatgcatctaagcaaagagaacccgaacattgagcaactgttaaagttgagctcaccgatctaccgcctggagttggcgatggtagggcgtctgtttggtcaggatccaaacctctacggtgacattattctctcatcgcaagaaaacatcgacatgattaagcgattccaccaacgcttcggcgaagcacttgcgattttggatagcaaagataaagccaaatttgtcgaaagctttgagcaggtgagtgagtggtttggtgattattcacaacaatttatgaatgagagccaaaacttactcaaacaggcgaatgataatattcatcgcggttaa

SEQ ID NO: 80572 - protein, 375 aa, Vibrio sp. Ex25
MAVELNALRDQIDAVDKQMLELLAQRLALVEKVGEVKSEHGLPIYAPDREAAMLASRRAEAEKMGIPPQLIEDILRRTMRESYASEKDSGFKCLNPELRSVVIIGGNGQLGGLFGRMFKLSGYQVKVLGSKDWDRADDILKDAGLVVVTVPIHLTEGVIEKLGNLPQDCILCDLTSIKSKPLQAMLNVHQGPVVGLHPMFGPDVPSLAKQVIVYCDGRGNDQYQWLLQQFGIWGASLCQIDAQEHDHGMTLIQALRHFTSFAYGMHLSKENPNIEQLLKLSSPIYRLELAMVGRLFGQDPNLYGDIILSSQENIDMIKRFHQRFGEALAILDSKDKAKFVESFEQVSEWFGDYSQQFMNESQNLLKQANDNIHRG

SEQ ID NO: 80573 - DNA, 1134 bp, Alteromonadales bacterium TW-7
  CDS (1)..(1134): transl_table=11
gtggcaaatataagtgatttggcccaactaagacaaggtatagatgaatgcgatgcgcagcttgttgccttactagctaaacgtaatggtattacccaaaaaattggtgaaatcaaacagcaaacaggtgcgcctttacatgcaccagagcgtgaagctgaattactagcggctaggcgccaagaagcaattaatcaaaatgtaagtcctgatctagttgaagatattctcaggcggatgatgcgtgaagcatatcaaaaccaacaggctaaattagcgtgtgcagcgccatcactttcacctattgttattgtgggcggtcaaggggcgatggggcagttatttgcccaacaatttatgcgctcaggttatgacgtcaaaatattagataaagagcagcaagatgatgcccaaagcattttaaccggtgcaaaactggtaatgataagtgtacctattaatgctttagagtctgtggttgctaaactaccaaaactagatgatgactgtttactcgttgatataacctcggtaaagcaatcgccaattaaagcattaaaagcagctcatagtggtccagttgttggtttacaccctatgtttgggcctgatatttcacattgggtaaaacaaacagtagttgtatgtgagggaagggagcataaggcggcgaaaggtctattagagcagttacaagtatgggggtgtcagcttgtagagctagatgctaaaaagcacgatgaagccatgcaaataattcaggtaatgcgacatttaacaacgtttgtttatgggcagtttttagcaaagcaaagccatactttagcagagttacgaagttgctcgtcgccgatatatcaattagagctaatgatggtagggcgtttgtttgcgcaatcgcctgagctttattccgatataatgttggctcagtttgatgacgttgaaagtttgttagctcaataccaagatacctttgcacaaacgcttgaaaagcttagggtaggtgataaagcagccttaatggaggcatttgcagatgctaaatcatatttttcagactcaactgcgcattttttaacacaaagccgcagtttacttaataaagcgaatgacgctaaagtgctcgactag

SEQ ID NO: 80574 - protein, 377 aa, Alteromonadales bacterium TW-7
MANISDLAQLRQGIDECDAQLVALLAKRNGITQKIGEIKQQTGAPLHAPEREAELLAARRQEAINQNVSPDLVEDILRRMMREAYQNQQAKLACAAPSLSPIVIVGGQGAMGQLFAQQFMRSGYDVKILDKEQQDDAQSILTGAKLVMISVPINALESVVAKLPKLDDDCLLVDITSVKQSPIKALKAAHSGPVVGLHPMFGPDISHWVKQTVVVCEGREHKAAKGLLEQLQVWGCQLVELDAKKHDEAMQIIQVMRHLTTFVYGQFLAKQSHTLAELRSCSSPIYQLELMMVGRLFAQSPELYSDIMLAQFDDVESLLAQYQDTFAQTLEKLRVGDKAALMEAFADAKSYFSDSTAHFLTQSRSLLNKANDAKVLD

SEQ ID NO: 80575 - DNA, 1122 bp, Enterobacter agglomerans
  CDS (1)..(1122): transl_table=11
atggtggctgaactgaccgcgttacgcgatcaaattgacagtgtagataaagcgctgctggatctgctggctaagcgactggaactggtggccgaggtaggtgaggtgaagagccgttacggcctgcctatctatgtgcctgagcgtgaggcgtcgatgctggcttcgcgtcgcaaagaggccgaagcgctcggcgtaccaccggatctgattgaggatgtgctgcgtcgcgtgatgcgggaatcctataccagcgagaatgataaaggctttaaaaccctctgtcctgaactgcgcccggtggtgattgtcggtggtaagggccagatgggccggctgtttgaaaaaatgctcgggctatcaggctacacggttaaaacgctggataaagaggactggcctcaggctgagactctgctcagcgatgccggaatggtgatcattagcgtgccgattcacctgaccgagcaggtgattgcccaactgccaccactgccggaagattgtattctggtcgatctggcgtcagtcaaaaaccggcctctgcaggcaatgctggctgcccataacgggcctgtactgggtctgcatccgatgtttggcccggacagcggcagcctggcaaaacaggtggtggtctggtgtgatggaagacaaccggaagcgtatcagtggttcctggagcagattcaggtctggggtgcgcgtctgcatcgtatcagcgctgttgagcatgaccagaacatggcattcattcaggcgctgcgtcactttgctaccttcgcttatggtctgcatttagccgaagagaacgtcaatctggatcagctgctggcgctctcgtcgcccatttaccggcttgaactggcgatggtggggcggttgttcgctcaggatccgcaactctatgcggatatcatcatgtcttcagagagtaatctggcgctgataaaacgctattaccagcggtttggtgaagcgattgcgctgctggagcagggcgacaagcaggcgtttatcgccagctttaaccgggttgaacagtggtttggcgatcacgcaaaacgcttcctggtcgaaagccgaagcctgttgcgatcggccaatgacagccgcccataa

SEQ ID NO: 80576 - protein, 373 aa, Enterobacter agglomerans
MVAELTALRDQIDSVDKALLDLLAKRLELVAEVGEVKSRYGLPIYVPEREASMLASRRKEAEALGVPPDLIEDVLRRVMRESYTSENDKGFKTLCPELRPVVIVGGKGQMGRLFEKMLGLSGYTVKTLDKEDWPQAETLLSDAGMVIISVPIHLTEQVIAQLPPLPEDCILVDLASVKNRPLQAMLAAHNGPVLGLHPMFGPDSGSLAKQVVVWCDGRQPEAYQWFLEQIQVWGARLHRISAVEHDQNMAFIQALRHFATFAYGLHLAEENVNLDQLLALSSPIYRLELAMVGRLFAQDPQLYADIIMSSESNLALIKRYYQRFGEAIALLEQGDKQAFIASFNRVEQWFGDHAKRFLVESRSLLRSANDSRP

SEQ ID NO: 80577 - DNA, 1134 bp, Haemophilus influenzae
  CDS (1)..(1134): transl_table=11
gtgagttttatggaagcccttaaagatttacgttctgaaattgattcgcttgatcgcgaacttatccaactttttgctaaacgtcttgagttggtttctcaagtcggtaaagtgaaacatcaacatggattacctatttatgcgccagaacgtgaaatagcaatgctccaagcacgtcgtttagaagctgaaaaagcaggcatttcagccgatttaattgaagatgttctacgccgttttatgcgtgaatcctatgccaatgaaaaccaatttggttttaaaactatcaattctgatattcacaaaattgttattgtgggcggttatggtaaattaggcggcttatttgcccgttatttacgtgcatctggctatccaatttctattttagatcgcgaagattgggcggtggctgaaagtattttagcgaatgctgatgtcgtgatcgtttccgtccctattaatctcaccttagaaacaattgaacgcttaaaaccttatttaacggaaaacatgctacttgcagatttaacctctgttaagcgtgaaccgctagcgaaaatgcttgaagttcatactggtgctgttttaggtttacatccaatgtttggtgcagatattgcaagtatggcaaaacaagtggttgtgcgttgtgatggacgttttcctgaacgttatgaatggttacttgagcaaattcaaatttggggtgcaaaaatttatcaaaccaatgccacagaacacgatcataatatgacttatatacaagccttgcgccatttttcgacttttgcgaatggtttacacctttccaaacagcccattaatctcgctaatttattggcactttcttcccctatttatcggttagaacttgcgatgataggtcgtttatttgcgcaagatgcagagctttacgcagatattattatggataagtcagaaaatttagcggtaattgaaacgctaaaacaaacttacgacgaagccttaactttctttgaaaataatgatcgtcaaggttttattgatgctttccacaaggtgcgtgactggtttggcgattattccgaacaatttttaaaagaaagccgtcagctattgcaacaggcaaatgatttgaaacaagggtag

SEQ ID NO: 80578 - protein, 377 aa, Haemophilus influenzae
MSFMEALKDLRSEIDSLDRELIQLFAKRLELVSQVGKVKHQHGLPIYAPEREIAMLQARRLEAEKAGISADLIEDVLRRFMRESYANENQFGFKTINSDIHKIVIVGGYGKLGGLFARYLRASGYPISILDREDWAVAESILANADVVIVSVPINLTLETIERLKPYLTENMLLADLTSVKREPLAKMLEVHTGAVLGLHPMFGADIASMAKQVVVRCDGRFPERYEWLLEQIQIWGAKIYQTNATEHDHNMTYIQALRHFSTFANGLHLSKQPINLANLLALSSPIYRLELAMIGRLFAQDAELYADIIMDKSENLAVIETLKQTYDEALTFFENNDRQGFIDAFHKVRDWFGDYSEQFLKESRQLLQQANDLKQG

SEQ ID NO: 80579 - DNA, 24 bp, Artificial sequence
  primer
atggttgctgaattgaccgcatta

SEQ ID NO: 80580 - DNA, 23 bp, Artificial sequence
  primer
ttactggcgattgtcattcgcct

SEQ ID NO: 80581 - protein, 372 aa, Artificial sequence
  consensus sequence
  Variant (2)..(3): Xaa in position 2 to 3 is any amino acid
  Variant (6)..(7): Xaa in position 6 to 7 is any amino acid
  Variant (10)..(11): Xaa in position 10 to 11 is any amino acid
  Variant (13)..(17): Xaa in position 13 to 17 is any amino acid
  Variant (20)..(21): Xaa in position 20 to 21 is any amino acid
  Variant (24)..(24): Xaa in position 24 is any amino acid
  Variant (27)..(28): Xaa in position 27 to 28 is any amino acid
  Variant (31)..(32): Xaa in position 31 to 32 is any amino acid
  Variant (34)..(36): Xaa in position 34 to 36 is any amino acid
  Variant (42)..(42): Xaa in position 42 is any amino acid
  Variant (44)..(44): Xaa in position 44 is any amino acid
  Variant (47)..(48): Xaa in position 47 to 48 is any amino acid
  Variant (51)..(52): Xaa in position 51 to 52 is any amino acid
  Variant (55)..(55): Xaa in position 55 is any amino acid
  Variant (58)..(60): Xaa in position 58 to 60 is any amino acid
  Variant (62)..(65): Xaa in position 62 to 65 is any amino acid
  Variant (70)..(70): Xaa in position 70 is any amino acid
  Variant (74)..(74): Xaa in position 74 is any amino acid
  Variant (80)..(81): Xaa in position 80 to 81 is any amino acid
  Variant (83)..(84): Xaa in position 83 to 84 is any amino acid
  Variant (85)..(85): Xaa in position 85 is any or no amino acid
  Variant (89)..(97): Xaa in position 89 to 97 is any amino acid
  Variant (100)..(100): Xaa in position 100 is any amino acid
  Variant (103)..(103): Xaa in position 103 is any amino acid
  Variant (105)..(106): Xaa in position 105 to 106 is any amino acid
  Variant (108)..(108): Xaa in position 108 is any amino acid
  Variant (111)..(116): Xaa in position 111 to 116 is any amino acid
  Variant (120)..(120): Xaa in position 120 is any amino acid
  Variant (122)..(123): Xaa in position 122 to 123 is any amino acid
  Variant (125)..(127): Xaa in position 125 to 127 is any amino acid
  Variant (130)..(131): Xaa in position 130 to 131 is any amino acid
  Variant (132)..(132): Xaa in position 132 is any or no amino acid
  Variant (134)..(139): Xaa in position 134 to 139 is any amino acid
  Variant (141)..(142): Xaa in position 141 to 142 is any amino acid
  Variant (144)..(146): Xaa in position 144 to 146 is any amino acid
  Variant (150)..(151): Xaa in position 150 to 151 is any amino acid
  Variant (153)..(155): Xaa in position 153 to 155 is any amino acid
  Variant (157)..(158): Xaa in position 157 to 158 is any amino acid
  Variant (160)..(161): Xaa in position 160 to 161 is any amino acid
  Variant (162)..(162): Xaa in position 162 is any or no amino acid
  Variant (164)..(168): Xaa in position 164 to 168 is any amino acid
  Variant (170)..(170): Xaa in position 170 is any amino acid
  Variant (173)..(173): Xaa in position 173 is any amino acid
  Variant (175)..(175): Xaa in position 175 is any amino acid
  Variant (177)..(178): Xaa in position 177 to 178 is any amino acid
  Variant (181)..(182): Xaa in position 181 to 182 is any amino acid
  Variant (185)..(186): Xaa in position 185 to 186 is any amino acid
  Variant (188)..(188): Xaa in position 188 is any amino acid
  Variant (190)..(190): Xaa in position 190 is any amino acid
  Variant (192)..(192): Xaa in position 192 is any amino acid
  Variant (202)..(203): Xaa in position 202 to 203 is any amino acid
  Variant (204)..(206): Xaa in position 204 to 206 is any or no amino acid
  Variant (208)..(209): Xaa in position 208 to 209 is any amino acid
  Variant (213)..(213): Xaa in position 213 is any amino acid
  Variant (215)..(215): Xaa in position 215 is any amino acid
  Variant (217)..(217): Xaa in position 217 is any amino acid
  Variant (220)..(223): Xaa in position 220 to 223 is any amino acid
  Variant (227)..(227): Xaa in position 227 is any amino acid
  Variant (229)..(229): Xaa in position 229 is any amino acid
  Variant (231)..(233): Xaa in position 231 to 233 is any amino acid
  Variant (237)..(245): Xaa in position 237 to 245 is any amino acid
  Variant (248)..(249): Xaa in position 248 to 249 is any amino acid
  Variant (251)..(253): Xaa in position 251 to 253 is any amino acid
  Variant (256)..(256): Xaa in position 256 is any amino acid
  Variant (260)..(261): Xaa in position 260 to 261 is any amino acid
  Variant (263)..(264): Xaa in position 263 to 264 is any amino acid
  Variant (266)..(267): Xaa in position 266 to 267 is any amino acid
  Variant (269)..(277): Xaa in position 269 to 277 is any amino acid
  Variant (280)..(281): Xaa in position 280 to 281 is any amino acid
  Variant (291)..(291): Xaa in position 291 is any amino acid
  Variant (293)..(293): Xaa in position 293 is any amino acid
  Variant (300)..(302): Xaa in position 300 to 302 is any amino acid
  Variant (305)..(305): Xaa in position 305 is any amino acid
  Variant (309)..(313): Xaa in position 309 to 313 is any amino acid
  Variant (315)..(317): Xaa in position 315 to 317 is any amino acid
  Variant (318)..(318): Xaa in position 318 is any or no amino acid
  Variant (320)..(336): Xaa in position 320 to 336 is any amino acid
  Variant (338)..(340): Xaa in position 338 to 340 is any amino acid
  Variant (342)..(344): Xaa in position 342 to 344 is any amino acid
  Variant (346)..(347): Xaa in position 346 to 347 is any amino acid
  Variant (349)..(350): Xaa in position 349 to 350 is any amino acid
  Variant (354)..(358): Xaa in position 354 to 358 is any amino acid
  Variant (360)..(361): Xaa in position 360 to 361 is any amino acid
  Variant (364)..(365): Xaa in position 364 to 365 is any amino acid
  Variant (368)..(369): Xaa in position 368 to 369 is any amino acid
LXXLRXXIDXXDXXXXXLLXXRLXLVXXVGXXKXXXGLPIYXPXREXXMLXXRRXEAXXXGXXXXLIEDXLRRXMRESYXXEXXXGFKXXXXXXXXXVIXGGXGXXGXLFXXXXXXSGYXVXXLXXXDWXXXAXXXXXXAXXVXXXVPIXXTXXXIXXLXXXLXXXXXLXDLXSXKXXPLXXMLXXHXGXVXGLHPMFGPDXXXXXSXXKQVXVXCXGRXXXXYQWXLXQXXXWGAXXXXXXXXXHDXXMXXXQAXRHFXXFXXGXXLXXXXXXXXXLLXXSSPIYRLELXMXGRLFAQXXXLYXDIIXXXXXNXXXXIXXXXXXXXXXXXXXXXXDXXXFXXXFXXVXXWFGXXXXXFXXESXXLLXXAND

SEQ ID NO: 80582 - protein, 61 aa, Artificial sequence
  protein pattern
  Variant (2)..(3): Xaa in position 2 to 3 is any amino acid
  Variant (4)..(4): Xaa in position 4 is Ile or Val
  Variant (7)..(7): Xaa in position 7 is Leu or Met
  Variant (11)..(11): Xaa in position 11 is any or no amino acid
  Variant (13)..(13): Xaa in position 13 is any or no amino acid
  Variant (15)..(15): Xaa in position 15 is Ala or Val
  Variant (16)..(16): Xaa in position 16 is any amino acid
  Variant (18)..(19): Xaa in position 18 to 19 is any amino acid
  Variant (21)..(21): Xaa in position 21 is Ala, Cys, Ser, Thr or Val
  Variant (22)..(22): Xaa in position 22 is any amino acid
  Variant (23)..(23): Xaa in position 23 is Glu or Gln
  Variant (24)..(24): Xaa in position 24 is any amino acid
  Variant (25)..(25): Xaa in position 25 is Ala, Ile, Pro or Val
  Variant (26)..(26): Xaa in position 26 is any amino acid
  Variant (27)..(27): Xaa in position 27 is Ile or Leu
  Variant (28)..(28): Xaa in position 28 is Ala, Asp, Glu or Gln
  Variant (29)..(29): Xaa in position 29 is any amino acid
  Variant (31)..(31): Xaa in position 31 is Leu or Met
  Variant (32)..(32): Xaa in position 32 is any amino acid
  Variant (33)..(33): Xaa in position 33 is Phe, Ile or Leu
  Variant (39)..(39): Xaa in position 39 is any amino acid
  Variant (43)..(43): Xaa in position 43 is Ala or Ile
  Variant (45)..(45): Xaa in position 45 is Ile or Val
  Variant (50)..(50): Xaa in position 50 is Ala or Gly
  Variant (52)..(52): Xaa in position 52 is Asp or Ser
  Variant (53)..(53): Xaa in position 53 is Ala, Gly or Pro
  Variant (54)..(54): Xaa in position 54 is any amino acid
  Variant (57)..(57): Xaa in position 57 is Ala or Gly
  Variant (61)..(61): Xaa in position 61 is Phe, Leu or Met
MXXXQAXRHFXTXFXXGXXLXXXXXXXXXLXXXSSPIYXLELXMXGRLFXQXXXLYXDIIX

SEQ ID NO: 80583 - protein, 34 aa, Artificial sequence
  protein pattern
  Variant (2)..(2): Xaa in position 2 is any amino acid
  Variant (3)..(3): Xaa in position 3 is any or no amino acid
  Variant (6)..(6): Xaa in position 6 is Ala or Thr
  Variant (8)..(8): Xaa in position 8 is Ile or Val
  Variant (10)..(11): Xaa in position 10 to 11 is any amino acid
  Variant (13)..(13): Xaa in position 13 is Leu or Met
  Variant (14)..(15): Xaa in position 14 to 15 is any amino acid
  Variant (18)..(18): Xaa in position 18 is any amino acid
  Variant (19)..(19): Xaa in position 19 is Ala, Ile or Val
  Variant (21)..(21): Xaa in position 21 is any amino acid
  Variant (23)..(23): Xaa in position 23 is Ala or Pro
  Variant (25)..(25): Xaa in position 25 is Leu or Val
  Variant (27)..(27): Xaa in position 27 is Phe or Leu
  Variant (33)..(33): Xaa in position 33 is Ala or Pro
LXXDLXSXKXXPXXXMLXXHXGXVXGXHPMFGXD

SEQ ID NO: 80584 - protein, 40 aa, Artificial sequence
  protein pattern
  Variant (3)..(3): Xaa in position 3 is Ala or Val
  Variant (5)..(5): Xaa in position 5 is Asp, Glu or Gln
  Variant (8)..(8): Xaa in position 8 is any amino acid
  Variant (9)..(9): Xaa in position 9 is Ala, Asp, Glu or Ser
  Variant (12)..(12): Xaa in position 12 is Ala, Asn, Gln or Ser
  Variant (13)..(13): Xaa in position 13 is any amino acid
  Variant (16)..(16): Xaa in position 16 is any amino acid
  Variant (19)..(21): Xaa in position 19 to 21 is any amino acid
  Variant (23)..(23): Xaa in position 23 is Ile or Val
  Variant (24)..(24): Xaa in position 24 is Ala, Pro or Ser
  Variant (25)..(25): Xaa in position 25 is Ala or Pro
  Variant (26)..(26): Xaa in position 26 is Asp or Gln
  Variant (31)..(31): Xaa in position 31 is Ile or Val
  Variant (35)..(35): Xaa in position 35 is any amino acid
IYXPXREXXMLXXRRXEAXXXGXXXXLIEDXLRRXMRESY

SEQ ID NO: 80585 - protein, 39 aa, Artificial sequence
  protein pattern
  Variant (2)..(2): Xaa in position 2 is any amino acid
  Variant (4)..(4): Xaa in position 4 is Ile or Val
  Variant (5)..(5): Xaa in position 5 is Ala, Ile or Val
  Variant (6)..(6): Xaa in position 6 is any amino acid
  Variant (8)..(8): Xaa in position 8 is Asp, Glu or His
  Variant (11)..(12): Xaa in position 11 to 12 is any amino acid
  Variant (13)..(13): Xaa in position 13 is Asp, Glu, Gln or Ser
  Variant (14)..(14): Xaa in position 14 is any amino acid
  Variant (15)..(15): Xaa in position 15 is Phe or Tyr
  Variant (16)..(16): Xaa in position 16 is Glu or Gln
  Variant (18)..(18): Xaa in position 18 is Phe, Leu or Val
  Variant (20)..(20): Xaa in position 20 is Glu or Gln
  Variant (22)..(22): Xaa in position 22 is Phe, Ile or Leu
  Variant (23)..(23): Xaa in position 23 is any amino acid
  Variant (24)..(24): Xaa in position 24 is Ile, Leu, Met or Val
  Variant (28)..(34): Xaa in position 28 to 34 is any amino acid
  Variant (35)..(35): Xaa in position 35 is any or no amino acid
  Variant (37)..(37): Xaa in position 37 is any or no amino acid
KXVXXXCXGRXXXXXXWXLXQXXXWGAXXXXXXXXEXHD

SEQ ID NO: 80586 - protein, 36 aa, Artificial sequence
  protein pattern
  Variant (4)..(4): Xaa in position 4 is any amino acid
  Variant (5)..(5): Xaa in position 5 is Ala, Ile, Leu or Val
  Variant (6)..(6): Xaa in position 6 is any amino acid
  Variant (7)..(7): Xaa in position 7 is Asn, Pro or Ser
  Variant (8)..(8): Xaa in position 8 is Ala, Asp, Glu, Asn, Gln or Ser
  Variant (9)..(9): Xaa in position 9 is Ile or Leu
  Variant (10)..(11): Xaa in position 10 to 11 is any amino acid
  Variant (12)..(12): Xaa in position 12 is Ile or Val
  Variant (15)..(15): Xaa in position 15 is Ile or Val
  Variant (18)..(18): Xaa in position 18 is any amino acid
  Variant (20)..(20): Xaa in position 20 is any amino acid
  Variant (21)..(23): Xaa in position 21 to 23 is any or no amino acid
  Variant (26)..(28): Xaa in position 26 to 28 is any amino acid
  Variant (29)..(29): Xaa in position 29 is Phe or Leu
  Variant (30)..(31): Xaa in position 30 to 31 is any amino acid
  Variant (35)..(35): Xaa in position 35 is any amino acid
  Variant (36)..(36): Xaa in position 36 is Ile or Val
GFKXXXXXXXXXVIXGGXGXXXXLFXXXXXXSGYXX

SEQ ID NO: 80587 - protein, 35 aa, Artificial sequence
  protein pattern
  Variant (3)..(3): Xaa in position 3 is Asp, Glu, Gly, Ser or Thr
  Variant (4)..(4): Xaa in position 4 is any amino acid
  Variant (7)..(8): Xaa in position 7 to 8 is any or no amino acid
  Variant (10)..(10): Xaa in position 10 is any amino acid
  Variant (11)..(11): Xaa in position 11 is Ala, Glu, Gln, Ser or Thr
  Variant (12)..(12): Xaa in position 12 is Leu or Met
  Variant (13)..(13): Xaa in position 13 is Ile, Leu or Val
  Variant (14)..(14): Xaa in position 14 is any amino acid
  Variant (16)..(16): Xaa in position 16 is Phe or Leu
  Variant (17)..(18): Xaa in position 17 to 18 is any amino acid
  Variant (20)..(20): Xaa in position 20 is Leu or Met
  Variant (21)..(21): Xaa in position 21 is any amino acid
  Variant (24)..(25): Xaa in position 24 to 25 is any amino acid
  Variant (26)..(26): Xaa in position 26 is Ile or Val
  Variant (28)..(28): Xaa in position 28 is any amino acid
  Variant (29)..(29): Xaa in position 29 is Ile or Val
  Variant (31)..(33): Xaa in position 31 to 33 is any amino acid
LRXXIDXXDXXXXXLXXXRXXLVXXXGXXKXXXGL

SEQ ID NO: 80588 - protein, 13 aa, Artificial sequence
  protein pattern
  Variant (2)..(3): Xaa in position 2 to 3 is any amino acid
  Variant (5)..(5): Xaa in position 5 is Ile, Leu or Val
  Variant (6)..(6): Xaa in position 6 is Ile or Val
  Variant (7)..(7): Xaa in position 7 is Ala, Cys, Ser or Thr
  Variant (11)..(12): Xaa in position 11 to 12 is any amino acid
  Variant (13)..(13): Xaa in position 13 is Thr or Val
AXXVXXXVPIXXX

SEQ ID NO: 80589 - DNA, 267 bp, Escherichia coli
  CDS (1)..(267): transl_table=11
atgactaaacctaatcatgagcttagcccggcgctgatcgtgctgatgtctatcgccaccggtctggcggtagccagtaactattacgcccagccattgctcgacaccatcgcgcgtaacttttccctttccgccagttcggcaggctttattgttaccgccgcgcagttgggctatgccgcaggtctactgtttcttgttcccctcggtgatatgtttgaacgccgccgcctgattgtctcgatgaccttactggcggcatgttaa

SEQ ID NO: 80590 - protein, 88 aa, Escherichia coli
MTKPNHELSPALIVLMSIATGLAVASNYYAQPLLDTIARNFSLSASSAGFIVTAAQLGYAAGLLFLVPLGDMFERRRLIVSMTLLAAC

SEQ ID NO: 80591 - DNA, 1218 bp, Mesorhizobium loti MAFF303099
  CDS (1)..(1218): transl_table=11
atgaccaccattaccgcatccggctccgcatccgccgagacgacaatttcgaattggatgaccttcttgctggctgccgcctgcgggctgatcgttgccaatatctattacgcacagccattgattggcccgattggcgccgaacttggcctgccgccacatgcggcgggcctgatcgttacgatggcgcagatcggctacggggtgggcctgctgttcatcgtgccgcttggcgacctgatcgagaaccgcaggctcgtgcttggcatactcgccgttgcgacgctcgccttattgggcgcggcgatttcaacgcagccggcgttttttctggccgcgatgctgtttgtcggccttggctcggtcgcggtgcagacccttatcccctatgcggcgcatctggcgccggaggccaggcgtggccgcgtggtcggcaatgtgtcggtgggattgttgctgggcataatgctgtcacggccgttttccagtttcatcaccgcgctgtcgtcctggcatgtggtctacttcacctcttgcgccgttatgatcctgctgaccgtggtgctgcggttcgcgctgcccaggcgcgtgccgacggcgcgtctgagctatggcgcactgttggcgtccatggtgcagattgcgcgctcgacgccggtcctgcggcggcgggctctctatcaggcgttcctgttcgcggccttcagcctgttctggacgacgacaccgctgctgctggccggacccgatttcggcttgacgcagcgcggcatcggcctgttcgccttggccggtgtcgccggcgctatcgccgcgccgctcgccggaagggttgccgaccgcggatggagccgcccggcgacagcctttgccatgctgtgcgtcgccgtcgcctttctcgtaacccatatcgcccccagcggttcgacgctttcgctggcgctgctggttgccgcagccatcgtcctcgacttcggcgtgcagaccaaccttgtcctcggctatcgcgacctgttcgcgctcggcgccgcccatcgcagccgtctgaacgggctctacatggcgacgttcttcatcgctggcgccatcggctcgggtgtcggcggttgggcctatgcgcaagacggctggccactggtgtcctggatcggcctggcgctgccggttgcggcactgctttgtttcgccaccgaattcatgtcgcgccaaagggcgtga

SEQ ID NO: 80592 - protein, 405 aa, Mesorhizobium loti MAFF303099
MTTITASGSASAETTISNWMTFLLAAACGLIVANIYYAQPLIGPIGAELGLPPHAAGLIVTMAQIGYGVGLLFIVPLGDLIENRRLVLGILAVATLALLGAAISTQPAFFLAAMLFVGLGSVAVQTLIPYAAHLAPEARRGRVVGNVSVGLLLGIMLSRPFSSFITALSSWHVVYFTSCAVMILLTVVLRFALPRRVPTARLSYGALLASMVQIARSTPVLRRRALYQAFLFAAFSLFWTTTPLLLAGPDFGLTQRGIGLFALAGVAGAIAAPLAGRVADRGWSRPATAFAMLCVAVAFLVTHIAPSGSTLSLALLVAAAIVLDFGVQTNLVLGYRDLFALGAAHRSRLNGLYMATFFIAGAIGSGVGGWAYAQDGWPLVSWIGLALPVAALLCFATEFMSRQRA

SEQ ID NO: 80593 - DNA, 1212 bp, Pseudomonas aeruginosa PAO1
  CDS (1)..(1212): transl_table=11
atgccatcctcgccatcctccctcccctccgcgctggtgctgctgttcgccgtcgcctgcggtctcagcgtggccaacgtctattacgcccagccgctgctggacgtcctcggtgccgagttcgccatcggccaggccggggtcggcctgctgttcggcacgacccaggccggttgcgccctggcgctgctgctggtggtgccgctgggcgacctgctggagcggcgccggctgatgttcgtccagctcctgctgctggtgctgtcgctgctgctggtgggcttcgccggcgataccctcggcctggcgctggggctgctcggactgggcctgctcggcaccgccatgacccagggactgctggcctacgccgcggcgctggcggcgcctggcgagcgcgggcgggtggtcggcgcggcgcagggcggcgtggtgatcggcctgctgctggcgcgcagcctggccgggctgctcgccgacctcggcggctggcgcagcgtctacctggtctcggcagcgagcatgggcgggctcggcctgctgctctggcgggtactgccggcggcgccgagcaacgaactggggctgacctaccggcaactgctcggctcgatgttcgacctgctggcgagccagcgcgtgctgcaggtgcgcggcctgctcgggctgttgatgttcgccgccttcggggtgttctggagcagcctggtattgctgctcggcgcgccgccgcattcgctgtcgcacagcgccatcggcgccttcggcctggtcggcgcgctcggcgcgctgggcgcggcgcgggccggcagcctggccgatcgcggccacgcccaggcgctcagcggcggcgccctgctgctgttgctgctgtcctggctgccgctcgccctcggcgcgcattcgctggcggcgctgattctcggcgtgctgctgctcgatctcgccggccaggcgatccatgtgctcaaccagagcctggtcttcgccatcgacccgcgcgcccacagccgcctggtgggttgctacatgctgttctacgccgccggcagcggcctcggcgccagcgccggcaccgccatgtacgcctgggccggctgggacgcggtgagcctgctcggcgcggcgatcagcctggcggccctggcgttctggtggttcacccgtggcgttggcggcgaagcgcgtacggcctgcgccaacggcgcctga

SEQ ID NO: 80594 - protein, 403 aa, Pseudomonas aeruginosa PAO1
MPSSPSSLPSALVLLFAVACGLSVANVYYAQPLLDVLGAEFAIGQAGVGLLFGTTQAGCALALLLVVPLGDLLERRRLMFVQLLLLVLSLLLVGFAGDTLGLALGLLGLGLLGTAMTQGLLAYAAALAAPGERGRVVGAAQGGVVIGLLLARSLAGLLADLGGWRSVYLVSAASMGGLGLLLWRVLPAAPSNELGLTYRQLLGSMFDLLASQRVLQVRGLLGLLMFAAFGVFWSSLVLLLGAPPHSLSHSAIGAFGLVGALGALGAARAGSLADRGHAQALSGGALLLLLLSWLPLALGAHSLAALILGVLLLDLAGQAIHVLNQSLVFAIDPRAHSRLVGCYMLFYAAGSGLGASAGTAMYAWAGWDAVSLLGAAISLAALAFWWFTRGVGGEARTACANGA

SEQ ID NO: 80595 - DNA, 1185 bp, Escherichia coli O157:H7 EDL933
  CDS (1)..(1185): transl_table=11
  misc_feature (688)..(688): y is t or c
atgaccaaacctaatcatgagcttagcccggcgctaatcgtgctgatgtctatcgccaccggtctggcggtcgccagcaactattacgcccagccattgctcgacaccatcgcgcgtaacttttccctttccgccagttcggcaggctttattgttaccgccgcgcagttgggctatgccgccggtctgctgtttcttgttcccctcggtgatatgtttgaacgccgccgcctgattgtctcgatgaccttactggcagcgggcggtatgttaatcactgccagcagtcagtcactggcgatgatgatcctcggtacggcattaaccggtttattctcagtcgtggcacaaattctggttccgctggcagcgacgctggcttcaccggataaacgcggcaaagtggttggcaccattatgagcggtctgctgttggggatattgctggcacgaaccgttgccgggttactggcaaacctcggcggctggcgcaccgtcttttgggttgcctcggtgttaatggctctgatggcgctggcattatggcgtggtctgccacaaatgaaatcagaaacccacctcaactacccacagttgttgggttccgttttcagcatgtttatcagcaataagatcctgcgcacccgcgcgttgctgggctgcctgacctttgccaacttcagcattytctggacctcaatggcctttttgcttgccgctccaccttttaactacagcgatggtgtaattggtctgtttgggcttgcgggagctgccggagcgttgggcgctcgtccggcgggcggttttgccgacaagggcaaatcgcaccacaccacaactttcggtctgcttctgctgttactttcatggctggcaatctggtttggtcacacttccgtactggcgttgattatcggcattctggtgctggacctcaccgtacagggcgtgcatatcactaaccagacggtaatttatcgaatacatcctgatgcgcgtaatcgcctgaccgcaggttacatgaccagctactttattggcggtgccgccggttcgctaatttcagcctcagcctggcaacatggcggttgggctggcgtttgtctggctggcgcgacgattgccctggttaacttactggtctggtggcgaggttttcatcgtcaggaagccgcaaattaa

SEQ ID NO: 80596 - protein, 394 aa, Escherichia coli O157:H7 EDL933
  misc_feature (230)..(230): The Xaa at location 230 stands for Leu, or Phe.
MTKPNHELSPALIVLMSIATGLAVASNYYAQPLLDTIARNFSLSASSAGFIVTAAQLGYAAGLLFLVPLGDMFERRRLIVSMTLLAAGGMLITASSQSLAMMILGTALTGLFSVVAQILVPLAATLASPDKRGKVVGTIMSGLLLGILLARTVAGLLANLGGWRTVFWVASVLMALMALALWRGLPQMKSETHLNYPQLLGSVFSMFISNKILRTRALLGCLTFANFSIXWTSMAFLLAAPPFNYSDGVIGLFGLAGAAGALGARPAGGFADKGKSHHTTTFGLLLLLLSWLAIWFGHTSVLALIIGILVLDLTVQGVHITNQTVIYRIHPDARNRLTAGYMTSYFIGGAAGSLISASAWQHGGWAGVCLAGATIALVNLLVWWRGFHRQEAAN

SEQ ID NO: 80597 - DNA, 1326 bp, Clostridium acetobutylicum ATCC 824
  CDS (1)..(1326): transl_table=11
gtgaaaaagttgtatatgattttttgcttgaattttatagaaaaatatagagggagatttaagatttattttgaattagtgtatagtatgtatacaatggagatggagatgtttaaaatgactattaaagaatcttttgagcttaataagttcattatattcattatggcattaacgtgtacggttactgttgctaatttgtattattgtcagcctcttttaggacaaatagctaaaagctttaatgttacagaggctaatgctggatttgttgttacgttaactcaagtaggatatgctcttggaatgctttttcttgtaccgcttggagatataaaagaaagaaaaaagcttataatagagatgcttttattggtttcagtattcctttttgctgcttttatttctagaaattattatgttttattagttacatcatttttaataggatttacaactatagtgccacagcttattgtaccgtttgcggcacatctatcaaaacccgaagaacgtggacaagtaataggtaatgttctgagcggactattaataggtatacttttatctagagtttttagtggaataataggtgatatcttaggttggagaaatgtatatttgatagcctcgttactaatggtttcttttttatttataattgtgttcttgtttcctaagagtaaacctacatctaagataagctataaaaaattaatattttctatgtggggattgataaaaagagaaaaagttcttagagaagcttctattaatggagcgcttatgtttggatcgtttagtatattttggactgcgcttgtatttttattggaatctaaagtatataatatgggatccaaagaagctggtttctttggattagttggtattgtgggtgctttggctgcacctgtagttgggaaagttgcagataaaaaaacaccaagatttgcagttggatttgctataatcttttctacaatagcttatgtttgtttttggggcatgggatataaaatatatggacttgtaattggagttattttgcttgatttaggaaatcaaaccggacaagtttcaaatcaagcaagagttcaagctataagtgatcaagagagaagtcgtataaatactgtatttatggtttcatattttattggaggttcaattggatcatttgttgcagctgtattttggcaaaagtttggatggagtggtgtgtgtgctattggtatgttttttcaaataattgcagttatatttcattattttatatacggaactaaatttagcattagaaataagtatggacaggtaaggtga

SEQ ID NO: 80598 - protein, 441 aa, Clostridium acetobutylicum ATCC 824
MKKLYMIFCLNFIEKYRGRFKIYFELVYSMYTMEMEMFKMTIKESFELNKFIIFIMALTCTVTVANLYYCQPLLGQIAKSFNVTEANAGFVVTLTQVGYALGMLFLVPLGDIKERKKLIIEMLLLVSVFLFAAFISRNYYVLLVTSFLIGFTTIVPQLIVPFAAHLSKPEERGQVIGNVLSGLLIGILLSRVFSGIIGDILGWRNVYLIASLLMVSFLFIIVFLFPKSKPTSKISYKKLIFSMWGLIKREKVLREASINGALMFGSFSIFWTALVFLLESKVYNMGSKEAGFFGLVGIVGALAAPVVGKVADKKTPRFAVGFAIIFSTIAYVCFWGMGYKIYGLVIGVILLDLGNQTGQVSNQARVQAISDQERSRINTVFMVSYFIGGSIGSFVAAVFWQKFGWSGVCAIGMFFQIIAVIFHYFIYGTKFSIRNKYGQVR

SEQ ID NO: 80599 - DNA, 1185 bp, Clostridium acetobutylicum ATCC 824
  CDS (1)..(1185): transl_table=11
atggaaaacttaaataatgatcttatggagaataaatctatattgaataagttattaattatggttatgtctatagcctgtggacttactgttgcaaatttatattatatacaaccattgctggcggatatatctaagacatttaatgtaagtgaaattagtgtaggctctgcagcaatgcttacacaaataggatatgcagttggaatggtattgatattgcccctaggagatataaaagaaaggcgaaatttgataactacgatacttctgttttcagtaatctctcttgcaagtatgtttttttcgagtaatatctatattttaacaatttcttcttttgcagttggatttacttctatcatccctcagcttatcatcccattagctgctcagttatcaaatcaaaaggatagaggccgaataatagggacagttatgagcggtttattaatcggtatattagtatcgcgtacattcagcggtattttaggtgcttattggggctggagagtagtgtatattattgcagctattatgatgatatttcttatgattgccttaagaaagttactacctgtaagtaaaccatcctctaacgttaaatatattgagctattaaaatcaatgttccaattaataaaaagtgaacctgttttaagagaagcatctatcaatggagctatgatgtttgcagcttttagtgcattttggacatcacttacatttttactccaaagtcctcattataatatgggctctcaggcagctggtttatttggattagttggcgttagtggtgccttagcagctcctttagttggaagaatagctgataagaagggtcctagatttattataggcatttgtatacctattataacaatttcctatttactatttctcttgcttggatttaaaatatttggattaattttaggagttatgctacttgatctaggagttcaatctggaaatgtttccaatcagactagagtacattctttaaatgaaaaaatgcgcaacagaattaatactgtctatatggtaagcttttttcttggaggagcattcggttcttttatgggttcttttacttatgtacactttggatggtacggagtatgtattttcggaatatcaactcaaattataacatttattatccataaaatcacaaaataa

SEQ ID NO: 80600 - protein, 394 aa, Clostridium acetobutylicum ATCC 824
MENLNNDLMENKSILNKLLIMVMSIACGLTVANLYYIQPLLADISKTFNVSEISVGSAAMLTQIGYAVGMVLILPLGDIKERRNLITTILLFSVISLASMFFSSNIYILTISSFAVGFTSIIPQLIIPLAAQLSNQKDRGRIIGTVMSGLLIGILVSRTFSGILGAYWGWRVVYIIAAIMMIFLMIALRKLLPVSKPSSNVKYIELLKSMFQLIKSEPVLREASINGAMMFAAFSAFWTSLTFLLQSPHYNMGSQAAGLFGLVGVSGALAAPLVGRIADKKGPRFIIGICIPIITISYLLFLLLGFKIFGLILGVMLLDLGVQSGNVSNQTRVHSLNEKMRNRINTVYMVSFFLGGAFGSFMGSFTYVHFGWYGVCIFGISTQIITFIIHKITK

SEQ ID NO: 80601 - DNA, 1218 bp, Agrobacterium tumefaciens str. C58
  CDS (1)..(1218): transl_table=11
ttggagaaaatgatgacaacgcgtgtaattgatggggatgatgttgaagcgacatccatttccccggctctgacgtttttgctggcaacagcctgcgggctgattgcagccaatctttattatggccagccgcttgccggcatcatcgggacggaactcggtctttccgccggcgccactggcctgatcgtgacgctgacgcagatcggttatggtatcggcctgctgttcgtcgtgccgctcggtgatctcgtcgaaaaccgcaagctggtggtcagttcggtctcgatggcggtgttgtcgctcgtcgctgctgcgtttgcgccgcatgcggcgccgttcctgatcgccgccttcctggttggcgtcagttccgtggcggtacaggtcatcgttccctatgctgcgcatatggcgccgcacgccattcgggggcgcgtggtcggcaatgtcatgagcgggctgatggccggcatcatgctggcgcggccggtctccagcctgctatcggaggtggtttcctggcgtggcgtctttctgacgtccgcagcggtcatggcgcttcttgccgtggtgcttttccgacttctgcccgttcgtatgcccgaagcgcggctgagctacggcgcgttgatggcctcgatgggcaggcttgccttgcatactccgatcctgcggcggcgggcgatctaccacgctttcctctttgccgccttcagcctgttctggacgacgacgccgctttatctgagcgggccgcatttcaatctcagccagggtgagatcgcgctcttcgcactggcgggcgcggccggcaccgtggccgcaccaattgccgggcggatggccgatcgtggctggacccgtgtggccacgctctttgcgctggtgtcggtggcgctctctttcgccgtcacgcatctggcgcccgaaggttcgcatctggcgctcgccattctggtcgtcgcggcaatcgttctggatttcggcgtcaccaccaatctggtactcggccaacgagcgatcttcacgcttggggcggaattccgcagccgcctgaacggtatttacatggcgacgtttttcatgggcggtgcgatcggttccgccgtgggtggctgggcctatgcggttggcgaatggccagccgcctcgtggatcggtttcgccttgccggtagcggcgctcctgtatttcctgacggaaaagcgcgcataa

SEQ ID NO: 80602 - protein, 405 aa, Agrobacterium tumefaciens str. C58
MEKMMTTRVIDGDDVEATSISPALTFLLATACGLIAANLYYGQPLAGIIGTELGLSAGATGLIVTLTQIGYGIGLLFVVPLGDLVENRKLVVSSVSMAVLSLVAAAFAPHAAPFLIAAFLVGVSSVAVQVIVPYAAHMAPHAIRGRVVGNVMSGLMAGIMLARPVSSLLSEVVSWRGVFLTSAAVMALLAVVLFRLLPVRMPEARLSYGALMASMGRLALHTPILRRRAIYHAFLFAAFSLFWTTTPLYLSGPHFNLSQGEIALFALAGAAGTVAAPIAGRMADRGWTRVATLFALVSVALSFAVTHLAPEGSHLALAILVVAAIVLDFGVTTNLVLGQRAIFTLGAEFRSRLNGIYMATFFMGGAIGSAVGGWAYAVGEWPAASWIGFALPVAALLYFLTEKRA

SEQ ID NO: 80603 - DNA, 1188 bp, Bacillus subtilis subsp. subtilis str. 168
  CDS (1)..(1188): transl_table=11
atggctaatggaaacaaacaagcaggtcagaggatttcacccagtttaacccttcttctcgcaactgcatgcggtatcattgttgctaatctttactatgcacaacccttggtcggattaattagtaaggcaattggactttctccaagcggtgctggattgattgtcacactcacccaaatcggatacgttgccggcttactattccttgtccctttaggagatattatcgaaaacaaaaaacttattgttgtatcgctccttctaagcgcagcggctttgacactaacagcatttgtgaagcatggaacactgtttttagcagctgcgtttttcgtcggattgggatcaatcgcagcccaagtgcttgttccatttgcatcataccttgcatcagacgctgcacgcggccgggttgttggcaatgtcatgagcggcttattactcggtattatgctttcccgtccgatatctagtctagtcgctgatatctgggggtggaatgcaatattcgctttgtccgccgtggtaagtgttatcctggccatcgtattatcaaaagtgcttcctgccagaaaaccaacagcaaatacaaactatactgccttactcggttcaatgtggaagctgctgcgcacgactccagtcttacgccgccgtgccatctatcatgcgtttgtatttggagctttcagcttgttctggacaactgttcctttattattgtccggtcctgattttcatttttctcagaaggcaatagcactctacgcattggtgggcattgcgggtgcagtcactgcaccaataggcggccgcctggctgatcgaggcttaaccaggcttgccactggaatcgctctcggtgttgtcgttgtctctttattactgccgctcatgattcagagcagctcccccgtcggtataacagttctagtggccgctgctattctgttagatatgggtgtatctgcaaaccttgtgctcagtcaacgtgctattttttcgttggcgcctgaaattcgcagtcgattaaacggattattcatggcgatcttctttctaggcggtgcgatagggtcatcaattggaggatgggcatatgcctcaggcggatggagtacagcattatggattggaatcgcttttccggtcatcgctttgctttatttcatcacagagaaataa

SEQ ID NO: 80604 - protein, 395 aa, Bacillus subtilis subsp. subtilis str. 168
MANGNKQAGQRISPSLTLLLATACGIIVANLYYAQPLVGLISKAIGLSPSGAGLIVTLTQIGYVAGLLFLVPLGDIIENKKLIVVSLLLSAAALTLTAFVKHGTLFLAAAFFVGLGSIAAQVLVPFASYLASDAARGRVVGNVMSGLLLGIMLSRPISSLVADIWGWNAIFALSAVVSVILAIVLSKVLPARKPTANTNYTALLGSMWKLLRTTPVLRRRAIYHAFVFGAFSLFWTTVPLLLSGPDFHFSQKAIALYALVGIAGAVTAPIGGRLADRGLTRLATGIALGVVVVSLLLPLMIQSSSPVGITVLVAAAILLDMGVSANLVLSQRAIFSLAPEIRSRLNGLFMAIFFLGGAIGSSIGGWAYASGGWSTALWIGIAFPVIALLYFITEK

SEQ ID NO: 80605 - DNA, 1158 bp, Sinorhizobium meliloti 1021
  CDS (1)..(1158): transl_table=11
atggccgccgcctgcggcctgattgccgccaacctctactatacgcagccactcgccgggccgattgcagtcgacatcggcctgccggcagaggcaaccggcctgatcgttaccctgacgcagatcggctatggccttgggctgctgctgctcgtgccgctaggtgacctcgtggaaaatcgtcggctgatcgtgaccatgatcggcgtggttactctcgccctgatcgcggccggcctctcaaccacgcccgggcccttcctcaccgcttcgcttgccatcggggtaggctcggttgcagtccagatgatcgttcccttcgctgccaaccttgctccggatgcggctcggggccgcgtcgtcggcaatatcatgagcgggttgatggtcggcatcatgatggcgcggccgatttccgggctgatcgccggcctcagctcctggcatgccgtcttttatatttccgctatcgtcatggtcgggcttggaaccctgctatgggtccaactgccgatccgcatgccgacggcccggctgagttacggccaactgctcaagtcgatggcccagcttctcgcggcgcagccggtcctgcagcgccgcgccgcatatcaggcctttcagttcgccgcattcagcctcttctggaccgtcacgccgctctatcttgcaggcccgcgctttgggctgggtcacaacggcattgcgcttttcgccctcgccggtgttgcgggcgccattgcttcccccatcgcgggacgcctcgcggacaaggggttggttcggccggcgacggcattcggccttctcagtgtcggtgtcgcttttctggtgacacaaatcgcttctgaaggttcagccattgcgctcacgcttctgacgcttgctgccatcctgctcgacttcggcgtaaccatgacgttggtgaccgggcagcgctcgatttacgaactcggcgcggagttgcgcagccggctcaacggcctgttcatggctatcttcttcactggcggcgcaattggctctgccttgggtgcctgggcttttgcctctggtggatggtggttcgcgtccatgatcggcttcgctctgcccgccacagcggtcgccatcttcctgaccgagaaacacggtcaggaaagaagcttgcagcattga

SEQ ID NO: 80606 - protein, 385 aa, Sinorhizobium meliloti 1021
MAAACGLIAANLYYTQPLAGPIAVDIGLPAEATGLIVTLTQIGYGLGLLLLVPLGDLVENRRLIVTMIGVVTLALIAAGLSTTPGPFLTASLAIGVGSVAVQMIVPFAANLAPDAARGRVVGNIMSGLMVGIMMARPISGLIAGLSSWHAVFYISAIVMVGLGTLLWVQLPIRMPTARLSYGQLLKSMAQLLAAQPVLQRRAAYQAFQFAAFSLFWTVTPLYLAGPRFGLGHNGIALFALAGVAGAIASPIAGRLADKGLVRPATAFGLLSVGVAFLVTQIASEGSAIALTLLTLAAILLDFGVTMTLVTGQRSIYELGAELRSRLNGLFMAIFFTGGAIGSALGAWAFASGGWWFASMIGFALPATAVAIFLTEKHGQERSLQH

SEQ ID NO: 80607 - DNA, 1410 bp, Sinorhizobium meliloti 1021
  CDS (1)..(1410): transl_table=11
atgaccaccaatcgccgatcacgtcgagcgatcgggcgctcggacaatagtctgagatgtgactcttgcgtcggaccatgcatgctcgttcagtttccaaaatcagttgcaatattaaactttccgcgatatccgtcaaatagtttaatgttgcaactgtcgaagggcctcatgtcgatatgtgagatcgaatccacggctatcgcaccggcatgcgataccacgtcgggaaagcgttcgaagccagggttatctcggtcgttaactctgctcttcgcggcagcgagcggcctcgctgtcgcaaacgcgtatttcgcgcacccgcttctcgatgtgatcgccgacgatctctcgctgccgcgggcgactatcgggttcgtggtcggcgccacccagctcggctacggactgggtctcgtcctgcttgtacccgtgggggatctggtcgaccggcgcaacctcgtcatcatccagtctctcctatcggttctggcattgctctgcgtcggctttgctccgacagaagaggtgctcttcccggcgttgattgcgatgggctttttcgccgtggctacgcaggcattcgtcgcctatgcggcaagcctcgcacgacccgaggagcgcggcgcagtcgtcggtacggtgacaagcggaatcgtgctcggcatcctgctggcgcggacggtggccggcgccgtcgtcgacattgccggctggcgcgcggtctatctgctgtcggctgcgttcacgctcgctatcaccgcaattctcgctcgtgtcgtgccagcgcagccgaagagcggtccggcggtctcttatccgaagctaatcggatccctgttcacgttgtttctgcaggagccggtcctgcgtgtccgggcgatcctcgcgtttctgatcttcgccgatgtcacgacgcttttgacgccgctcgtccttcccttgagcgccccgccttattcgttgtcgcatgctgcgatcggtctgttcggattagcgggcgcggcgggcgcgctgggggcttcgagggcgggacgttggaccgacgaaggcttcggccagcgcgttaccggcgtggcgctcacgctgatgctctgctcatggattttgatcgggctgcttccttattcgatccttttcctcgttaccggggtgctgctgctcgatttcgggctccaggccgttcacgtggcgagccaaggcctgatctatcgggtgagacctgaagcccaaagtcgcctcaccgccgcctatatggtattctactcgaccggatctgctctcggctcctctatctcaaccctggtctatgcccgttgggcgtggacgggagtaagcatgcttggtgccggcattgcggcggcggcactcctcttttgggcgataacgcttcccaagcgcatggcctga

SEQ ID NO: 80608 - protein, 469 aa, Sinorhizobium meliloti 1021
MTTNRRSRRAIGRSDNSLRCDSCVGPCMLVQFPKSVAILNFPRYPSNSLMLQLSKGLMSICEIESTAIAPACDTTSGKRSKPGLSRSLTLLFAAASGLAVANAYFAHPLLDVIADDLSLPRATIGFVVGATQLGYGLGLVLLVPVGDLVDRRNLVIIQSLLSVLALLCVGFAPTEEVLFPALIAMGFFAVATQAFVAYAASLARPEERGAVVGTVTSGIVLGILLARTVAGAVVDIAGWRAVYLLSAAFTLAITAILARVVPAQPKSGPAVSYPKLIGSLFTLFLQEPVLRVRAILAFLIFADVTTLLTPLVLPLSAPPYSLSHAAIGLFGLAGAAGALGASRAGRWTDEGFGQRVTGVALTLMLCSWILIGLLPYSILFLVTGVLLLDFGLQAVHVASQGLIYRVRPEAQSRLTAAYMVFYSTGSALGSSISTLVYARWAWTGVSMLGAGIAAAALLFWAITLPKRMA

SEQ ID NO: 80609 - DNA, 1209 bp, Agrobacterium tumefaciens str. C58
  CDS (1)..(1209): transl_table=11
atgatgacaacgcgtgtaattgatggggatgatgttgaagcgacatccatttccccggctctgacgtttttgctggcaacagcctgcgggctgattgcagccaatctttattatggccagccgcttgccggcatcatcgggacggaactcggtctttccgccggcgccactggcctgatcgtgacgctgacgcagatcggttatggtatcggcctgctgttcgtcgtgccgctcggtgatctcgtcgaaaaccgcaagctggtggtcagttcggtctcgatggcggtgttgtcgctcgtcgctgctgcgtttgcgccgcatgcggcgccgttcctgatcgccgccttcctggttggcgtcagttccgtggcggtacaggtcatcgttccctatgctgcgcatatggcgccgcacgccattcgggggcgcgtggtcggcaatgtcatgagcgggctgatggccggcatcatgctggcgcggccggtctccagcctgctatcggaggtggtttcctggcgtggcgtctttctgacgtccgcagcggtcatggcgcttcttgccgtggtgcttttccgacttctgcccgttcgtatgcccgaagcgcggctgagctacggcgcgttgatggcctcgatgggcaggcttgccttgcatactccgatcctgcggcggcgggcgatctaccacgctttcctctttgccgccttcagcctgttctggacgacgacgccgctttatctgagcgggccgcatttcaatctcagccagggtgagatcgcgctcttcgcactggcgggcgcggccggcaccgtggccgcaccaattgccgggcggatggccgatcgtggctggacccgtgtggccacgctctttgcgctggtgtcggtggcgctctctttcgccgtcacgcatctggcgcccgaaggttcgcatctggcgctcgccattctggtcgtcgcggcaatcgttctggatttcggcgtcaccaccaatctggtactcggccaacgagcgatcttcacgcttggggcggaattccgcagccgcctgaacggtatttacatggcgacgtttttcatgggcggtgcgatcggttccgccgtgggtggctgggcctatgcggttggcgaatggccagccgcctcgtggatcggtttcgccttgccggtagcggcgctcctgtatttcctgacggaaaagcgcgcataa

SEQ ID NO: 80610 - protein, 402 aa, Agrobacterium tumefaciens str. C58
MMTTRVIDGDDVEATSISPALTFLLATACGLIAANLYYGQPLAGIIGTELGLSAGATGLIVTLTQIGYGIGLLFVVPLGDLVENRKLVVSSVSMAVLSLVAAAFAPHAAPFLIAAFLVGVSSVAVQVIVPYAAHMAPHAIRGRVVGNVMSGLMAGIMLARPVSSLLSEVVSWRGVFLTSAAVMALLAVVLFRLLPVRMPEARLSYGALMASMGRLALHTPILRRRAIYHAFLFAAFSLFWTTTPLYLSGPHFNLSQGEIALFALAGAAGTVAAPIAGRMADRGWTRVATLFALVSVALSFAVTHLAPEGSHLALAILVVAAIVLDFGVTTNLVLGQRAIFTLGAEFRSRLNGIYMATFFMGGAIGSAVGGWAYAVGEWPAASWIGFALPVAALLYFLTEKRA

SEQ ID NO: 80611 - DNA, 1293 bp, Streptomyces coelicolor A3(2)
  CDS (1)..(1293): transl_table=11
atgccgtcttcgccgtcctccaccactcccgcccccacgtccactccggccgccaggagggagccctccgggaaggggccgtccggcgccgccgcccggctcttcctccccctgatcgccctgtgcaccgccgtgacggccgccaacatctacctcgcggcgccgctgctccccctcatcgcccacgacatgggctccaccccgtcggcggtcgcctggctcgcctcggtcgcccagctgggatacgcggccggcctgctcttcttcgccccgctcggggacagcgtgaaccggcgccgcctggtcgccgccctctcgctggtcgccaccgccgccctgctcaccgccgccgcgtcggccgggaccggcgcgctcgccggcgccgtcctggtcgcctcggccgccaccgtcgtaccgcagctgctggtcccgctggtcgccgagcgtgctcccgccgaccgccgggcccggcacgtcgcggccgtcatcgcgggcctgttcaccggcgtcgtcgcggcccgggtgctcggcggcctcgccgggcaggccttcggctggcgggcggtgttcgtgggcgccgccgtcctcaccgccgtactggggctggcgaccgcgtacatcctaccggtggagcggcggcagcggcggggcccgctgttcgccgggctcgtcgcgataccgggactggtgcgccgctcgcccgacctgtggcgggcgtgcgtgcgccaggcggggatgtacggcgcctggagcgccctgtggacctcgctggccctgctgctcacggagggcgaggggtacggcatgaccaccgccgcggccggactgttcggcctgttcgggctggcggcgagtgtcgtcgcgccgctcgccgggggtctggtcgaccggttcggcgcggccaaggtcgtacggtccgcgtacgcgctggccgccctctcggtgccgctgttctggctgggcggtcaggtgatggcggcactgtgcgcggccgccgtcctggtgcacgccgccctggtcgcctcgcacgtcgccaaccagaccctggccctcaccacgacctcggccccggccaccgccaacacggcgtacgtcgtcgccggcttcgcgggcggcgcgctcgcctcggccctcgcggggcccgcgttcggccactggggctggggcggcgtgtgcgcggtggcgggggcctggctggtgctggggtggacggccacggccgtacgccctgcgcggtctgcgcgatctgcgcgatctgcgcggtccgtgcggtccgtgcggtccgctcggtaa

SEQ ID NO: 80612 - protein, 430 aa, Streptomyces coelicolor A3(2)
MPSSPSSTTPAPTSTPAARREPSGKGPSGAAARLFLPLIALCTAVTAANIYLAAPLLPLIAHDMGSTPSAVAWLASVAQLGYAAGLLFFAPLGDSVNRRRLVAALSLVATAALLTAAASAGTGALAGAVLVASAATVVPQLLVPLVAERAPADRRARHVAAVIAGLFTGVVAARVLGGLAGQAFGWRAVFVGAAVLTAVLGLATAYILPVERRQRRGPLFAGLVAIPGLVRRSPDLWRACVRQAGMYGAWSALWTSLALLLTEGEGYGMTTAAAGLFGLFGLAASVVAPLAGGLVDRFGAAKVVRSAYALAALSVPLFWLGGQVMAALCAAAVLVHAALVASHVANQTLALTTTSAPATANTAYVVAGFAGGALASALAGPAFGHWGWGGVCAVAGAWLVLGWTATAVRPARSARSARSARSVRSVRSAR

SEQ ID NO: 80613 - DNA, 1191 bp, Xanthomonas axonopodis pv. citri str. 306
  CDS (1)..(1191): transl_table=11
atgcagaccgagcccacctcccacccgcccttgccccgtcgcctggtgctgctgatggccgccgccaccgggttggcggtggcgagcaattactacgcccagccgctgctggaaacgctggcgcaggcattcggcatccaggtgcgcagtgccggtgcggtggtcaccgcggcgcagttggcgtacgcggcggggttgctgttgctggtgccgctgggcgaccggctggagcggcgcggcctgatcgtgggcctgttcgtactgagcgcgcttgggctgctggtgagcgccagttcgcacagttttgcgatgttgctggccggcaccatcgtgaccggcgccagctcggtggcggcgcagatcctggtgccgttcgccgccacgctggctgcgccccacgagcgtggccgggtgatcggcacggtgatgagcgggttgctgctggggatcttgctggcgcgcaccgcggccggcgtgctcgccggtgtcggcggctggcatacggtgtactggatcgcctcggtcgcgttgctgctcaccgccgggctgttgtggcgcgggctgccgcgccatcccggcaatgcgcaactggcgtacccgcggttggtgggctcggtgctgacgctgctgcgcgacgatgcggtgctgcgttcgcgcgcggtgctgggcgggctgatctttgccggcttcagcatgttctggaccacgctggcgtttttgttgtccgggccgagttatggctacggcacggcggtgatcggcttgttcggcctgatcggtgcggccggtgcactggccgccaatcgctccgggcactggtccgatcacggccatggcgaccgcgtgagctggggcgggctggcgatgttgctgctgtcgtggggcttgctggcgtttgcgccgcagtcgatcgtgctgctgatcgtcggcgtgctgctgctggatatcgcggtgcagggcgtgcatatcgccaaccagagcgtgatctatcagcgcaacccggcggcgcgcaatcgcatcacctcggcctacatcacctgctatttcatcggcggtgcagtgggctcgaccctgggcacggcggcgtatgcgcaggccggctggatgggtgtggtgatcggtggcgcggtgcttgctgcggcggcgctgggctgggtggggctgagcgtggcgcgcaagcagtggaagtga

SEQ ID NO: 80614 - protein, 396 aa, Xanthomonas axonopodis pv. citri str. 306
MQTEPTSHPPLPRRLVLLMAAATGLAVASNYYAQPLLETLAQAFGIQVRSAGAVVTAAQLAYAAGLLLLVPLGDRLERRGLIVGLFVLSALGLLVSASSHSFAMLLAGTIVTGASSVAAQILVPFAATLAAPHERGRVIGTVMSGLLLGILLARTAAGVLAGVGGWHTVYWIASVALLLTAGLLWRGLPRHPGNAQLAYPRLVGSVLTLLRDDAVLRSRAVLGGLIFAGFSMFWTTLAFLLSGPSYGYGTAVIGLFGLIGAAGALAANRSGHWSDHGHGDRVSWGGLAMLLLSWGLLAFAPQSIVLLIVGVLLLDIAVQGVHIANQSVIYQRNPAARNRITSAYITCYFIGGAVGSTLGTAAYAQAGWMGVVIGGAVLAAAALGWVGLSVARKQWK

SEQ ID NO: 80615 - DNA, 960 bp, Shigella flexneri 2a str. 301
  CDS (1)..(960): transl_table=11
atgactaaacctaatcatgagcttagcccggcgctgatcgtgctgatgtctatcgccaccggtctggcggtagccagtaactattacgcccagccattgctcgacaccatcgcgcgtaacttttccctttccgccagttcggcaggctttattgttaccgccgcgcagttgggctatgccgcaggtctactgtttcttgttcccctcggtgatatgtttgaacgccgccgcctgattgtctcgatgaccttactggcagcgggcggtatgttaatcactgccagcagtcagtcactggcgatgatgatcctcggtacggcattaaccggtttattctcagtcgtggcacaaattctggttccgctggcagcgacgctggcttcaccggataaacgcggcaaagtggttggcaccattatgagcggtctgctgttggggatattgctggcacgaaccgttgccgggttactggcaaacctcggcggctggcgcaccgtcttttgggttgcttcggtgttaatggcactgatggcgctggcattatggcgtggtctgccacaaatgaaatcagaaacccacctcaactacccacagttgttgggttccgttttcagcatgttcatcagcgataagatcctgcgcacccgcgcgttgctgggctgcatgacctttgccaacttcagcattctctggacctcaatggcctttttgcttgccgctccaccttttaactacagcgatggtgacattggtctgtttgggcttgcgggagctgccggagcgttgggcgctcgtccggcgggcggttttgccgacaagggcaaatcgcaccacaactttcggtctgcttctgctgttactttcatggctggcaatctggtttggtcacacttccgtactggcgttgattatcggcattctggtgctggacctcaccgtacagggcgtgcatatcactaa

SEQ ID NO: 80616 - protein, 319 aa, Shigella flexneri 2a str. 301
MTKPNHELSPALIVLMSIATGLAVASNYYAQPLLDTIARNFSLSASSAGFIVTAAQLGYAAGLLFLVPLGDMFERRRLIVSMTLLAAGGMLITASSQSLAMMILGTALTGLFSVVAQILVPLAATLASPDKRGKVVGTIMSGLLLGILLARTVAGLLANLGGWRTVFWVASVLMALMALALWRGLPQMKSETHLNYPQLLGSVFSMFISDKILRTRALLGCMTFANFSILWTSMAFLLAAPPFNYSDGDIGLFGLAGAAGALGARPAGGFADKGKSHHNFRSASAVTFMAGNLVWSHFRTGVDYRHSGAGPHRTGRAYH

SEQ ID NO: 80617 - DNA, 1188 bp, Pseudomonas putida KT2440
  CDS (1)..(1188): transl_table=11
atgcacacccccactctcagccgcgccttgatcctgctgatggccaccgccacaggcctggccgtggccagcaactattacgcccaaccactgctgcacagcatcgcccagcagtttggcttgagcaccgccagcgccggcagcatcgtgattgccgcgcaactcagctatggcgccggcctgttgctgctggcaccgctgggcgacctgttcgagcagcgccggctgattaccatgatgaccgttgtctccaccctgggcctggtcatcagcgcctgtgcacccagcctgccctggctgctgctcggcacggcgctgaccgggctgttctcggtggtggcacagatcctcgtgccgatggcagcgaccctgagtgagccccatcagcgtgggcgcgcggtcggcacactgatgagcggcctgctgctgggcatcctgctggcgcgtactgctgccggcttcatggccgagctgggtggctggcgcagtatctacgtgctggccgccgcgctgatggcacttaccgcgctggcgctataccgcagcctgccgcagcaccacagccacgccgggctgaaatatcctgcactgatcggctccgtgttccgcctgttcatcgaagaacccgtgctgcgcctgcgctcgctgctcggtctgttggcattcagcctgttcgccctgttctggacacccctggcgtttctgctggcgaatggcccctatcactattcggatgcggtgatcggcctgttcggcctggccggtgcggcgggtgcgttgtcggccaactgggccggacgcctggcggaccgtggcaaggggtcgctgggcaccaccgtgggcctggtggtgttgctgctgtcgtgggtgccgctggggtttgccgaacagtcgctgctcgccttgctgctgggcgtgctgatgctcgacctggcggtacaactggtgcatgtgagcaaccagaacgcggtgatcgccctgcggcccgaggcacgcacgcggctgaatgccggttatatcacctgctacttcattggcggggcgcttgggtcgttgctgggcacacagctgttccagcgccagggctggatggggattgtggtggccgggctggtgattggcgggctgggattgctggtgtggggcctggccgagcgtaagcgcaagaacaccttgcaggtggcctga

SEQ ID NO: 80618 - protein, 395 aa, Pseudomonas putida KT2440
MHTPTLSRALILLMATATGLAVASNYYAQPLLHSIAQQFGLSTASAGSIVIAAQLSYGAGLLLLAPLGDLFEQRRLITMMTVVSTLGLVISACAPSLPWLLLGTALTGLFSVVAQILVPMAATLSEPHQRGRAVGTLMSGLLLGILLARTAAGFMAELGGWRSIYVLAAALMALTALALYRSLPQHHSHAGLKYPALIGSVFRLFIEEPVLRLRSLLGLLAFSLFALFWTPLAFLLANGPYHYSDAVIGLFGLAGAAGALSANWAGRLADRGKGSLGTTVGLVVLLLSWVPLGFAEQSLLALLLGVLMLDLAVQLVHVSNQNAVIALRPEARTRLNAGYITCYFIGGALGSLLGTQLFQRQGWMGIVVAGLVIGGLGLLVWGLAERKRKNTLQVA

SEQ ID NO: 80619 - DNA, 1200 bp, Pseudomonas putida KT2440
  CDS (1)..(1200): transl_table=11
atgaacccctaccttgcgacagcgcaaccggcagccgccagcctgagccgggctctggtagtgctgctggcgttctgctgcggcgcgatcgtcgccaacatctactacgcccagcccatcgtcgggctgatcgccccggacctggggctgtccaccgagcatgccagcctgatcgtttccctcactcagctgggctatgccctgggcctgttattgctggtaccgctggccgacctgctggagaaccgccgcctgatggtggccaccgcggtcctggcctgcgtcagtctactgctggcaggcaccagcagcagtggccaggggcagctgttcctgggttacgcactgctgatcggcttcagttcggtgtcggtgcagatgctcatcccgctggcggcgcatctggcgccggaacagcagcgtggtcgtgtggtcggtaacatcatgggcggcttgttgctgggcatcctgctggcgcgaccgctgtcgagcgtggtggccgaccacttcggctggcgtgcggtgttcattggcgccgccggggtaatgctggcgatcatcctgttgctgtcattgaccttgccgcagcggcggcccgagcacaaagccagctataccgggctaatgctgtcgctgctcacactgctgcgtcgttatccactgttgcgtcagcgttcgttgtaccaggcattgatgtttgcagcgttcagcctttactggacggcagtgccgatggcgcttgccggggagcatggcctgtcacaaagccagatcgccgtgttcgcccttgtcggcgcggtgggcgccgtagctgcgcccttggccggccgcctggccgatgccgggcatgcccgcgccgcttcgctgctggcgcttttgctggcgccggcggccttgttgctggggctgacagtgccgggttacagcgtgattggcctgggccttaccggcgtgttgctggactttgcggtgcagatgaacatggtcatcggccagcgtgaagtgtacgcactggacccggccagccgcgggcggctgaatgcggtgtacatgaccagcatcttcctcggcggggcgctggggtcggcggtggccagtgcgctgttcagccagtttggctggcaaggcgtggcactggtgggggcggggttgccgggtgtggcgctggttgtgtttctactcaaagcacgccggggttga

SEQ ID NO: 80620 - protein, 399 aa, Pseudomonas putida KT2440
MNPYLATAQPAAASLSRALVVLLAFCCGAIVANIYYAQPIVGLIAPDLGLSTEHASLIVSLTQLGYALGLLLLVPLADLLENRRLMVATAVLACVSLLLAGTSSSGQGQLFLGYALLIGFSSVSVQMLIPLAAHLAPEQQRGRVVGNIMGGLLLGILLARPLSSVVADHFGWRAVFIGAAGVMLAIILLLSLTLPQRRPEHKASYTGLMLSLLTLLRRYPLLRQRSLYQALMFAAFSLYWTAVPMALAGEHGLSQSQIAVFALVGAVGAVAAPLAGRLADAGHARAASLLALLLAPAALLLGLTVPGYSVIGLGLTGVLLDFAVQMNMVIGQREVYALDPASRGRLNAVYMTSIFLGGALGSAVASALFSQFGWQGVALVGAGLPGVALVVFLLKARRG

SEQ ID NO: 80621 - DNA, 1185 bp, Escherichia coli CFT073
  CDS (1)..(1185): transl_table=11
atgactaaacctaatcatgagcttagcccggcgctgatcgtgctgatgtctatcgccaccggtctggcggtagccagtaactattacgcccagccattgctcgacaccatcgcgcgtaacttttccctttccgccagttcggcaggctttattgttaccgccgcgcagttgggctatgccgcaggtctgctgtttcttgttcccctcggtgatatgtttgaacgccgccgcctgattgtctcgatgaccttactggcagcaggcggcatgttaatcactgccagcagtcagtcgctggcgatgatgatcctcggtacagcattaaccggtttattttcagtcgtggcacaaattctggttccactggcagcgacgctggcttcaccggacaaacgcggcaaagtggttggcaccattatgagcggtctgctattggggatcttactcgcacggaccgttgccggattgctggcgaatctcggcggctggcgcaccgtcttttgggttgcttcgatgttaatggcactgatggcgctggcattatggcgtggtctgccacaaatgaaatcagaaacccacctcaactacccacagttgttgggttccgttttcagcatgtttatcagcaataagatcctgcgcacccgcgcgttgctgggctgcctgacctttgccaacttcagcattctctggacctcaatggcctttttgcttgccgctccaccttttaactacagcgatggtgtaattggtctgtttgggcttgcgggagctgccggagcgttgggcgctcgtccggcgggcggttttgccgataagggcaaatcgcaccacaccacaactttcggtctgctgctgctgttactttcatggctggcaatctggtttggtcacacttccgtactggcgctgattatcggcatcctggtgctggacctcaccgtgcagggcgtgcatatcactaaccagacggtaatttatcgaatacaccctgatgcgcgtaatcgcctgaccgcaggttacatgaccagctactttattggcggtgccgccggttcgctaatttcagcctcagcctggcaacatggcagttgggctggcgtgtgtctggctggcgcgacgattgccctggttaacttactggtctggtggcgaggttttcatcgtcaggaagccgcaaattaa

SEQ ID NO: 80622 - protein, 394 aa, Escherichia coli CFT073
MTKPNHELSPALIVLMSIATGLAVASNYYAQPLLDTIARNFSLSASSAGFIVTAAQLGYAAGLLFLVPLGDMFERRRLIVSMTLLAAGGMLITASSQSLAMMILGTALTGLFSVVAQILVPLAATLASPDKRGKVVGTIMSGLLLGILLARTVAGLLANLGGWRTVFWVASMLMALMALALWRGLPQMKSETHLNYPQLLGSVFSMFISNKILRTRALLGCLTFANFSILWTSMAFLLAAPPFNYSDGVIGLFGLAGAAGALGARPAGGFADKGKSHHTTTFGLLLLLLSWLAIWFGHTSVLALIIGILVLDLTVQGVHITNQTVIYRIHPDARNRLTAGYMTSYFIGGAAGSLISASAWQHGSWAGVCLAGATIALVNLLVWWRGFHRQEAAN

SEQ ID NO: 80623 - DNA, 1194 bp, Bradyrhizobium japonicum USDA 110
  CDS (1)..(1194): transl_table=11
atgacgatgaatgccaccatcgagaccgcgcccgaaccggatgcggtgtcgcagcgcctgaccttcgtgcttgccgcggcctgtggcatggtcgccgccaacatctactatgcccagccgctgatcgccccgatcagcgccgcgctgggcctgtcgcacgccgccgccgggctgatcgtcaccatgacgcagatcggctacggcaccgggctgctcttcatcgtgccgctcggcgatctcgtcgagaaccgtacgttgatttgctccgtcatcacgctcggcgccgtggcgctgctcgcagccgcgttcgcgacgcacgccctgccgttcctgatcgccgcgctgttcatcgggctcggctcggtcgcggtgcagatcatcattccttatgcggcgcatctggcgccggaggccatccgcggccgcgtcgtcggcaacgtctcgaccggcctgatgctcggcatcatgctggcgcgcccggtgtcgagcttcgtcacggcggcctcgtcatggcatgcggtgttcttcgcctccgcggcgctgatgattgtgctcgcagccgtgctctggatggtgctgccgacgcgcaagccggtggcgcgcatgcattacggcacgctgctgctgtcgatgccgcatctggtgcgcaccatgccgctgctccggcggcgcgcactctaccaggcgagcctgttcggttgcttcaccctgttctggacggtcgcaccactccagctcgcctccgagttcggcttctcccagcgcggcatcgcgctgttcgcgctggccggtgtcgccggcgtgttcgccgcgccaatcgcggggaggctcgccgatcgcggccatagccgcatcgcgacgctgattgcgatgttgctggcggccgcgggcttcctggtgacctatatcggcgcggccggctcgatgctgaacctcgcctgcctggtcgtggccgcgatcgccatcgatatcggcgtccagggcaacgtggtgctcggcttccgcgccatcttcgcgctcgggcacgagcatcgcagccgcctcaacggcctctacatggcgacgttcttcgcggccggcgcggccggctccgcggtcggcgcctgggccttcgcgcaaggcggctgggcgctcgcatcgggaatcggcctcgctctgcccgtcgcgggcctgctctatgcggccacggagtag

SEQ ID NO: 80624 - protein, 397 aa, Bradyrhizobium japonicum USDA 110
MTMNATIETAPEPDAVSQRLTFVLAAACGMVAANIYYAQPLIAPISAALGLSHAAAGLIVTMTQIGYGTGLLFIVPLGDLVENRTLICSVITLGAVALLAAAFATHALPFLIAALFIGLGSVAVQIIIPYAAHLAPEAIRGRVVGNVSTGLMLGIMLARPVSSFVTAASSWHAVFFASAALMIVLAAVLWMVLPTRKPVARMHYGTLLLSMPHLVRTMPLLRRRALYQASLFGCFTLFWTVAPLQLASEFGFSQRGIALFALAGVAGVFAAPIAGRLADRGHSRIATLIAMLLAAAGFLVTYIGAAGSMLNLACLVVAAIAIDIGVQGNVVLGFRAIFALGHEHRSRLNGLYMATFFAAGAAGSAVGAWAFAQGGWALASGIGLALPVAGLLYAATE

SEQ ID NO: 80625 - DNA, 1188 bp, Lactobacillus plantarum WCFS1
  CDS (1)..(1188): transl_table=11
gtgaattcaaaatctttaaataaaagtacggtcctattaatggcgatctccgcggccattgtagtggctaatattaattatattcaaccgattgaggcggacattgcgcaacagtttaatctcccaaacgccgttattggcgcggtggcaatgctgacgcagttaggctatgcctttgggttgctcttaattgtacccatgggtgatatcatgaatcgccgaatgttgattatgcgcttactggtactcgcaatcatttcagcgttactagccttcgtggctcccaatatttgggtgtacgccttggcaagtttactgattgggataacctctgtggcaccacaagttattattccgtacgctggctttctcgcacctcgtaatcagcgtggtcaagtcttgggcaacgtcctgagtggcttgctcgtgggggttctcttgtcacgaactgtcagtggggtacttgcgagctatttgccttggcagatggtctatctgattgccgctatcttgattgcaggattgtggctcgtcttgtggcgaaaattaccgcatgatcccgtgacgacacataccacgaattataaagccatgattcagacagtacctcagttagtaaaacgctatccggttttgcgagcgtcggctgttaacggatttgtcttgtttggtgtttctaatattttctgggcaacactcgtcttttacttgcaacatcaatacgggtggggaagtcgtgaagctggtctgcttgcgttgctaggtgttaccggtgtgttagcagcccctttaattggccgtctagctgatcgttttcggccccgaacgattatcggcttgggtctagtgttatcaacattagcctacgtcgtgttttggctgagtggtacgcatttggtggggttaattattggtattgtcattcttgatttaggtactcaattcgggcaggtcgcgaatcagacacggattcaaagcatcgatgtccatgccagtagccgtttcaattcggtattcatgtttggctacttcatgggtggcgccctaggttcattttgtggcaacgtcttatgggatttagctggttggaacggcgtctgcgggttagcggtcgtcgtgttaatgattggcttttatgcccactttgttcattatccacgggtggtgacacgacaagcgcaacattag

SEQ ID NO: 80626 - protein, 395 aa, Lactobacillus plantarum WCFS1
MNSKSLNKSTVLLMAISAAIVVANINYIQPIEADIAQQFNLPNAVIGAVAMLTQLGYAFGLLLIVPMGDIMNRRMLIMRLLVLAIISALLAFVAPNIWVYALASLLIGITSVAPQVIIPYAGFLAPRNQRGQVLGNVLSGLLVGVLLSRTVSGVLASYLPWQMVYLIAAILIAGLWLVLWRKLPHDPVTTHTTNYKAMIQTVPQLVKRYPVLRASAVNGFVLFGVSNIFWATLVFYLQHQYGWGSREAGLLALLGVTGVLAAPLIGRLADRFRPRTIIGLGLVLSTLAYVVFWLSGTHLVGLIIGIVILDLGTQFGQVANQTRIQSIDVHASSRFNSVFMFGYFMGGALGSFCGNVLWDLAGWNGVCGLAVVVLMIGFYAHFVHYPRVVTRQAQH

SEQ ID NO: 80627 - DNA, 1194 bp, Ruegeria sp. PR1b
  CDS (1)..(1194): transl_table=11
atgagctggaatccctcccggtcccccgactgctccccagcctccccagagctgacccgccctcttttgcttgctatgtccatcgccgcaggcggagccgttgccaatatctattataatcagccaatgctggagatcatacagagtgaccttggtgtgcgcatgacggcgcttgtccctatggcgacccagctaggctacgcgtgtgggctactactgctggttcctctgggcgatgccctgcctcgcaagcggctgatccttggacagttcctagcgctttcggcagcacttatacttgcagcgctcgcgccgactgggggagcgctcgtcattgcttcccttctggtcggtgccgctgcaacggtggcgcaacaaattattccctttgccgcgcatctggcgctacccgaacgccggggcgcggtcgtgggtacagtgatggctggtttgctggcaggtatcctcttgagccgaacaatcgctggagttgttgcggagttctggggatggcgcgaaatgttcgtcgcggcggttccggtggcgctcgccctcggggtcctcatggcacgactgttgccttccgagtcagtgcgaagcggcaccaactatggcactttgttgcggtctctgtaccggatttggagaacacagcccgtgctgcgtcgtgcggccacaatccaagctttgctgttcgcctcgttctccgcgttctggacggtccttgcactttatctcgacagcccgaaatttgagctcggggctgatgtcgccgggatcttcggcctcgtggggttggttggcattgccgcagcgcctctagcaggcaggtttgctgaccgtcgggggccggcgccggtggtactggctggtaccattctgacgcttggtgcctgggtgctctttgggacctggacgacgttggtcggtctggtcgtcggtgtcatagttctggatttcgcggttcaagcagcgctcatttcaaatcagcacgcggtgttcgcgctgggcgctgatattcgcgcccgcgtgacgaccttgttcatgggcgcgatgtttcttggtggagctttgggatcgggagtggcaagcataacgttccatgctggggggtggggcgctatatgccttgtaggcgctgctttcgcggcgtttgccttggctctgaccctgaaacaaggcacacatgggtag

SEQ ID NO: 80628 - protein, 397 aa, Ruegeria sp. PR1b
MSWNPSRSPDCSPASPELTRPLLLAMSIAAGGAVANIYYNQPMLEIIQSDLGVRMTALVPMATQLGYACGLLLLVPLGDALPRKRLILGQFLALSAALILAALAPTGGALVIASLLVGAAATVAQQIIPFAAHLALPERRGAVVGTVMAGLLAGILLSRTIAGVVAEFWGWREMFVAAVPVALALGVLMARLLPSESVRSGTNYGTLLRSLYRIWRTQPVLRRAATIQALLFASFSAFWTVLALYLDSPKFELGADVAGIFGLVGLVGIAAAPLAGRFADRRGPAPVVLAGTILTLGAWVLFGTWTTLVGLVVGVIVLDFAVQAALISNQHAVFALGADIRARVTTLFMGAMFLGGALGSGVASITFHAGGWGAICLVGAAFAAFALALTLKQGTHG

SEQ ID NO: 80629 - DNA, 1197 bp, Pseudomonas syringae pv. tomato str. DC3000
  CDS (1)..(1197): transl_table=11
atgccccactcggcccaatctgcgcataacaccgtcaccatgacgcccggtctggtgatgctgttcgcgttctgctgtggcgcgattgtcgccaatatctattacgcgcaaccgatcatcgagctgattgccccagacatcgggctgtcgagtacggcggccagtctgattgtttcgttgacgcagatcggttatgcactgggcctgttctttctggtgccgctgggcgatttgctggagaaccgcaggttgatgctggtcaccacggtggttgcggtgctcagcctgctgggcgctgcatttgccgagcagccgaatctgtttctgctggtctcgttgctggtcggtttcagctcggtgtcggtacagatgctgatcccgctggcggcgcatctggcgccggaagaatcgcgcggccgggtagttggcagcatcatgggcgggttgctgttggggattctgctcgcgcggcccatcgccagtctggtggctgaccatttcggatggcgtgcggtgttcggttcggcggccgtggtgatgatcggtatcagcgtggtgctggcgaccaccatgcccaaacgcctgcctgaacaccgtgcgtcctatggccagttgctgttctcgctctggaccctgttgcggacccagcctgtgctgcgccagcgtgctttttatcaggcctgcatgtttgcgacgttcagcctgttctggaccgccgtaccgctggaactgtcgcgcaatcacgggctatcgcaaacccagatcgccctttttgccttgatcggtgccattggtgccatcgcggcccccatcagcggccgtttggcagacgcaggctatacgcggataacgtcattgggcgcactgttgttcggggcactgagctttcttccgggccttattcatccggtatacagcgtgatcggcctgtcgataaccggcgtggtgctggatttctgcgtgcagaccagcatggtgttgggccagcgcaccgtttatgcactggatgccgcgagccgcagccgactcaacgcgttgtacatgaccagcattttcatcggcggcgcgattggctcggcggtggccagcccgctgtttgatcatggcggctggacctgggtgttgatcgcaggcacgctgctgccgctgactgcattgctggcgttgctcagggatcgatccaggcagaatgcgtaa

SEQ ID NO: 80630 - protein, 398 aa, Pseudomonas syringae pv. tomato str. DC3000
MPHSAQSAHNTVTMTPGLVMLFAFCCGAIVANIYYAQPIIELIAPDIGLSSTAASLIVSLTQIGYALGLFFLVPLGDLLENRRLMLVTTVVAVLSLLGAAFAEQPNLFLLVSLLVGFSSVSVQMLIPLAAHLAPEESRGRVVGSIMGGLLLGILLARPIASLVADHFGWRAVFGSAAVVMIGISVVLATTMPKRLPEHRASYGQLLFSLWTLLRTQPVLRQRAFYQACMFATFSLFWTAVPLELSRNHGLSQTQIALFALIGAIGAIAAPISGRLADAGYTRITSLGALLFGALSFLPGLIHPVYSVIGLSITGVVLDFCVQTSMVLGQRTVYALDAASRSRLNALYMTSIFIGGAIGSAVASPLFDHGGWTWVLIAGTLLPLTALLALLRDRSRQNA

SEQ ID NO: 80631 - DNA, 1185 bp, Salmonella enterica subsp. enterica serovar Typhi Ty2
  CDS (1)..(1185): transl_table=11
atgacgaaacccactcatgggcttagcccggcgctgatcgttttaatgtctgtggccacgggtctggcggtcgccagcaactactatgcccagccgctgcttgataccatcgcgcatcacttttcgctttccgccagctccgcagggtttatcgttaccgccgcgcagttgggctatgccgctggcctgttgtttctggtgccgctcggcgacatgtttgaacgccgaacgctgattgtctccatgacgttgctggcggctggcggaatgctgatcactgccagcagtcagtcgcttagcatgatgatactcggaacggccttaaccggactgttctccgtggtggcgcagattctggttccgctggccgccacgcttgcgacgcccgccacccgcggtaaagtggtcggcaccattatgagcggcctgttgctggggatcctgctggcgcgaacggtcgccggactgctggcaaacctcggcggttggcgcaccgtattttgggtagcgtcggcgctgatggcgctgatggccgtcgcgttgtggcgcggactgccaaagctcaaatccgacacccatcttaactacccgcaactgttgggttctgtattcagcctgtttattcacgataagctgctgcgtacccgcgcgctgctgggctgtctgacctttgctaatttcagcatcctctggacgtcaatggcctttttgctcgccgcgccgccgtttagctattccgaggggatgattggcctgtttggcctggcgggggccgccggcgctttaggcgcgcgtccggctggcggatttgccgataaaggtaaatctcacctcaccaccacgttcggcttactgctgctgttactctcctggctggctatctggcttgggcgcacctcggtactggcgctgattattggtattctggtactggacctcaccgttcagggggtacatatcaccaatcagacggtcatctatcgtttgcatccggatgcgcgtaaccggctcaccgccggctatatgaccagctactttatcggtggcgccgcggggtcgctgatttccgcctccgcctggcaacatgccggctgggccggcgtttgtctggcgggtgtcacggtagccttacttaatttactggtctggtggcgaggttttcaccgacaggaagccgtaaattaa

SEQ ID NO: 80632 - protein, 394 aa, Salmonella enterica subsp. enterica serovar Typhi Ty2
MTKPTHGLSPALIVLMSVATGLAVASNYYAQPLLDTIAHHFSLSASSAGFIVTAAQLGYAAGLLFLVPLGDMFERRTLIVSMTLLAAGGMLITASSQSLSMMILGTALTGLFSVVAQILVPLAATLATPATRGKVVGTIMSGLLLGILLARTVAGLLANLGGWRTVFWVASALMALMAVALWRGLPKLKSDTHLNYPQLLGSVFSLFIHDKLLRTRALLGCLTFANFSILWTSMAFLLAAPPFSYSEGMIGLFGLAGAAGALGARPAGGFADKGKSHLTTTFGLLLLLLSWLAIWLGRTSVLALIIGILVLDLTVQGVHITNQTVIYRLHPDARNRLTAGYMTSYFIGGAAGSLISASAWQHAGWAGVCLAGVTVALLNLLVWWRGFHRQEAVN

SEQ ID NO: 80633 - DNA, 1191 bp, Enterococcus faecalis V583
  CDS (1)..(1191): transl_table=11
atgaagaaacaacaatcgggtttaacaaatcaagtgacgtttttattagcgttaacttgcggggtcgtggtcgccaatatgtattatattcaaccaattggcacccaaattgctcaggcctttcaagtcagtattggttctattggttttgttactatgctgacccaattaggctatgcgctaggcttactttttcttgttccattaggcgatgtcgttgatcgtcgcaaattaatcattcgagtagccgcgctctcctcgctgtctctaagtgctgcattttttgcaccaagttttctcctgtttgcactctcttctttttttatcgggctgctctctattgtcgcccaaattattattccttatgctgcggtcatggcgggaccagcgaaccgtggtaaagtaacaggtcgaatgctgggcggactattgacaggaattttattgtctcgaacgatctcgggtttcattgctagtgcagcttcttggcgaacagtctacctaatcgccgtaatattcgtgttagcattggtcgttctacttcaattaaaattgcccaaaacagtgatacatactcaaacttcaaatcgattaacttatttaggttctttgaaaagtcttcctaagctaatcaaatcgcaacctttgttaagagaagcaactgtcaatggcttttttatgtttgcaaccttttcaatcttttggtctacattaattttctttgttagtagtccagcttattattggggaccgaaagaagtcggtattttagcaatttttggtttatcgggagcattcgtagcacccatcattggtcgtctatccgattattatccagagcggaagattgttttgattggcctgttgatgcagttcggtagttttatcttactttttctaggtggaacacatgtggtcttactaatcttagcaattattgttttagatatcggtactcaatttgggcaagtagccaatcaaacacgcgtccaaaatttgggagaagaagccagcaatcgtaacaataccgtctttatgtttttctatttcatcggcggttcactgggttcattgattggtacattaatgtggcaaaactatggttggtctggtgttactttaactggtattgggttccaattgttcgcattattttttcactttatgctctttgctcccaaaaagaaatga

SEQ ID NO: 80634 - protein, 396 aa, Enterococcus faecalis V583
MKKQQSGLTNQVTFLLALTCGVVVANMYYIQPIGTQIAQAFQVSIGSIGFVTMLTQLGYALGLLFLVPLGDVVDRRKLIIRVAALSSLSLSAAFFAPSFLLFALSSFFIGLLSIVAQIIIPYAAVMAGPANRGKVTGRMLGGLLTGILLSRTISGFIASAASWRTVYLIAVIFVLALVVLLQLKLPKTVIHTQTSNRLTYLGSLKSLPKLIKSQPLLREATVNGFFMFATFSIFWSTLIFFVSSPAYYWGPKEVGILAIFGLSGAFVAPIIGRLSDYYPERKIVLIGLLMQFGSFILLFLGGTHVVLLILAIIVLDIGTQFGQVANQTRVQNLGEEASNRNNTVFMFFYFIGGSLGSLIGTLMWQNYGWSGVTLTGIGFQLFALFFHFMLFAPKKK

SEQ ID NO: 80635 - DNA, 1191 bp, Bacillus cereus ATCC 14579
  CDS (1)..(1191): transl_table=11
atgtctaattttaaaaataaagcaattgataaggacatttcatcaggtttaatcattcttttagcaactgcatgtggtattattgtggctaatctttattatgcacagcctttaattgggctaattagtaatgaaattgggctttctaatagtagcgctggattaattgtaacgctaactcaaattggatatgttgttggcttattatttcttgtgcctttgggggatattgttgagaataaaaaattgatacttatattgttatttttaagtgcatttgcactcatttctatggtttttgtaaaaagcgcaaccttgttgttaattgcttcattctttatcggactgggttcggtcgcagcgcaagtgctcgtacctcttgtatcatatctttcatctgagaatgcacgcggtcgcgtagttggcaatgtcatgagtggtctgttattaggtattatgcttgcgcgaccgatctctagtctagtagccgatatgtggggatggaatgcaatatttgctttatctgctactgtaattattgttttagcgtttgtattatcgaaagtactccctactaggaaaccaaaggcaaaaacaaattatatagccttacttaattcaatgtggcaactgctacgtactactccaattttacgccgtcgcgccatttatcatgcttgtgtatttggggcttttagtttattctggaccactgttccattattattatttagtcctgcttttcatttttctcagactgccatagcattatatgcacttgtcggaattacaggtgcaatagccgctccaataggtggtcgtctagctgatcttggctggacacgacccgccactgggatagctctcactgttgttattatttctttaatactcccactttttattcaaagtagctcgtcctttggaatagctgttttagtaattgctgcaattctgttggacatgggagtatctgcaaaccttgtgcttagccaacgtttaattttctcgttgagtccagaaattcgtagtcgattaaatgggctatttatggctattttctttttaggaggtgctgttggatcctttattggaggatgggcatatgccttaggaggatggaatctaacattatggataggaatcgcttttccgaccatagccttgctttattttgctagagaagaatag

SEQ ID NO: 80636 - protein, 396 aa, Bacillus cereus ATCC 14579
MSNFKNKAIDKDISSGLIILLATACGIIVANLYYAQPLIGLISNEIGLSNSSAGLIVTLTQIGYVVGLLFLVPLGDIVENKKLILILLFLSAFALISMVFVKSATLLLIASFFIGLGSVAAQVLVPLVSYLSSENARGRVVGNVMSGLLLGIMLARPISSLVADMWGWNAIFALSATVIIVLAFVLSKVLPTRKPKAKTNYIALLNSMWQLLRTTPILRRRAIYHACVFGAFSLFWTTVPLLLFSPAFHFSQTAIALYALVGITGAIAAPIGGRLADLGWTRPATGIALTVVIISLILPLFIQSSSSFGIAVLVIAAILLDMGVSANLVLSQRLIFSLSPEIRSRLNGLFMAIFFLGGAVGSFIGGWAYALGGWNLTLWIGIAFPTIALLYFAREE

SEQ ID NO: 80637 - DNA, 1170 bp, Bacillus anthracis str. Ames
  CDS (1)..(1170): transl_table=11
atgtctaattttaaaaataaagtaattgataaggatatttcatcaggtttaatcattcttttagcaactgcatgtggtattattgtggctaatctttattatgcacagcctttaattggggtaattagtaatgaaattgggctttctaatagtagcgctggattaattgtaacgctaactcaaattggatatgttgttggcttactatttcttgtgcctttgggggatattgttgagaataaaaaattgatacttatattgttatttttaagtgcatttgcactcatttccatggtttttgtaaaaagcgcaactttgttgttaattgcttcattctttatcggactgggttcggtcgcagcgcaagtactcgtacctcttgtatcatatctttcatctgagaatgcacgcggtcgcgtagttggcaatgtcatgagtggtctgttattaggtattatgcttgcgcgaccgatatctagtctagtagccgatatgtggggatggaatgcaatatttgctttatctgctactgtaattattgtcttagcgtttgtattatcgaaagtactccctactaggaaaccacaggtaaaaacaaattatatagccttacttaattcaatgtggcaactgctacgaactactccaattttacgccgtcgcgccatttatcatgcttgtgtatttggggctttcagcttattctggaccactgttccattattattatctagtcctgcttttcatttttctcagactgccatagcattatatgcacttgtcggaattacaggtgcaatagccgctccaataggtggtcgtctagctgatcttggctggacacgatccgccactgggatagctctcactgttgttattatttctttattactaccacttattattcaaagtagttcgcccatcggaatagctgttttagtaattgctgcaattctgttagacatgggagtatctgcaaaccttgtgcttagccaacgtttaattttctcgttaagtccagaaattcgtagtcgattaaacggactatttatggctattttctttttaggaggtgctgttggatcctttattggaggatggaatctaacattatggataggaatcgcttttccgaccatagccttgctttattttgctagagaaaaatag

SEQ ID NO: 80638 - protein, 389 aa, Bacillus anthracis str. Ames
MSNFKNKVIDKDISSGLIILLATACGIIVANLYYAQPLIGVISNEIGLSNSSAGLIVTLTQIGYVVGLLFLVPLGDIVENKKLILILLFLSAFALISMVFVKSATLLLIASFFIGLGSVAAQVLVPLVSYLSSENARGRVVGNVMSGLLLGIMLARPISSLVADMWGWNAIFALSATVIIVLAFVLSKVLPTRKPQVKTNYIALLNSMWQLLRTTPILRRRAIYHACVFGAFSLFWTTVPLLLSSPAFHFSQTAIALYALVGITGAIAAPIGGRLADLGWTRSATGIALTVVIISLLLPLIIQSSSPIGIAVLVIAAILLDMGVSANLVLSQRLIFSLSPEIRSRLNGLFMAIFFLGGAVGSFIGGWNLTLWIGIAFPTIALLYFAREK

SEQ ID NO: 80639 - DNA, 1203 bp, Bordetella pertussis Tohama I
  CDS (1)..(1203): transl_table=11
atgagccctgcgcgcgcgcgcctgaccgcgcccatcgtcctgctgatgtccgtggccaccggcctggccgtggccagcaactattacgcccagccgctgctgcataccatcggcgccgaattcgccctcaccaccgccacggccggcgccatcgtcaccgtggcccagctcagctatgccgtgggcctgatcctgctggtgccgctgggcgacctctacgagcggcgcaccctgatcgcgctgatgaccgccctgtcggccgtgggcctgctgctgtcggccttctcgcccggcatcggctggctcatgctgggcaccgccgtgaccggcctgctgtccgtcgtggcgcaggtcctggtgccgtttgccgccaccctggccgaaccgcacgaacgcggcaaagtggtcggggccgtcatgagcggcctgctgctgggcatcctgctggcgcgcaccatcgccggcgcgctggccgatctcggcagctggcgcaccgtctactgggtggccgccatcctgatgctgctgatgtcgatggcgctgtggcgcgtgctgccgcgctcggtcaacccgacgaggctgagctatccgcgcctgctggcctcgatcgtccagctttacgcgcaagagcccttgctgcgcgcccgctcggtgctcggcgcgctgctgttcgccgcgttcagcatgctgtggacgccgctgaccttcctgctgtccggcccgaactacggctattccaataccaccatcgggctgttcggcctggccggcgccatcggcgcctatggcgccaaccggttcggccgcctgaacgaccgtggccagggcaaccgctcgacgcgccagggcctgctgctgctggcctcctggccgctgctggcctggggcgcccaccacgtcgcgcccctgctggccggcgtactggccctggacctggcgatccaggcggtccatgtcaccaaccagagcgccatctatcgcctgcggcccgaggcgcgcagccgcctgaccgccggctacatgacctcgtatttcctgggcggcgcggcgggatcgctgctgtcggcctggatctacgcccacgccggctggctgggcgtcacggcggccggcgcgctgacctcgctggccgccctgctgtacgggtgcctggcgaggtcggcgcgcatcccggaaaccacgccggcccctgcgatcgcctag

SEQ ID NO: 80640 - protein, 400 aa, Bordetella pertussis Tohama I
MSPARARLTAPIVLLMSVATGLAVASNYYAQPLLHTIGAEFALTTATAGAIVTVAQLSYAVGLILLVPLGDLYERRTLIALMTALSAVGLLLSAFSPGIGWLMLGTAVTGLLSVVAQVLVPFAATLAEPHERGKVVGAVMSGLLLGILLARTIAGALADLGSWRTVYWVAAILMLLMSMALWRVLPRSVNPTRLSYPRLLASIVQLYAQEPLLRARSVLGALLFAAFSMLWTPLTFLLSGPNYGYSNTTIGLFGLAGAIGAYGANRFGRLNDRGQGNRSTRQGLLLLASWPLLAWGAHHVAPLLAGVLALDLAIQAVHVTNQSAIYRLRPEARSRLTAGYMTSYFLGGAAGSLLSAWIYAHAGWLGVTAAGALTSLAALLYGCLARSARIPETTPAPAIA

SEQ ID NO: 80641 - DNA, 1188 bp, Bordetella parapertussis 12822
  CDS (1)..(1188): transl_table=11
atgccccgcggcctggtatggctgttcgccatcgccagtggcctgagcgtggccaatgtctattacgcccagcccttgctcgacgccctggcgcgcgactttcgcattagccatgcggcgatcggcggcgtggtcacggccacccagatcgggtgcgcgctggccctgctgctggtgccgctgggcgaccggatgaaccgccgccgcctcatggccatgcaactgctggcgctggtgggcgcgctggcagcggtgggcgcggcgcgctccgcgcccgccctgctggcgggcatgctggccgtgggcttgctgggcacggcaatgacgcagggcttgatcgcctacgcggccagcgccgccgcgccccatgagcaagggcgcgtggtcggcgcggcgcaaagcggcgtcttcatcggtctgctgctggcccgggtatttgccggcggcgtcagcgacctggccggctggcgcggcgtgtacctctgcgccgccgcactgatgctggcgcttgcgctgccgctctggcgctggctccccaccctggccgccgcgcccggcgcgatgcgctacccgcggctgatcgcctccctgctgaccttgctgcgcgaagaaaaagccctgcaagtgcgcggcatgctggccttgctcatgtttgccgcgttcaacatcttctggagcgcgctggtgctgcccttgagcgccccgccctacggcttctcgcacaccgccatcggcgcctttggcctggtcggcgtggtcggcgcgcttgccgccgcgcgggccgggcaatgggccgaccagggccatgcccaacgcaccagcgccgcggcgctggccgccctgctgctggcctggtggccgctgtcgctgatggaggaatcgctcggcgcgctggtcatcggcatcctgctgctcgatctgggcggacaggcgctgcacgtcaccaaccagagcctgatcctgcgcacccggccccaggcccatggccgtctggttggcctctacatgctgttctacgcaatcggcagcggactgggcgcgatcggcacgacggccgcctatgcccatgccggctggcgcggcgtatgcctgctgggcgcggcggtcagcctgctggcgctgctgttctggtgggcgacgcggcgcacaggacatcccgcagcgccataccgcgccagccgcccgtag

SEQ ID NO: 80642 - protein, 395 aa, Bordetella parapertussis 12822
MPRGLVWLFAIASGLSVANVYYAQPLLDALARDFRISHAAIGGVVTATQIGCALALLLVPLGDRMNRRRLMAMQLLALVGALAAVGAARSAPALLAGMLAVGLLGTAMTQGLIAYAASAAAPHEQGRVVGAAQSGVFIGLLLARVFAGGVSDLAGWRGVYLCAAALMLALALPLWRWLPTLAAAPGAMRYPRLIASLLTLLREEKALQVRGMLALLMFAAFNIFWSALVLPLSAPPYGFSHTAIGAFGLVGVVGALAAARAGQWADQGHAQRTSAAALAALLLAWWPLSLMEESLGALVIGILLLDLGGQALHVTNQSLILRTRPQAHGRLVGLYMLFYAIGSGLGAIGTTAAYAHAGWRGVCLLGAAVSLLALLFWWATRRTGHPAAPYRASRP

SEQ ID NO: 80643 - DNA, 1158 bp, Bordetella parapertussis 12822
  CDS (1)..(1158): transl_table=11
atgtccgtggccaccggcctggccgtggccagcaactattacgcccagccgctgctgcataccatcggcgccgaattcgccctcaccaccgccaccgccggcgccatcgtcacggtggcccagctcagctatgccgtgggcctgatcctgctggtgccgctgggcgacctctacgagcggcgcaccctgatcgcgctgatgaccgccctgtcggccgtgggcctgctgctgtcggccttctcgcccggcatcggctggctcatgctgggcaccgccgtgaccggcctgctgtccgtcgtggcgcaggtcctggtgccgtttgccgccaccctggccgaaccgcacgaacgcggcaaagtggtcggggcggtcatgagcggcctgctgctgggcattctgctggcgcgcaccatcgccggcgcgctggccgatctcggcagctggcgcaccgtctactgggtggccgccatcctgatgctgctgatgtcgatggcgctgtggcgcgtgctgccgcgctcggtcaacccgacgaggctgagctatccgcgcctgctggcctcgatcgtccagctttacgcgcaagagcccttgctgcgcgcccgctcggtgctcggcgcgctgctgttcgccgcgttcagcatgctgtggactccgctgaccttcctgctgtccggcccgaactacggctattccaataccaccatcgggctgttcggtctggccggcgccatcggcgcctatggcgccaaccggttcggccgcctgaacgaccgtggccagggcaaccgctcgacgcgccagggcctgctgctgctggcctcgtggccgctgctggcctggggcgcccaccacgtcgcgcccctgctggccggcgtactggccctggacctggcgatccaggcggtccatgtcaccaaccagagcgccatctatcgcctgcggcccgaggcgcgcagccgcctgaccgccggctacatgacctcgtatttcctgggcggcgcggcgggatcgctgctgtcggcctggatctacgcccacgccggctggctgggcgtcacggcggccggcgcgctgacctcgctggcagccctgctgtacgggtgcctggcgcggtcggcgcgcatcccggaaaccacgccggcccctgcgatcgcctag

SEQ ID NO: 80644 - protein, 385 aa, Bordetella parapertussis 12822
MSVATGLAVASNYYAQPLLHTIGAEFALTTATAGAIVTVAQLSYAVGLILLVPLGDLYERRTLIALMTALSAVGLLLSAFSPGIGWLMLGTAVTGLLSVVAQVLVPFAATLAEPHERGKVVGAVMSGLLLGILLARTIAGALADLGSWRTVYWVAAILMLLMSMALWRVLPRSVNPTRLSYPRLLASIVQLYAQEPLLRARSVLGALLFAAFSMLWTPLTFLLSGPNYGYSNTTIGLFGLAGAIGAYGANRFGRLNDRGQGNRSTRQGLLLLASWPLLAWGAHHVAPLLAGVLALDLAIQAVHVTNQSAIYRLRPEARSRLTAGYMTSYFLGGAAGSLLSAWIYAHAGWLGVTAAGALTSLAALLYGCLARSARIPETTPAPAIA

SEQ ID NO: 80645 - DNA, 1257 bp, Bordetella bronchiseptica RB50
  CDS (1)..(1257): transl_table=11
atgaaaacctctctcgcatctgcgttaccgccctgttcaggcagcgcgccagcctggtccgcgggcatgccccgcggcctggtatggctgttcgccatcgccagtggcttgagcgtggccaatgtctattacgcccagcccttgctcgacgccctggcgcgcgactttcgcattagccatgcggcgatcggcggcgtggtcacggccacccagatcgggtgcgcgctggccctgctgctgctggtgccgctgggcgaccggatgaaccgccgccgcctcatggccatgcaactgctggcgctggtgggcgcgctggcagcggtgggcgcggcgcgctccgcgcccgccctgctggcgggcatgctggccgtgggcttgctgggcacggcaatgacgcagggcttgatcgcctacgcggccagcgccgccgcgccccatgagcaagggcgcgtggtcggcgcggcgcaaagcggcgtcttcatcggtctgctgctggcccgggtatttgccggcggcgtcagcgacctggccggctggcgcggcgtgtacctctgcgccgccgcactgatgctggcgcttgcgctgccgctctggcgctggctgcccaccctggccgccgcgcccggcgcgatgcgctacccgcggctgatcgcctccctgctgaccttgctgcgcgaagaaaaagccctgcaagtgcgcggcatgctggccttgctcatgtttgccgcgttcaacatcttctggagcgcgctggtgctgcccttgagcgccccgccctacggcttctcgcacaccgccatcggcgcctttggcctggtcggcgtggtcggcgcgcttgccgccgcgcgggccgggcaatgggccgaccagggccatgcccaacgcaccagcgccgcggcgctggccgccctgctgctggcctggtggccgctgtcgctgatggaggaatcgctcggcgcgctggtcatcggcatcctgctgctcgatctgggcggacaggcgctgcacgtcaccaaccagagcctgatcctgcgcacccggccccaggcccatggccgtctggttggcctctacatgctgttctacgcaatcggcagcggactgggcgcgatcggcacgacggccgcctatgcccatgccggctggcgcggcgtatgcctgctgggcgcggcggtcagcctgctggcgctgctgttctggtgggcgacgcggcgcacaggacatcccgcagcgccataccgcgccagccgcccgtag

SEQ ID NO: 80646 - protein, 418 aa, Bordetella bronchiseptica RB50
MKTSLASALPPCSGSAPAWSAGMPRGLVWLFAIASGLSVANVYYAQPLLDALARDFRISHAAIGGVVTATQIGCALALLLLVPLGDRMNRRRLMAMQLLALVGALAAVGAARSAPALLAGMLAVGLLGTAMTQGLIAYAASAAAPHEQGRVVGAAQSGVFIGLLLARVFAGGVSDLAGWRGVYLCAAALMLALALPLWRWLPTLAAAPGAMRYPRLIASLLTLLREEKALQVRGMLALLMFAAFNIFWSALVLPLSAPPYGFSHTAIGAFGLVGVVGALAAARAGQWADQGHAQRTSAAALAALLLAWWPLSLMEESLGALVIGILLLDLGGQALHVTNQSLILRTRPQAHGRLVGLYMLFYAIGSGLGAIGTTAAYAHAGWRGVCLLGAAVSLLALLFWWATRRTGHPAAPYRASRP

SEQ ID NO: 80647 - DNA, 1206 bp, Bordetella bronchiseptica RB50
  CDS (1)..(1206): transl_table=11
atgagccccgcgcgcgcgcgcctgaccgcgcccatcgtcctgctgatgtccgtggccaccggcctggccgtggccagcaactattacgcccagccgctgctgcataccatcggcgccgaattcgccctcaccaccgccaccgccggcgccatcgtcacggtggcccagctcagctatgccgtgggcctgatcctgctggtgccgctgggcgacctctacgagcggcgcaccctgatcgcgctgatgaccgccctgtcggccgtgggcctgctgctgtcggccttctcgcccggcatcggctggctcatgctgggcaccgccgtgaccggcctgctgtccgtcgtggcgcaggtcctggtgccgtttgccgccaccctggccgaaccgcacgaacgcggcaaagtggtcggggcggtcatgagcggcctgctgctgggcattctgctggcgcgcaccatcgccggcgcgctggccgatctcggcagctggcgcaccgtctactgggtggccgccatcctgatgctgctgatgtcgatggcgctgtggcgcgtgctgccgcgctcggtcaacccgacgaggctgagctatccgcgcctgctggcctcgatcgtccagctttacgcgcaagagcccttgctgcgcgcccgctcggtgctcggcgcgctgctgttcgccgcgttcagcatgctgtggacgccgctgaccttcctgctgtccggcccgaactacggctattccaataccaccatcgggctgttcggtctggccggcgccatcggcgcctatggcgccaaccggttcggccgcctgaacgaccgtggccagggcaaccgctcgacgcgccagggcctgctgctgctgctggcctcgtggccgctgctggcctggggcgcccaccacgtcgcacccctgctggccggcgtactggccctggacctggcgatccaggcggtccatgtcacaaaccagagcgccatctatcgcctgcggcccgaggcgcgcagccgcctgaccgccggctacatgacctcgtatttcctgggcggcgcggcgggatcgctgctgtcggcctggatctacgcccacgccggctggctgggcgtcacggcggccggcgcgctgacctcgctggcagccctgctgtacgggtgcctggcgcggtcggcgcgcatcccggaaaccacgccggcccctgcgatcgcctag

SEQ ID NO: 80648 - protein, 401 aa, Bordetella bronchiseptica RB50
MSPARARLTAPIVLLMSVATGLAVASNYYAQPLLHTIGAEFALTTATAGAIVTVAQLSYAVGLILLVPLGDLYERRTLIALMTALSAVGLLLSAFSPGIGWLMLGTAVTGLLSVVAQVLVPFAATLAEPHERGKVVGAVMSGLLLGILLARTIAGALADLGSWRTVYWVAAILMLLMSMALWRVLPRSVNPTRLSYPRLLASIVQLYAQEPLLRARSVLGALLFAAFSMLWTPLTFLLSGPNYGYSNTTIGLFGLAGAIGAYGANRFGRLNDRGQGNRSTRQGLLLLLASWPLLAWGAHHVAPLLAGVLALDLAIQAVHVTNQSAIYRLRPEARSRLTAGYMTSYFLGGAAGSLLSAWIYAHAGWLGVTAAGALTSLAALLYGCLARSARIPETTPAPAIA

SEQ ID NO: 80649 - DNA, 1155 bp, Chromobacterium violaceum ATCC 12472
  CDS (1)..(1155): transl_table=11
atggccatcgcctgcggcttttccatcgccaacatctattacaaccagcccctgctgggcctgctgcagcgcgagtggggcgcatccccgctgatcggcctgatacccgccatgacgcagctggggttcgccttcggcctgatcctgctggttccgctcggcgatgccatggaccgcaagcggctgattctggcgcagacgctggcgctgatcgcctccctcgcctgcatggccgccagcccgacgccgccgttgctgttgctggcctcggtcctggtcggcgccaccgccaccatcgctcagcaaatcattccgttcgccgcggagcttgccggaccggaacagcgcggcaaggtggtcggccatgtgatgagcggcctgctaagcggcattctgctggcgcgcacgctgagcggcttcgccggcgcctatctgggctggcgggcgatgttcatggtgggcgcggcgctggcgatcgccatgggcttgatgctgctggcctttctgccgagcagcaaaccgacggcgcagcacggctatccggcactgctcgcctccctgttcaagctggctcgagaggaaagggaactgcgctacgccatcctgacccagggcatgctattcgccgcgttcagcgccttttggagcaccttggtcttgctgctgcaacaaccggagttccatatgggcagccgcgaggcgggcctgtttggcatcatcggcttggtcggcgtcctgcttgcgccacaggctggcaagcttgcagacgcgcgcggacctcacggcatcgtcaagctggggatcgcgctggttgtcgcgtcgtttctggtcttcggcgtggcgccgaacctgatgggactggtcgtcggcgtgattcttctggacgcgggcgtgcaagtcgccatggtctcgcaccagaccatcattttcgcgctgaaccccgcggcccgcagccgcatcaacaccgtctacatgaccggattatttgtggcgggcgcgctgggttcggccatagggggattctgctggcaaatgctgaattggaacggcgtagccgccgcgggattcgcgctaggcgtgctctcgacgtttttccatctgggaatgggcagcccgcagcctagccgtcaaaccggcggccaaggaggcatctag

SEQ ID NO: 80650 - protein, 384 aa, Chromobacterium violaceum ATCC 12472
MAIACGFSIANIYYNQPLLGLLQREWGASPLIGLIPAMTQLGFAFGLILLVPLGDAMDRKRLILAQTLALIASLACMAASPTPPLLLLASVLVGATATIAQQIIPFAAELAGPEQRGKVVGHVMSGLLSGILLARTLSGFAGAYLGWRAMFMVGAALAIAMGLMLLAFLPSSKPTAQHGYPALLASLFKLAREERELRYAILTQGMLFAAFSAFWSTLVLLLQQPEFHMGSREAGLFGIIGLVGVLLAPQAGKLADARGPHGIVKLGIALVVASFLVFGVAPNLMGLVVGVILLDAGVQVAMVSHQTIIFALNPAARSRINTVYMTGLFVAGALGSAIGGFCWQMLNWNGVAAAGFALGVLSTFFHLGMGSPQPSRQTGGQGGI

SEQ ID NO: 80651 - DNA, 1191 bp, Photorhabdus luminescens subsp. laumondii TTO1
  CDS (1)..(1191): transl_table=11
atggaagaaaatatttcccgtacgccattaagcccagcgttgattgcactaatcgccattgccacaggtctggttgtcgccagcaactattatgcacagccgctactcgatactattgcgttacaatttaatctgaccgtcaacgaagccgggtttattgtaaccacagctcaattgagctatgccgttggcctaacattccttgtgccattaggtgatatgttcgaacgacgcagtttaattgtctcaatgacaatattagccactattggattactgattaccgccacgtcacagaacatctggcaaatgttactgggaacggcaatgacgggcttattttcggtggtcgctcaaatactggtcccgctggccgcaacacttgctcttccccatcaacgaggaaaagctgtcggtacaattatgagcggtttactgcttggaatattactagcaagaaccatctcaggaacaatggcaactcttggtggctggcgaactgttttttgggttgccagtgtcttattggtgattctttctctgacgttgtggcgctacctgccccgttacaaacaagtaaccaatctcagttatttccaattacttggctctattgtaaaccttatcactacaagcccgcttctaagagtacgcgccatactgggtgcactgacatttgccaacttcagcctgctatggacatcaatggcattcctgctttcagcacctccttttaactattctgaaggagtcatcggcttatttggattagtcggtgctgccggtgcattgatggcaacccaaaccgggcgactcgttgataaaggaaaaggccctctgaccaccagcatttctctggtgctattacttctttcatggataccgatcggtttagtcaaagaatcactaattggctttataattggtgtttttctccttgatattgcgattcaaggagttcacgttacaaatcaaagtacaatataccgcatcatgccagaagccagaaaccgactcaccgccgcttacatgactagctattttatcggtggagctcttggctctctggtttcaggctatgcttacaaacactcaggttggtatggcgttgccaccgcgggtatagctatctgtataatcagcctaatcgtgtggtttttaggcaaaaagtacgaaccaaagacgttgtaa

SEQ ID NO: 80652 - protein, 396 aa, Photorhabdus luminescens subsp. laumondii TTO1
MEENISRTPLSPALIALIAIATGLVVASNYYAQPLLDTIALQFNLTVNEAGFIVTTAQLSYAVGLTFLVPLGDMFERRSLIVSMTILATIGLLITATSQNIWQMLLGTAMTGLFSVVAQILVPLAATLALPHQRGKAVGTIMSGLLLGILLARTISGTMATLGGWRTVFWVASVLLVILSLTLWRYLPRYKQVTNLSYFQLLGSIVNLITTSPLLRVRAILGALTFANFSLLWTSMAFLLSAPPFNYSEGVIGLFGLVGAAGALMATQTGRLVDKGKGPLTTSISLVLLLLSWIPIGLVKESLIGFIIGVFLLDIAIQGVHVTNQSTIYRIMPEARNRLTAAYMTSYFIGGALGSLVSGYAYKHSGWYGVATAGIAICIISLIVWFLGKKYEPKTL

SEQ ID NO: 80653 - DNA, 1239 bp, Photorhabdus luminescens subsp. laumondii TTO1
  CDS (1)..(1239): transl_table=11
gtgccagaattatttcatcataattccggccaaatgctgagcattcccatgtcaaatacagcaattaaaccaaatcctatttcttctatttctctcattttgttatctactgcttgtggttttgctgtagcgaatatttattataaccaaccattattgccaacaattgggacaagttttaacgttaatggttcaatatccggctggatcgcgacactaactcagattggctatgcggcggggcttctcttttttgggccgcttggagatacgataagccgtcgcaaactgattttctgcctgttaatcggcaatataatcagccttattttatgtgccacagcaccaaattttacatgtcttctgacaagtagcctgattgtggggataacttctatttcagcacaaatcattattcctgccgtatctggttgggtaataccagaaaagcgtggccaagcggtaggcagtctgatgagtggccttttcgccggagcactacttgccagggcattaagtggtgcagtcggagagtatttcggctggcgtgaaatgtttatattggccgctttaatcgatatctgcctattttttctgatctggtttgtgttgccagaaatagaaacaccacacacgatgacttacggccaacttcttatttcactcggtaaattggtaaagcaacaaccccttttgcgtgaagctgcattatccggttttttactgttcgccgcttttaatacgctgtgggggtcgctggccttattactttcccaaccaccttacggatgggggagtgatatcgcaggtctttttggtttgatgggtattgtgggaatgctagcttcacccataataggttcgttgacagatcgcttcggcgggagaacgattgttgccacaggcgctttattagtgacactggccttgtgcctaattagcggcacgagccacaatattctatttttattcgcgggtattattctgttagatcttggcagcagagcgggtttagtggcaaatcaaacacggttatatacattattacctgaggctcgcagccgactaaataccgtatttatgacctgttatttcgctggcggcgcaataggttcctctttgggagctgtcgccgcttggcatttttcttggtatggtgtcgctttcagcggcggaggatgcgcattattagccgcgctatgggttctatttaatccaaatagccgcaagcaaatatga

SEQ ID NO: 80654 - protein, 412 aa, Photorhabdus luminescens subsp. laumondii TTO1
MPELFHHNSGQMLSIPMSNTAIKPNPISSISLILLSTACGFAVANIYYNQPLLPTIGTSFNVNGSISGWIATLTQIGYAAGLLFFGPLGDTISRRKLIFCLLIGNIISLILCATAPNFTCLLTSSLIVGITSISAQIIIPAVSGWVIPEKRGQAVGSLMSGLFAGALLARALSGAVGEYFGWREMFILAALIDICLFFLIWFVLPEIETPHTMTYGQLLISLGKLVKQQPLLREAALSGFLLFAAFNTLWGSLALLLSQPPYGWGSDIAGLFGLMGIVGMLASPIIGSLTDRFGGRTIVATGALLVTLALCLISGTSHNILFLFAGIILLDLGSRAGLVANQTRLYTLLPEARSRLNTVFMTCYFAGGAIGSSLGAVAAWHFSWYGVAFSGGGCALLAALWVLFNPNSRKQI

SEQ ID NO: 80655 - DNA, 1149 bp, Rhodopseudomonas palustris CGA009
  CDS (1)..(1149): transl_table=11
atgggcgccgggctgacgctggcgatggcggcggccgcgggcatcagcgtcgccaatatctattacaaccagccgatgctgggtgtgatcgagcgcgacctcggcaatccggcgctgaccgggatgatcccgacggcgactcagctcggctacgcggtcggtctgttcctgctggtgccactcggcgatctgaccgaccggcggcggctgattgccggtcagtttgtgctgctggcggtcgcggctgcgctggtggcgctggcgccgtcggcctggctgatcattgccgcgtcgctggcgctcggcgcctgcgcgacggtggcgcagcaggtggtgccgttcgccgcggccctggcggcaccggagcggcgcggcaagaccatcggcctggtgatggccgggctgttgtgcggcatcctgctcagccggacggtggccggctttgttgccggccatctcggctggcgcgagatgttctggctggcggtgccggcggcgctcgcggccgccgcgctgatggcgtggctgctgccgcgccatcacggtcacctcgatatcagctatggcgccgcgctgaagtcgctggcgtcgctgtggcgcgagcagcgggatctgcggcgggggaccgcggtgcaggcggcgctgttcgcctcgttcagcgtgttctggacggtgctggcgctgcatctgcaggagccgaagttcgggcttggggccgaggcggcgggcctgttcggcctggttggcgtggttggcgtgttggcggcgccgatctccggccggatcgccgaccgaagtggaccgggaccggtgatcgcgatcggcgcggctctggtgctggcgtcgtgggtgttgttcggtctgtggggcagcgtcgttggactgctgatcggcgtcgtggtgctggatttcggtctgcagagcgcgctgatctccaaccagcacatcgtctacgcgttggtgccggaagcgcgaaaccgcctcaacaccgtgttcatgaccgggatgttcgtcggcggatcggtcggttctgccggcgcggccttcgcctgggcgcacggcggctggacggtggtcagcctctatggcggcgcgctggcggcgatcgccttgctactcgaactgacggcgcgttggtcccgccgttag

SEQ ID NO: 80656 - protein, 382 aa, Rhodopseudomonas palustris CGA009
MGAGLTLAMAAAAGISVANIYYNQPMLGVIERDLGNPALTGMIPTATQLGYAVGLFLLVPLGDLTDRRRLIAGQFVLLAVAAALVALAPSAWLIIAASLALGACATVAQQVVPFAAALAAPERRGKTIGLVMAGLLCGILLSRTVAGFVAGHLGWREMFWLAVPAALAAAALMAWLLPRHHGHLDISYGAALKSLASLWREQRDLRRGTAVQAALFASFSVFWTVLALHLQEPKFGLGAEAAGLFGLVGVVGVLAAPISGRIADRSGPGPVIAIGAALVLASWVLFGLWGSVVGLLIGVVVLDFGLQSALISNQHIVYALVPEARNRLNTVFMTGMFVGGSVGSAGAAFAWAHGGWTVVSLYGGALAAIALLLELTARWSRR

SEQ ID NO: 80657 - DNA, 1185 bp, Bdellovibrio bacteriovorus HD100
  CDS (1)..(1185): transl_table=11
atgggaaaaggcctctctcgcactcaagttttcttcatgaccctgacctgcattctggttgtgggcaatatgtactacaaccaaccgctgctagggattctggcgcgtgaatttggtgtgacggaaagcaaggtgtctttggtccctgccttcacattgatcggctatgcgttggggattctgttcctggttccactgggtgacatgatcgaacgccgcaagctgattcaaggttccatgaccatggcggggcttttggccatcgcacttccgttcagtcctacactgggcgtgttctgtgcgatcagctgcgtgatgggtttcttcaacatctcccagtccgtgctgatcccttttgccgccaacctggccaaacctgaagagcgcggtaaagtcgtgggcattgtcctgtcgggaattctgattggttcattgatggcacgaaccctggctggctttatcgcgcagtacttcggctggaagacggtgttcatttttgccggcgcggtcagcctgattctttccatcgtgtcgcagttcgtgctgccgatgtccgagccaaacttcaaagggacctacaaagcgttgctgctttccacggccaagcttttccgcgaacttcccaccatgcgtgaagcggctttgatgggcgcaatcttgtttggaacgttctcggccttctggacgacgctgaccttcctgctggaggccgctccgttcaactatgatccgaaaaccatcggtctgtttggggccttgggaatgattggtgctttggcggctcctttggccgggcgttatgccgacaaaaaaggcgctgcggcgaccatccgtatgggtctttactgctccatgggggcctttgccctgctggcgctttcctccaccttcgtagcaggaatcatcctgggtgttttggtgctggatctgggcattcaggtggcccatatctccaatcagtcccgcgtgtttagccatccacccgagtaccactcccgcctgaacacgatatacatctttgcctactttaccggaggaagtctcgggtcttacgtgggttcgactctttggagttggggccaatggcctgccgtcagcctgggtgggctcggcttttgccttatcgcgaccctcattttccgccgggggcagaaaaaccgagcggctgccgccaaaatagcctaa

SEQ ID NO: 80658 - protein, 394 aa, Bdellovibrio bacteriovorus HD100
MGKGLSRTQVFFMTLTCILVVGNMYYNQPLLGILAREFGVTESKVSLVPAFTLIGYALGILFLVPLGDMIERRKLIQGSMTMAGLLAIALPFSPTLGVFCAISCVMGFFNISQSVLIPFAANLAKPEERGKVVGIVLSGILIGSLMARTLAGFIAQYFGWKTVFIFAGAVSLILSIVSQFVLPMSEPNFKGTYKALLLSTAKLFRELPTMREAALMGAILFGTFSAFWTTLTFLLEAAPFNYDPKTIGLFGALGMIGALAAPLAGRYADKKGAAATIRMGLYCSMGAFALLALSSTFVAGIILGVLVLDLGIQVAHISNQSRVFSHPPEYHSRLNTIYIFAYFTGGSLGSYVGSTLWSWGQWPAVSLGGLGFCLIATLIFRRGQKNRAAAAKIA

SEQ ID NO: 80659 - DNA, 1200 bp, Yersinia pestis biovar Microtus str. 91001
  CDS (1)..(1200): transl_table=11
atgcaaaaaactgacactcctggtttaagcccggcactgatcgtattgatgtcggtagccacggggctggccgttgccagtaactactacgcccagcccttgttggaaactatcgccacaaactttaacctctctgtcaatcaggccggttttatcgtcaccgccgcccaattgggctatgccgtaggactgatgttcttagtcccactgggcgatatgtttgaacgccgtgggctgattgttggcatgaccttactggcagcaggcggcatgctgattaccgcgatgtcgcaaaatctgacgatgatgattatcgggaccgccctcaccggcttgttctctgtggtcgcacaattgttggtccccttagcggcgacactggcagcaccagaaaaacgcggtaaagtggtcggtatcattatgagcggcctgttgttgggtattttactggctcggaccgtcgctggcgcactggcaaccctcggcggctggcgcaccatttattgggttgccagtgccttgatgtttatcatggcactggtcctttggcgctgcctgccacgctataaacaacataccggtttaaattatggtcagttgctcggttcaattttcgccctgtttattcacacccccgtactgcgtacccgcgctttactcggggcattatcattcgccaatttcagtgtgctatggacatcaatggccttcctgctggccgcgccaccattcggttactctgaagccactattgggctatttggtttagtgggggccgctggcgcattaatggcgaccaaagcgggtcaattggccgataaaggtaaagcacgtgtcaccaccagcgccggattagttttactgttgctatccttgttgcccattgccttcggccaacactcaatcatcgcactgattattgggattatcgtactggatttagccgtacaggctgtgcacgtgaccaaccagagcgtgatgtaccgcatgatgccagaagcaagaaaccgcctaaccgcaggctatatgacgtcttactttatcggtggagcactggggtcgctgatttcagccgccgcctatcaacatgctggctggtatggcgtctccaccgcagggttggtcctgtgcctgttgaatatagtgacctggcttgtgggtaaacgaagtgatcaacccgcgaatcaaaccgtagaataa

SEQ ID NO: 80660 - protein, 399 aa, Yersinia pestis biovar Microtus str. 91001
MQKTDTPGLSPALIVLMSVATGLAVASNYYAQPLLETIATNFNLSVNQAGFIVTAAQLGYAVGLMFLVPLGDMFERRGLIVGMTLLAAGGMLITAMSQNLTMMIIGTALTGLFSVVAQLLVPLAATLAAPEKRGKVVGIIMSGLLLGILLARTVAGALATLGGWRTIYWVASALMFIMALVLWRCLPRYKQHTGLNYGQLLGSIFALFIHTPVLRTRALLGALSFANFSVLWTSMAFLLAAPPFGYSEATIGLFGLVGAAGALMATKAGQLADKGKARVTTSAGLVLLLLSLLPIAFGQHSIIALIIGIIVLDLAVQAVHVTNQSVMYRMMPEARNRLTAGYMTSYFIGGALGSLISAAAYQHAGWYGVSTAGLVLCLLNIVTWLVGKRSDQPANQTVE

SEQ ID NO: 80661 - DNA, 1164 bp, Magnaporthe grisea 70-15
  CDS (1)..(1164)
atggacaaaaatagcggccccgataatagggtgcaaagcagttcgtcacaagattcagaaccagaaaagcctagggatgaaagcatcactcagaataaagacgatgatgaacagacgatggaaaatgctgctaccatctcaacatcacaggcaagcaagccgcaaacaaaaggagacgccgaacacgatgcttcttcgatttccaggcccaatgctgccgttccagaggctgcctccataaccactcacaagagcgacgtggagtcggggaaaacctccatacttcagcgagcatggcttgcattgtcttggggcccagaggcaacgcgtcacaaccctgacaagccactcaagttttcgcttggcctcaatgtcctgtttgcaattgcaacgactgtaaccgttgccaacatttactacaatcaaccgattttgaacaaaatggccgagacattcaacgtcagcttcgagagggcagcatcagtggcaacgctgatgcaagctggctacgcaggcgggctcctctttctgtgtccgctaggtgacgttcttgagaggaggccgtttattcttgggctggtaatgctcacgatattgttttggctgggactgtgcatcacgcaatcgttcgaggtcttccaggccatgtcatttctctgcggcttcactacggtcacgccgcaactcatgctgcctctggtcggtgacttggctcccccgaaccggagggcaagttctctgtccattgccgttgccggtctgtcgttgggtatgatggtggcccgggttctttctgggatcgtgtccaactttacggaatggcgcaacatttactgggttgcactcggacttcaattggcactgctggctgccttgtggttctacctgccagactacccatccaaaaaccctggtggtcttaactactttggcatgctgctcaacatcttcaccctcatggccagggaagctgtgcttttgcaggcgtgtctgatatcgttttgcataagcgcagtctttacatcgtactggaccacgctttcctttctcctctcgtcagccccatatcactttggaccactccagattgggttgttcgggctgataggattctttgttgtattttggggcccggtcctcgttttgtctttgtgtactaaataa

SEQ ID NO: 80662 - protein, 387 aa, Magnaporthe grisea 70-15
MDKNSGPDNRVQSSSSQDSEPEKPRDESITQNKDDDEQTMENAATISTSQASKPQTKGDAEHDASSISRPNAAVPEAASITTHKSDVESGKTSILQRAWLALSWGPEATRHNPDKPLKFSLGLNVLFAIATTVTVANIYYNQPILNKMAETFNVSFERAASVATLMQAGYAGGLLFLCPLGDVLERRPFILGLVMLTILFWLGLCITQSFEVFQAMSFLCGFTTVTPQLMLPLVGDLAPPNRRASSLSIAVAGLSLGMMVARVLSGIVSNFTEWRNIYWVALGLQLALLAALWFYLPDYPSKNPGGLNYFGMLLNIFTLMAREAVLLQACLISFCISAVFTSYWTTLSFLLSSAPYHFGPLQIGLFGLIGFFVVFWGPVLVLSLCTK

SEQ ID NO: 80663 - DNA, 1503 bp, Gibberella zeae PH-1
  CDS (1)..(1503)
atgacgtcctcgaacaggcccgaggggtcaaatgttgctgataatagcatcagagagacaattcctgttgaggattctactgaagagaccaaagtccagagttcggctacgtcgactgaagagacgggctctaacaatgtggttttgcagtcttcaaagtacgagtccagttggattcgcaggatattaacaccgagaaattgtcgatggagtgatgagtcgccaccagctttgtccattggacattgtcttctctatgccatggcatcgggtatcacggtagcaaacctctactacaaccaaccaattctcaacaagatagccgcaacattcaatgtctcatacgaagaatcctcccaggttgcgactttgttacagtcaggatacgcagccgggctcatctttgttcttcctctcggagatattcttgagagacggccgtttatcatcagtctagtctttgctactgcaacaatgtggataggactctgtgtcacaaatgacttcaccgtcttccgcgccttatctttcctctgcggtgctaccactgtgactccgcagctgatggtccctctcgtaggagactttgcgcctttacatcgaaaggcgtctcttctggccattgtcacgtcaggacttatgcttggtcttctcatggccagactattatccggagttgtgaccaacttcaccagttggcgcaacatctattgggtagcttgtggactgcagtatctcatgggtgttgtgctcttttgctttatgccggactatccatccacgaatccggatggtctcaattatttccgtgcgctggcttcgattccttacatgatggttacagagcctgtgctcatacaggcctgccttatcgccttcacgctgtcagccgtgtttacatcattttggacaactctgacatttctactcgcttctccgccgttcgactatacatccctgcagatcggtctcttttctcttacagcacttgcgactataatgtctattccactgattggaagattgattgatcgctacgttgctctgctaccaacgattggtgggcaaatcctggcgttgataggagcgatcgtaggaacatttattggaaacttcacggttgcaggccccgttctccaagctataggtacagatgtcggtatgcagactgcacaggtatccaatcgttcagctatctttggcatcaacccaaaggcacgcaatagagtcaacacggcctatatggcagtggcttttgctggccaattgaccggtacagcggcgggaaacaggttgtatgccagtggaggctggaagaaaagtggcagtttaagcattgcatttgtagtgttgtctttattattctctcttgcaagaggtcccagggaagatggttggattgggtggaaaggaggttggcatcctcgacgagagaagactgtgacgccgccaaccgaggatgaagaaagaggtagcgagttacaggataaggagcaaaagtga

SEQ ID NO: 80664 - protein, 500 aa, Gibberella zeae PH-1
MTSSNRPEGSNVADNSIRETIPVEDSTEETKVQSSATSTEETGSNNVVLQSSKYESSWIRRILTPRNCRWSDESPPALSIGHCLLYAMASGITVANLYYNQPILNKIAATFNVSYEESSQVATLLQSGYAAGLIFVLPLGDILERRPFIISLVFATATMWIGLCVTNDFTVFRALSFLCGATTVTPQLMVPLVGDFAPLHRKASLLAIVTSGLMLGLLMARLLSGVVTNFTSWRNIYWVACGLQYLMGVVLFCFMPDYPSTNPDGLNYFRALASIPYMMVTEPVLIQACLIAFTLSAVFTSFWTTLTFLLASPPFDYTSLQIGLFSLTALATIMSIPLIGRLIDRYVALLPTIGGQILALIGAIVGTFIGNFTVAGPVLQAIGTDVGMQTAQVSNRSAIFGINPKARNRVNTAYMAVAFAGQLTGTAAGNRLYASGGWKKSGSLSIAFVVLSLLFSLARGPREDGWIGWKGGWHPRREKTVTPPTEDEERGSELQDKEQK

SEQ ID NO: 80665 - DNA, 1200 bp, Acinetobacter sp. ADP1
  CDS (1)..(1200): transl_table=11
atggcttcttcgagtatctataccccaaccgttgttctcatggcagttgctgcgggtatttgctcagggagtaattattttagccagcctctggtacattcaatggctttggaacttcatctttctgaaaccacaattgcatggattccgacacttgcccaaattgcttatgcctgtggtttattatttttaatgccattgggtgatattcttgaaaaaagacgattactgtttattttaatgttattggcatctttgggtttactgattagtggtttttctggtcatattgccttcattatgttgggaactgtaattacaggtttgttttcagtatctgcacagttattgctccctcttgctgcaagtttggttccaattcagcatagtggtcgtgtagtcggttttttaattagtggactcatggtcgggattcttctagcacgatctttgtctggtctcatgtctactttatttgcctggaatattatttatttggtcagtggctttttattattagctattgcgatagttttatatttaaaaattaattctttcccagcaacacaatcggaaaattatttaaaaacaattcggtctattcctattatttttaaggaaaatcaacgtttacgtcgccgtacttatcttggctttttcatatttgctggaattagcatgatatttacaacgatgtcacttttacttgcccctgcaccctatcactttagcgattttacaattgggttatttggatttgtggggattataggaacctttattgccaacttttcaggtaaatatatggatcagggatatgttcataaaatctcgatctggggtggctttggtttcattttgagctggctattattcagtttactaccattttcatttattttttatgtaatcggaacaattttgatttattcgtgcctgtcggcaatacatgtgactaatcaaagtattgtatttaaattgaatcaaaaacttagatcccgctttaatgccatttacatgacaggttattttactggtggtgctgtaggtacaacattggcaagttacacatggcgccattttgggtggaacggagtttgtgtgttaggcctaatttttgctactttgacactttactattgttttcgtgatgcaaggcttgcaccaatatctcatgttccattaaataaaaaccagtaa

SEQ ID NO: 80666 - protein, 399 aa, Acinetobacter sp. ADP1
MASSSIYTPTVVLMAVAAGICSGSNYFSQPLVHSMALELHLSETTIAWIPTLAQIAYACGLLFLMPLGDILEKRRLLFILMLLASLGLLISGFSGHIAFIMLGTVITGLFSVSAQLLLPLAASLVPIQHSGRVVGFLISGLMVGILLARSLSGLMSTLFAWNIIYLVSGFLLLAIAIVLYLKINSFPATQSENYLKTIRSIPIIFKENQRLRRRTYLGFFIFAGISMIFTTMSLLLAPAPYHFSDFTIGLFGFVGIIGTFIANFSGKYMDQGYVHKISIWGGFGFILSWLLFSLLPFSFIFYVIGTILIYSCLSAIHVTNQSIVFKLNQKLRSRFNAIYMTGYFTGGAVGTTLASYTWRHFGWNGVCVLGLIFATLTLYYCFRDARLAPISHVPLNKNQ

SEQ ID NO: 80667 - DNA, 1203 bp, Erwinia carotovora subsp. atroseptica SCRI1043
  CDS (1)..(1203): transl_table=11
atgatgatgagtacattatccagcgaggccaatgtcagaacaccgcatgttcccggcaaattattgattttctcaatggcggctgccagcggtatttctgttgccaatatctattacaaccaaccaatgcttggcgtgattagtgaaagctttacgtcgagtggggcaatctcgctgattccaaccgtgacgcaactgggctatgcgcttgggctgctacttctggtgccgctcggtgataaatttgatcgccgtcggctgattgtatggcaattcttgatgttggcgctggcctcagcatttgctgcactgtcgacatcggctttcgccttattaagtgcctcgttgctcattggttttggtgccactgctgcacagcagattgttccggttgcagcagcacttgcggatgtgaaacagcgtggtgctattgttgggacggtgatgagtggattgctgagcggcattctgcttagccgtactattgcgggccttgtggcggaaagcgcaggctggcgtgcaatgttctggctgggtgtaccgctggcgctggcgggcgcgtgggcgatgggaggaatgttaccggcttcgccctcgaatcaaaccgttcgttacagtgagctgatgcgttcgctggtaacgctgtggcggaataaacacacattacgcaaagccacgctgattcaggcactgctgtttgcatcgttcagcgcgttctggagcgtacttgcgctgtatctggaaagcggacgctttcaaatgggggcggccgcagcgggtctatttggtgtgattggcgtagcgggcatctttgcggctccgctggcgggaagattggccgatagaatcggtagccgtccagttgtgatcgctggagcactgctgacgctgctgtcatgggggatattcatcggcttcgattctgttatcggcctgattatcggcgttgtactactcgatctcggcgttcaaagtgcgttaattgccaatcagcatgtgatctacgggcttggcgacgcagccagaggtcgaatcaatacggtgttcatgggcggtatgtttctaggtggcgcgggtgggtcctcggttgcaatggctgcctggcatcagggaggatggttgatggtcggggggcttgccagcgcgttggcaataatggcactgctggctgcactgatgaacacgaaaaaagcggtattatga

SEQ ID NO: 80668 - protein, 400 aa, Erwinia carotovora subsp. atroseptica SCRI1043
MMMSTLSSEANVRTPHVPGKLLIFSMAAASGISVANIYYNQPMLGVISESFTSSGAISLIPTVTQLGYALGLLLLVPLGDKFDRRRLIVWQFLMLALASAFAALSTSAFALLSASLLIGFGATAAQQIVPVAAALADVKQRGAIVGTVMSGLLSGILLSRTIAGLVAESAGWRAMFWLGVPLALAGAWAMGGMLPASPSNQTVRYSELMRSLVTLWRNKHTLRKATLIQALLFASFSAFWSVLALYLESGRFQMGAAAAGLFGVIGVAGIFAAPLAGRLADRIGSRPVVIAGALLTLLSWGIFIGFDSVIGLIIGVVLLDLGVQSALIANQHVIYGLGDAARGRINTVFMGGMFLGGAGGSSVAMAAWHQGGWLMVGGLASALAIMALLAALMNTKKAVL

SEQ ID NO: 80669 - DNA, 1221 bp, Erwinia carotovora subsp. atroseptica SCRI1043
  CDS (1)..(1221): transl_table=11
atgcctcttcagcaacaatctgcatcctctacaccacaaccagggcttagcctgtctttgaccctgattatgtctatcgcgactggccttgccgtcgccagtaactattatgcccagccgctgctggagacgattgccagagtctttgcgctttccgttaatcaggcgggattcattgtcaccgccgcgcagttgggttatgccgttggcctgctgtttttggtgccgctgggggatatgtttgaacgccggacgctgattgtcggcatgacgctgctcgccgctggtggaatgttgatcaccgcttcggcacccacgctctggataatgattgctggcacggcgttaaccggcttgttctccgttgtcgcgcagttgctggttcctcttgccgcgacgctggcaacgccggaaacacgcggtaaagtcgtcggcacgattatgagtggcctgctgctagggattctgctagcgcgtaccgtcgcgggtgcgctggcttcactcggtgactggcgtaccgtttactgggttgccagtacgctgatggccatcatggcgctgattctgtggcgcgcattgccgcgcattcctcaacaaaacacgctgaactacccgcagttgctggcctccatattccgcttgttctctgcaaatccgctgctgcgcacgcgcgcaattcttggctgtctgtcctttgctaacttcagcattctgtggacgtcgatggcattcctgctcgcttcaccgccatacggatattccgaaggcgttatcggcctgttcgggctggtcggtgcggcaggcgcattagcggcatcgcgcgctggtcgtctggtcgatcaaggcaaagccaagccgaccaccagcgttgggattatcctgcttttgctctcgtggggctttatcgcactcggtattcattccgtggcggcgctgctcattggcatcatcgtactggatctggcagttcagggcgtgcacgtgaccaaccagagcgtgatttaccgtatgatgcccgaagcacgtaatcgcctgaccgcaggctatatgaccagctatttcatcggcggtgcactgggatcgctcctctctgcttcggcttatcagcagtggggctggctgggcgtttgtgctgcgggcagtattatcagcctattgaacctgctggtgtggtggcgaagccatcatcacaaaacgcaggaagcgatggcggcgctgtag

SEQ ID NO: 80670 - protein, 406 aa, Erwinia carotovora subsp. atroseptica SCRI1043
MPLQQQSASSTPQPGLSLSLTLIMSIATGLAVASNYYAQPLLETIARVFALSVNQAGFIVTAAQLGYAVGLLFLVPLGDMFERRTLIVGMTLLAAGGMLITASAPTLWIMIAGTALTGLFSVVAQLLVPLAATLATPETRGKVVGTIMSGLLLGILLARTVAGALASLGDWRTVYWVASTLMAIMALILWRALPRIPQQNTLNYPQLLASIFRLFSANPLLRTRAILGCLSFANFSILWTSMAFLLASPPYGYSEGVIGLFGLVGAAGALAASRAGRLVDQGKAKPTTSVGIILLLLSWGFIALGIHSVAALLIGIIVLDLAVQGVHVTNQSVIYRMMPEARNRLTAGYMTSYFIGGALGSLLSASAYQQWGWLGVCAAGSIISLLNLLVWWRSHHHKTQEAMAAL

SEQ ID NO: 80671 - DNA, 1200 bp, Yersinia pseudotuberculosis IP 32953
  CDS (1)..(1200): transl_table=11
atgcaaaaaactgacactcctggtttaagcccggcactgatcgtattgatgtcggtagccacggggctggctgttgccagtaactactacgcccagcccttgttggaaactatcgccacaaactttagcctctctgtcaatcaggccggttttatcgtcaccgccgcccaattgggctatgccgtaggactgatgttcttagtcccactgggcgatatgtttgaacgccgtgggctgattgttggcatgaccttactggcagcaggcggcatgctgattaccgcgatgtcgcaaaatctgacgatgatgattatcgggaccgccctcaccggcttgttctctgtggtcgcacaattgttggtccccttagcggcgacactggcagcaccagaaaaacgcggtaaagtggtcggtatcattatgagcggcctgttgttgggtattttactggctcggaccgtcgctggcgcactggcaaccctcggcggctggcgcaccatttattgggttgccagtgccttgatgtttatcatggcactggtcctttggcgctgcctgccacgctataaacaacataccggtttaaattatggtcagttgctcggttcaattttcgccctgtttattcacacccccgtactgcgtacccgcgctttactcggggcattatcattcgccaatttcagtgtgctatggacatcaatggccttcctgctggccgcgccaccattcggttactctgaagccactattgggctatttggtttagtgggggccgctggcgcattaatggcgaccaaagcgggtcaattggccgataaaggtaaagcacgtgtcaccaccagcgccggattagttttactgttgctatcctggttgcccattgccttcggccaacactcaatcatcgcactgattattgggattatcgtactggatttagccgtacaggctgtgcacgtgaccaaccagagcgtgatgtaccgcatgatgccagaagcaagaaaccgcctaaccgcaggctatatgacgtcttactttatcggtggagcactggggtcgctgatttcagccgccgcctatcaacatgctggctggtatggcgtctccaccgcagggttggtcctgtgcctgttgaatatagtgacctggcttgtgggtaaacgaagtgatcaacccgcgaatcaaaccgtagaataa

SEQ ID NO: 80672 - protein, 399 aa, Yersinia pseudotuberculosis IP 32953
MQKTDTPGLSPALIVLMSVATGLAVASNYYAQPLLETIATNFSLSVNQAGFIVTAAQLGYAVGLMFLVPLGDMFERRGLIVGMTLLAAGGMLITAMSQNLTMMIIGTALTGLFSVVAQLLVPLAATLAAPEKRGKVVGIIMSGLLLGILLARTVAGALATLGGWRTIYWVASALMFIMALVLWRCLPRYKQHTGLNYGQLLGSIFALFIHTPVLRTRALLGALSFANFSVLWTSMAFLLAAPPFGYSEATIGLFGLVGAAGALMATKAGQLADKGKARVTTSAGLVLLLLSWLPIAFGQHSIIALIIGIIVLDLAVQAVHVTNQSVMYRMMPEARNRLTAGYMTSYFIGGALGSLISAAAYQHAGWYGVSTAGLVLCLLNIVTWLVGKRSDQPANQTVE

SEQ ID NO: 80673 - DNA, 1197 bp, Burkholderia pseudomallei K96243
  CDS (1)..(1197): transl_table=11
atgtcctcgcagcctcgccactccgccggcacgcccggccactattcacgcagcctgttgctgctgctcgcgacgatcgccggcgtctccgtcgcgaatatctattacaaccagccgctgctcgacgcattccgcgcatcgttcccgggcagcgcgtcatggatcggcgtcgtgccgaccgcgacgcagctcggctacgcaaccggcatgctcgtcctcgcgccgctcggcgaccgcttcgaccggcgcacgctgatcctgctgcagatcgccgggctgtcggccgcgctcgtcgtcgcggcggccgcgccgacgctcggcgtgctcgccgcggcaagcctcgcgatcggcatcctcgcgacgatcgcgcagcaggcggtgccgttcgccgccgagatcgcgccgcccgccgcgcgcgggcaggcggtcggcaccgtgatgagcggcctgctgctcggcatcctgctcgcgcgcacggcggcgggcttcgtcgccgaatacttcggctggcgcgcggtgttcgccgcatcggtcgcggcgctcgccgcgctcgcggccgtgatcgtcgcgcgcctgccgcgcagctcgccgacatcgacgctgccgtacggcaagctgctcgcgtcgatgtggcagctcgtgcgcgagttgcgcggactgcgcgaggcgtcgatgacgggcggcgcgatcttcgccgcgttcagcgcgttctggccggtgctcacgctgctgctcgcgggcgcgccgtttcatctgggcccgcaggcggcggggctcttcgggatcgtcggcgcggcgggcgcgctcgccgcgccgtacgcgggccgcttcgccgacaagcgcggcccgcgcgcgatcatctcgctcgcgatcgcgctgatcgccgcgtcgttcgcgatcttcgcgctgtcgggcgcgagcctcatcgggctcgtgatcggcgtgatcgtgctcgacgtcggcgtgcaggccgcgcagatctcgaaccagtcgcgcatctacgcgctgaagccggacgcgcgcagccgcgtgaacacggtgttcatggtctgctacttcatcggcggcgcgatcggctcgtccgcgggcgtcgccgcatggcgcgcgacgggctggctcggcatgtgcgcggtcggcctgctgttctcgatcgtcgcggcgatcgtgcatttccgcggcggcgcgggcgcgcgataa

SEQ ID NO: 80674 - protein, 398 aa, Burkholderia pseudomallei K96243
MSSQPRHSAGTPGHYSRSLLLLLATIAGVSVANIYYNQPLLDAFRASFPGSASWIGVVPTATQLGYATGMLVLAPLGDRFDRRTLILLQIAGLSAALVVAAAAPTLGVLAAASLAIGILATIAQQAVPFAAEIAPPAARGQAVGTVMSGLLLGILLARTAAGFVAEYFGWRAVFAASVAALAALAAVIVARLPRSSPTSTLPYGKLLASMWQLVRELRGLREASMTGGAIFAAFSAFWPVLTLLLAGAPFHLGPQAAGLFGIVGAAGALAAPYAGRFADKRGPRAIISLAIALIAASFAIFALSGASLIGLVIGVIVLDVGVQAAQISNQSRIYALKPDARSRVNTVFMVCYFIGGAIGSSAGVAAWRATGWLGMCAVGLLFSIVAAIVHFRGGAGAR

SEQ ID NO: 80675 - DNA, 1221 bp, Burkholderia pseudomallei K96243
  CDS (1)..(1221): transl_table=11
atgacgcaaaccgcgctgccgcgcggcacggttgcgctgttcgccggtgcgagcggcttgagcgtggcgaacgtctactatgcgcagccgcttctcgacgcgcttgccgcggatttcacgatcggccgcgcggcgatcggcggcgtcgtgaccgccacgcaaatcggctgcgcacttgcgctgctgttgctcgtgccgctcggcgacctcgtcgaccgccgccggctgatgctcgtgcaatcgctcgcgctcgcggcaacgttgatcgccgtcggcttcgcgtcggccagcgccgtgctgatcgccggcatgcttggcacagggctgctcggcacggcgatgacccaggggctcgtatcgtacgcggcgagcgcctcggcctcgcacgagcgcgggcgcgtggtcggcgccgcgcaaggcggcgtcgtgatcgggctgttgctcgcgcgcgtgctggcgggcttcgtcggcgacgtggcgggatggcgcggcgtctatttcctgtcggcggcgacgatgctcgcgctcgcggcgctgctcgcgcgcaagctgcccgccctcgcgccggcatcgccgcgcatcggctatccgcgactgatcgcatcgctgttcggcctgctgcgcgacgagcgcgtcttgcagatccgcgggatgctcgcgatgctgatgttcgccgcgttcaacattttctggagtgcgctcgcgctgccgctcagcgcgccgccctatacgctttcgcacaccgcgatcggcgcattcgggctcgtcggcgcattgggcgcgttcgccgccgcgcgcgccgggcattgggccgatcgcggcttcggacaaccgacgagcgccgcggcgctcgcgctgctgctcgcatcgtggctgccgctcgccttcatgccgatgtcgctatgggcgctcgtgctcggcatcgtgctgctcgatgccggcggacaggcgattcacgtgacgaatcagagcatgatcttccgcgcgcggccggatgcgcacagccggctcatcgccgcctacatgctgttctattcggtcggcagcgggctcggcgcgatcgcgtcgacggccgtctacgcaacgcacggatggcgcggcgtctgcatgctgggcgcggccgtcagcgcggcggcgctcatattctgggcggccacggcgcggccgacgccgaacgaagccgcgtcggcgcatacggcaaacgggcggctccggcggtga

SEQ ID NO: 80676 - protein, 406 aa, Burkholderia pseudomallei K96243
MTQTALPRGTVALFAGASGLSVANVYYAQPLLDALAADFTIGRAAIGGVVTATQIGCALALLLLVPLGDLVDRRRLMLVQSLALAATLIAVGFASASAVLIAGMLGTGLLGTAMTQGLVSYAASASASHERGRVVGAAQGGVVIGLLLARVLAGFVGDVAGWRGVYFLSAATMLALAALLARKLPALAPASPRIGYPRLIASLFGLLRDERVLQIRGMLAMLMFAAFNIFWSALALPLSAPPYTLSHTAIGAFGLVGALGAFAAARAGHWADRGFGQPTSAAALALLLASWLPLAFMPMSLWALVLGIVLLDAGGQAIHVTNQSMIFRARPDAHSRLIAAYMLFYSVGSGLGAIASTAVYATHGWRGVCMLGAAVSAAALIFWAATARPTPNEAASAHTANGRLRR

SEQ ID NO: 80677 - DNA, 1182 bp, Burkholderia pseudomallei K96243
  CDS (1)..(1182): transl_table=11
atgttcttctcggcgacggtcggcgtgatcgtgctcaacctgttcgccgcgcagccgctgacgggcccgatcgcggccgaactgcggctgcccgccagtctgacggggctcgtcgcgatgctgccgcagctcggctacgcggcgggcctcgtgctgctcgtcccgctcgtcgacctgctcgaaaaccgccggctcatcgtgacgacgctcgccgtctgtgcggcgacgctcgcgctgcccgccgtcacgcgctccggcgccgtgtacctcgcggcggtgttcgccgccggggcggcgtcgagcgtgattcagatgctggtgccgatggcggcgtcgatggcccccgacgaacggcgcggccgcgcggtcggcaacgtgatgagcggcctgatgctcggcatcctgctgtcgcggccgctcgcgagcctgatcgccggcgcggccggctggcgcgcgttctatggcgcggccgcggccgccgatatcgcgatcgccgcggtgctcgccgcgaagctgccgctgcgcgcgccgcagctgtcgacccgctacgcggcgctgctccgctcgctttggacgctcgtcgcgaccgagcgcgtgctgcagcggcgcgcgctgtccgcggcgctgtcgatggccgcgttcagcgcgttctggaccgcgatcggcctgcgtctcgccgccgcgccgttcgatctcggcctgcacggcatcgcgatgttcgcgttcgccggcgccaccggcgcgatcgtcacgccgttcgcgggcctggccggcgaccgcggccgggagcgcgacgcactgcgcggcgcgcacgtggcgatgctcgccgcgttggccgcgctcggcgtcgcgggggccggctggggcggattcgacacggccgcgcatccggcgctcgcgctcgcgctgctcgtcgtcggtgcggcggcgctcgacgcgggcgtcgtcgccgatcagacgctcggccggcgcgcgatcaatctgctcgatcccgccatgcgcgggcggctcaacgggctgttcgtcggcctgttcttcgtcggcggctcgctcggcgccgtgctcgccggcgcggcatgggcctgggcgggctggggcgcggtgtgcgcggtagggctcgtgtttgcgggcgccgcgttcgcgctggactggatcggcgcgcacgggccggcgccccgctga

SEQ ID NO: 80678 - protein, 393 aa, Burkholderia pseudomallei K96243
MFFSATVGVIVLNLFAAQPLTGPIAAELRLPASLTGLVAMLPQLGYAAGLVLLVPLVDLLENRRLIVTTLAVCAATLALPAVTRSGAVYLAAVFAAGAASSVIQMLVPMAASMAPDERRGRAVGNVMSGLMLGILLSRPLASLIAGAAGWRAFYGAAAAADIAIAAVLAAKLPLRAPQLSTRYAALLRSLWTLVATERVLQRRALSAALSMAAFSAFWTAIGLRLAAAPFDLGLHGIAMFAFAGATGAIVTPFAGLAGDRGRERDALRGAHVAMLAALAALGVAGAGWGGFDTAAHPALALALLVVGAAALDAGVVADQTLGRRAINLLDPAMRGRLNGLFVGLFFVGGSLGAVLAGAAWAWAGWGAVCAVGLVFAGAAFALDWIGAHGPAPR

SEQ ID NO: 80679 - DNA, 1203 bp, Burkholderia pseudomallei K96243
  CDS (1)..(1203): transl_table=11
atgaacgccaaccttgcctcttccgccacggccggccccgtcccgcaaatggcgcgcggcctgatcctgctgttcgcgttcagttgcggcgcgatcgtcgccaatctctactacgcgcagccgatcatcgcgctgatcgcgccggacctgcacatgtccggcggcatggcgagcctcatcgtgtcgctcacgcagatcggctacgcggccggcctgttctttctcgtgccgctcggcgatctggtcgagaacaagaagctgatggtcgtcaccgcgctgacgtcgatcgcgagcctcgcgctcgccgcgaccgtgcgcgcgccgggcctgttcctcgccgtctcgctgatcgtcggcttcagctcggtcgcggtgcaactgctgattccgctcgccgcgcacctcgcgccgagcgaatcgcgcgggcgcgtcgtcggcacgatcatgagcggcctgctgctcggcatcctgctgtcgcgccccgtcgcgagcttcatcgccgatcacttcggctggcgcgcggtgttcgcgttcggcgcggccacgatggcggtcgtcaccgtgctgctgatgctgacggtcccgagccgccggcccgcgcatcaggcgacgtacatgcaactgatccgctcgctcgggcggctcgtcgcgacgcagccggcgctgcgcgagcgctcgctctaccaggggctgatgttcggttcgttcagcctgttctggagcgcggcgccggtcgagctgatgcatcgccatcatctgtcgcaatcggcgatcgcgctgttctcgctcgtcggcgcgatgggcgcgagctccgcgccgatcgccgggcgcctcgccgacgccggccacaccgggcgcgcgaccgtcgtcgcgctcgggctcgccgcggcgagcttcgcgccggcgctgttcgtgccgggtgccggcgtcgccgggctcgtcgcgaccggcatcctgctcgacttcgcggtgcagatgaacatggtgctcggccagcgggagatctacgcgctcgacgcgcacagccgcaatcgcctgaactcgatctacatgacgagcatcttcgtcggcggcgcgatcggctccgcgctcgcgagcgcgctctacgagcacggcggctggacatggatcgcgatcgtcggcgcgctctttccgctcgcggcgctcgcgcgcttcgcctttgcgtcgcgcgccgcccgatga

SEQ ID NO: 80680 - protein, 400 aa, Burkholderia pseudomallei K96243
MNANLASSATAGPVPQMARGLILLFAFSCGAIVANLYYAQPIIALIAPDLHMSGGMASLIVSLTQIGYAAGLFFLVPLGDLVENKKLMVVTALTSIASLALAATVRAPGLFLAVSLIVGFSSVAVQLLIPLAAHLAPSESRGRVVGTIMSGLLLGILLSRPVASFIADHFGWRAVFAFGAATMAVVTVLLMLTVPSRRPAHQATYMQLIRSLGRLVATQPALRERSLYQGLMFGSFSLFWSAAPVELMHRHHLSQSAIALFSLVGAMGASSAPIAGRLADAGHTGRATVVALGLAAASFAPALFVPGAGVAGLVATGILLDFAVQMNMVLGQREIYALDAHSRNRLNSIYMTSIFVGGAIGSALASALYEHGGWTWIAIVGALFPLAALARFAFASRAAR

SEQ ID NO: 80681 - DNA, 1197 bp, Pseudomonas syringae pv. syringae B728a
  CDS (1)..(1197): transl_table=11
atgccccactcgtcccaatccccgcacaacgctatgaccatgaccccggccatggtcatgctgttcgccttctgctgcggcgcgattgtcgccaacatctactacgcacagccgatcatcgagctgattgcgccggacatcgggctgtcgagcacggcggccagtctgattgtctcgttgacgcagatcggttacgccctgggtttgttctttctggtgccgctgggtgacttgctggagaaccgcaggctgatgctggtgacgactgtcgtcgcgattctcagcctgctgggtgccgccttcgccgagcagccgaatgtgtttttgctggtctcgctgctggtgggcttcagttcagtatcggtgcagatgctcattccgttggcggcgcatctggctccggaggagtcgcgtgggcgggtcgttggcgggatcatgggcggactgctgctggggattctgctggcgcggccgattgccagtctggtggccgaccatttcggctggcgggcggtgtttggatcggcggccgtggtgatgatcggcatcagcgtggtactggcgaccaccatgccaaaacgcctcccggatcatcgcgcgtcctacggccagttgctgttctcgctgtggactctccttcgtacccagccggtgctgcgtcagcgtgccttttatcaggcgtgcatgttcgcaaccttcagcctgttctggaccgccgtcccgctggagctgtcacgcaatcatgggctgtcgcaaacgcagatcgcgatcttcgccctgatcggcgcgatcggcgccattgccgcgcccatcagcggccgactggcagacgctggctacacccgcatcgcctcactgggcgcgctgctgttcggcgcgctgagctttcttcccggcctggttcatccagcgtacagcgtgattggcctggccataacgggcgtagtgctggatttctgcgtgcagaccagcatggtcctgggccagcgcacggtctacgcgctggatgccgccagccgcagccgcctcaacgcgctgtacatgaccagtattttcatcggcggcgcgattggctcggcagtcgccagcccactgtttgatcacggtggctggacctgggtactgatcgccggcacggcactgccgctgattgcactgctcgcgctgctcagggatcgatccaggcagaatgcgtaa

SEQ ID NO: 80682 - protein, 398 aa, Pseudomonas syringae pv. syringae B728a
MPHSSQSPHNAMTMTPAMVMLFAFCCGAIVANIYYAQPIIELIAPDIGLSSTAASLIVSLTQIGYALGLFFLVPLGDLLENRRLMLVTTVVAILSLLGAAFAEQPNVFLLVSLLVGFSSVSVQMLIPLAAHLAPEESRGRVVGGIMGGLLLGILLARPIASLVADHFGWRAVFGSAAVVMIGISVVLATTMPKRLPDHRASYGQLLFSLWTLLRTQPVLRQRAFYQACMFATFSLFWTAVPLELSRNHGLSQTQIAIFALIGAIGAIAAPISGRLADAGYTRIASLGALLFGALSFLPGLVHPAYSVIGLAITGVVLDFCVQTSMVLGQRTVYALDAASRSRLNALYMTSIFIGGAIGSAVASPLFDHGGWTWVLIAGTALPLIALLALLRDRSRQNA

SEQ ID NO: 80683 - DNA, 1287 bp, Pseudomonas fluorescens Pf-5
  CDS (1)..(1287): transl_table=11
ttgccgcccggcccgctccatcgctttgccacggggtcttgccgacctcgctccttgcgcttgccccagagatcgccaatgaattccacgacccaggctctgcccaccgccagcgcgacaatgacccgaggcatggtgctgctgttcgccttctgctgcggggccatagtcgccaacatctactacgcacaaccgatcatcgagctgattgccccggatctcggcctgtccagcgccctggccagcctgatcgtgtcgctgacccagatcggctacgccctgggcctgttcttcctggtgcccctgggcgatttgctggaaaaccgccggctgatgatctgcaccaccctggtggcgattgccagcctgctgggcgcggcctttatccagcagcccaatgcctttctcctggtgtcgctgttgatcggcttcagttcggtgtcggtgcagatcctgattcccctggccgcgcacctggcccccgaggaaacccggggccgggtggtgggcgggatcatgggcggcctgctactggggattctcctggcccggccggtgtccagcgtggtggccgaccacttcggctggcgggcgatgttcatcgccgcggcgctgctgatggcagccatcagcctggtgctgatgctcaccattcccaagcgccagccggcccacagcgccacctatggccaactgctgcattccctgggcaacttgctgcgccagcaaccggtactgcgccagcgcgccttctaccagggttgcctgttcgccaccttcagcctgttctggaccgccgcaccgctggagctggcgcgccagcacggcctgagccaaagccagatcgcgatctttgccctggtgggcgccatcggcgccatcgccgcgcccatcagcgggcgcctggcagatgccggccatacccgcatcgcctcactgctggccatgctgctggcggccctgagcttcatccccagcctggtgcatccggcctacagcgtgatcggcatggccgtgaccggggtggtcctggatttctgcgtgcagatgaatatggtgctcggccagcgcgccgtgtacgccctcgacgcccacagccgcagccgcctgaatgcgctgtacatgaccagcatcttcatcggcggtgcctttggctcctcgattgccagtgcggtgtacgagcatggcggctggctgggcatcgtgctggtgggcagcgccttcccgctgctggccttgatgcgtttcctgctggtgcgggacaaccgccgcccggcccgggcctga

SEQ ID NO: 80684 - protein, 428 aa, Pseudomonas fluorescens Pf-5
MPPGPLHRFATGSCRPRSLRLPQRSPMNSTTQALPTASATMTRGMVLLFAFCCGAIVANIYYAQPIIELIAPDLGLSSALASLIVSLTQIGYALGLFFLVPLGDLLENRRLMICTTLVAIASLLGAAFIQQPNAFLLVSLLIGFSSVSVQILIPLAAHLAPEETRGRVVGGIMGGLLLGILLARPVSSVVADHFGWRAMFIAAALLMAAISLVLMLTIPKRQPAHSATYGQLLHSLGNLLRQQPVLRQRAFYQGCLFATFSLFWTAAPLELARQHGLSQSQIAIFALVGAIGAIAAPISGRLADAGHTRIASLLAMLLAALSFIPSLVHPAYSVIGMAVTGVVLDFCVQMNMVLGQRAVYALDAHSRSRLNALYMTSIFIGGAFGSSIASAVYEHGGWLGIVLVGSAFPLLALMRFLLVRDNRRPARA

SEQ ID NO: 80685 - DNA, 1221 bp, Pseudomonas fluorescens Pf-5
  CDS (1)..(1221): transl_table=11
atgtcagccaattcttcccctcatgcctcgcctgctctttccaccaaagtggtgctgctgttcgccatcgcctgcggtctggcggtgggtaacgtctactacgcccagccactgctggatgccatggctcataccttcgacctggcgccggccaccgtaggcatcgtcatcaccctgacccaggtcggctatggcctgggcctgctgttgctggtgcccctgggggacctgtacaaccggcgacggctgatcgtgacccagaccctgctctcggtgctggccctgctcaccgtggccctggccccgagcagcgcctggctgctgctgggcatggcctgcatcggcctgctggcggtggtaacccaggtactggtggcctacgccgccaacctggccccggcagagcaacgcggccgaaccgtgggcatggtcaccagcggcgtggtggtaggcatcctgctggcccgtaccgtggccgggaccatggccgacctggcgggctggcgttcggtctatctgttgtccgccgggctgaccctgctggtggccctggccctgtggaaaaccctgcctacccgcgagcaacccaaggccacccagggttacgggcaattgctcggttcgctgctgcaactgttcagggaggaaaaggtgttgcgggaccgggcggtgctggcgatgctgatcttcgccgccggcaccgtgctgtggacgccattggtgttgccattgagtgccccgccactgtccttgtcccataccgagatcggcctgttcggcctcgccggcgcggcaggcgccctgggcgcggcacgggccgggcacctggccgaccgcggcctggcgcagtggaccagcggcctggcactgggcctgatgctgctgtcctggctgcccattgccttcactcaatcgtccctgtgggccctgctgttcggggtaatcagcttcgacctgggcctgcaggccgtgcacgtcaccagccagagcctgatctacagcgtgcgccccgaggcgcagagccgactggccgccggctacatgctgttctattccctgggcagcgccgcaggctccatcgccgccaccgccacctatgcctgggccggctggaccggggtctgcctgctgggggccgggatcaacggcgtggcgctgatctactggctgtggagcctggccccgggcaaagccgcggccagggttcgttgcgccacttga

SEQ ID NO: 80686 - protein, 406 aa, Pseudomonas fluorescens Pf-5
MSANSSPHASPALSTKVVLLFAIACGLAVGNVYYAQPLLDAMAHTFDLAPATVGIVITLTQVGYGLGLLLLVPLGDLYNRRRLIVTQTLLSVLALLTVALAPSSAWLLLGMACIGLLAVVTQVLVAYAANLAPAEQRGRTVGMVTSGVVVGILLARTVAGTMADLAGWRSVYLLSAGLTLLVALALWKTLPTREQPKATQGYGQLLGSLLQLFREEKVLRDRAVLAMLIFAAGTVLWTPLVLPLSAPPLSLSHTEIGLFGLAGAAGALGAARAGHLADRGLAQWTSGLALGLMLLSWLPIAFTQSSLWALLFGVISFDLGLQAVHVTSQSLIYSVRPEAQSRLAAGYMLFYSLGSAAGSIAATATYAWAGWTGVCLLGAGINGVALIYWLWSLAPGKAAARVRCAT

SEQ ID NO: 80687 - DNA, 1203 bp, Ralstonia eutropha JMP134
  CDS (1)..(1203): transl_table=11
atgaaaaccacaacctctcacgcgccacatactgccgatcacgcggccgcgccaatgtctggcgcgctggtcggcttgttcgccctgtgcgcaggcgtcctcgtcgccaatctctattacgcacagccgatcatcgaactgattgcaccggctgtgggcctgtccgcgcaaagcgccagcgtgatcgtatcgctgacccagatcggctatgcggtcggccttttctttctggtgccccttgccgacctgcaggagaaccggcgtttgctgacgatcagcggtgtcgcggccgcaatcagcctggcaggcgccgccaccgcgtcgcaaccgggcgtgttcctgctggtgtcgctgctgctgggcctcagttcggtgagcgtgcagattctgattccgctggccgcgaaccttgcccctgaggcgctgcggggacggactgtcggcaccatcatgggcggcctgctatccggcatcctgctgtccaggccgctgtcgagcctgcttgcgcagtacttcggctggcgtgccgtgttctacatcgccgccgcgacgacgctgatcacggtcggcatcattaccacgacgctgcctcggcgcacgccgcagcatcgggccacctatgcccaactgctcgtatcgttgtggcatctgttcacgcgctttgcagtgctgcgtcagcgctcgctgtaccaggccctcctctttgcggccttcagcctgttctggaccgctgcaccgctcgaactcgccagccattacgggctgtcgcagtcgcagatcggcgtgtttgccctggtcggcgcactgggcgcagtcgcagcccctgttgcgggccggctggcagacgcggggcacacgcgcattgcctcattccttgcgatgatcgcggcagccatcagctttattccgggcattgccggtggcgctggcggcctgtattggctggcactcaccggcatcgtgctcgacttcgccgtgcagatgaacatggtgctgggccagcgtgccatctatgcgctcgatgccgccagccgcggacggctgaacgcactgtatatgactgccatcttcgccggcggcgcggtgggatccgcgctggccagcacgctgtacacgcatctcggttgggccggcgtggtcgcggcaggcagcggtcttgcgacggtctcgctggtggcgctggcgatcgcttcgcggcgctga

SEQ ID NO: 80688 - protein, 400 aa, Ralstonia eutropha JMP134
MKTTTSHAPHTADHAAAPMSGALVGLFALCAGVLVANLYYAQPIIELIAPAVGLSAQSASVIVSLTQIGYAVGLFFLVPLADLQENRRLLTISGVAAAISLAGAATASQPGVFLLVSLLLGLSSVSVQILIPLAANLAPEALRGRTVGTIMGGLLSGILLSRPLSSLLAQYFGWRAVFYIAAATTLITVGIITTTLPRRTPQHRATYAQLLVSLWHLFTRFAVLRQRSLYQALLFAAFSLFWTAAPLELASHYGLSQSQIGVFALVGALGAVAAPVAGRLADAGHTRIASFLAMIAAAISFIPGIAGGAGGLYWLALTGIVLDFAVQMNMVLGQRAIYALDAASRGRLNALYMTAIFAGGAVGSALASTLYTHLGWAGVVAAGSGLATVSLVALAIASRR

SEQ ID NO: 80689 - DNA, 1212 bp, Methanosarcina barkeri str. Fusaro
  CDS (1)..(1212): transl_table=11
atgtcggaagaaataaattattattcgaaaaaggacacattccagactggaaatgtctctgagccaggtaaagggcttgtctttgcaatggcctgtgcatgtggaattgcagtggcgaacatctattataaccagccaatgcttggggttatcactcgctcctttcctggcgaattggctcccagcctcattcctactgctactcaactcggttacgcaatcggtttgctgcttctggtgcctctgggagatctgatagaacgtcgtcgactcatcgtatcccagttccttgttttggccttatcactgctttttgccgccgccgcatctactggttgggccttgctgagtgcttcactttgcattggctttaccgcttctgtcacgcagcagataataccggctgccgcatcactagcctctgataaccgccgaggtgcaattataggtagcgttatgagcgggctgttgagcggcatgcttttgagccggattcttgccggttttatcgctactaactacggctggagagcgatgttctggcttggcattcccctagttctggctggtgcggcagcaatggcgctgttattgccgctcagccatcccgtgacttctatgaactatggctcgctgcttcgttcactcctacaactttggcgcgaggaatccaggctacgtcgcgccacatttatacagggtttgctttttgccgtgttcagtgccttctggacgatcctcgcacttcatcttgaacagccccctttccacctcggcgccgacgtcgcaggactttttggaattcttgggatggttggagtgcttgctgctcccatagctggacgtctagccgaccgccggggaccaggccaggttgtttctacaggtgcgtttgccgctctgctagcctggctgattcttgcaggctggaattctcttgctggcctggttttcggtgtcatgcttcttgatttcgggatgcagagtgccatggttgccaatcaacaggtaatttacgggcttaagccacaagcacgcaaccgggtgaatagtttgttcatggtagggatgtttattggcggcagcctggggtctggaggtgcaatgctggcctggaagatagcagattggaagggcgttgccgtttctgctattgctgtagcacttacagctttcctggtaccacttttgctccaacgcaatcattcatga

SEQ ID NO: 80690 - protein, 403 aa, Methanosarcina barkeri str. Fusaro
MSEEINYYSKKDTFQTGNVSEPGKGLVFAMACACGIAVANIYYNQPMLGVITRSFPGELAPSLIPTATQLGYAIGLLLLVPLGDLIERRRLIVSQFLVLALSLLFAAAASTGWALLSASLCIGFTASVTQQIIPAAASLASDNRRGAIIGSVMSGLLSGMLLSRILAGFIATNYGWRAMFWLGIPLVLAGAAAMALLLPLSHPVTSMNYGSLLRSLLQLWREESRLRRATFIQGLLFAVFSAFWTILALHLEQPPFHLGADVAGLFGILGMVGVLAAPIAGRLADRRGPGQVVSTGAFAALLAWLILAGWNSLAGLVFGVMLLDFGMQSAMVANQQVIYGLKPQARNRVNSLFMVGMFIGGSLGSGGAMLAWKIADWKGVAVSAIAVALTAFLVPLLLQRNHS

SEQ ID NO: 80691 - DNA, 1152 bp, Anabaena variabilis ATCC 29413
  CDS (1)..(1152): transl_table=11
atgattatgaatcgcaatatcgtttggctaatggcaattaccagtggggctgctgctgccaacctgtattacaaccaacccctgcttgcagcaattactcagaatttgaacgcctctgttcaagacgtaggattaattccgacgttgggacaaattggctatgcaatgggcaactttttcatcgttcctctcggcgatcttctagagcgcagacgtttgctcgttaacatgctcattggaactgctctagctttagctgcggctgctgtttctcctaccattggctggttaattattgctagcttcatcgttggggtaacgacgatcgtacctcagattgcggttccctttgcagctttacttgctcctgcggcaatgcggggcaaagttgtcggcacagtcatgagcggactgctgattggcattcttcttgcccggacggtgagtggcttcgttggtgcagaactaggttggcggtcgatgtattggattgcgagtggcgtaatgttgatgttagcgctcgttctgtttagtgtgctgcccaacagtcagcctgcggtcatgtttacttaccgagaattgatgcgatcgatgttgaagttggttcgagagcctatcttgcaagaagcttcaattacaggtgcaatggctttcggggcatttagcgttttttggagtaccttgatttttctattagaacaaccaccttatcaatatggcagcgaggtcgctgggttgtttgggttgattggggtcgttggagccgcaagcgcgccactagctggcaaacttgccgatcgcagaagtccgagactcgcgattgcactgggcttactcgcaactgctgtgtctttcctggtgttctggttgtttggataccaactatggggactgattgttggcgtgattttgttagatatgggggtacaggtgacaacagtatccaaccaggcattgatttacaggctacctgaagaaacgcatagccgtttgaatgcgctgtttgtcacattctatttctttggtggcgcgatcggttcattcctgggtgcttacggctggaatctctggcgatggaatggagtttgtaccgccgggatgtttttgtcgatcattgcttttgcagcactcacgcttggacgtaagcgctaa

SEQ ID NO: 80692 - protein, 383 aa, Anabaena variabilis ATCC 29413
MIMNRNIVWLMAITSGAAAANLYYNQPLLAAITQNLNASVQDVGLIPTLGQIGYAMGNFFIVPLGDLLERRRLLVNMLIGTALALAAAAVSPTIGWLIIASFIVGVTTIVPQIAVPFAALLAPAAMRGKVVGTVMSGLLIGILLARTVSGFVGAELGWRSMYWIASGVMLMLALVLFSVLPNSQPAVMFTYRELMRSMLKLVREPILQEASITGAMAFGAFSVFWSTLIFLLEQPPYQYGSEVAGLFGLIGVVGAASAPLAGKLADRRSPRLAIALGLLATAVSFLVFWLFGYQLWGLIVGVILLDMGVQVTTVSNQALIYRLPEETHSRLNALFVTFYFFGGAIGSFLGAYGWNLWRWNGVCTAGMFLSIIAFAALTLGRKR

SEQ ID NO: 80693 - DNA, 1188 bp, Pseudomonas fluorescens PfO-1
  CDS (1)..(1188): transl_table=11
atgaccgccacaactcacgcaatgacccgaggcatggtgctgctgttcgctttctgctgcggcgccatcgttgccaacatctactacgcccagccgatcatcggcctgatcgcgccggacatcggcctgagcgacaccatggccagtttcatcgtgtcgctgacccagatcggctatgcgctgggcctgttctttctggtgccgctggcggatctgctggaaaaccgccgtctgatgatcatcaccaccgtggtggcaattgccagcctgctgggtgcggcgtttaccgatcaaccgaatgtgttcctgctaatttcgttgctggtgggcttcagctcggtgtcggtgcaggtgctgattccattggcggcgcatctggcgccggaagaatcccgtggccgggtggtcggcgggatcatgggcggtctgctgctggggattctgctggcgcggccagtgtcgagcgtggtcgccgaccacctcggctggcgggcgatgttcatgatcgcggcaggcttgatggccgcgatcagcgtggttttggcgctgactgtgcccaagcgccagccggatcacagcgcctcctacggccaattactcggatcgttgtggacgctgctgcgcaaacaaccggtgctgcgtcagcgcgcgttctaccaggcctgcatgttcgccacgttcagcctgttctggactgccgtgccgctggaactggcgcgcaaccatggcctgtcccagagtgaaatcgcgatcttcgccctggtcggcgccatcggtgccatcgccgctccgatcagcggacgtctggccgacgccggccacacccgcatcgcttcgttgctggccatgctgttcgccagcctgagcttcctgcccgccttcatccacccggcctacagcgtgatcggcctggccgtgaccggtgtggtgctcgacttctgcgtacagatgaacatggtgctcggccagcgcgcggtctactccctcgacgccaaaagccgcggccgcctcaacgcgctgtacatgaccagcatcttcgtcggcggcgccttcggctcgtcggtggccagtgcggtatacgagcatggtggctggttgtggatcgtgattgtcggcagcgcgttcccgctgctggcgctggtgcggtttttgagtgcttcgcagaagcctgttctggcaacggcctag

SEQ ID NO: 80694 - protein, 395 aa, Pseudomonas fluorescens PfO-1
MTATTHAMTRGMVLLFAFCCGAIVANIYYAQPIIGLIAPDIGLSDTMASFIVSLTQIGYALGLFFLVPLADLLENRRLMIITTVVAIASLLGAAFTDQPNVFLLISLLVGFSSVSVQVLIPLAAHLAPEESRGRVVGGIMGGLLLGILLARPVSSVVADHLGWRAMFMIAAGLMAAISVVLALTVPKRQPDHSASYGQLLGSLWTLLRKQPVLRQRAFYQACMFATFSLFWTAVPLELARNHGLSQSEIAIFALVGAIGAIAAPISGRLADAGHTRIASLLAMLFASLSFLPAFIHPAYSVIGLAVTGVVLDFCVQMNMVLGQRAVYSLDAKSRGRLNALYMTSIFVGGAFGSSVASAVYEHGGWLWIVIVGSAFPLLALVRFLSASQKPVLATA

SEQ ID NO: 80695 - DNA, 1200 bp, Pseudomonas fluorescens PfO-1
  CDS (1)..(1200): transl_table=11
atgcttacgggcaatccggcagcggcggccaaggccgaaccatccgcttctctttccggcctgatggtcgcgttcctggcattctgctgcggcgcggtcgtggccaacctttattacgctcagccgatcgtcgaactgatcgcgccgcagatcggcctgtccagtgccaatgccagtctgatcgtttccctcacgcagttcggttatgcattgggcctgctgttgctggtgccgctggccgacctgatggaaaaccgtcggctggtggtgggctttaccctggcggcgagcgtgaccctgttgtgcgccggcctgacgcactcgccgtcgatgttcctggtcctgtcgttgctgatcggcctcacttcggtggcggtgcagattctggtgccgttggccgcgcatctggcgcccgaggcgacccgtgggcgggtggtgggcaacatcatgagcggcctgttgctgggcattctgctgtcgcggccactgtcgagtctgctggtggaagtgttcggctggcgcggtgtgtttttcagcgcagcggcgctgatggctgtcatcgccctgatcatggcgattgccttgccgcgccgcgtcccgagccatcaggcgacgtacgctgcgctgatcggctcggtgtttgcgctggcccgtcggcacgcggttctgcgtcagcgttcgctgtatcagggcttgctgttcgccagtttcagcctgttctggacccttgcaccgatcgagctgatgcggcaccacggtttcagtcaggcacaggtggcgatatttgcattggttggcgctgtcggcgcggtcgcagcgccgattgccgggcgcctggccgatgccgggcacggtcggcgcgggacgctcgtggcactgttgctggcgccagcctcgttgctgatcgccgcgctgccgggcagcagctatgtctggctggtggtttgcgcggtgctgctggacttcgccgtgcaactgaacatggtgctgggccagcgcgaggtgtacgccatcgacccgcacagccgggcccgcctgaatgccgtgtacatgaccagcatcttcgtcggcggcgccctgggatcgctggtcgccagtccgctctacgagcatttcggctggaacctgtccgccgtgaccgtggcgttgctgccggcgctggccctggcgctgttcctgagccgcaaggccgatgcctga

SEQ ID NO: 80696 - protein, 399 aa, Pseudomonas fluorescens PfO-1
MLTGNPAAAAKAEPSASLSGLMVAFLAFCCGAVVANLYYAQPIVELIAPQIGLSSANASLIVSLTQFGYALGLLLLVPLADLMENRRLVVGFTLAASVTLLCAGLTHSPSMFLVLSLLIGLTSVAVQILVPLAAHLAPEATRGRVVGNIMSGLLLGILLSRPLSSLLVEVFGWRGVFFSAAALMAVIALIMAIALPRRVPSHQATYAALIGSVFALARRHAVLRQRSLYQGLLFASFSLFWTLAPIELMRHHGFSQAQVAIFALVGAVGAVAAPIAGRLADAGHGRRGTLVALLLAPASLLIAALPGSSYVWLVVCAVLLDFAVQLNMVLGQREVYAIDPHSRARLNAVYMTSIFVGGALGSLVASPLYEHFGWNLSAVTVALLPALALALFLSRKADA

SEQ ID NO: 80697 - DNA, 1209 bp, Pseudomonas fluorescens PfO-1
  CDS (1)..(1209): transl_table=11
atgaaaactgcaacattcgataaagatgtcgtgctgcttttcgccatcgcctgcggcctcgcggtgggcaacgtgtattacgcccagccgctgctggatgcaatggccgacgccttcggcctgtcgccgggcagcatcggcatcgtcatgacgttgactcaggtcggctacggcctcgggctgttgttgctcgtgccccttggcgacctgctcaaccgccggcggctgatcgtcacgcaaacgctgttgtccgccgctgccttgctgatgatcgccttggcctcgaacagcgtctggctactgatcggcgtcaccctgaccggcctgctggccgtggtcacccaggtgttggtcgcctacgccgcaaccctggccgtcccggcgcaacgcggaaaggttgtgggcgtgatcaccagcggcatcgtcatcggcattctgctggcgcgcacggtggccggcggtatggctgatctggccggctggcgctcgatctatctgctgtcagcgggattgacgctggtgatggctgtgttgctgtttcgggtgttacccaaggatgaagaagcacgaccatccacgcattacgtggcattgattgcctcagtgttcagcctgtttcgtgaagaaccggtgctgcgccaacgtgcgatcctcgccctgctcaccttcgccagcgccatggtgctgtggacgccgatggtgttaccgctggccgccccgccgctgtcgctttcccacagtgaaatcggattgttcggactcgccggcgcggcgggtgcactcgccgccgccagagccggacacctggcggatcgaggattggggcaatgggtaagcggtctgtcgctgctgctgatgctcggttcgtggttgccgatcgcactgacccagtcttcgttgtgggcgttgctgcttggcgtcatcaccctggatctgggcttgcaggccgtgcacgtcaccagccagagcctgatctacagcgtccgcccagaggcacaaagccgactgactgccggctacatgctgttttattcaatgggcagcgccttgggctcaatcgcctcgaccgccatgtacgcctgggcaggatggccgggcgtctgctggctgggtgccgcaatcaacgtggtcgcgctgctgtactggtggcgaacgctggccacccggaaacgtggcgaggctgcttgcgccctcgccacgtcggactga

SEQ ID NO: 80698 - protein, 402 aa, Pseudomonas fluorescens PfO-1
MKTATFDKDVVLLFAIACGLAVGNVYYAQPLLDAMADAFGLSPGSIGIVMTLTQVGYGLGLLLLVPLGDLLNRRRLIVTQTLLSAAALLMIALASNSVWLLIGVTLTGLLAVVTQVLVAYAATLAVPAQRGKVVGVITSGIVIGILLARTVAGGMADLAGWRSIYLLSAGLTLVMAVLLFRVLPKDEEARPSTHYVALIASVFSLFREEPVLRQRAILALLTFASAMVLWTPMVLPLAAPPLSLSHSEIGLFGLAGAAGALAAARAGHLADRGLGQWVSGLSLLLMLGSWLPIALTQSSLWALLLGVITLDLGLQAVHVTSQSLIYSVRPEAQSRLTAGYMLFYSMGSALGSIASTAMYAWAGWPGVCWLGAAINVVALLYWWRTLATRKRGEAACALATSD

SEQ ID NO: 80699 - DNA, 1296 bp, Burkholderia sp. 383
  CDS (1)..(1296): transl_table=11
atgaactgccctgccaacccttgccccgccgccgctcgcccgcccgtcagcgcgcccgccggcccgccgcccgcgctcagcgcgggcatgacgctgttcttcgccgcgacggtcggcgtgatcgtgatggacctgttcgccgcgcagccgctgacgggcccgatcagcaccgacctgcacctgccgcccggcctgaccggcctcgtcgcgatgctgccgcagctcggctacgccgccgggctcgtgctgctcgtcccgctcgtcgacctgctcgagaaccgtcgcctgatcgtcacgacgctggccgcgtgcgcagccgcgctcgcactgccggcgttcacgcggtcgggcaccgtattcctgctggcgacgctcgtggccggcgccgcgtcgagcgtgatccagatgctcgtgccgatggccgcgtcgatggcgcccgaggcgcagcgcggccgcgcggtcggcaacgtgatgagcgggctgatgctcggcatcctgctgtcccggccgctcgcgagcctgatcgcgggctcggccggctggcgcgggttctacgtgctggccgcgctcgcgaacgccgcaatcgccgtcgtgctcgcgctgcgcctgccgtcgcgcacgccgtcgatcacggccggctaccgcacgctgctcgcgtcgatgggacgcctgctggccgacgagccgatactgcgccggcatgcgttgtcggccgcgctggcgatggccgcgttcagcgcattctggaccgcggtcgggctgcggctcgcgcagccgccgttcggcctcgacctgcacggcattgcgctgttcgcgttcgccggcgccagcggtgcaatcgtcacgccgctcgcgggccgcgccggcgaccgcggccacggcccggtcgcgcagcggatcgcgcacggcacgatgctcgtggcgctcgtcgtgctcgggatcgcgggtgccggctggttcggcttcgacgcgcacatgcatcgcggccccgcgctcgcgctgctggccggcggcgcggcgctgctcgatgcgggcgtcatcgtcgaccagacgatcggccgccgcgagatcaacctgctgaacccggccgcgcgcggccgcctgaacgggctgttcgtcgggctgttcttcatcggcggcgcgctcggcgcggtgctcgccggcaccgcgtgggcctggggcgggtggagtgcggtatgcggtgtggggtttgcgttcgccggcgcggccaccgtcttcgggctcacggccggacgcggggccggcgctgccgcgttgacgcgcccgcgtgcctag

SEQ ID NO: 80700 - protein, 431 aa, Burkholderia sp. 383
MNCPANPCPAAARPPVSAPAGPPPALSAGMTLFFAATVGVIVMDLFAAQPLTGPISTDLHLPPGLTGLVAMLPQLGYAAGLVLLVPLVDLLENRRLIVTTLAACAAALALPAFTRSGTVFLLATLVAGAASSVIQMLVPMAASMAPEAQRGRAVGNVMSGLMLGILLSRPLASLIAGSAGWRGFYVLAALANAAIAVVLALRLPSRTPSITAGYRTLLASMGRLLADEPILRRHALSAALAMAAFSAFWTAVGLRLAQPPFGLDLHGIALFAFAGASGAIVTPLAGRAGDRGHGPVAQRIAHGTMLVALVVLGIAGAGWFGFDAHMHRGPALALLAGGAALLDAGVIVDQTIGRREINLLNPAARGRLNGLFVGLFFIGGALGAVLAGTAWAWGGWSAVCGVGFAFAGAATVFGLTAGRGAGAAALTRPRA

SEQ ID NO: 80701 - DNA, 1200 bp, Burkholderia sp. 383
  CDS (1)..(1200): transl_table=11
atggaaccgcatcacgacacccatcctcccctcacccgcggcatgacgctgctgttcgcctgcgcgtgcggcatcgtcatcggcaacatctattacgcgcagccgctgctcgccgcgatcgcgcgcagcttcgggcgcgcgccgaccgagctcggctatctcgtcacgctgacgcagctcggctacgcggcaagcctgctgctgatcgtcccgctcggcgacgcggtcaaccgtcatacgctgatcgtgcggctgttgatgctcaacgtcgtcgcgctggtcgcggtcacgttcagcacgaacttcacgatgttcgtcgtcgcgaacatcgcggtcggcttcgtcacctgttcgacgcagctgctcgtgccgttcgccgcatcgctcgccgacgcacgctcgcgcggccgcgcggtcggcaccgtgatgagcgggctgctgctcggcatcctgctcgcgcgcgtcgcggccggtgcgatcgccgacgggttcggctggcgcgcggtgtacggcatcgctgcggtgatggtggcggtgctgaccgtcgtgctcgccgtgaagctgccgaaggatcgccgcgatgcgcgcctcgactatgcggcgctgatgaagtcgctcgtcgcgctggtgcgcgcgcaaccgctgatcgcgctgcgctcgacctacggcgcgctcgtgttcgcatgcttcagcctgctgtggacgggcctcacgttcctgctgagccagccgccgtacagctattccgaagggcagatcggcctgttcggcgtcgttggcgcagtgggtgcgctcgcggcgacgtcggccggccggctcgtcgatcgcgggcacggcaatgcggcgacggggctgttcgcggcggcggtgctcgcatcgttcgcgctgatcgcgaccggcgcgcactcgctcgccgcgctgatcgcgggcatcctgctgctcgacgtcggcgtgcagggcatgcacatctcgaaccagagcgtgatctatgcgctggccggcaacgcacgcagccgcgtgacgacgatctacctgacgagctacttcatcggcggggcgttcgggtcgttcgcggcgagcgtcgcgtacggcatcgacggctggcgcggcgtgtgtatcgcgggcgcggcgctgtcgggtgtgctgatcgtgctgtggctcgcatcgcagcgcgtcggcgtgcggcaggtcacgcagtaa

SEQ ID NO: 80702 - protein, 399 aa, Burkholderia sp. 383
MEPHHDTHPPLTRGMTLLFACACGIVIGNIYYAQPLLAAIARSFGRAPTELGYLVTLTQLGYAASLLLIVPLGDAVNRHTLIVRLLMLNVVALVAVTFSTNFTMFVVANIAVGFVTCSTQLLVPFAASLADARSRGRAVGTVMSGLLLGILLARVAAGAIADGFGWRAVYGIAAVMVAVLTVVLAVKLPKDRRDARLDYAALMKSLVALVRAQPLIALRSTYGALVFACFSLLWTGLTFLLSQPPYSYSEGQIGLFGVVGAVGALAATSAGRLVDRGHGNAATGLFAAAVLASFALIATGAHSLAALIAGILLLDVGVQGMHISNQSVIYALAGNARSRVTTIYLTSYFIGGAFGSFAASVAYGIDGWRGVCIAGAALSGVLIVLWLASQRVGVRQVTQ

SEQ ID NO: 80703 - DNA, 1200 bp, Burkholderia sp. 383
  CDS (1)..(1200): transl_table=11
atgtccaccgcctccaccgaccgtccgaccgacgccgcctcgccccactattcgcgcagcctgctgttgctgctcgcgacgatcgcgggcgtgtccgtcgcgaacatctattacaaccagccgctgctcgacagcttccgctccgcgtttcccgacggcgcgtcgtggatcggcgcggtgccgaccgcgacgcagctcggctatgcggccggcatgttcctgctcgcgccgctcggcgaccgcttcgaccgccgcggtctgatcctgatgcagatcgccggcctgtcggtcgcgctgatcgtcgcggccaccgcgccgtcgctggctgtgctcgccgtcgcgagtctcgcgatcggcgtactcgcgaccatcgcgcaacaggccgtgccgttcgccgccgaaatcgcgccgccggccgaacgcgggcatgcggtcggcaccgtgatgagcggcctgctgctcggcatcctgctcgcgcggacggccgccggcttcgtcgccgagtatttcggctggcgcgcggtgttcgccgcgtcggttgcggcgctcgtcgcgctcgccgcggtgatcgtgctgcggctgccgcgcagctcgccgacgtcgacgctgtcgtacggcaaactgctcggctcgatgtggcatctggcggtcgaattgcgcgggctgcgcgaggcatcgctgacgggtgccgcgctgttcgcggcattcagcgcgttctggcccgtgctcacgctgctgctcgccggcgcgccgttccatctcggcccgcaggcagccggcctgttcgggatcgtcggtgcggcaggcgcgctcgcggcgccgtacgcgggccgcttcgcggacaagcgcggcccgcgcgcgatcatctcgctcgcgatcgcgctgctcgcgctgtcgttcgtgatcttcgcgctatcgggctcgagcctcgtcgggctcgtgatcggcgtgatcgtgctggacgtcggcgtgcaggccgcgcagatctcgaaccagtcgcgcatctatgcgctgaagcccgaggcgcgcagccgcgtcaacacggtgtacatggtgtgctatttcatcggcggcgcactcggctcgtcggccggcgtcgccgcatggcacgcgttcggctggatcgggatgtgcgcaaccgggctggtgttcaccgcgctcggcggctggttccaccatcgcggcggccggcgcgactga

SEQ ID NO: 80704 - protein, 399 aa, Burkholderia sp. 383
MSTASTDRPTDAASPHYSRSLLLLLATIAGVSVANIYYNQPLLDSFRSAFPDGASWIGAVPTATQLGYAAGMFLLAPLGDRFDRRGLILMQIAGLSVALIVAATAPSLAVLAVASLAIGVLATIAQQAVPFAAEIAPPAERGHAVGTVMSGLLLGILLARTAAGFVAEYFGWRAVFAASVAALVALAAVIVLRLPRSSPTSTLSYGKLLGSMWHLAVELRGLREASLTGAALFAAFSAFWPVLTLLLAGAPFHLGPQAAGLFGIVGAAGALAAPYAGRFADKRGPRAIISLAIALLALSFVIFALSGSSLVGLVIGVIVLDVGVQAAQISNQSRIYALKPEARSRVNTVYMVCYFIGGALGSSAGVAAWHAFGWIGMCATGLVFTALGGWFHHRGGRRD

SEQ ID NO: 80705 - DNA, 1233 bp, Burkholderia sp. 383
  CDS (1)..(1233): transl_table=11
atgtccactccgtcccgactcgatgccgcgccccgcgcagcccacgccccggcccacccggccgcccattcgatgcccgatcgccggctcgtgctgctgctcgcggccgctgccggtctcggggtcgccccgctctactacgcgcaaccgatgctcggcgcgctcgggcccgatctcggcgcgtcggcacgggcgatcggcttcgtgccgacgctcacgcaactcggctatgcgctcggcatcctgctgctcgcgccgctcggcgaccgcttcgaccgccgccgcgtgatcgtgaccaaggccgcgacgctggtcgtcgcgctgctgctcgccgccatcgcgccgtcgctcgggccgctgctcgcggcgagcttcgcgatcggcctcgccgcgacgatggcgcaggacgtcgtgccggccgccgcgacgctcgcgcacgacgcgcatcgcggccgtatcgtcggcacggtgatgacggggctgctgctcggcatcctgctgtcgcgcgtcgtggccgggttcgtcgccgagacggccggatggcgcgcgatgttcgcactcgcggccgccagcgtcgccgtgatcggcgtcgtggccgcgcgcgggctgccgcacttcgagccgaccacgcgcctgccgtatcgcgcactgatcgggtcgctcggcgcactgtggcgccagcatccggcgctgcgccgcgccgcgctcgcacaggggctgctggccatcgggttcagcgcattctggtcgacgctcgcggtgatgctgcacggcgcaccgttccacctcggcagcgcggccgctggcgcattcggcctcgcgggcgccgccggcgcgctggccgcgccgatcgccgggcgcatggccgaccatcacggccccgagcgcgtcacgcgcatcgggatcggcatcgcgacggtgtcgttcgcgtcgatggccgccgcgccgctgatgtcgccgcatgcacagctcgtgctgctcgcggtcgcgacgatcggcttcgatctcggcgtgcaggccacgctgatcgcgcaccaggcgatcgtctaccggatcgaccccgcgtcgcgcagccgcctcaacgcggtgctgttcgtcggcatgttcatcgggatggcggccggcgccgcgatcggcagtttgttgctcgcgcaactgggctggaatgcggtgaccgcgctggccgtcgtcacatcgctggccgcgctcgccgtgcggatctggcgccactga

SEQ ID NO: 80706 - protein, 410 aa, Burkholderia sp. 383
MSTPSRLDAAPRAAHAPAHPAAHSMPDRRLVLLLAAAAGLGVAPLYYAQPMLGALGPDLGASARAIGFVPTLTQLGYALGILLLAPLGDRFDRRRVIVTKAATLVVALLLAAIAPSLGPLLAASFAIGLAATMAQDVVPAAATLAHDAHRGRIVGTVMTGLLLGILLSRVVAGFVAETAGWRAMFALAAASVAVIGVVAARGLPHFEPTTRLPYRALIGSLGALWRQHPALRRAALAQGLLAIGFSAFWSTLAVMLHGAPFHLGSAAAGAFGLAGAAGALAAPIAGRMADHHGPERVTRIGIGIATVSFASMAAAPLMSPHAQLVLLAVATIGFDLGVQATLIAHQAIVYRIDPASRSRLNAVLFVGMFIGMAAGAAIGSLLLAQLGWNAVTALAVVTSLAALAVRIWRH

SEQ ID NO: 80707 - DNA, 1197 bp, Burkholderia sp. 383
  CDS (1)..(1197): transl_table=11
gtgccgacacatgctgcgcatccggccgacggcggccgcctgtcctcggcgcgcgtcgcgttgctggccgtctgctgcgcggccagtgtcgcgaacgtctactacgcgcagccgctgctcgattcgatcgcgcgggatttcggcgtgtcgcaggcggccgtcggcggcgtcatcaccgcaacgcagctcggctgcgcgctcgcgctgctgttcgtcgtgccgctcggcgacctgctgaaccgcaagcgcctgatcaccgtgcaactcctgctgctgacggcggcctgcatcggtgtcgccgcatcatcgacgcgcgtcgcgctgctggcggggatggtcgcggtcgggctgctcggcaccgcgatgacgcaagggctgatcgcgtgctcggccgcgctcgcgggcgccggcgaacgcgggcgcgtggtgggcgccgcacagggcggcgtcgtggtcgggttgctggccgcccgctcgctggcgggcgtcgtcaccgatatcgcgggctggcgggccgtctatctggtgtcgggggcgctcgcgatcgtgatgctcgtcgtgctgtcgcggttattgccgaacgagaacgggccccgcgaacgcatcggttatgcggcgctgctgcgatcgatggtggcgctgctgcgcaatgagcgcgtgctgcgtgtgcgtggcgcgatcgcgctgctgatgttcgccgccttcagcatcttctggagcgcgctggtgctgccgctgagcgcaccgccgcacgcgatgtcgcatacgcagatcggtgcgttcggcctggtcggcgcgctgggcgcggcggcggccgcccgcgcgggccggctcgcggatcgcgggcgcggcgaagcgacgacgggcgccgcgctcgcgctgctcgcgtgctcgtggctgccgctcgcgttcggcgatacgtcgattgcatggctgatcgtcggcatcgtgctgctcgatgtcggtgggcaggccgtccacgtcgtcaaccagagcatgattctcggcgcgcggcccgatgcgcatgcgcgcctcgtcggctgctacatgctgttctattcggccggcagcgggctcggcgcgattgcgtcgacgatgatgtatgcgcgcgccggatggacgggcgtctgcgtgctcggcgcggttgtgagcatggcggcgctcggcgtctgggccgcgacgctcaggcgcgcgtga

SEQ ID NO: 80708 - protein, 398 aa, Burkholderia sp. 383
MPTHAAHPADGGRLSSARVALLAVCCAASVANVYYAQPLLDSIARDFGVSQAAVGGVITATQLGCALALLFVVPLGDLLNRKRLITVQLLLLTAACIGVAASSTRVALLAGMVAVGLLGTAMTQGLIACSAALAGAGERGRVVGAAQGGVVVGLLAARSLAGVVTDIAGWRAVYLVSGALAIVMLVVLSRLLPNENGPRERIGYAALLRSMVALLRNERVLRVRGAIALLMFAAFSIFWSALVLPLSAPPHAMSHTQIGAFGLVGALGAAAAARAGRLADRGRGEATTGAALALLACSWLPLAFGDTSIAWLIVGIVLLDVGGQAVHVVNQSMILGARPDAHARLVGCYMLFYSAGSGLGAIASTMMYARAGWTGVCVLGAVVSMAALGVWAATLRRA

SEQ ID NO: 80709 - DNA, 1218 bp, Rhodospirillum rubrum ATCC 11170
  CDS (1)..(1218): transl_table=11
atgtccgaacccgccgtattcccctctccccggcccgcccttggtcgcggggcgaccttcgccatggccgccgccgctgggctggccgtcgccaacatctactataatcagccgatgctcggcctcatcgaagacgccttccccggctcggccagcccgggcctgatcccgacggtgacccaattgggctatgccctgggtttgtttctgctggtgccgctgggggatcttgtcgaccggcggcgtctgatcatcggccagttcctggctttggccgcgacgctttgtctgacggcgctggcgccaacggccggggtgctggtcggcgcctcgctactggttggcgccggggcgacggtggcccagcatatcgtgccgtttgccgccgccctggcgcccgacggccagcgcgggcggatcatcggcacggtgatgggcgggctgctttgcgggatcttgctcagccggaccctggccggcgtcgtcgccacccatctgggatggcgcgagatgttctggctgggcgtgccgctggtcctggccgccgccgggttgatggccgccgtgctgccgcgccgggtcgttccgccgcagggcctgcgctacggccaagccttgcgttcgctcgcccatctctggcgcgacgaaccggccctgcggcgggcgacgctgacgcaggccgccctctttggctcgttctcggtcttctggacggttctggcgcttcatctgcaagagcccgccctggggctgggcgccgatgtcgccggcctgttcggggttatcggcgcggtcggggtggtggcggcgccgctggccgggcggctggccgatcatcgcggaccggggccggtgatcgtcctcggcgcgtcgctggttctggtgtcctgggcgattgtcgccctgtgggcaagcgtccttgggctggtggtcggcgtcatcgcccttgatctcggcactcaaagcgccctggtgtccaatcagcatgtggtctatgcgctgcgccccgaggcgcgcagccgcctcaacaccgtattcatgagcggtatgttcctgggaggcgccggcggatcggccggggcgaccctggcctggagcttgggcggctgggcggcggtcagcggctatggcgccgggctggcgatcctcgccctggggatcttgcgccttggccggccgatcaggtcggagtgtgcggcggcggcagcgacagactga

SEQ ID NO: 80710 - protein, 405 aa, Rhodospirillum rubrum ATCC 11170
MSEPAVFPSPRPALGRGATFAMAAAAGLAVANIYYNQPMLGLIEDAFPGSASPGLIPTVTQLGYALGLFLLVPLGDLVDRRRLIIGQFLALAATLCLTALAPTAGVLVGASLLVGAGATVAQHIVPFAAALAPDGQRGRIIGTVMGGLLCGILLSRTLAGVVATHLGWREMFWLGVPLVLAAAGLMAAVLPRRVVPPQGLRYGQALRSLAHLWRDEPALRRATLTQAALFGSFSVFWTVLALHLQEPALGLGADVAGLFGVIGAVGVVAAPLAGRLADHRGPGPVIVLGASLVLVSWAIVALWASVLGLVVGVIALDLGTQSALVSNQHVVYALRPEARSRLNTVFMSGMFLGGAGGSAGATLAWSLGGWAAVSGYGAGLAILALGILRLGRPIRSECAAAAATD

SEQ ID NO: 80711 - DNA, 1212 bp, Moorella thermoacetica ATCC 39073
  CDS (1)..(1212): transl_table=11
ttgaacagtaaactcaaggaaaaacaatttattatgacaagatcgtttatattgttgatggcggttgtctgtggcgtttccgtcgcaaacctttattacatacaaccgctggaggggcagatttcgactacttttcatgtctcacagagcgcggcaggtattgcagccatgctcacacaggtgggttatgcgtttggcctgttgttatttgttccactgggagacatgtgtgaacgccgctcccttattctgcatatgctgcttttggttgctatatcactgctcacagctggtttatcaccgtgctatcctgtgctgctaattgcgatgtttgccgttgggattacaacaatcgtgccacaacttatcgttccctatgcagcccatctttcacgtccggaagagcagggggaaattattggctatgtcatgagcggtctgcttatcggaattttgctgtcccggacattcagtggccttgtgggcgcggctttgaattggcgagcagtttacctttttgcagccggatttatcattattttattggttctaatcaggtgtttttttccggaaagccagccgtcttcaaagatttcatatcaagagctactcaaatcaatacctggtctcgttaagagagaacgccctctgcgtgaagcggccctcaatggttttttcatgtttggttcgttcagcgcgttctggacttctctgattttccttcttgaaacaccgatctatcgtatgagtacaagagaagcaggtttgttcgggttagcaggagtagccggtgcgctcgcagcacctctgattgggaaagcagctgacacaaaaagcccgcgttttacagtaggtattggcgtcatcctatcgactcttgcctatctatgctttagcctgttcgggtataatatttggggccttatcatcggcgttatcgtgcttgatcttggcaatcagtgtggacaagtttccaatcaggcaagggtccaagcacttggtgactcaacacggagtcgcaataacaccgtgttcatgttttcatattttatcggtggagcagcaggctctttccttggcaccttttgttggcagcattatggatggtacggtgtttgcatggtagggcttgcgttccaatttgctgcgttaattactcattttttgatttacagaaagcaaaaatttgataatgcgctgctgagtcgttag

SEQ ID NO: 80712 - protein, 403 aa, Moorella thermoacetica ATCC 39073
MNSKLKEKQFIMTRSFILLMAVVCGVSVANLYYIQPLEGQISTTFHVSQSAAGIAAMLTQVGYAFGLLLFVPLGDMCERRSLILHMLLLVAISLLTAGLSPCYPVLLIAMFAVGITTIVPQLIVPYAAHLSRPEEQGEIIGYVMSGLLIGILLSRTFSGLVGAALNWRAVYLFAAGFIIILLVLIRCFFPESQPSSKISYQELLKSIPGLVKRERPLREAALNGFFMFGSFSAFWTSLIFLLETPIYRMSTREAGLFGLAGVAGALAAPLIGKAADTKSPRFTVGIGVILSTLAYLCFSLFGYNIWGLIIGVIVLDLGNQCGQVSNQARVQALGDSTRSRNNTVFMFSYFIGGAAGSFLGTFCWQHYGWYGVCMVGLAFQFAALITHFLIYRKQKFDNALLSR

SEQ ID NO: 80713 - DNA, 1269 bp, Burkholderia thailandensis E264
  CDS (1)..(1269): transl_table=11
atgaactgccctgccgatcttcgcgccggcccggccgccggagaaccgcgcgccgctcccgctcccacactcacgcctgcgctcaccgtgttcttttcggcgacggtcggtgtgatcgtgctcgacctgttcgccgcgcagccgttgacgggaccgatcgcggccgaactgcggctgcctgccggcctgaccgggctcattgcgatgctgccgcaactcggctatgcggcgggcctcgtgctgctcgtgccgctcatcgacctgctcgagaaccgccggctcatcgtgacgacgctcaccgtctgcgcggcgacgctcgcgctgcctgccgtcacgcactccggcgccctgtacctcgctgcggtgttcgccgcgggcgcggcatcgagcgtgatccagatgctcgtgccgatggcggcgtcgatggcgccggacgaacagcgcggccgcgcggtcggcaacgtgatgagcggcctgatgctcggcatcctgctgtcgcggccgctcgcgagcctgatcgccggcacggccggctggcgcgcgttctacggcacggccgccgccgccgacatcgcgatcgccgcggtgctggccgcgaagctgccgttgcgcgcgccgtcgctgtcgactcgttatgcggcgctgctccggtcgctctgggtgctcgtcgcgaccgagcgcgtgctgcagcggcgcgcgctgtccgcggcgctatcgatgggcgcattcagcgcgttctggaccgcgatcggtctgcgcctcgccgccgcgccattcgatctcggcttgcatggaatcgcgatgttcgcgttcgccggcgcgacgggcgcgatcgtcacgccgttcgcggggctggccggcgaccgcggctgggagcgccgcgcattgcgcggcgcgcacgtggccatgctcgccgcgctggtcgcgctcggcgtcgcaggcgcgggctgggcccggttcgatccggccgcgcatccgacgctggcgctcacgctgctcgtcgccggcgcggcggcgctcgatgcgggcgtcgtcgccgaccagacgctcggccggcgcgcgatcaacctgctgaaccccgccgcgcgcggacggctcaacgggctgttcgtcgggctgttcttcgtcggcggctcgctcggcgccgcgctcgccggcgcggcgtgggcatgggccggctggagcgcggtgtgcgcggtgggtctcgcgttcgcgggggccgcattcgcgctcgactggatcggcgcgcgccggcaagccgtgcgctga

SEQ ID NO: 80714 - protein, 422 aa, Burkholderia thailandensis E264
MNCPADLRAGPAAGEPRAAPAPTLTPALTVFFSATVGVIVLDLFAAQPLTGPIAAELRLPAGLTGLIAMLPQLGYAAGLVLLVPLIDLLENRRLIVTTLTVCAATLALPAVTHSGALYLAAVFAAGAASSVIQMLVPMAASMAPDEQRGRAVGNVMSGLMLGILLSRPLASLIAGTAGWRAFYGTAAAADIAIAAVLAAKLPLRAPSLSTRYAALLRSLWVLVATERVLQRRALSAALSMGAFSAFWTAIGLRLAAAPFDLGLHGIAMFAFAGATGAIVTPFAGLAGDRGWERRALRGAHVAMLAALVALGVAGAGWARFDPAAHPTLALTLLVAGAAALDAGVVADQTLGRRAINLLNPAARGRLNGLFVGLFFVGGSLGAALAGAAWAWAGWSAVCAVGLAFAGAAFALDWIGARRQAVR

SEQ ID NO: 80715 - DNA, 1203 bp, Burkholderia xenovorans LB400
  CDS (1)..(1203): transl_table=11
atgtccacttccaacgcgtccacccccgcttccgccgaccggtcgctgcgcggcctgctgcttctgctcgccaccatcgccggcgtcgcggtcgcgaacatctattacaaccagccgctgctcgacgacttccgccagtcgtttccgcatagcgcgtcgtgggtcggcgcggtgccggccgtcacgcaactcggctacgcggccggcatgctgctgctggcgccgctcggcgaccgcttcgaccggcgccgtctgatcctgctgcagatcgtgggaatctgcgtcgcgctggtggtggcgaccgcggcgccgacgctgtccgtgctgatcgtcgcgagtctcgcgatcggggtgctggccaccatcgcgcagcaagccgtgccgttcgcggcggaactcgcgccgccggcggaacgcggtcacgcggtcggcacggtgatgagcggtttgctgctgggaatcctgctggcgcgaacggcctcgggtgtgatcgccgaatatttcggctggcgcgcggtattcggcgcgtccgtggtcgcgttgctggtgctggcggtcgtcatcattctgcgtctgccgaagagccagcccacttcgacgctgccctacggcaagctgctggtgtcgatgtggcatctgctggtcgagcatcgcgcgctgcgcgaagcgtcgctcaccggcgcggccctgttcgcggcgttcagcattttctggtcggtgctggctttgctgctggccggcgcgccgtttcatctcgggccgcaggcggccgggttgttcggtatcgtcggcgcagcaggcgcgatggccgcgccgctcgccggcaagttcgccgacaggcgcggaccgcgcgccatcatcaccgtgtcgatcgtgctggtggcgatttcgtttgtcgtattcggcgcatcggcgaaaagcattgcgggcctggtggtcggcgtgatcattctcgatatcggcgtgcaggccgcgcagatctccaatcagtcgcgcatttacgcactcaagccggacgcgcgcagccgcgtgaatacggtgtacatggtggcgtatttcattggcggagcgatcggctccggcgtgggcgcggccgtgtggccggctttcggatggctcggcgtgagcgctgccgggctcgtgttcgccgggctggcggcgtggaatcatctggcgcttcccgctcgcgccgcgaaggtttag

SEQ ID NO: 80716 - protein, 400 aa, Burkholderia xenovorans LB400
MSTSNASTPASADRSLRGLLLLLATIAGVAVANIYYNQPLLDDFRQSFPHSASWVGAVPAVTQLGYAAGMLLLAPLGDRFDRRRLILLQIVGICVALVVATAAPTLSVLIVASLAIGVLATIAQQAVPFAAELAPPAERGHAVGTVMSGLLLGILLARTASGVIAEYFGWRAVFGASVVALLVLAVVIILRLPKSQPTSTLPYGKLLVSMWHLLVEHRALREASLTGAALFAAFSIFWSVLALLLAGAPFHLGPQAAGLFGIVGAAGAMAAPLAGKFADRRGPRAIITVSIVLVAISFVVFGASAKSIAGLVVGVIILDIGVQAAQISNQSRIYALKPDARSRVNTVYMVAYFIGGAIGSGVGAAVWPAFGWLGVSAAGLVFAGLAAWNHLALPARAAKV

SEQ ID NO: 80717 - DNA, 1197 bp, Ralstonia metallidurans CH34
  CDS (1)..(1197): transl_table=11
atgacatccgccaccgcccaacgcgccgacgcccctgccgcctggatcactcccctcctggccaccgcgtgcggcatgatcgtcgccaacctctactacgcccagccactggttggtccgatcgcgcgggcgctcgagctttctcccgagatcgccggcctgatcgtcacgctgatccagatcggctattgcgtgggcctgctgctgctggtgcccttgggcgatatcgtcgagaaccgcaagcttgtactggcgctgatcgccggctgtgcggtggcattggtcgcggcagcgctggctacgcacgcgagcgtcttcctgatcgctggctgcgcgataggcctgtgctcggtggctgtgcaggtactggtgccgttcgcggcacacctcgcgcccgaacatgcgcgcggccgggccgtcggcaacgtgaccagcggcctgctgatgggcatcatgctggcgcgcccggtatcgagcctggtggcggacctgttcggctggcatacgatcttcgccgcgtcggccgtggccatggtgctgcttggcgtggtgctgtcgcgcaagctgccgcagcgccagccggcgcccggcgtgaactatgtcgagatgcttggttcgatggggcacctgttgcgcacgcagccggtgctgcggcggcgcgcgatgtatcaggcgagcatgttcggcgtattcagcctgttctggaccaccacgccgctgtacctggccgggcccgctttccatatgtcccagaccggcatcgccgtgttcgcgctcgtgggcgtggccggcgcgattgccgcgccgatggccggccgctatgccgatcgtggccacagccgccagatgactgccatcgcactggcgctgggcgcaggctccttcctgctgagccgcatcggcgtcgaaggttcgctcatgtcactggcggccttgaccgtcgcggccgtcgtgctcgactttgccgtgtcggccaacctggtgatcgggcagcgcgcgatcttctctttgtccgcggaacatcgcagccgcctgaatgggctctacatggccatcttcttcgttggcggtgcgatcggctcgtcggttggcgcatgggcctatgcgcgtgccggctggccgctggcgagctggatcggcttcgccttgccggccatcgccctgctctatttccgaaccgagcctgcaagcacctga

SEQ ID NO: 80718 - protein, 398 aa, Ralstonia metallidurans CH34
MTSATAQRADAPAAWITPLLATACGMIVANLYYAQPLVGPIARALELSPEIAGLIVTLIQIGYCVGLLLLVPLGDIVENRKLVLALIAGCAVALVAAALATHASVFLIAGCAIGLCSVAVQVLVPFAAHLAPEHARGRAVGNVTSGLLMGIMLARPVSSLVADLFGWHTIFAASAVAMVLLGVVLSRKLPQRQPAPGVNYVEMLGSMGHLLRTQPVLRRRAMYQASMFGVFSLFWTTTPLYLAGPAFHMSQTGIAVFALVGVAGAIAAPMAGRYADRGHSRQMTAIALALGAGSFLLSRIGVEGSLMSLAALTVAAVVLDFAVSANLVIGQRAIFSLSAEHRSRLNGLYMAIFFVGGAIGSSVGAWAYARAGWPLASWIGFALPAIALLYFRTEPAST

SEQ ID NO: 80719 - DNA, 1224 bp, Acidobacteria bacterium Ellin345
  CDS (1)..(1224): transl_table=11
atggcgaatccaatctttgtgtctactcaggaacagaaactacaggccaccacgctgctgatggcaatcggcgtcggcgtggccgtcgccaatatttattattgccagccgctgctcggcatcatggcgcaggacctgcacgtgagtgagcgccataccggctggatcgcgacccttacgcaagtcggcacagctatcggcatgctgttgttcgttcctctcggcgacattgcggagcgtcgcaagctcacagtgcgcatgtgcgtgttcgtggcgttcgccgcactgctcacagcgctcgcgccgagcttttccctgttggcactgttcagctttctgctggggctcgggtccgtgataccgcatctaatccttccattcgccgcgcacctggcgccggaaggcgcacgcggtaaagtcgtcgcaaaggtaatcagtggaatgctcgtcggcatcctgctggcacggactgttgctggattcgtcggcgcggcattcggatggcgcgctatttttttcatctccgccgggctgatgctcgggctcgcgatcgcttttcgcgagttgctgccagagagccacccatcggtacagatgcactacttcgatcttctgcgctcagtaggcagcatggtgcgggaacatcgcgggctgcgcgagtcggcggcgatcggggctttgctattcgcttcgttcagcgcgttctggaccacgctggtgttctttctcgccaagccgccgtatcactatggcgcgcgcatggccggtggacttggcttgctggctgctgccagtgcggcactcgcgcccatcgtgggccgcatggttgaccgtcgttcaccgaagcttggcatctcgatcgcggtcatcacaacacttgcgtcttatgccgtgatgatcgcaacggggcactggctgatcggcctggggctcggcgtcattctgctcgacgtcggcgtgcagacgggacacatcagcaaccagacgcgcatttacaacacgttcccgcacgcacgcagccgagctaataccgtctacatggtgagctattttgtcggcggcgcgttcgggtccgcgctgggcaatgccggttggcatttcttcggatgggcgggcgtttgcgccgctggcgcggtcgttctgcttccagcgcttctgatcgtacgcaccatgcgcgaagaaaaaatggaacgagtggaagagacagaattatcagtggcgtaa

SEQ ID NO: 80720 - protein, 407 aa, Acidobacteria bacterium Ellin345
MANPIFVSTQEQKLQATTLLMAIGVGVAVANIYYCQPLLGIMAQDLHVSERHTGWIATLTQVGTAIGMLLFVPLGDIAERRKLTVRMCVFVAFAALLTALAPSFSLLALFSFLLGLGSVIPHLILPFAAHLAPEGARGKVVAKVISGMLVGILLARTVAGFVGAAFGWRAIFFISAGLMLGLAIAFRELLPESHPSVQMHYFDLLRSVGSMVREHRGLRESAAIGALLFASFSAFWTTLVFFLAKPPYHYGARMAGGLGLLAAASAALAPIVGRMVDRRSPKLGISIAVITTLASYAVMIATGHWLIGLGLGVILLDVGVQTGHISNQTRIYNTFPHARSRANTVYMVSYFVGGAFGSALGNAGWHFFGWAGVCAAGAVVLLPALLIVRTMREEKMERVEETELSVA

SEQ ID NO: 80721 - DNA, 1203 bp, Myxococcus xanthus DK 1622
  CDS (1)..(1203): transl_table=11
atgacaacgcattcctccccggaagctccccacaccgcgctgtccaccgggctcgtgtggctgatggccgccgcctcgggcgccaccgtcgcgaacctctattacaaccagccgctgctgggagacatcggcgaggccctgggggcctcggggagcgcgctggggctggtgcccatgctgacgcaggtgggctacgcggtggggatgctcttcatcgtcccgctgggcgacagcctggagcggcggcgggtcatcgtcaccatgaacatgctggtggcgctggcgctcgttggcgtggccctcgcgccgacgctgcactggatggtggccgcgagcttcgtcgtgggcgtcaccaccatcattccccagctcctcgtccccttcgcggcgcacctggcgcccgcggcgcagcgaggccgggtggtgggcaccgtcatgagcggtgtgctgattggcatcctcctgtcccggacggcggcgggcttcatcgggacgcacctgggatggcgcaccatgttctggattgcggcagggctgatgctcgcgttggccggcgtgctgcgcttcacgctgccgtcgcagccgcccatggcctccatgccgtatccgcaactgttgcgctcgctcatccacctggcgcgcaccgagcccgtgctacggctgcatgcggtgctgggcgcactcagcttcggcgcgttcagcgtgttctggtccacgctggcgctgtacctccagagcctgccgcagaagtacgacgcgcaggtggcggggctgttcggcgtcgtgggcgtggcgggcgccgccgtggctccgctggtgggccgctacgccgataagcgcggggaccggcgcatcaacggagcggccatcgtcgtgttgctgctgtcgttcgtcgtgatgtggcccctgggacgatggctgtggggcatggcgctgggcgtggtgctgctcgatttgggcgtccaggcgaaccagatttccaatcagacacgggtgtactcgctgcgtccggaggcccgcagccggctgaacacgctctacatggtgacgtacttcgcgggcggcgccgcgggctcgtggctggggaccttcgcatggacgcactggggatggagcggggtgtgcgcctccggcgccgcgctgtgtgtcgtggccctgctggcgctcaagcgagggccgaagggcggcgcagcgaaggcgtga

SEQ ID NO: 80722 - protein, 400 aa, Myxococcus xanthus DK 1622
MTTHSSPEAPHTALSTGLVWLMAAASGATVANLYYNQPLLGDIGEALGASGSALGLVPMLTQVGYAVGMLFIVPLGDSLERRRVIVTMNMLVALALVGVALAPTLHWMVAASFVVGVTTIIPQLLVPFAAHLAPAAQRGRVVGTVMSGVLIGILLSRTAAGFIGTHLGWRTMFWIAAGLMLALAGVLRFTLPSQPPMASMPYPQLLRSLIHLARTEPVLRLHAVLGALSFGAFSVFWSTLALYLQSLPQKYDAQVAGLFGVVGVAGAAVAPLVGRYADKRGDRRINGAAIVVLLLSFVVMWPLGRWLWGMALGVVLLDLGVQANQISNQTRVYSLRPEARSRLNTLYMVTYFAGGAAGSWLGTFAWTHWGWSGVCASGAALCVVALLALKRGPKGGAAKA

SEQ ID NO: 80723 - DNA, 1206 bp, Rhodococcus sp. RHA1
  CDS (1)..(1206): transl_table=11
atgtcccgagccgataccaccccggccaccgagacccgtacggccatgccgacctggctcgtgctgctgatcgcaaccgcctgcgcagtggtggtcgccaatctctactactcacagcctttgatcggcgagatcagcgcatctctgggcctacctgcccagtcagcggggctgatcgtcaccctcacccagatcggctacggcgtaggacttctcctcgtcgtacccctcggtgatctctacgagaaccgcaccctggtaacggtcctgctggccgccgaaacggtggtcctcatcgcagcggccctcgtcacggcgccgattgccttcctggtgatctccgcactcatcgggctcgccgcggtcgcagtccaggtgttggttcccttcacctcgcactatgcccccgaacaccagcgcggccggatcatcggcacggtcatgggcggcctcaccatcggaatcatgctggcccgccctgccgcgagcctcattaccagcgtgtggtcctggcgggccatctacgtcctgtccgccctcctcgtcgtgatgatcggcgccgcgatccgattcacgatgcccgcccggcgccccgaacacaccgcgggctaccgcgcactgctggcatccctacctcgcctcgtgcgcgacatcccggtcctgcgccgccgcgcgctctaccacgcctgcctgttcggggcgttcagcctcttctggaccgccgttccgctgctgctgaccagcgacgcgttcggaatgtcccagagcggagtcgcactgttcgccctcgtcggagccgccggagccatcgcatcaccgatcgccggcagaatggccgaccgccaccgaacccgatcatggacgcggatcgccatcggctgcgtcctgattgcactgctggccgcggccctcgcccccgccggatccgccctcgggctctcaatcctcgtcggtgcggcaattctgctcgacttcggcgtcatgaccaatgtagtgctcggacaacgcgccatctacagcctcggaccccaactacgtgcccgcctcaacggcctctacatggccatattcttcgtcgggggcggagtcggctcagcactcggcggattcgtctacgcccaccacggatggacagccgccgcactgaccggggccgtcctgcccgtcctcgccctcggatacttcctcaccgagcgacacgactaa

SEQ ID NO: 80724 - protein, 401 aa, Rhodococcus sp. RHA1
MSRADTTPATETRTAMPTWLVLLIATACAVVVANLYYSQPLIGEISASLGLPAQSAGLIVTLTQIGYGVGLLLVVPLGDLYENRTLVTVLLAAETVVLIAAALVTAPIAFLVISALIGLAAVAVQVLVPFTSHYAPEHQRGRIIGTVMGGLTIGIMLARPAASLITSVWSWRAIYVLSALLVVMIGAAIRFTMPARRPEHTAGYRALLASLPRLVRDIPVLRRRALYHACLFGAFSLFWTAVPLLLTSDAFGMSQSGVALFALVGAAGAIASPIAGRMADRHRTRSWTRIAIGCVLIALLAAALAPAGSALGLSILVGAAILLDFGVMTNVVLGQRAIYSLGPQLRARLNGLYMAIFFVGGGVGSALGGFVYAHHGWTAAALTGAVLPVLALGYFLTERHD

SEQ ID NO: 80725 - DNA, 1212 bp, Pseudomonas aeruginosa UCBPP-PA14
  CDS (1)..(1212): transl_table=11
atgccatcctcgccatcctccctcccctccgcgctggtgctgctgttcgccgtcgcctgcggtctcagcgtggccaacgtctattacgcccagccgctgctggacgtcctcggtgccgagttcgccatcagccaggccggggtcggcctgctgttcggcgcgacccaagccggttgcgccctggcgctgctgctggtggtgccgctgggcgacctgctggagcggcgccggctgatgttcgtccagctcctgctgctggtgctgtcgctgctgctggtgggcttcgccggcgataccctcggcctggcgctggggctgctcggactgggcctgctcggcaccgccatgacccagggactgctggcctacgccgcggcgctggcggcgcctggcgagcgcgggcgggtggtcggcgcggcgcagggcggcgtggtgatcggcctgctgctggcgcgcagcctggccgggctgctcgccgacctcggcggctggcgcagcgtctatctggtctcggcagcgagcatgggcgggcttggcctgctgctctggcgggtactgccggcggagccgagcaacgaactggggctgtcctaccggcagctgctcggctcgatgttcggcctgctggcgagccagcgcgtgctgcaggtgcgcggcctgctcgggctgttgatgttcgccgccttcggggtgttctggagcagcctggtattgctgctcggcgcgccgccgtattcgctgtcgcacagcgccatcggcgccttcggcctggtcggcgcgctcggcgcgctgggcgcggcgcgggccggcagcctcgccgatcgcggccacgcccaggcgctcagcggcggcgccctgctgctgttgctgctgtcctggctgccgctcgccctcggcgcgcattcgctggcggcgctgattctcggcgtgctgctgctcgatctcgccggccaggcgatccatgtgctcaaccagagcctggtcttcgccatcgacccgcgcgcccacagccgcctggtgggttgctacatgctgttctacgccgccggcagcggcctcggcgccagcgccggcaccgccatgtacgcctgggccggctgggacgcggtgagcctgctcggcgcagcgatcagcctggcggccctggcgttctggtggttcacccgcggcgttggcggcgaagcgcggacggcctgcgccaacggcgcctga

SEQ ID NO: 80726 - protein, 403 aa, Pseudomonas aeruginosa UCBPP-PA14
MPSSPSSLPSALVLLFAVACGLSVANVYYAQPLLDVLGAEFAISQAGVGLLFGATQAGCALALLLVVPLGDLLERRRLMFVQLLLLVLSLLLVGFAGDTLGLALGLLGLGLLGTAMTQGLLAYAAALAAPGERGRVVGAAQGGVVIGLLLARSLAGLLADLGGWRSVYLVSAASMGGLGLLLWRVLPAEPSNELGLSYRQLLGSMFGLLASQRVLQVRGLLGLLMFAAFGVFWSSLVLLLGAPPYSLSHSAIGAFGLVGALGALGAARAGSLADRGHAQALSGGALLLLLLSWLPLALGAHSLAALILGVLLLDLAGQAIHVLNQSLVFAIDPRAHSRLVGCYMLFYAAGSGLGASAGTAMYAWAGWDAVSLLGAAISLAALAFWWFTRGVGGEARTACANGA

SEQ ID NO: 80727 - DNA, 1212 bp, Mycobacterium smegmatis str. MC2 155
  CDS (1)..(1212): transl_table=11
atgacagcggaggatctccagcaccgcggcatgtcgactcgtctgacggtcctctttgcgctcgccggcgcaatggcagtcggcaacctgtactacacccagccgctactgcatgtcatcggcgtcagcctgcacaccgaagtagggcatgtcggtttgctcgtcacggcgacgcagatcggctactcgctgggcgtgctgctgcttgtgccgctcggcgacagtcgcgaccgccgccgcctgatcccgaccttgatgttgctgtcggcggctgcgctgacctggtgcgcggtggcgccgaccctgtcggcgcttgccgtggcaagtctcgcgctggggctgaccacggtgtcaggtcagctgttgacgccgctggcgggtgatctcgccgatgaccgtagccgtggacgcgtggtcgggatcgtagtttcgggtctcgtcaccggcatcttggtctcccgaattgccggcggtgtcatcgcgggtgcctggggttggcgcgctgtcttcgcgatcgctgcggcgatcactgcggccctggccctcgtgctcgccgctgccgttccacgggtgccgcccaccacccgcgtcgcgtatccgaagctgctcggctcggtgctggcactggctgtgcgggaaccgaccgtacgggtcacccttgtgctgggagccctcgggttcgccatgttcacgatgttctggaccgcgctgaccttcctgctcagcggtgcgccgtatgacttcaccgcatggcagatcggcctggtcggcgttgcgggtctggtcggcgcactcgccgcacagggcgccgggcgcctgcacgatcgcggccgaaacgtggcagccacgggagcgtgctggtgcctcgggctcgctgcatgggcggtcgcggcggtgtcccacaatcttctgatcgggatcatcgtcgcggccatcgtcctcgacgtctccgttcagggcctcaacatcctgaaccaatcacgcgtgttcgtggtggcacaggaggcgcgcagccgggtcaatacggcctacgtcaccgccaatttcgttgggggaacaggcgggtcgctggccgctgcggtgctgtggagcgtcggcgggtggtcggcgatcacggtggcgggcgcagccatgtcggtcctcggctgtgcagtctgggcggcggcccggcgcggagcgctgagggcgagtcgagacgtgcacacgtcgtga

SEQ ID NO: 80728 - protein, 403 aa, Mycobacterium smegmatis str. MC2 155
MTAEDLQHRGMSTRLTVLFALAGAMAVGNLYYTQPLLHVIGVSLHTEVGHVGLLVTATQIGYSLGVLLLVPLGDSRDRRRLIPTLMLLSAAALTWCAVAPTLSALAVASLALGLTTVSGQLLTPLAGDLADDRSRGRVVGIVVSGLVTGILVSRIAGGVIAGAWGWRAVFAIAAAITAALALVLAAAVPRVPPTTRVAYPKLLGSVLALAVREPTVRVTLVLGALGFAMFTMFWTALTFLLSGAPYDFTAWQIGLVGVAGLVGALAAQGAGRLHDRGRNVAATGACWCLGLAAWAVAAVSHNLLIGIIVAAIVLDVSVQGLNILNQSRVFVVAQEARSRVNTAYVTANFVGGTGGSLAAAVLWSVGGWSAITVAGAAMSVLGCAVWAAARRGALRASRDVHTS

SEQ ID NO: 80729 - DNA, 1212 bp, Azoarcus sp. BH72
  CDS (1)..(1212): transl_table=11
atgatgtccaacattcaggctgcgcatgcagccttcgttcccgccgaggcggggccacgtccggcgctcgtactgctgctcgcggccggcgccgggctcagcgtcgcctcgatctactacagccagccgatgctcggcgtgctcgccggcgacctcggcgccgacgccgcgcgcgtcggcctgattcccacgctgacccagctcggctacgcctgcggcatcctgctgctggcgccgctcggcgaccgccacgaccgccgcggcatcatcgccctcaaggccgcgctgctcgccctcgcactgctggccagcggcctcgcccccggcgtcggcctgctgctcgccgccagccttggcgtcggtctcgcggccacgctggcgcaggacatcgtgccggccgcggcggcgctggcgccggagcggcagcgcggccgcatcgtcggcacggtgatgaccggactgctgctcggcatcctgctgtcgcgggtggtcagcggcttcgtcgccgagcagttcggctggcgcacgatgtacttcatcgccgccttcgcggtcgccgcgatcggcgtggtggcctggcgcggcatcccgcacatcccacccaccacgcgggcgagctaccttgcgctgctcggctcgctgcgcgggttgtggatggcgcatccggcgctgcgccgcgcggccctcgcgcagggactgctgtcggtaggcttcagcgccttctggtccaccctggcggtgatgctgcacgacagcttccagctcggcagcgccgcggcgggcgccttcggcctggccggcgcggcgggtgcgctggcggcgccgctcgccggccgccttgccgaccgtcgcggcccccagccggtgaccgtgctcggcgcggccctggcactgctggcgttcgcagcgatgtggctggccccgctgctgccgccttcggcccggctcggtctgatcgtggcgagcgcaatcggcttcgacttcggcatccaggccgcgctggtcgcccaccagagcatcgtctacagcctggacgccggcgcgcgcagccgcatcaatgcgctgctgatcacaaccatgttcgtcggcatggcggcgggctcgtcgctcggcagcctggcgctggcccacgcgggctggaacggcgtaatcggcgtggcggtcgccgccagtgcggttgcgcttgcacttcgcctcggtgcgcggcgctga

SEQ ID NO: 80730 - protein, 403 aa, Azoarcus sp. BH72
MMSNIQAAHAAFVPAEAGPRPALVLLLAAGAGLSVASIYYSQPMLGVLAGDLGADAARVGLIPTLTQLGYACGILLLAPLGDRHDRRGIIALKAALLALALLASGLAPGVGLLLAASLGVGLAATLAQDIVPAAAALAPERQRGRIVGTVMTGLLLGILLSRVVSGFVAEQFGWRTMYFIAAFAVAAIGVVAWRGIPHIPPTTRASYLALLGSLRGLWMAHPALRRAALAQGLLSVGFSAFWSTLAVMLHDSFQLGSAAAGAFGLAGAAGALAAPLAGRLADRRGPQPVTVLGAALALLAFAAMWLAPLLPPSARLGLIVASAIGFDFGIQAALVAHQSIVYSLDAGARSRINALLITTMFVGMAAGSSLGSLALAHAGWNGVIGVAVAASAVALALRLGARR

SEQ ID NO: 80731 - DNA, 1194 bp, Nostoc punctiforme PCC 73102
  CDS (1)..(1194): transl_table=11
atggaaaaacaaatactaaataacgcattaactaaagtccaggtactgattatggcgatcgcatccggtgtctgtgttgccaacgtttattataatcagccaatcctcaaagatattgcatcatcttttcgagtcagtgaaggtgaagcgggtagtatctctgtgcttacgcaagttggttacggtttggggattttctttttaatcccattgggcgataaaatcaacaagaaaaaattaattctttgcttactgataagtttattctgtttgttgatattgatgacgttttcacaaaacatcattgaagtttggatattgagcgtagcaattgggattgcgacagtctccgctcagattattcttcctttagcagcaagtatagatagagtaactacaggccaaaccgtaggcaatatttttactggtatattgattggagttttaggagcaagggtttttagtggatatatttctgaatggttgaattggcgttatgtatatggattttcggcaggaatgattttaattgttattgttttactaaatacatatttgcctagtatcaaaaatgaatttaatggttattatttggagttattaagctcaacaattcaccagttaaaacgtttttcattattaagagaagcgtctttaattagcgggttattgtttggtgtcttttgctcattttggacaacgctgactttccatttaagcggagcgccttttaattttcaatctgacacaattgggatgtatggctttgtagcgatcgcaggtgcattgatggcaccagtttttggtaaactagccgatcgaggtaactcccaacgttccttgagtattgctgtatcgatggtgattgcaagcttagtaattgctaaaactgcttctaattctgcactggcgatcgctgttgctgtattgttactagatgtaggtgtacaggcaatccaagttactaatgtcgcaagaatatatagtcttgatgctcaatccaatagtcgcatcaacacagtttacatgactacctattttatcggcggtgctgtaggtactagcattggtttattatgctggaatcttggtggctggaatttggtgacttggcaaatgttagtttttactttgcttggattttttattatcgtcagacctaaaaatattacagcaaaaacaaataaagaataa

SEQ ID NO: 80732 - protein, 397 aa, Nostoc punctiforme PCC 73102
MEKQILNNALTKVQVLIMAIASGVCVANVYYNQPILKDIASSFRVSEGEAGSISVLTQVGYGLGIFFLIPLGDKINKKKLILCLLISLFCLLILMTFSQNIIEVWILSVAIGIATVSAQIILPLAASIDRVTTGQTVGNIFTGILIGVLGARVFSGYISEWLNWRYVYGFSAGMILIVIVLLNTYLPSIKNEFNGYYLELLSSTIHQLKRFSLLREASLISGLLFGVFCSFWTTLTFHLSGAPFNFQSDTIGMYGFVAIAGALMAPVFGKLADRGNSQRSLSIAVSMVIASLVIAKTASNSALAIAVAVLLLDVGVQAIQVTNVARIYSLDAQSNSRINTVYMTTYFIGGAVGTSIGLLCWNLGGWNLVTWQMLVFTLLGFFIIVRPKNITAKTNKE

SEQ ID NO: 80733 - DNA, 579 bp, Bacillus anthracis str. A2012
  CDS (1)..(579): transl_table=11
atgtctaattttaaaaataaagtaattgataaggatatttcatcaggtttaatcattcttttagcaactgcatgtggtattattgtggctaatctttattatgcacagcctttaattggggtaattagtaatgaaattgggctttctaatagtagcgctggattaattgtaacgctaactcaaattggatatgttgttggcttactatttcttgtgcctttgggggatattgttgagaataaaaaattgatacttatattgttatttttaagtgcatttgcactcatttccatggtttttgtaaaaagcgcaactttgttgttaattgcttcattctttatcggactgggttcggtcgcagcgcaagtactcgtacctcttgtatcatatctttcatctgagaatgcacgcggtcgcgtagttggcaatgtcatgagtggtctgttattaggtattatgcttgcgcgaccgatatctagtctagtagccgatatgtggggatggaatgcaatatttgctttatctgctactgtaattattgtcttagcgtttgtattatcgaaaagtactccctactag

SEQ ID NO: 80734 - protein, 192 aa, Bacillus anthracis str. A2012
MSNFKNKVIDKDISSGLIILLATACGIIVANLYYAQPLIGVISNEIGLSNSSAGLIVTLTQIGYVVGLLFLVPLGDIVENKKLILILLFLSAFALISMVFVKSATLLLIASFFIGLGSVAAQVLVPLVSYLSSENARGRVVGNVMSGLLLGIMLARPISSLVADMWGWNAIFALSATVIIVLAFVLSKSTPY

SEQ ID NO: 80735 - DNA, 1233 bp, Burkholderia vietnamiensis G4
  CDS (1)..(1233): transl_table=11
atgtccacccccacccatctcgccgccgcgccccgcgcggctcacgcgccggcccatgcggccgctgcgtctctgcccgaccgccgtctcgtgatgctgctggccgcggcggccggcctcggcgttgcgccgctctattacgctcagccgatgctcgccgcgctcggcgccgacgtcggcgcatcggcccgcgcgatcggcttcgtgccgacgctgacgcagctcggctatgcgctcggcatcctgctgctcgcgccgctcggcgaccgcttcgaccggcgccgcgtgatcgtgtcgaaggccgccgcgctggtcgtcgccctgttgctcgccgcgttcgcgccgtcgctcgggctgctgctggccgccagcttcgcgatcggcctgaccgcgacgatggcgcaggacgtcgtgccggccgccgcgacgctcgcgtacgacgcccatcgcggccgcatcgtcggcacggtgatgacggggctgctgctcggcatcctgctgtcgcgcgtcgtcgccggcttcgtcgccgaaacgatcggctggcgcgcgatgttcgcgctcgcggccgccagcgtcgccgcgatcggcgtgatcgccgcacgcgggttgccgcgcttcgagccggccacgcagctgtcctaccgcgcgctgatcgcgtcgctcggcgaactgtggcgccgtcatcccgcgctgcgccttgcggcgctcgcgcaagggctgctggccgtcggcttcagcgcgttctggtcgacgctcgcggtgatgctgcacggcgcgccgttccatctcggcagcgcggccgccggcgcattcggcctcgccggcgcggcgggcgcactggccgcgccgatcgccggacgcctggccgatcatcatggccccgagcgcgtcacgcggatcggcatcgcgatcgcgacggtgtcgttcgccgcgatgggcgccgcgcccctgatgacgccgcatgcacagctcgcgctgctcgccgcggcgacgatcggcttcgacctcggcgtgcaggccacgctgatcgcgcatcaggcgatcgtctaccggatcgatcccgcgtcgcgcagccgcctgaacgccgtgctgttcgtcggcatgttcatcgggatggcggccggcgccgcggcgggcagcgcgttgctcgcacagttcggctggaatgcggtgatcgtgctggccgtcgcgacgtcggtcgcggcgctcgccgtgcggatgtggcgccggtaa

SEQ ID NO: 80736 - protein, 410 aa, Burkholderia vietnamiensis G4
MSTPTHLAAAPRAAHAPAHAAAASLPDRRLVMLLAAAAGLGVAPLYYAQPMLAALGADVGASARAIGFVPTLTQLGYALGILLLAPLGDRFDRRRVIVSKAAALVVALLLAAFAPSLGLLLAASFAIGLTATMAQDVVPAAATLAYDAHRGRIVGTVMTGLLLGILLSRVVAGFVAETIGWRAMFALAAASVAAIGVIAARGLPRFEPATQLSYRALIASLGELWRRHPALRLAALAQGLLAVGFSAFWSTLAVMLHGAPFHLGSAAAGAFGLAGAAGALAAPIAGRLADHHGPERVTRIGIAIATVSFAAMGAAPLMTPHAQLALLAAATIGFDLGVQATLIAHQAIVYRIDPASRSRLNAVLFVGMFIGMAAGAAAGSALLAQFGWNAVIVLAVATSVAALAVRMWRR

SEQ ID NO: 80737 - DNA, 1329 bp, Burkholderia vietnamiensis G4
  CDS (1)..(1329): transl_table=11
atgcgcgggcctgtcgcccgacgccttttcggttgcattttaaaacttgtcttcctacactccaacacgtttctatttgcaactactttcatgagaacgtcgatggaatcgtcctgctgttccgacctggccgcgtcggctgcgccgccgctcgccgcgaaccaggcccgcgtgccgaccgcgaccgtcgcgttgctcgcggtctgctgcgcggcgagcgtcgcgaacgtgtactacgcgcaaccgctgctcgattcgatcgcgcgcgagttccgcgtcgcgccggccgcgatcggcggcgtcatcaccgcgacgcagctcggctgcgcgctcgcgctgctgttcgtcgtgccgctcggcgatctgctgaaccgcaagcgcctgatcgccgtgcaactcgtcctgctggcggcggcatgcacgtgcgtggccacggcgtcgacacgcatcgcgttgctggccggcatggtcgcgctcggcctgctcggcaccgcgatgacgcaaggactgatcgcatgcgcggccgcgctcgcggcgcccggcgagcgcggccgcgtggtcggcgcggcgcagggcggcgtcgtgatcggcctgctcgccgcacgctcgctcgcgggtgtggtgacggacctcgccggctggcgcgcggtgtatctggtgtcgggcgcggccgcgctcgcgatgctcgcggcgctcgcccgcctgttgccggccatcgacgcgccgcgcgagcggatcggctatgcggcgctgctcggctcgatggtcacgctgctgcgcaccgagcgcgtgctgcgcgtgcgcggcgcgatcgcgctgctgatgttcgccgcgttcagcatcttctggagcgcgctggtgttgccgctcagcgcgggaccggagccgatgtcgcatacgcagatcggcgccttcgggctggtgggcgcgctcggcgccgctgcggccgcacgcgcgggccggctcgccgatcgcgggcgcggcgaggcgacgacgggcgccgcgctgctgctgctcgcgtgcgcgtggctgccgctcgcgttcgcgggcacgtcgatcgcgtggctggtcgtcggcatcgtgctgctcgacgtcggcgggcaggccgtccacgtcgtgaaccagagcatgatcctcggcgcgcggcccgatgcgcacgcgcgcgtggtcggctgctacatgctgttctattcggcgggcagcgggctcggcgcgatcgcctcgacgatcgcatatgcgcacgcgggctggctcggcgtctgcgcactcggcgcggcggtcagcgtggccgcgtcgtgcgtatgggccgcgacgctcgagcgccgatag

SEQ ID NO: 80738 - protein, 442 aa, Burkholderia vietnamiensis G4
MRGPVARRLFGCILKLVFLHSNTFLFATTFMRTSMESSCCSDLAASAAPPLAANQARVPTATVALLAVCCAASVANVYYAQPLLDSIAREFRVAPAAIGGVITATQLGCALALLFVVPLGDLLNRKRLIAVQLVLLAAACTCVATASTRIALLAGMVALGLLGTAMTQGLIACAAALAAPGERGRVVGAAQGGVVIGLLAARSLAGVVTDLAGWRAVYLVSGAAALAMLAALARLLPAIDAPRERIGYAALLGSMVTLLRTERVLRVRGAIALLMFAAFSIFWSALVLPLSAGPEPMSHTQIGAFGLVGALGAAAAARAGRLADRGRGEATTGAALLLLACAWLPLAFAGTSIAWLVVGIVLLDVGGQAVHVVNQSMILGARPDAHARVVGCYMLFYSAGSGLGAIASTIAYAHAGWLGVCALGAAVSVAASCVWAATLERR

SEQ ID NO: 80739 - DNA, 1200 bp, Burkholderia vietnamiensis G4
  CDS (1)..(1200): transl_table=11
atgtcctccgccgcccccgaccgctcgaccgacgccgcctcgccgcactactcgcgcagcctgctgttgctgctcgcgacgatcgccggcgtgtcggtcgcgaacatctactacaaccagccgctgctcgacgcgttccgctcggcgtttccggaccgcgcgtcatggatcggcgtcgtgccgaccgcgacccagctcggctatgcggccggcatgttcgtgctcgcgccgctcggcgaccgcttcgaccgccgcgggctgatcctgatgcagattgcgggcctgtcgatcgcgctgatcgtcgccgcggccgcaccgtcgctggcggtgctggcagccgcgagcctcgcgatcggcgtgctcgcgacgatcgcgcagcaggccgtgccgttcgcggcggaaatcgcgccgccggccgagcgcggccaggcggtcggcacggtgatgagcgggctgctgctcggcatcctgctcgcgcgcacggcggccggcttcgtcgccgaatatttcggatggcgggcggtgttcggcgcgtcggtcgccgcgctcgtcgtgctcgccgcggtgatcgtgctgcgcctgccgcgcagcacgccgacgtcgacgctgtcgtacggcaagctgctcggctcgatgtggcatctggcggtcgaactgcgcgggctgcgcgatgcgtcgctgacgggcggcgcgctgttcgccgcgttcagcgcgttctggccggtgctcacgctgttgctcgccggcgctccgttccatctcggcccgcaggtcgccgggctgttcgggatcgtcggcgcggccggcgcgctggccgcgccgtatgcgggccgcttcgccgacaagcgcggcccgcgcacgatcatctcgctcgcgattgcgctgatcgcggtgtcgttcgcgatcttcgcggtgtcgggcacgagcctcgtcgggctcgtgatcggcgtgatcgtgctggatgtcggcgtgcaggccgcgcagatctcgaaccagtcgcgcatctacgcgctcaagcccgacgcgcgcagccgcgtgaacaccgtctacatggtgtgctacttcatcggcggcgcgctcggctcgtcgatcggcgtcgctgcatggcatgcgttcggctggatcgggatgtgcacggccggcttgctgtttaccgcgctcgccggatggtgccaccaccgcggcgcacgccgaagctga

SEQ ID NO: 80740 - protein, 399 aa, Burkholderia vietnamiensis G4
MSSAAPDRSTDAASPHYSRSLLLLLATIAGVSVANIYYNQPLLDAFRSAFPDRASWIGVVPTATQLGYAAGMFVLAPLGDRFDRRGLILMQIAGLSIALIVAAAAPSLAVLAAASLAIGVLATIAQQAVPFAAEIAPPAERGQAVGTVMSGLLLGILLARTAAGFVAEYFGWRAVFGASVAALVVLAAVIVLRLPRSTPTSTLSYGKLLGSMWHLAVELRGLRDASLTGGALFAAFSAFWPVLTLLLAGAPFHLGPQVAGLFGIVGAAGALAAPYAGRFADKRGPRTIISLAIALIAVSFAIFAVSGTSLVGLVIGVIVLDVGVQAAQISNQSRIYALKPDARSRVNTVYMVCYFIGGALGSSIGVAAWHAFGWIGMCTAGLLFTALAGWCHHRGARRS

SEQ ID NO: 80741 - DNA, 1218 bp, Burkholderia vietnamiensis G4
  CDS (1)..(1218): transl_table=11
atgtcagcagattcaacgccgctcgcggcgggcgcgcacggcgccaaactcacgcaggggctgatcctgctgttcgcgttcagctgcggcgcgatcgtcgcgaacctgtactacgcgcagcccatcaccgaactgatcgcgccggggctccacatgtcgggcgacacggcgagcctgatcgtgtcgctgacgcagatcggctatgcgctcggcctgttcttcatcgtgccgctcggcgatctgctcgagaaccgcaagctgatgatcgtgacggccgtcgtgtcgatcgcgagcctcgcggcggccgcgttcgtgcacaccgccgggctgtttctggcgatctcgctgctgatcggcttcagctcggtggcggtccagatcctggtgccgctcgccgcgcatctcgcgcccgatcattcgcgcggccgcgtggtcggcaccatcatgagcgggctgctgctcggcatcctgctcgcgcgtccgctgtcgagcgtggtcgccgacgcgttcggctggcgcttcgtgttcgcggcggcggccgtgctgatgacgctcgtcaccgcggtgctcgcgctgacgattccggcgcgccagcccgaccatcgcgcgacctacttcgagctgatcggctcgctgctgcatctggtccgcacgatgccgatcctgcgtcaccgcgcgttctaccagggcctgatgttcgcgtcgttcagcctgttctggaccgccgtgccggtcgagctgacgcgccactacggtctgtcgcaaacggcgatcggcgtgttcgcgctggtcggcgcgatcggcgcgacgtcggcgccggtggccggccggctcgcggacgccggccatacggtgcgcgcgacgctgatcgcgctgatcgccggcgccctcgcgtatgcgatcgcgctggtgcacggcgcgggcctctacgggctcgtcgtcaccggcatcgtgctcgacttcgcggtgcagatgaacatggtgctcggccagcgcgagatctatgcgctgcatgcggcgagccgcaatcgcctgaacgcgctgtacatgacgagcatcttcgtcggcggcgcgctcggctcggcgctcgcgagcccgctttacgaacgcggcggctggccactcgtcgcggcggtggctggtgtgttcccggtcgtcgcgctcgcgcactacctcgcgatcgggcggccgcatgcgcgccgccacgcccaaggctaa

SEQ ID NO: 80742 - protein, 405 aa, Burkholderia vietnamiensis G4
MSADSTPLAAGAHGAKLTQGLILLFAFSCGAIVANLYYAQPITELIAPGLHMSGDTASLIVSLTQIGYALGLFFIVPLGDLLENRKLMIVTAVVSIASLAAAAFVHTAGLFLAISLLIGFSSVAVQILVPLAAHLAPDHSRGRVVGTIMSGLLLGILLARPLSSVVADAFGWRFVFAAAAVLMTLVTAVLALTIPARQPDHRATYFELIGSLLHLVRTMPILRHRAFYQGLMFASFSLFWTAVPVELTRHYGLSQTAIGVFALVGAIGATSAPVAGRLADAGHTVRATLIALIAGALAYAIALVHGAGLYGLVVTGIVLDFAVQMNMVLGQREIYALHAASRNRLNALYMTSIFVGGALGSALASPLYERGGWPLVAAVAGVFPVVALAHYLAIGRPHARRHAQG

SEQ ID NO: 80743 - DNA, 1206 bp, Kineococcus radiotolerans SRS30216
  CDS (1)..(1206): transl_table=11
gtgctgacccgacccctcctgctcgtcatggccctcgccaccggactcaccgtgggcgggaactacgtcaaccagccgctgctgcacaccatcgccggcgacctcggcgtccccgacggccgggcggcggccctggtgacggtcgcgcaggtcgcctacgggctggggctgctgctggtcgtccccctcggggacctgctcgagcgccggcggctgctcaccgtgctggccctgctcgcggccgcggggcacgccgtctgcgcgctcgccccgaactacgcggtgctggtcgtgggcaccgccgtcgcgggggtgttctccgtggccgcccaggtcctcgtcccgttcgcggcggagctggccgagccgggccgggagggccgggccgtcggcacggtgatgagcggcctgctcatcggcgccctgctggcgcgcagcgtctccggggcgctggccgaggtcgccggctggcacgcgccctacgccgtcgtcgccgccggcctggtgctcatcgccctcgtgctgcggtggcggctgccgcgcagcgtgccctgctccgtcggcggctaccgcgcgacgctgcgctcaggagcccggctggtgggggagctgccgcggctgcgcacccgggccctgctcggggggctggggttcgcgggcgtctcggtgctgttcgccaccacgaccttcctgctcgccgggccccggttcgggatgtcggagctgcagatcggcctcgtcgggctggccggggtggccggggccgcgatggcctccgccgcgggccggatggccgacgccgggcgggggcagctggcgaccggtctgggggcggtcgggctggtcttcacctggggcctgctggggctgtccgcctcgacctggctgacctcggcgctgctcttcgtcctcgggttcgggctggccgacatgttcctgcaggccgtgcaggtctcgaaccagaacgcggtctacgggttgcggccggaggcgcgctcgcggctgaactccgtctacatgacgacctacttcgccgggggtgccctgggctccgccgtcggctccgccgcctggagcgccgggggctggcccgcggtgacggcggtgggggccgggttcggggtgctgacgatcctcgtctggctcgtggacctgcgcctggaccgggcggcgcggctcagccccgccggcgccggtagccgatga

SEQ ID NO: 80744 - protein, 401 aa, Kineococcus radiotolerans SRS30216
MLTRPLLLVMALATGLTVGGNYVNQPLLHTIAGDLGVPDGRAAALVTVAQVAYGLGLLLVVPLGDLLERRRLLTVLALLAAAGHAVCALAPNYAVLVVGTAVAGVFSVAAQVLVPFAAELAEPGREGRAVGTVMSGLLIGALLARSVSGALAEVAGWHAPYAVVAAGLVLIALVLRWRLPRSVPCSVGGYRATLRSGARLVGELPRLRTRALLGGLGFAGVSVLFATTTFLLAGPRFGMSELQIGLVGLAGVAGAAMASAAGRMADAGRGQLATGLGAVGLVFTWGLLGLSASTWLTSALLFVLGFGLADMFLQAVQVSNQNAVYGLRPEARSRLNSVYMTTYFAGGALGSAVGSAAWSAGGWPAVTAVGAGFGVLTILVWLVDLRLDRAARLSPAGAGSR

SEQ ID NO: 80745 - DNA, 1170 bp, Xanthobacter autotrophicus Py2
  CDS (1)..(1170): transl_table=11
atgacctcatcttccgccagcgccgagggcgccggcttcggacgcatcttcgccatggccgccgccgccggcgtggcggtggccaacatctattacaaccagcccatgctcgcggtgatggagcgcgacctgcccggttccctcaccccgctggtgcctacggtgacgcagatcggctatgccgccggcctgttcctgctggtgcctttgggcgacgtggtggagcggcgacgcctcatcgtgatccagttcgtggcggtggcggcggcgctggccttttccgccctggcgcaggggccgctggcgctgcttgccgcctccttgctggtgggcctcggctccacggtggctcagcagatcgtgcctttggcggcccatctcgccgcgccggagaagcgcggcgccacggtgggcatggtgctgtcgggcatcctcgccggcatcctgctcagccgcaccctgtccggcttcgtcgccgcccatgcgggctggcgcgacatgttctggctgggggtgcctatggcattgctcgccggcgggctgatggcactgaccctgccccgcagcatgcccgagaccagcctgtcctacggccgcctcctggggtcgctcggcgccctgtggcgcgagtttcccaccctgcgccgggccgccattacccaggcactcatcttcgccgccttcatcgccttctggaccatcctcgccttccggctggaggggccgccgttccacctcggcgcgcaggcggcggggctgttcggcatcctcggcctcgtgggcatcctggccgcgcccctgtccggccgcttcgccgaccgcaagggccccgggagcgtggtgctctggggcgccggcctcgccctggcggcatggctcgtcttcttcgcctggcccagcatcgccggcatggtggtgggcgtcatcgtgctggacttcgccatgcagggcgcgctggtggccaaccagcacatcgtgttcgcgctgcggccggccgcccgggcgcggctgaacaccatcctgatcggcaccatgttcgtcggcggggcgctgggctcagcggcggccacgctcgcctggggcttcggcggctggccggcggtgtgcgcggcgggacttggctgcggcgccctcgctctcgccatccaggccctgggccgcaggggctga

SEQ ID NO: 80746 - protein, 389 aa, Xanthobacter autotrophicus Py2
MTSSSASAEGAGFGRIFAMAAAAGVAVANIYYNQPMLAVMERDLPGSLTPLVPTVTQIGYAAGLFLLVPLGDVVERRRLIVIQFVAVAAALAFSALAQGPLALLAASLLVGLGSTVAQQIVPLAAHLAAPEKRGATVGMVLSGILAGILLSRTLSGFVAAHAGWRDMFWLGVPMALLAGGLMALTLPRSMPETSLSYGRLLGSLGALWREFPTLRRAAITQALIFAAFIAFWTILAFRLEGPPFHLGAQAAGLFGILGLVGILAAPLSGRFADRKGPGSVVLWGAGLALAAWLVFFAWPSIAGMVVGVIVLDFAMQGALVANQHIVFALRPAARARLNTILIGTMFVGGALGSAAATLAWGFGGWPAVCAAGLGCGALALAIQALGRRG

SEQ ID NO: 80747 - DNA, 1206 bp, Erwinia chrysanthemi
  CDS (1)..(1206): transl_table=11
  misc_feature (722)..(722): w is a or t
atgtctgcatctactaccaccacggccggcctgagcccggcgctaacgctgttaatgtccgccgccaccgggctggcggtcgccagcaactattacgcccagccgttgctggacgccatcgcccaggcattcagcctgtcggttaatcaggccggttttatcgtcacggcggcccagttgggttatgcctgcggcctgatgtttctggtgccgctgggcgaccgcttcgagcgccgcggtttgatagtcggaatgaccctgctggcggcaggcggcatgctgattaccgcctccgccccgtcgctgtggctgatggtggccggcaccgccattaccggcctgttctcggtcgtggcgcagattctggtgccgctggccgccacgctggcctcgccggaaagccgcggcaaggtcgttggtacgatcatgagcggcctgctgctggggatcctgctggcccgcacgttggccggcgcgctggcgtcgctgggggactggcgcacggtgtactgggttgccagcctgctgatgacgggaatggcgttgctgatgtggcgcgcgctgccgcgctatcatccgtcaaccaaccttaactatccacagttactgatctccatcttccagctgttcggcagttctcgcccgctacgtacccgcgcgattctgggcgcgctctcgttctctaatttcagcatcatgtggacatcgatggcattcctgcwctccgctccgccttaccactacagcgagggcgtaatcgggttattcggtctggcgggcgctgccggtgccttgtccgccagccgggccggccgtctggtggatcagggcaaagccaagctctccacgacggcggggttgctgctgctggcgctgtcctggctgccgatcgccgccggcgtcagcgccatcgcaccgttattgatcggcatcgtggcgctggatatggcggtacaggggttgcatgtcaccaaccagagcgcgatttaccgtatgttgccggacgcgcgcaaccgcctgaccgccggttacatgaccagctattttatcggcggcgccctcggctcgctggtttccgcctatgcttaccagcatttcggctggctgggggtatcgggagccggaggcactctaagcctgcttgcgctcctggtctggtggcaaaaccatcaccatgaatcttcacaaccggagacgcacggatga

SEQ ID NO: 80748 - protein, 401 aa, Erwinia chrysanthemi
  misc_feature (241)..(241): The Xaa at location 241 stands for His, or Leu.
MSASTTTTAGLSPALTLLMSAATGLAVASNYYAQPLLDAIAQAFSLSVNQAGFIVTAAQLGYACGLMFLVPLGDRFERRGLIVGMTLLAAGGMLITASAPSLWLMVAGTAITGLFSVVAQILVPLAATLASPESRGKVVGTIMSGLLLGILLARTLAGALASLGDWRTVYWVASLLMTGMALLMWRALPRYHPSTNLNYPQLLISIFQLFGSSRPLRTRAILGALSFSNFSIMWTSMAFLXSAPPYHYSEGVIGLFGLAGAAGALSASRAGRLVDQGKAKLSTTAGLLLLALSWLPIAAGVSAIAPLLIGIVALDMAVQGLHVTNQSAIYRMLPDARNRLTAGYMTSYFIGGALGSLVSAYAYQHFGWLGVSGAGGTLSLLALLVWWQNHHHESSQPETHG

SEQ ID NO: 80749 - DNA, 1185 bp, Escherichia coli
  CDS (1)..(1185): transl_table=11
atgactaaacctaatcatgagcttagcccggcgctgatcgtgctgatgtctatcgccaccggtctggcggtcgccagtaactattacgctcagccattgctcgacaccatcgcgcgtaacttttccctttccgccagttcggcaggctttattgttaccgccgcgcaattgggctatgcagcaggtctgctgtttcttgttcccctcggtgatatgtttgaacgccgccgcctgattgtctcgatgaccttactggcggcaggcggcatgttaatcactgccagcagtcagtcgctggcgatgatgatcctcggtacggcattaaccggtttattctctgtcgtggcacaaattctggttccgctggcagcgacgctggcttcaccggacaaacgcggcaaagtggttggcactattatgagcggtctgctgttggggatcttgctggcacggacagttgccggattgctggcgaatctcggcggctggcgcaccgtcttttgggttgcttcggtgttaatggcactgatggcgctggcattatggcgtggtctgccacaaatgaaatcagaaacccacctcaactacccacagttgttgggttccgttttcagtatgtttatcagcgataaaattctgcgtacccgcgcgttgctgggctgcctgacctttgccaatttcagcattctctggacctcaatggcctttttgcttgccgctccaccttttaactacagcgatggtgtaattggtctgtttggacttgcgggagctgccggagcgttgggcgctcgtccggcgggcggttttgccgataagggcaaatcgcaccacaccacaactttcggtctgctgctgctattactttcatggctggcgatctggtttggtcacacttccgtactggcgttgattatcggaatcctggtgctggatctcaccgtgcagggcgtgcatatcactaaccagacggtaatttatcggatacatcctgatgcgcgcaatcgcctgaccgcaggttacatgactagctactttattggcggtgccgccggttcgctaatttcagcctcagcctggcaacatggcggttgggctggcgtttgtctggctggcgcgacgattgccctggttaacttactggtctggtggcgaggttttcatcgtcaggaagccgcaaattaa

SEQ ID NO: 80750 - protein, 394 aa, Escherichia coli
MTKPNHELSPALIVLMSIATGLAVASNYYAQPLLDTIARNFSLSASSAGFIVTAAQLGYAAGLLFLVPLGDMFERRRLIVSMTLLAAGGMLITASSQSLAMMILGTALTGLFSVVAQILVPLAATLASPDKRGKVVGTIMSGLLLGILLARTVAGLLANLGGWRTVFWVASVLMALMALALWRGLPQMKSETHLNYPQLLGSVFSMFISDKILRTRALLGCLTFANFSILWTSMAFLLAAPPFNYSDGVIGLFGLAGAAGALGARPAGGFADKGKSHHTTTFGLLLLLLSWLAIWFGHTSVLALIIGILVLDLTVQGVHITNQTVIYRIHPDARNRLTAGYMTSYFIGGAAGSLISASAWQHGGWAGVCLAGATIALVNLLVWWRGFHRQEAAN

SEQ ID NO: 80751 - DNA, 26 bp, Artificial sequence
  primer
atgactaaacctaatcatgagcttag

SEQ ID NO: 80752 - DNA, 25 bp, Artificial sequence
  primer
ttaacatgccgccagtaaggtcatc

SEQ ID NO: 80753 - protein, 373 aa, Artificial sequence
  consensus sequence
  Variant (2)..(3): Xaa in position 2 to 3 is any amino acid
  Variant (6)..(7): Xaa in position 6 to 7 is any amino acid
  Variant (10)..(10): Xaa in position 10 is any amino acid
  Variant (13)..(33): Xaa in position 13 to 33 is any amino acid
  Variant (34)..(35): Xaa in position 34 to 35 is any or no amino acid
  Variant (37)..(37): Xaa in position 37 is any amino acid
  Variant (40)..(41): Xaa in position 40 to 41 is any amino acid
  Variant (44)..(46): Xaa in position 44 to 46 is any amino acid
  Variant (52)..(55): Xaa in position 52 to 55 is any amino acid
  Variant (57)..(57): Xaa in position 57 is any amino acid
  Variant (59)..(68): Xaa in position 59 to 68 is any amino acid
  Variant (69)..(91): Xaa in position 69 to 91 is any or no amino acid
  Variant (93)..(98): Xaa in position 93 to 98 is any amino acid
  Variant (99)..(99): Xaa in position 99 is any or no amino acid
  Variant (101)..(103): Xaa in position 101 to 103 is any amino acid
  Variant (105)..(105): Xaa in position 105 is any amino acid
  Variant (108)..(109): Xaa in position 108 to 109 is any amino acid
  Variant (111)..(113): Xaa in position 111 to 113 is any amino acid
  Variant (114)..(114): Xaa in position 114 is any or no amino acid
  Variant (117)..(118): Xaa in position 117 to 118 is any amino acid
  Variant (121)..(124): Xaa in position 121 to 124 is any amino acid
  Variant (127)..(128): Xaa in position 127 to 128 is any amino acid
  Variant (130)..(130): Xaa in position 130 is any amino acid
  Variant (133)..(133): Xaa in position 133 is any amino acid
  Variant (135)..(145): Xaa in position 135 to 145 is any amino acid
  Variant (148)..(167): Xaa in position 148 to 167 is any amino acid
  Variant (170)..(170): Xaa in position 170 is any amino acid
  Variant (171)..(182): Xaa in position 171 to 182 is any or no amino acid
  Variant (184)..(185): Xaa in position 184 to 185 is any amino acid
  Variant (187)..(188): Xaa in position 187 to 188 is any amino acid
  Variant (190)..(192): Xaa in position 190 to 192 is any amino acid
  Variant (194)..(198): Xaa in position 194 to 198 is any amino acid
  Variant (199)..(199): Xaa in position 199 is any or no amino acid
  Variant (202)..(210): Xaa in position 202 to 210 is any amino acid
  Variant (212)..(213): Xaa in position 212 to 213 is any amino acid
  Variant (215)..(217): Xaa in position 215 to 217 is any amino acid
  Variant (219)..(224): Xaa in position 219 to 224 is any amino acid
  Variant (226)..(238): Xaa in position 226 to 238 is any amino acid
  Variant (239)..(240): Xaa in position 239 to 240 is any or no amino acid
  Variant (242)..(244): Xaa in position 242 to 244 is any amino acid
  Variant (246)..(247): Xaa in position 246 to 247 is any amino acid
  Variant (249)..(251): Xaa in position 249 to 251 is any amino acid
  Variant (253)..(255): Xaa in position 253 to 255 is any amino acid
  Variant (257)..(259): Xaa in position 257 to 259 is any amino acid
  Variant (261)..(267): Xaa in position 261 to 267 is any amino acid
  Variant (268)..(304): Xaa in position 268 to 304 is any or no amino acid
  Variant (306)..(311): Xaa in position 306 to 311 is any amino acid
  Variant (314)..(322): Xaa in position 314 to 322 is any amino acid
  Variant (323)..(323): Xaa in position 323 is any or no amino acid
  Variant (325)..(330): Xaa in position 325 to 330 is any amino acid
  Variant (331)..(336): Xaa in position 331 to 336 is any or no amino acid
  Variant (338)..(340): Xaa in position 338 to 340 is any amino acid
  Variant (341)..(346): Xaa in position 341 to 346 is any or no amino acid
  Variant (348)..(348): Xaa in position 348 is any amino acid
  Variant (350)..(352): Xaa in position 350 to 352 is any amino acid
  Variant (354)..(357): Xaa in position 354 to 357 is any amino acid
  Variant (358)..(364): Xaa in position 358 to 364 is any or no amino acid
  Variant (367)..(372): Xaa in position 367 to 372 is any amino acid
GXXVAXXYYXQPXXXXXXXXXXXXXXXXXXXXXXXQXGYXXGLXXXVPLGDXXXXRXLXXXXXXXXXXXXXXXXXXXXXXXXXXXXXXXXXGXXXXXXXQXXXPXAAXXAXXXXRGXXVGXXXXGLXXGXLLXRXXXXXXXXXXXWRXXXXXXXXXXXXXXXXXXXXLPXXXXXXXXXXXXXYXXLXXSXXXLXXXXXXLRXXXXXXXXXFXXFXXXWXXXXXXLXXXXXXXXXXXXXXXFXXXGXXGXXXAXXXGXXXDXXXXXXXXXXXXXXXXXXXXXXXXXXXXXXXXXXXXXXXXXXXXLXXXXXXLDXXXXXXXXXXQXXXXXXXXXXXXRXXXXXXXXXFXGXXXGXXXXXXXXXXXGWXXXXXXG

SEQ ID NO: 80754 - protein, 14 aa, Artificial sequence
  protein pattern
  Variant (2)..(2): Xaa in position 2 is any amino acid
  Variant (3)..(3): Xaa in position 3 is any or no amino acid
  Variant (6)..(6): Xaa in position 6 is Ala, Gly or Val
  Variant (8)..(9): Xaa in position 8 to 9 is any amino acid
  Variant (10)..(10): Xaa in position 10 is Asp, Glu or Asn
  Variant (11)..(11): Xaa in position 11 is any amino acid
  Variant (12)..(12): Xaa in position 12 is His, Lys or Arg
  Variant (13)..(13): Xaa in position 13 is any amino acid
  Variant (14)..(14): Xaa in position 14 is Phe, Ile, Leu or Val
LXXPLXDXXXXXXX

SEQ ID NO: 80755 - protein, 15 aa, Artificial sequence
  protein pattern
  Variant (2)..(3): Xaa in position 2 to 3 is any amino acid
  Variant (4)..(5): Xaa in position 4 to 5 is any or no amino acid
  Variant (8)..(8): Xaa in position 8 is Ala, Cys, Gly, Asn, Ser or Thr
  Variant (11)..(11): Xaa in position 11 is Ile, Leu or Met
  Variant (12)..(12): Xaa in position 12 is Ala, Ile, Leu or Val
  Variant (13)..(14): Xaa in position 13 to 14 is any amino acid
  Variant (15)..(15): Xaa in position 15 is Phe, Ile, Leu or Met
AXXXXYYXQPXXXXX

SEQ ID NO: 80756 - DNA, 1086 bp, Escherichia coli
  CDS (1)..(1086): transl_table=11
atgttcaagcgtcgttatgtaacattgcttcccctttttgtgttgcttgccgcctgtagcagcaagccaaaacctactgagactgatacgaccaccggaacgccgtctggcggcttcctgcttgagccgcagcacaatgtgatgcagatgggcggcgatttcgctaataacccgaatgcccagcagttcatcgacaaaatggtgaacaaacacggtttcgatcgtcagcagttgcaggaaattctctcccaggcgaagcgtctggattcggtactgcggctgatggataaccaggcaccaaccacatcggtgaaaccgccatcaggtccgaacggcgcatggctccgttatcgcaaaaaatttattacgccggacaacgtgcagaacggtgtggttttctggaatcagtatgaagatgcgttgaatcgcgcgtggcaggtgtatggagtaccgccggaaattatcgtcgggattatcggcgttgaaacccgctgggggcgcgtgatggggaaaactcgcatcctcgatgcgctggcaacgctgtcatttaactacccacgccgcgcggagtatttctctggcgagctggaaaccttcctgttgatggcgcgcgacgagcaggacgatccgctcaatctgaaaggttcctttgccggggcgatgggctacggacagtttatgccgtcgtcttacaaacaatatgcggtagatttcagcggcgacgggcatatcaacctgtgggatccggttgatgcgatcggtagcgtggcgaactatttcaaagcgcacggctgggtgaaaggcgatcaggtcgcggtaatggcaaacggtcaggctccaggcttgccaaatggcttcaaaactaagtacagcatttcgcagcttgccgccgcaggtttaacgccacagcagccgctgggcaaccatcaacaagccagcctgctgcgtctggatgttggcaccggctaccagtactggtacggtctgccgaacttctacaccatcacccgttacaaccacagcacccattacgcaatggcggtctggcagttaggacaagccgtggcgctggcgcgagtacagtaa

SEQ ID NO: 80757 - protein, 361 aa, Escherichia coli
MFKRRYVTLLPLFVLLAACSSKPKPTETDTTTGTPSGGFLLEPQHNVMQMGGDFANNPNAQQFIDKMVNKHGFDRQQLQEILSQAKRLDSVLRLMDNQAPTTSVKPPSGPNGAWLRYRKKFITPDNVQNGVVFWNQYEDALNRAWQVYGVPPEIIVGIIGVETRWGRVMGKTRILDALATLSFNYPRRAEYFSGELETFLLMARDEQDDPLNLKGSFAGAMGYGQFMPSSYKQYAVDFSGDGHINLWDPVDAIGSVANYFKAHGWVKGDQVAVMANGQAPGLPNGFKTKYSISQLAAAGLTPQQPLGNHQQASLLRLDVGTGYQYWYGLPNFYTITRYNHSTHYAMAVWQLGQAVALARVQ

SEQ ID NO: 80758 - DNA, 1104 bp, Pseudomonas aeruginosa PAO1
  CDS (1)..(1104): transl_table=11
atgcgccgtaccgccctcgccctgcccctgttccttctggtctcagcatgcagcagcgaaccgacgccaccaccgaaacccgccgccaaaccccaggcccgcaccgtcatttcaccccgccccgtacgccagtcggtgcaaccgatactgccgctgcgcggcgattacgcgaacaatccggcggcacagcacttcatcgacaggatggtcagccagcacggcttcaaccgccagcaactgcacgatctgttcgcccagacccagcgcctggactgggtgatccgcctgatggaccggcaagccccgacctataccccacccagcggaccgaacggcgcctggctgcgctaccggaagaagttcgtcacgccaggcaacgtacagaacggcgtgctgttctgggaccaatacgaaaccgacctgcaacgggcatcgcgcgtctacggcgtgccgccggagatcatcgtcggcatcatcggcgtggaaacccgctgggggcgtgtgatgggcaagacgcggatcatcgatgcgctgtccaccctgtccttctcctaccctcgccgcgcggaattcttcagcggcgaactggagcaattcctcctccaggcgcgcaaggaaggcaccgacccgctggccctgcgcggttcctatgccggcgccatgggctacggccagttcatgccgtcttcattcaccaagtacgcggtggacttcgatggcgatgggcatatcgacctgtggaatccgcgtgacgccatcggcagcgtcgccaactatttcaagcagcacggctgggtcagcggcgatcgcgtggcggttcccgccagtggccgggctccctcgctggaagatggcttcaagacgctgtacccgctggacgtgctcgcttccgccggattacgcccgcagggtccgctcggcggccaccggcaagccagcctgctgcgcctggacatgggcaggaactaccagtactggtacggcctgccgaacttctacgtgatcacccgctataaccacagcacccactacgcgatggccgtctgggaactgggcaaggaagtcgaccgggtgcgtcaccgctccgtcgtcaggcaggattag

SEQ ID NO: 80759 - protein, 367 aa, Pseudomonas aeruginosa PAO1
MRRTALALPLFLLVSACSSEPTPPPKPAAKPQARTVISPRPVRQSVQPILPLRGDYANNPAAQHFIDRMVSQHGFNRQQLHDLFAQTQRLDWVIRLMDRQAPTYTPPSGPNGAWLRYRKKFVTPGNVQNGVLFWDQYETDLQRASRVYGVPPEIIVGIIGVETRWGRVMGKTRIIDALSTLSFSYPRRAEFFSGELEQFLLQARKEGTDPLALRGSYAGAMGYGQFMPSSFTKYAVDFDGDGHIDLWNPRDAIGSVANYFKQHGWVSGDRVAVPASGRAPSLEDGFKTLYPLDVLASAGLRPQGPLGGHRQASLLRLDMGRNYQYWYGLPNFYVITRYNHSTHYAMAVWELGKEVDRVRHRSVVRQD

SEQ ID NO: 80760 - DNA, 1110 bp, Neisseria meningitidis MC58
  CDS (1)..(1110): transl_table=11
atgaaaaagagaaaaatactgccgctggcaatttgtttggcggctttgtctgcctgtacggcgatggaggcacgcccaccccgggcaaatgaagcccaagccccccgcgcggttgaaatgaaaaaagaaagccgccccgcgtttgacgcggcagccgtatttgacgcggcagccgtaccggtatccgacagcgggtttgccgccaatgcaaatgtccgccgttttgtggacgatgaagtcgggaaaggggatttttcccgggcggaatggcaggatttttttgacaaagcggcttacaaggcggacatcgtcaagattatgcaccgcccctccacatcgcgtccgtggtatgtgttccgcacgggaaattcgggcaaggcgaaatttcgcggcgcgcgccggttttatgcggaaaaccgcgcgcttatcgatgatgtggcgcaaaaatacggcgtgcctgccgaacttatcgtggcggttatcgggattgaaacgaattacggcaaaaatacgggcagtttccgtgtggcggacgcattggcgaccttaggctttgattacccccgccgcgccgggtttttccaaaaagaattggtcgagcttttaaagctggcaaaagaagaaggcggcgatgttttcgcctttaaaggcagctatgcgggcgcaatggggatgccgcaatttatgccttcgagctaccggaaatgggcggtggattatgacggggacggacatcgggacatatggggcaacgtcggcgatgtcgcggcatcggttgccaattatatgaagcagcacggttggcgcacgggcgggaaaatgctggtgtctgcaacattggcgccgggtgcggatgttcaggcaatcattggcgaaaaaaccgccctgacgcggacggtggcggatttgaaggcgtacggcatcatccccggcgaagagcttgcagatgatgaaaaggcggttttgttcaaactggaaaccgcaccgggcgtgtttgaatattatttgggcttgaacaatttttatacggtatggcagtacaaccacagccggatgtatgtaacggcggtcagggacattgccaattcgcttggcggcccgggattgtaa

SEQ ID NO: 80761 - protein, 369 aa, Neisseria meningitidis MC58
MKKRKILPLAICLAALSACTAMEARPPRANEAQAPRAVEMKKESRPAFDAAAVFDAAAVPVSDSGFAANANVRRFVDDEVGKGDFSRAEWQDFFDKAAYKADIVKIMHRPSTSRPWYVFRTGNSGKAKFRGARRFYAENRALIDDVAQKYGVPAELIVAVIGIETNYGKNTGSFRVADALATLGFDYPRRAGFFQKELVELLKLAKEEGGDVFAFKGSYAGAMGMPQFMPSSYRKWAVDYDGDGHRDIWGNVGDVAASVANYMKQHGWRTGGKMLVSATLAPGADVQAIIGEKTALTRTVADLKAYGIIPGEELADDEKAVLFKLETAPGVFEYYLGLNNFYTVWQYNHSRMYVTAVRDIANSLGGPGL

SEQ ID NO: 80762 - DNA, 1125 bp, Xylella fastidiosa 9a5c
  CDS (1)..(1125): transl_table=11
ttgttaataaatatgattaagcgcatagcaacctcaatactgactctcggcctcgttgcctgtgcatcgcaaccctcatccaagcggctagccagtccaacgacaacagaaccaacgaaaaagacagaaccacccaaagtggcagcacccccactaaatctgtcgcctgtcccgttcgaaatcgcgcgtaacaatttcatacgcgataccgcaaccaagtacgacttggacccgatatggatcgaaaaaaccctagcgcaagctcaatttaaagacgcaatagtagcggccatgtcgcgcccagccgagcaagtcaagccgtggaacgaataccgatcaatgttcatcgctcaagcaagaattgacagtggacgtcaattcttagcctctcacaagatacaactcaaaaaagtcgaagctgctaccggcgtaccagcagaactcatcgtcgcaattattggtgtcgaaagcagctatggcactagccccgggaaataccgcgtactggacgcgctatacacactcgcctttaaatacccacgcagcggcgacccaaacaaactcaaacgcgaagtacaacgcgaattattttttcgcgatgaactcgcccaactattcgcactcagtaaagaagaaaacctggatatcaccacattgactggcagctacgccggagcaatgggcatgggacagttcatgccctccagctatcgtcaatatgcagtagacggcgatggggacggcaaacgcaacctattcaccaacgaggatgacgtattcgcttcgatcgccaactacttcctccgaaaaggaggctgggtacgtggtgctctggtcgcagtaccagccaccctcgcttcgggttaccaagaattcgatccacccgactggatcccgcgttacaccctgaccgaattagccgcacgtggctaccatacctatgtgcccgtcacagccggtatcaccgccaccccgatcagtctggacaacaccaccagtaaagaatactggctgtgcttccagaactactacgcgattacccgctacaacccctccaaaatgtacgccatggccgtgttccaactgtccgaatccattgccggccgcacactccccccaacatga

SEQ ID NO: 80763 - protein, 374 aa, Xylella fastidiosa 9a5c
MLINMIKRIATSILTLGLVACASQPSSKRLASPTTTEPTKKTEPPKVAAPPLNLSPVPFEIARNNFIRDTATKYDLDPIWIEKTLAQAQFKDAIVAAMSRPAEQVKPWNEYRSMFIAQARIDSGRQFLASHKIQLKKVEAATGVPAELIVAIIGVESSYGTSPGKYRVLDALYTLAFKYPRSGDPNKLKREVQRELFFRDELAQLFALSKEENLDITTLTGSYAGAMGMGQFMPSSYRQYAVDGDGDGKRNLFTNEDDVFASIANYFLRKGGWVRGALVAVPATLASGYQEFDPPDWIPRYTLTELAARGYHTYVPVTAGITATPISLDNTTSKEYWLCFQNYYAITRYNPSKMYAMAVFQLSESIAGRTLPPT

SEQ ID NO: 80764 - DNA, 1302 bp, Caulobacter crescentus CB15
  CDS (1)..(1302): transl_table=11
atggctatggatcgtcgcgtctttcttgttcttctgctcgccggctgcgcggacacctcaccgcaagggccgctgaccgccatcagccctgcgccgccgcctgcgcccacgcctcaaacgaccgtcacccccgcgccaacgccgcagacaccggtgcctgcgggcgaactggccttcgacacctggatgcaggatttccgtggccgagccatcgcggcgggactgtcgcccgaccttctggaccgcgagctgggcggggtgattcccgatcccagggtgatcagcctcgacagccgccagccggagttctccaagcccgtcggcgactatatccgcggcgtgatcagcgaggaccgcgtcgcgatcggccgcagcaagcgcgatcagctagacttcctctcacagatcgagtcccggtacggcgtgccgggtgacatcctgctggcggtgtgggccatggagtccgcgttcgggcagctgcaaggcaatttcgacgtggtccgctcgatggtcagccttgccgccgacggccgtcgacgggcctgggccgagggcgagctgatcgccgccctgaagatcatcgactccggcgaggtcacgcgcgcccagctgaaaggctcgtgggccggcgccatgggccagacccagttcatcccgacgagcttcagggccacagccgtggacttcgacggcgacggccgccgcgacatctggggctcggacgccgacgccctggcctcagccgccaatctgctggtgcgcggcggctggaagcggaacgtcggctgggccagggaggtcatcctgccgccaggcttcgactactcggtcactgagggccccagggaaatcccggcctggtgggaagcccgcggcgtgcgccgcgcggatggcctgccttggaccgctcaggacgcggcgtcgcccgccatgctgatcctgccggccggcgcgacgggaccggcgttcctcgccctgcccaatcattttgcgatcaggacctacaacaactccacctcctatgcgctgggcatcggcctgctggccgaccggttcgccggcggcgcgccgccgatcacgccctggccggtggagaccccgctgtcgatgtcggatcgcatggccgcccagatcgccctggcgcgcgtcggtttcaatcccggccccgccgacggtgtgatcggcgccggcacgcgacgggcgctgcgcgcctggcagcagagccagcaattgcccgccgacggctacctgtccaacgacatggtcgcgcggctgaaggcccaggccgggatcagcccgtag

SEQ ID NO: 80765 - protein, 433 aa, Caulobacter crescentus CB15
MAMDRRVFLVLLLAGCADTSPQGPLTAISPAPPPAPTPQTTVTPAPTPQTPVPAGELAFDTWMQDFRGRAIAAGLSPDLLDRELGGVIPDPRVISLDSRQPEFSKPVGDYIRGVISEDRVAIGRSKRDQLDFLSQIESRYGVPGDILLAVWAMESAFGQLQGNFDVVRSMVSLAADGRRRAWAEGELIAALKIIDSGEVTRAQLKGSWAGAMGQTQFIPTSFRATAVDFDGDGRRDIWGSDADALASAANLLVRGGWKRNVGWAREVILPPGFDYSVTEGPREIPAWWEARGVRRADGLPWTAQDAASPAMLILPAGATGPAFLALPNHFAIRTYNNSTSYALGIGLLADRFAGGAPPITPWPVETPLSMSDRMAAQIALARVGFNPGPADGVIGAGTRRALRAWQQSQQLPADGYLSNDMVARLKAQAGISP

SEQ ID NO: 80766 - DNA, 1080 bp, Salmonella typhimurium LT2
  CDS (1)..(1080): transl_table=11
atgttcaagcgtcgttatgtagcgttacttccactttgcgtattgcttgctgcctgtagcagcacgccaaaatcttccgagactcaagcgacgacgggcacgccttccggcggctttctgcttgagccgcagcataacgtcatgcaaatgggcggcgacttcgccaacaaccctaatgcgcagcagttcattgataaaatggtcagtaaacacggtttcgaccgtcagcagttgcaagagatcctctcgcagtctaaaagactggattacgtcctgcgtctgatggacagacaagcgccgaccactcagccgcccgccggaccaaatggcgcctggttgcgctaccgcaaacaatttattacgccggataacgtgcaaaacggcgtcgcgttctggaatcagtatgaagacgcgctgaaccgcgcctggcaggtatacggcgtaccgccggagatcatcgtgggcatcatcggcgtggaaacccgctggggacgtatcatggggaaaacgcggattctggacgcgctggcgacgctgtcatttaactatccgcgccgggcggaatatttctccggcgagctggaaaccttcctgctcatggcgcgcgatgagcaagacgatccgctcaatctgaaaggttcctttgcgggcgcgatgggctacggccagtttatgccatcttcctataaagaatatgcggtcgatttcaatggtgatgggcacattaacttgtgggatccggtagatgccatcggcagcgtggcgaactatttcaaggcgcatggttgggtgaaaggcgatatggttgcggtgccggcgagtggtcaggcgcctgggttggcgaatggtttcaaaacaaaatacagcatctctcagcttgccgccgcaggcttaacgccgcagcaatcgttgggcaatcatcaggaagccagcctgctgcgtctggatatcggtacgggataccagtactggtacggcctgccgaacttctacacaattacccgatataaccacagcacgcattatgcgatggcggtttggcaactgggccaggcggtagcgctggcgcgggtgcgctaa

SEQ ID NO: 80767 - protein, 359 aa, Salmonella typhimurium LT2
MFKRRYVALLPLCVLLAACSSTPKSSETQATTGTPSGGFLLEPQHNVMQMGGDFANNPNAQQFIDKMVSKHGFDRQQLQEILSQSKRLDYVLRLMDRQAPTTQPPAGPNGAWLRYRKQFITPDNVQNGVAFWNQYEDALNRAWQVYGVPPEIIVGIIGVETRWGRIMGKTRILDALATLSFNYPRRAEYFSGELETFLLMARDEQDDPLNLKGSFAGAMGYGQFMPSSYKEYAVDFNGDGHINLWDPVDAIGSVANYFKAHGWVKGDMVAVPASGQAPGLANGFKTKYSISQLAAAGLTPQQSLGNHQEASLLRLDIGTGYQYWYGLPNFYTITRYNHSTHYAMAVWQLGQAVALARVR

SEQ ID NO: 80768 - DNA, 1119 bp, Ralstonia solanacearum GMI1000
  CDS (1)..(1119): transl_table=11
atgcccatgagccaaacgtccccctcccgtcgtcccgtgctgcgcgccctgatggcgggtgccgcactctccacgctttccctgtcttcgctgtcgctggccgcgcgcgctgccagacgccgcgtcgccgtgcacgaggaggagatcgacccggaccgctatcgcaacaatccgcagacgcaagccttcatcggcacgctggtggccgaacacaacttcgaccgcgccgcgctcgacgcgctgtttgccggcaccgcttattccgccacggtggcgcggttgatcctgccgccgccgacgccggcgcgccgcagctggacggcctaccgcggccgcttcatcgagccggtgcggatcggcgccggcgtggaattctggcagcaatacggcgacacactgcgccgggccgaagccgagttcggcgtgccggccgacgtggtcgtcggcatcctcggcgtggagacgatctacggccgcgacatgggcaacttccgcgtgatggatgcgctcaccacgctcgccttcgactacccggacacgcccaaccgcgaagagcgcagcaccatgttccgcaaccagctgaaggacttcctgctgtggtgccgcgacaccgggacggatgccttctcggtgctgggctcgtacgccggcgcggtcggcattccgcagttcatgccggccagcatccgcgaatatgccctcgactacgaccgcgacggacgcatcgacctgcgcaacagcgcggtggacgccatcggcagcgtcgcgcacttcctgcagatgcatggttgggagcccaaccgcccggtgatgtggaacatcgcgggcgacaccgacagccagggcatcgcggcggcggcagccgatggccagccctatccacgcatgacgctgtcccggctgacgcgcgccgggctggccctggcccccggcgtcgacaccgcccgcgagcaggagaccgatgtgctcgtggtcgacctgccctcccccggcctgccaaccgaataccgcgtcggcctgcgcaatttctatgtgctgacgcgctacaaccgcagcttcttctacgccgccgcggtgtacgagctgggccaggcggtccgccaggccatgcggggctga

SEQ ID NO: 80769 - protein, 372 aa, Ralstonia solanacearum GMI1000
MPMSQTSPSRRPVLRALMAGAALSTLSLSSLSLAARAARRRVAVHEEEIDPDRYRNNPQTQAFIGTLVAEHNFDRAALDALFAGTAYSATVARLILPPPTPARRSWTAYRGRFIEPVRIGAGVEFWQQYGDTLRRAEAEFGVPADVVVGILGVETIYGRDMGNFRVMDALTTLAFDYPDTPNREERSTMFRNQLKDFLLWCRDTGTDAFSVLGSYAGAVGIPQFMPASIREYALDYDRDGRIDLRNSAVDAIGSVAHFLQMHGWEPNRPVMWNIAGDTDSQGIAAAAADGQPYPRMTLSRLTRAGLALAPGVDTAREQETDVLVVDLPSPGLPTEYRVGLRNFYVLTRYNRSFFYAAAVYELGQAVRQAMRG

SEQ ID NO: 80770 - DNA, 1140 bp, Xanthomonas axonopodis pv. citri str. 306
  CDS (1)..(1140): transl_table=11
atgattcgacgcaccctgacctgcctgctcaccctcggccttgtcgcctgcgcgacccagcccagccctccgtccccgccaccggccgccagcgcgccgccggccaagccaccggttgcgccaaccccgcccgcaagcgccgccgccgaggcgcctgcgcttccgccagtcgacctgaccccggtcccgttcgagatcgcccgcgccaacttcgtgcgcgacacctcggccaagtacggcatcgatgccgcgcagatcgaagcggtgctggcgcaggcgcaattcaaggacgccattgtcactgcgatgtcgcgcccggccgaacgggtcaagccgtggaacgaataccggccgatgttcatcacccaggcgcgtatcgacggcggccgcaagtttctcgccgaacatcgcgccgagctgagcaaggtcgaagcggccaccggtgtgccggcacaggtgatcgtcgccatcatcggggtggaaaccagctacggcagcaacgccggcaagtaccgcgtgctggacgcgctgtacacgctggcgttccgctatccgcgcagcggcgacccggccaagctcgagcgcgaagtgcgccgcgaactgtttttccgcgacgaactcggccagttgttcgcgctcggcaaggaagagcaactcgacgtcaccaccctgatcggcagctatgccggcgcaatgggcatgggccagttcatgccgtccagctatcgccagttcggcgtggacggcgatgccgacggcaagcgcaatttgttcaccgactacaacgacgtgttcgcctcgatcgccaactacttcgtcaagaagggcggctgggtgcgtggcgggcaggtcgcggtgccggccacgctggccgctgggcacgaagaattcaatcccaccgactggtcgccggtgtacacgctgtccgagctgtcggcgcgcggctatcacccgagcgcaccggtggtggccggcagcaccgccaccccgatcagcctggacgacgccaacggcaagcagtattggctgggcttccagaacttttatgcgatcacccgttacaacatttccaagatgtatgcgatggccgtgttccagctgtccgaggccatcgccggcaaggagttacccccggcatga

SEQ ID NO: 80771 - protein, 379 aa, Xanthomonas axonopodis pv. citri str. 306
MIRRTLTCLLTLGLVACATQPSPPSPPPAASAPPAKPPVAPTPPASAAAEAPALPPVDLTPVPFEIARANFVRDTSAKYGIDAAQIEAVLAQAQFKDAIVTAMSRPAERVKPWNEYRPMFITQARIDGGRKFLAEHRAELSKVEAATGVPAQVIVAIIGVETSYGSNAGKYRVLDALYTLAFRYPRSGDPAKLEREVRRELFFRDELGQLFALGKEEQLDVTTLIGSYAGAMGMGQFMPSSYRQFGVDGDADGKRNLFTDYNDVFASIANYFVKKGGWVRGGQVAVPATLAAGHEEFNPTDWSPVYTLSELSARGYHPSAPVVAGSTATPISLDDANGKQYWLGFQNFYAITRYNISKMYAMAVFQLSEAIAGKELPPA

SEQ ID NO: 80772 - DNA, 1113 bp, Yersinia pestis KIM
  CDS (1)..(1113): transl_table=11
atggtttataggtattcgatgcgttatttggctgttattctccctttgttgacgttgctctcagcttgtagtagccagccgacacctcctgttgctgcaaccccgtcagatagccctgttcagggcggttttttgcttgagccggaacatacgggccagttgcaaaacggtgattttgcctttaacccagataccacgcgttttgttgacaaaatggtgcgtgagcacggttttgatcgccagcaactgcacgatgtattggctcagacccagcggctggactgggttattcgtttgatggataagcaagcgccgacgtcccgaccaccttctgagccaaacggtgcctggaatcgctatcgcaataaatttattactcctgataatgtgcagaacggtgtggttttctggaaccaatatgaaggtgcgctgcaacgtgcctgggaggtgtacggtgtgccgccggaaattatcgtcggtatcatcggggttgaaacgcgttggggccgggtgatggggaaaacccgaatcatcgacgccttggcgacgctatcctttgcttacccacggcgtgcaacattctttacgggtgagttggaaaccttcttattaatggcgcgtgctgaggggaaagacccactcagtctacggggctcctatgcgggggcaatgggctatggtcaatttatgccatcgtcatttaagcgctatgcagtggattttgatggcaacggccacatcaacttatgggatcccgttgatgctatcggcagtgttgccaattacttcaaatcccacggttggacgaaaggtgcgccggtagctgtacctgccaacggacaggctccaaatctcgaaaatggatttaagacccgttatccaatctcaactttagcggcagcagggcttagccccaaagggtcgttaggcgattatcaggaggccagtttgctgcgctttgatgtgggtaccggttatcaatattggtacggtttgcccaacttctacacgattacccgctataaccacagtacctattatgcgatggcagtatggcagttaggggaagccgtgggcagggcgcgcaaaggggagtcaatgattacccaatag

SEQ ID NO: 80773 - protein, 370 aa, Yersinia pestis KIM
MVYRYSMRYLAVILPLLTLLSACSSQPTPPVAATPSDSPVQGGFLLEPEHTGQLQNGDFAFNPDTTRFVDKMVREHGFDRQQLHDVLAQTQRLDWVIRLMDKQAPTSRPPSEPNGAWNRYRNKFITPDNVQNGVVFWNQYEGALQRAWEVYGVPPEIIVGIIGVETRWGRVMGKTRIIDALATLSFAYPRRATFFTGELETFLLMARAEGKDPLSLRGSYAGAMGYGQFMPSSFKRYAVDFDGNGHINLWDPVDAIGSVANYFKSHGWTKGAPVAVPANGQAPNLENGFKTRYPISTLAAAGLSPKGSLGDYQEASLLRFDVGTGYQYWYGLPNFYTITRYNHSTYYAMAVWQLGEAVGRARKGESMITQ

SEQ ID NO: 80774 - DNA, 1086 bp, Shigella flexneri 2a str. 301
  CDS (1)..(1086): transl_table=11
atgttcaagcgtcgttatgtaacattgcttcccctttttgtgttgcttgccgcctgtagcagcaagccaaaacctactgagactgaaacgaccaccggaacgccgtctggcggcttcctgcttgagccgcagcacaatgtgatgcagatgggcggcgatttcgctaataacccgaatgcccagcagttcatcgacaaaatggtgaacaaacacggtttcgatcgtcagcagttgcaggaaattctctcccaggcgaagcgtctggattcggtactgcggctgatggataaccaggcaccaaccacatcggtgaaaccgccatcaggtccgaacggcgcatggctgcgttatcgcaaaaaatttattacgccggacaacgtgcagaacggtgtggttttctggaatcagtatgaagatgcgttgaatcgcgcgtggcaggtgtatggcgtaccgccggaaattatcgtcgggattatcggcgttgaaacccgctgggggcgcgtgatggggaaaactcgcatcctcgatgcgctggcaacgctgtcatttaactacccacgccgcgcggagtatttctctggcgagctggaaaccttcctgctgatggcgcgcgacgagcaggacgatccgctcaatctgaaaggttcctttgccggggcgatgggctacggacagtttatgccgtcgtcttacaaacaatatgcggtagatttcagcggcgacgggcatatcaacctgtgggatccggttgatgcgatcggtagcgtggcgaactatttcaaagcgcacggctgggtgaaaggcgatcaggtcgcgataatggcaaacggtcaggctccaggcttgccaaatggtttcaaaactaagtacagcatttcgcagcttgccgccgcaggtttaacgccacagcagccgctgggcaaccatcaacaagccagcctgctgcgtctggatgttggcaccggctaccagtactggtacggtctgccgaacttctacaccatcacccgttacaaccacagcacccattacgcaatggcggtctggcagttaggacaagccgtggcgctggcgcgagtacagtag

SEQ ID NO: 80775 - protein, 361 aa, Shigella flexneri 2a str. 301
MFKRRYVTLLPLFVLLAACSSKPKPTETETTTGTPSGGFLLEPQHNVMQMGGDFANNPNAQQFIDKMVNKHGFDRQQLQEILSQAKRLDSVLRLMDNQAPTTSVKPPSGPNGAWLRYRKKFITPDNVQNGVVFWNQYEDALNRAWQVYGVPPEIIVGIIGVETRWGRVMGKTRILDALATLSFNYPRRAEYFSGELETFLLMARDEQDDPLNLKGSFAGAMGYGQFMPSSYKQYAVDFSGDGHINLWDPVDAIGSVANYFKAHGWVKGDQVAIMANGQAPGLPNGFKTKYSISQLAAAGLTPQQPLGNHQQASLLRLDVGTGYQYWYGLPNFYTITRYNHSTHYAMAVWQLGQAVALARVQ

SEQ ID NO: 80776 - DNA, 1302 bp, Shewanella oneidensis MR-1
  CDS (1)..(1302): transl_table=11
atgaaagcaaaaggaatgtattatcttgctgcgagtatcacagcgtgtgtgagcttaagtgcttgttctagctcgccaacgtctagcagtacgcctagcaataatagtgatactgctatcgtacagacgcaagccgctgcgcaagaagtgcaattgaacgagattatcaccagtcatgcagcagcctttccgacttgcgtgacaaacctccagaagcgcgctcgacgtgaaggtttatccgaagagaccattaacaacactgtggccagtctgcagtttgtgcctaaggtgattgagtttgaccagtcccagcctgaatttagccaaactttcaccaattacttcaccaaacgggcaactgattggcgagtaaatgaaggtcgacgtctgctgaaaaagcaccgagtgttgcttgaacaactcgcgcagcaatatggcgtgccgccccaatatattctgtctttttgggggctggagaccaactacggttcctataaaggcaaaatgtccgttttagattccctcgcgaccttggcctgcgagccacgtcgaagtgattattttacgactgagctgatgcaagcgctcaagttaaaagaaaaatatggcttcgataagcgtactatggtgggctcttgggcgggcgccatggggcatactcagtttatgccctcggcctatgctaaatacgccatcgatggtgatggggacggtaaagcggatctgtggaatagcacagaagatgctctcacatctgcggcaaactttctgcaacacttaggttggcagcgtaacgaacgctggggccgtgaagtgttattgccaagcaatttcggctatgagcatcttggtgcaaaacaggctctacctttgtctcaatgggcggcgcaatctgtgttgcaaacgaatggattgcctttacctgctatcgatctgaaagctgcactgtacttgccttctggtcatacgggccctgcattcttaggttatgaaaacttcaatgtgattatgcgttggaaccgctctgaattttacgccatcaccgtaggccatttggctgaccggattaatggtggtgaaccgctcaaggtgacaccacccgagcagcctcgattaagccgtgagctaatcaaacagttacaaaccaaactaaatgaatccggctttgatgtcggtaaaccggacggcgtgcttgggcgcaattctacggcggggatccaggcattccaacgtagtaacaatatgattgccgatggttttccaagcccagaagtgtttactgccctaggtatttcactctga

SEQ ID NO: 80777 - protein, 433 aa, Shewanella oneidensis MR-1
MKAKGMYYLAASITACVSLSACSSSPTSSSTPSNNSDTAIVQTQAAAQEVQLNEIITSHAAAFPTCVTNLQKRARREGLSEETINNTVASLQFVPKVIEFDQSQPEFSQTFTNYFTKRATDWRVNEGRRLLKKHRVLLEQLAQQYGVPPQYILSFWGLETNYGSYKGKMSVLDSLATLACEPRRSDYFTTELMQALKLKEKYGFDKRTMVGSWAGAMGHTQFMPSAYAKYAIDGDGDGKADLWNSTEDALTSAANFLQHLGWQRNERWGREVLLPSNFGYEHLGAKQALPLSQWAAQSVLQTNGLPLPAIDLKAALYLPSGHTGPAFLGYENFNVIMRWNRSEFYAITVGHLADRINGGEPLKVTPPEQPRLSRELIKQLQTKLNESGFDVGKPDGVLGRNSTAGIQAFQRSNNMIADGFPSPEVFTALGISL

SEQ ID NO: 80778 - DNA, 1317 bp, Pseudomonas putida KT2440
  CDS (1)..(1317): transl_table=11
atgctcttccgtcttatcccccgctgggaaacccgccagctgatcgcggcctccagcttcatcctgctcgtggcctgtgcggaaaagcccaccgccgccgacgcgctgccgctggcccctgcccaacccaatcccgtggtgaccgtgcccggcgcaacgcccgacgtcagcactgacatccagcccctgcaaaccttcgcccaatggcaagcgggcttccgcgagcaggccctgcaagccggcatttcgccgagcaccttcgaccgcgccttcctcggtgtcacccccgacctggacgtgatcaaggcagaccgcagccagccggagttcacccgcccggtgtgggaatacctcgaaggcgccctgtcgcccctgcgtgtgcgcaacggcaagaagctgctggagcagaacgccgagctgctgactcgccttgagcaacgctatggcgtggaccgccaggtgctggtcgcggtgtggggcatggaaagcaacttcggccagttccagggcagcaagtcggtgatccgctcgctggccactttggcctatgagggccgccgcccacagttcgcccaggatcagctgattgccgcgctgcagatcatccagcatggtgacatccagcctgaagccatgcgtggctcgtgggccggcgccatgggccagacccagttcatcccgaccacctacaacacccatgccgtggacttcgacggcgatggccgccgcgacatctggaacagcacaccagacgccctggcctcaacagcgcactacctgcagagttcgggctggaaacgcggccaaccgtggggcttcgaggtacaggtgccggccggcttcgacttctggcaggccgatggtgcactgcgcaaaccggtgagtgaatggctggcgatgggcgtgaaactgccagcgggtacccagctgccggcaggtagcaaccagctgtctgccgccctgctgctgccggccggtgcacgcggcccggcgttcctggtgctggacaacttccgcgccatcctcaaatacaacaactcgtcgtcctatgccctggcggtgagcctgctcggggatcgcttcagcggctggggcttcattgccggcagctggccgaaagaggacctgccgctcagccgcaccgagcgcatggagttgcagaacttgctgaacagccgcgggcatgatgcgggtaatgccgatggcattatcggggccaatacccgcaaggcaatccgcaatgcccagcaagggctgggatggccggcggatggctacccgacccacaagctgcttgagagcctgcgccagcagtaa

SEQ ID NO: 80779 - protein, 438 aa, Pseudomonas putida KT2440
MLFRLIPRWETRQLIAASSFILLVACAEKPTAADALPLAPAQPNPVVTVPGATPDVSTDIQPLQTFAQWQAGFREQALQAGISPSTFDRAFLGVTPDLDVIKADRSQPEFTRPVWEYLEGALSPLRVRNGKKLLEQNAELLTRLEQRYGVDRQVLVAVWGMESNFGQFQGSKSVIRSLATLAYEGRRPQFAQDQLIAALQIIQHGDIQPEAMRGSWAGAMGQTQFIPTTYNTHAVDFDGDGRRDIWNSTPDALASTAHYLQSSGWKRGQPWGFEVQVPAGFDFWQADGALRKPVSEWLAMGVKLPAGTQLPAGSNQLSAALLLPAGARGPAFLVLDNFRAILKYNNSSSYALAVSLLGDRFSGWGFIAGSWPKEDLPLSRTERMELQNLLNSRGHDAGNADGIIGANTRKAIRNAQQGLGWPADGYPTHKLLESLRQQ

SEQ ID NO: 80780 - DNA, 1047 bp, Pseudomonas putida KT2440
  CDS (1)..(1047): transl_table=11
atggatcgcgcaggtttgaataaggtgaacaatttcatgcaagcagtgcgtaactgggctgcccgttgtgcgccttggatcggtgcggtgggcctgttcggcgctgtacagctggcccatgccggcgaatacgacggctcgcccgaggtagccgcgtttgttggcgaaatgagccgcgactatggttttgcgcctgagcaactgatgggtgtgtttcgtgaggtgcagcgcaagcagtcgattctcgacgccatctcgcgcccggccgagcgggtcaaaccgtggaaggactaccggccgatgttcatcaccgatgcgcgtatcgctcgcggtgtggatttctggcgtcagcacgaggctgtattggcacgtgccgagcaggagtacggcgtacctgcgcagtacattgtcgcgatcatcggcgtggaaaccttctttggccgcaataccggcaactaccgggtgatcgacgccctgtcgacgctgggcttcgactacccgccacgggccgagttcttccgcaaggagctgcgagagttcctgctgctggcccgtgaggagcagcttgatcccttgacgctcaagggctcgtacgccggcgccatggggctgccgcagttcatgccaagcagcttccgcaactacgcggtggacttcgacggggacggccatatcaatatctggaacaaccctgacgatgccatcggcagcgtggccagctacttcaagcgccacggctgggtggccggcgagggtgtggtcagtcgcgcctgggtggaaggtgagcgcgccgacgaaggcctgaccaccggcatcgagccggtgaaaacggtaggggagttgcgtacgcttggctggtcggttcatgattcgctgcgcgatgatctgccggttaccgccttccgtctcgagggcgagagcggccccgagtactggatgggcctgaagaacttctacgcgatcactcgctacaaccgcagcgtgatgtatgccatggcggtacatcagcttgcggaacagctggttcaagtacggggcgtcaagtaa

SEQ ID NO: 80781 - protein, 348 aa, Pseudomonas putida KT2440
MDRAGLNKVNNFMQAVRNWAARCAPWIGAVGLFGAVQLAHAGEYDGSPEVAAFVGEMSRDYGFAPEQLMGVFREVQRKQSILDAISRPAERVKPWKDYRPMFITDARIARGVDFWRQHEAVLARAEQEYGVPAQYIVAIIGVETFFGRNTGNYRVIDALSTLGFDYPPRAEFFRKELREFLLLAREEQLDPLTLKGSYAGAMGLPQFMPSSFRNYAVDFDGDGHINIWNNPDDAIGSVASYFKRHGWVAGEGVVSRAWVEGERADEGLTTGIEPVKTVGELRTLGWSVHDSLRDDLPVTAFRLEGESGPEYWMGLKNFYAITRYNRSVMYAMAVHQLAEQLVQVRGVK

SEQ ID NO: 80782 - DNA, 1191 bp, Escherichia coli CFT073
  CDS (1)..(1191): transl_table=11
ttgagttatgtaaagtccgtatcgggcagtgactaccgcttccttgtgcggggcgggatgctttaccatacttgcccctggttgaatctgttaaatggacccctcatgttcaagcgtcgttatgtaacattgcttcccctttttatgttgcttgccgcctgtagcagcaagccaaaacctactgagactgaaacgaccaccggaacgccgtctggcggcttcctgcttgagccgcagcacaatgtgatgcagatgggcggtgacttcgccaataacccgaatgcccagcagttcatcgacaaaatggtgaacaaacacggtttcgatcgtcagcagttgcaggaaattctctcccaggcgaaacgtctggattcggtactgcggctgatggataaccaggcaccaaccacatcggtgaaaccgccatcaggtccgaacggcgcatggctgcgttatcgcaaaaaatttattacgccggacaacgtgcagaacggtgtggttttctggaatcagtatgaagatgcgttgaatcgcgcgtggcaggtgtatggtgtaccgccggaaattatcgtcgggattatcggcgttgaaacccgctgggggcgcgtgatggggaaaactcgcatcctcgatgcgctggcaacgctgtcatttaactacccacgccgcgcggagtatttttctggcgagctggaaaccttcctgctgatggcgcgcgacgagcaggacgatccgctcaatctgaaaggttcctttgccggggcgatgggctacggtcagtttatgccgtcgtcttacaaacaatatgcggtagatttcagcggcgacgggcatatcaacctgtgggatccggttgatgcgatcggtagcgtggcgaattatttcaaagcgcacggctgggtgaaaggcgatcaggtcgcggtaatggcaaacggtcaggcgccaggcttgccaaatggcttcaaaaccaggtacagcatttcgcagcttgccgcggcaggtttaacgccacagcagccgctgggcaaccatcaacaagccagcctgctgcgtctggatgttggcaccggctaccagtactggtacggtctgccgaacttctacaccattacccgttataaccacagcacccattacgcaatggcggtctggcagttaggacaagccgtggcgctggcgcgcgtgcagtaa

SEQ ID NO: 80783 - protein, 396 aa, Escherichia coli CFT073
MSYVKSVSGSDYRFLVRGGMLYHTCPWLNLLNGPLMFKRRYVTLLPLFMLLAACSSKPKPTETETTTGTPSGGFLLEPQHNVMQMGGDFANNPNAQQFIDKMVNKHGFDRQQLQEILSQAKRLDSVLRLMDNQAPTTSVKPPSGPNGAWLRYRKKFITPDNVQNGVVFWNQYEDALNRAWQVYGVPPEIIVGIIGVETRWGRVMGKTRILDALATLSFNYPRRAEYFSGELETFLLMARDEQDDPLNLKGSFAGAMGYGQFMPSSYKQYAVDFSGDGHINLWDPVDAIGSVANYFKAHGWVKGDQVAVMANGQAPGLPNGFKTRYSISQLAAAGLTPQQPLGNHQQASLLRLDVGTGYQYWYGLPNFYTITRYNHSTHYAMAVWQLGQAVALARVQ

SEQ ID NO: 80784 - DNA, 1125 bp, Xylella fastidiosa Temecula1
  CDS (1)..(1125): transl_table=11
ttgttaataagtatgattaagtgcatagcaacctcgatactgactctcggcctcgttgcctgtgcatcgcaaccctcatccaagcggctagtcagtacaacgacaaaagaaccaacgaaaaagatagatccctcaaaagtggaagaaacaccactaaatctgtcgcctgtcccattagaaatcgcgcgtaacaatttcatacgtgatactgcaaccaagtacaacttggacccgatatggatcgaaaaaaccctagcacaagctcaatttaaagacgcaatagtagcggccatgtcgcgcccagccgagcaagtcaaaccgtggaacgaataccgatcaatgttcatcgctcaggcaagaattgacggtggacgtcagttcttagcctctcacaagatacaactcaaaaaagtcgaagctgctacaggcgtaccagcagaactcatcgtcgcaattattggtgtcgaaagcagctatggtactagccccgggaaataccgcgtactggacgcgctatacacactcgcctttaaatacccgcgcagcggcgacccaaacaaactcaaacgcgaagtacaacgtgaattattttttcgcgatgaactcgcccaactattcgcactcagtaaagaagaaaacctggatatcaccacattgactggcagctacgccggagcaatgggcatgggacagttcatgccctccagctatcgtcaatatgcagtagacggcgatggggacggcaaacgcaacctattcaccaacgaagatgacgtattcgcttcgatcgccaactacttcctccgaaaaggaggctgggtacgtggcgctctggtcgcagtaccagccaccctcgcttcgggttaccaagaattcgacccacccgactggatcccgcgttacaccctgaccgaattagccgcacgtggctaccatacctatgtgcccgtcacagccggtatcaccgccaccccgatcagtctggacaacaccaccagtaaagaatactggctttgcttccagaactactacgcgattacccgctacaacccctccaaaatgtacgccatggccgtgttccaactgtccgaatccattgccggccgcacactccccaaaacatga

SEQ ID NO: 80785 - protein, 374 aa, Xylella fastidiosa Temecula1
MLISMIKCIATSILTLGLVACASQPSSKRLVSTTTKEPTKKIDPSKVEETPLNLSPVPLEIARNNFIRDTATKYNLDPIWIEKTLAQAQFKDAIVAAMSRPAEQVKPWNEYRSMFIAQARIDGGRQFLASHKIQLKKVEAATGVPAELIVAIIGVESSYGTSPGKYRVLDALYTLAFKYPRSGDPNKLKREVQRELFFRDELAQLFALSKEENLDITTLTGSYAGAMGMGQFMPSSYRQYAVDGDGDGKRNLFTNEDDVFASIANYFLRKGGWVRGALVAVPATLASGYQEFDPPDWIPRYTLTELAARGYHTYVPVTAGITATPISLDNTTSKEYWLCFQNYYAITRYNPSKMYAMAVFQLSESIAGRTLPKT

SEQ ID NO: 80786 - DNA, 1008 bp, Pseudomonas syringae pv. tomato str. DC3000
  CDS (1)..(1008): transl_table=11
atgcaagcaatgcgtaactgggctcgatatgctccggtggtcggcctggtgggcatccttgggtcggtgcaagaggcactggccggtgattacgaaggttcgccccaggtggccgagttcgtcggtgaactgacccgcgactacggttttgccggcgagcagttgatgggcctgtttcgtgaggtcgagcgcaagcaggccattctggatgccatttcgcgcccggctgaacgggtcaagcagtggaaagagtatcggccgatgttcatcactgacacgcgcatagcccgcggtgtcgatttctggcgtcagcacgaggccgcattggcccgcgccgagcaggaatatggcgtaccggcgcagatcatcgtttcgatcatcggcgtcgaaacctttttcggccgcaacaccggtaattaccgggtgatcgacgccttgtcgacgctcggtttcgattacccgccgcgcgccccgttcttccgcaaggaactgcgtgagttcctgctgctggcccgcgagcaacaggtcgatccgctgaccctgaaaggctcgtatgccggcgcaatgggcctgccgcaattcatgccgagcagcttccgcgcttatgcagtggactttgacggcgacggtcacatcaacatctggaccgacccggacgacgccatcggcagcgtggccagctatttcaagcgtcatggctgggtggccggccagcaggtcgtcagccgcgcaacggcgcgtggcgaccgggttgatgaaggcttgagccctgcacttgatccggtaatgtcggtcggggagttgcgacagctgggttgggcaagtcatgatgcgctgcgcgacgacatgccggtgacggcattccgtcttgaaggcgacaatggtcccgaatactggctgggtctgaacaatttttatgcaatcacccgttataaccgcagtgtgatgtacgccatggccgtgtatcagctgtctgaatcgttggttcaagctcgaggcgtcaagtaa

SEQ ID NO: 80787 - protein, 335 aa, Pseudomonas syringae pv. tomato str. DC3000
MQAMRNWARYAPVVGLVGILGSVQEALAGDYEGSPQVAEFVGELTRDYGFAGEQLMGLFREVERKQAILDAISRPAERVKQWKEYRPMFITDTRIARGVDFWRQHEAALARAEQEYGVPAQIIVSIIGVETFFGRNTGNYRVIDALSTLGFDYPPRAPFFRKELREFLLLAREQQVDPLTLKGSYAGAMGLPQFMPSSFRAYAVDFDGDGHINIWTDPDDAIGSVASYFKRHGWVAGQQVVSRATARGDRVDEGLSPALDPVMSVGELRQLGWASHDALRDDMPVTAFRLEGDNGPEYWLGLNNFYAITRYNRSVMYAMAVYQLSESLVQARGVK

SEQ ID NO: 80788 - DNA, 1005 bp, Coxiella burnetii RSA 493
  CDS (1)..(1005): transl_table=11
atgttaaattggcttcaaaggggattttgtgcgctgttattgttgttcgccacaccaatattaggcgccgaaatgaaaaagcaaagcacggtcgcacaaaaagaaaaaactttcattaattacatggcaaagcattatcacttcaaacgtgaaaaactggtcgctgcactttctcaagcgaaatacgatgaagaagtgattttccatatcacccatccttacgaagaaaaaccgtgggacgtttatcgtcactattttataaccgaaaaacggatccaagacggtatcaactattggaaagtccatgcaaaagcgttggaatatgccgaacgccggtatggcgtcccacccgctgttatcgtcgctatcattggaattgaaaccaattatggggaacgcatcggaaaatattccgccctcaacgcgttaacgacgttggcttttcattataatcatcggacgaagtttttcacccgagagctcgctcaattttttttactgattgaagaacagcgcttaccccttcccctagtcagaagctcttacgctggcgctattggaattcctcaatttatgcctagtacttaccggcattacgcagttacctatgccaagcagggtcacattgacctcatgaataacgacgaagacgccattgttagtattgcaaactttctccatgcccatggctggcataaaaatcaatctattgcctgtgcttttaccagcaaaaaaccccttgacccgcagttaatttccaaaagggctattcccaaaatttccattaagcaattgaaaaataagggaattatcccatcagctccaatacctgatactaaaaaagcggccattgtccaactgaaaatggaaaatggcgatgaaaaatggctcgtctttgctaattttgatgtgattatgcggtataatccgcgtataatttatgcaatgaccgtttatcaattgagtcaagcccttcaaaaacgatatgaccaacaaactccttga

SEQ ID NO: 80789 - protein, 334 aa, Coxiella burnetii RSA 493
MLNWLQRGFCALLLLFATPILGAEMKKQSTVAQKEKTFINYMAKHYHFKREKLVAALSQAKYDEEVIFHITHPYEEKPWDVYRHYFITEKRIQDGINYWKVHAKALEYAERRYGVPPAVIVAIIGIETNYGERIGKYSALNALTTLAFHYNHRTKFFTRELAQFFLLIEEQRLPLPLVRSSYAGAIGIPQFMPSTYRHYAVTYAKQGHIDLMNNDEDAIVSIANFLHAHGWHKNQSIACAFTSKKPLDPQLISKRAIPKISIKQLKNKGIIPSAPIPDTKKAAIVQLKMENGDEKWLVFANFDVIMRYNPRIIYAMTVYQLSQALQKRYDQQTP

SEQ ID NO: 80790 - DNA, 1059 bp, Nitrosomonas europaea ATCC 19718
  CDS (1)..(1059): transl_table=11
atgtttctgcgacctgctgtaacgaatcctatcaagcacaacacttttgggcattctcgtaaccgcctgactttatttattttgacatctttggtcacacatcatacttcgtgcatggcggaacaacctgtttccggtttgcgtctggaaatcagaagttttgtaacagatatggtgagccgtcatggatatgatgcgcatgaactggaagatgcttttattcaaacgaatttccggccggagattctcaaactgatttccaccccggcttcagcaatttcctgggatgaatatcggaagcgattcgtcaacatgcagcgtatcaaaggcggagtcgatttctggaacaaatatgccgctgatctggagcgtgcaaggaaaatttacggcgtacctgaagaaatcatcgtggcgattatcggtattgagacttcctatggttcatcgaccggaaattatcgcgtcatggatgcactgacgacactcgcctttgattttcccagaagagcagattattttcgggaagagctggaaaactatttattgctggccagggaacagaaatttggtttgctggacatcaaaggctcttacgccggcgcaattggtgtccctcagtttatgcccggaagctaccggcgctacgcagtcgacttcaacaatgatggaaagatcgatctttccaggagtgccgtcgatgcaataggcagtataggcaattatctgaaggaatacggatgggaggcgggcaaaccggttgctattcgcgcacgagccggatcacagaatctgcaggaattcctggacacagatatcaaaccgttacattccgtctggaaactgcgccaggccggtatcactccacttgatcctgttgcagatgataccctctctgccttgctggaattgaacagccagggcaagcgtcagttatggttgggattcaaaaatttttatgtgatcacgcgctataaccgcagtaccttctacgccatgtctgtttttgagttggctagagcgatccatactgccagatcatcctattcggctgaccggtaa

SEQ ID NO: 80791 - protein, 352 aa, Nitrosomonas europaea ATCC 19718
MFLRPAVTNPIKHNTFGHSRNRLTLFILTSLVTHHTSCMAEQPVSGLRLEIRSFVTDMVSRHGYDAHELEDAFIQTNFRPEILKLISTPASAISWDEYRKRFVNMQRIKGGVDFWNKYAADLERARKIYGVPEEIIVAIIGIETSYGSSTGNYRVMDALTTLAFDFPRRADYFREELENYLLLAREQKFGLLDIKGSYAGAIGVPQFMPGSYRRYAVDFNNDGKIDLSRSAVDAIGSIGNYLKEYGWEAGKPVAIRARAGSQNLQEFLDTDIKPLHSVWKLRQAGITPLDPVADDTLSALLELNSQGKRQLWLGFKNFYVITRYNRSTFYAMSVFELARAIHTARSSYSADR

SEQ ID NO: 80792 - DNA, 1146 bp, Bordetella pertussis Tohama I
  CDS (1)..(1146): transl_table=11
atgttcaactgtcggcgattcctgcaaatcggcacgctgtcggccctgctggccggctgtgccacctccagccaaacaccccaagcccagcatcttcccgcgcaggccgccacaggccaggccgaccgcgtccgcatcggcccggacaaacccgtatcgagcgacgaaggccccgccacgctgacgccgaccggcgaactgcggcccgacgtccgcgccttcgccgaacagctggcggcgcagcgcgagctgcccctgccgcaagtgctggccagcctggaaagcacgcgctacaacgcgaccgtcgcccgcctcatcgccccgtccggcgcgtcgggcaagaaaatctggcgcagctggctgacctatcgcgggcgtttcgtcgaacccaagcgcatcgcctggggcgtggaattctggaacgccaaccaggacctgctcaaccgcgccgcccagcgctacggcgtgccggcctcgatcatcgcctccatcatcggcgtggaaaccctgtatggccgcaacgtgggcaacttccgcgtggtcgacgccctggcgacgctggcattcgactacctcgatcccgccaagcccgagcgcgccgacatgttccgcggccagctcggcgacttcatcaccctggcgctgcaggacaagctggaccccgagacgcgcggctcgtacgccggcgccatcggcatgccgcaattcatgcccggcagcatcatgcgctatgcggtcgatggcgatgacgacggccacatcgacctgaccaacagcgtcgcggacgcggtcatgtcggtgggcaacttcctggtcgaacatggctggcagcgcggcctgccggtgttcgcgccggtcgcgctgccggccgatccggcgccgctggtggccggcggccttacgccgacgctggactggaacggcctgcaggccgccggcgcgcgcccggcggcgggcgccggacgcggcgcctggcaggagcaccccatgggcatcgtggacctggtcgaggaagcgcgcggcaccgtgcaataccgtaccgccacgcccaatttctttgccctgacgcaatacaaccgcagctacttctatgccacggcggtggccgacctggcggccgaactgcaggcccgcacgggctattga

SEQ ID NO: 80793 - protein, 381 aa, Bordetella pertussis Tohama I
MFNCRRFLQIGTLSALLAGCATSSQTPQAQHLPAQAATGQADRVRIGPDKPVSSDEGPATLTPTGELRPDVRAFAEQLAAQRELPLPQVLASLESTRYNATVARLIAPSGASGKKIWRSWLTYRGRFVEPKRIAWGVEFWNANQDLLNRAAQRYGVPASIIASIIGVETLYGRNVGNFRVVDALATLAFDYLDPAKPERADMFRGQLGDFITLALQDKLDPETRGSYAGAIGMPQFMPGSIMRYAVDGDDDGHIDLTNSVADAVMSVGNFLVEHGWQRGLPVFAPVALPADPAPLVAGGLTPTLDWNGLQAAGARPAAGAGRGAWQEHPMGIVDLVEEARGTVQYRTATPNFFALTQYNRSYFYATAVADLAAELQARTGY

SEQ ID NO: 80794 - DNA, 1146 bp, Bordetella parapertussis 12822
  CDS (1)..(1146): transl_table=11
atgttcaactgtcggcgattcctgcaaatcggcacgctgtcggccctgctggccggctgtgccacctccagccaaacaccccaagcccagcatcttcccgcgcaggccgccacaggccaggccgaccgcgtccgcatcggcccggacaaacccgtatcgagcgacgaaggccccgccacgctgacgccgaccggcgaactgcggcccgacgtccgcgccttcgccgaacagctggcggcacagcgcgagctgcccctgccgcaagtgctggccagcctggaaagcacgcgctacaacgcgaccgtcgcccgcctcatcgccccgtccggcgcgtcgggcaagaagatctggcgcagctggctgacctatcgcgggcgtttcgtcgaacccaagcgcatcgcctggggcgtggaattctggaccgccaaccaggacctgctcaaccgcgccgcccagcgctacggcgtgccggcctcgatcatcgcctccatcatcggcgtggaaaccctgtacggccgcaacgtgggcaacttccgcgtggtcgatgccctggcgacgctggcgttcgactaccccgatcccgccaagcccgagcgcgccgacatgttccgcggccagctcggcgacttcatcaccctggcgctgcaggacaagctggaccccgagacgcgcggctcgtacgccggcgccatcggcatgccgcaattcatgcccggcagcatcatgcgctatgcggtcgatggcgatgacgacggccacatcgacctgaccaacagcgtcgcggacgcggtcatgtcggtgggcaacttcctggtcgaacatggctggcagcgcggcctgccggtgttcgcgccggtcgcgctgccggccgatccggcgccgctggtggccggcggccttacgccgacgctggactggaacggtctgcaggccgccggcgcgcgcccggcggcgggcgccggacgcggcgcctggcaggagcaccccatgggcatcgtggacctggtcgaggaagcgcgcggcaccgtgcaataccgtaccgccacgcccaatttctttgccctgacgcaatacaaccgcagctacttctatgccacggcggtggccgacctggcggccgaactgcaggcccgcacgggctattga

SEQ ID NO: 80795 - protein, 381 aa, Bordetella parapertussis 12822
MFNCRRFLQIGTLSALLAGCATSSQTPQAQHLPAQAATGQADRVRIGPDKPVSSDEGPATLTPTGELRPDVRAFAEQLAAQRELPLPQVLASLESTRYNATVARLIAPSGASGKKIWRSWLTYRGRFVEPKRIAWGVEFWTANQDLLNRAAQRYGVPASIIASIIGVETLYGRNVGNFRVVDALATLAFDYPDPAKPERADMFRGQLGDFITLALQDKLDPETRGSYAGAIGMPQFMPGSIMRYAVDGDDDGHIDLTNSVADAVMSVGNFLVEHGWQRGLPVFAPVALPADPAPLVAGGLTPTLDWNGLQAAGARPAAGAGRGAWQEHPMGIVDLVEEARGTVQYRTATPNFFALTQYNRSYFYATAVADLAAELQARTGY

SEQ ID NO: 80796 - DNA, 1146 bp, Bordetella bronchiseptica RB50
  CDS (1)..(1146): transl_table=11
atgttcaactgtcggcgattcctgcaaatcggcacgctgtcggccctgctggccggctgtgccacctccagccaaacaccccaagcccagcatcttcccgcgcaggccgccacaggccaggccgaccgcgtccgcatcggcccggacaaacccgtatcgagcgacgaaggccccgccacgctgacgccgaccggcgaactgcggcccgacgtccgcgccttcgccgaacagctggcggcacagcgcgagctgcccctgccgcaagtgctggccagcctggaaagcacgcgctacaacgcgaccgtcgcccgcctcatcgccccgtccggcgcgtcgggcaagaagatctggcgcagctggctgacctatcgcgggcgtttcgtcgaacccaagcgcatcgcctggggcgtggaattctggaacgccaaccaggacctgctcaaccgcgccgcccagcgctacggcgtgccggcctcgatcatcgcctccatcatcggcgtggaaaccctgtacggccgcaacgtgggcaacttccgcgtggtcgatgccctggcgacgctggcgttcgactaccccgatcccgccaagcccgagcgcgccgacatgttccgcggccagctcggcgacttcatcaccctggcgctgcaggacaagctggaccccgagacgcgcggctcgtacgccggcgccatcggcatgccgcaattcatgcccggcagcatcatgcgctatgcggtcgatggcgatgacgacggccacatcgacctgaccaacagcgtcgcggacgcggtcatgtcggtgggcaacttcctggtcgaacatggctggcagcgcggcctgccggtgttcgcgccggtcgcgctgccggccgatccggcgccgctggtggccggcggccttacgccgacgctggactggaacggtctgcaggccgccggcgcgcgcccggcggcgggcgccggacgcggcgcctggcaggagcaccccatgggcatcgtggacctggtcgaggaagcgcgcggcaccgtgcaataccgtaccgccacgcccaatttctttgccctgacgcaatacaaccgcagctacttctatgccacggcggtggccgacctggcggccgaactgcaggcccgcacgggctattga

SEQ ID NO: 80797 - protein, 381 aa, Bordetella bronchiseptica RB50
MFNCRRFLQIGTLSALLAGCATSSQTPQAQHLPAQAATGQADRVRIGPDKPVSSDEGPATLTPTGELRPDVRAFAEQLAAQRELPLPQVLASLESTRYNATVARLIAPSGASGKKIWRSWLTYRGRFVEPKRIAWGVEFWNANQDLLNRAAQRYGVPASIIASIIGVETLYGRNVGNFRVVDALATLAFDYPDPAKPERADMFRGQLGDFITLALQDKLDPETRGSYAGAIGMPQFMPGSIMRYAVDGDDDGHIDLTNSVADAVMSVGNFLVEHGWQRGLPVFAPVALPADPAPLVAGGLTPTLDWNGLQAAGARPAAGAGRGAWQEHPMGIVDLVEEARGTVQYRTATPNFFALTQYNRSYFYATAVADLAAELQARTGY

SEQ ID NO: 80798 - DNA, 1041 bp, Chromobacterium violaceum ATCC 12472
  CDS (1)..(1041): transl_table=11
atgaaatcgatgttgaaactggccatcgccgccgccctggccggcgcggccctcaccgccccgccagcccaggctgacgccgccttcctgtctcgccccgatgtgcagcgctacatcgacgagcaggtggcgagcggccagttcaatcgccccgaactggaggcggtgttcgccaatgtcgagctgaagcccaacatcatccgcatcctggacaagccgtccacctcgcggccgtggtaccagttccgcgcgtccaccgtcaacgacaagctgatcgcggacggaaccgcgttctggcaggccaacgccgacgcgctgtcccgcgccgagcgccagtacggcgtggcgccggaggtgatcgtcgccattctgggcgtggaaacccattacggccgcaacaccggcagcttccgcctggtggattccttgtccaccatcggcttcgactacccgcgccgcgccgcgtacttccgcggcgaactgacccagttcctgctgctggcgaaggaggagggcaaggacccgctgacgctgaaggggtcctacgccggcgcgatgggcctgccgcagttcatgccgtccagctaccgcaagtgggcggtggactttgacggcagcggccaccgcgacatctggaacaacccgcatgacgccatcggcagcgtcgcccattatttccagctgcacggctggcggcacggcgacgacgtggtggcgccggccagcgtggcgccaggcgcccaggtcgacaagctgctggccgacaaattcaacttgcactacacggtgggcgagctgcgcaagctgggcgtggcgccgcaggcgcagctggccgacgacgtgccggcggtgctgttctcgctggagaccgcgcccggcgtcaccgaatactggctgggcctgaacaacttctacgcgatcacccgctacaaccgcagcacgctgtacgccaaggcggtgcaggaaatcgccgatcagctgcgcgcgcgctactacgcgacgctggcgcagcggccggacccggcgtccgtcgcgcagtaa

SEQ ID NO: 80799 - protein, 346 aa, Chromobacterium violaceum ATCC 12472
MKSMLKLAIAAALAGAALTAPPAQADAAFLSRPDVQRYIDEQVASGQFNRPELEAVFANVELKPNIIRILDKPSTSRPWYQFRASTVNDKLIADGTAFWQANADALSRAERQYGVAPEVIVAILGVETHYGRNTGSFRLVDSLSTIGFDYPRRAAYFRGELTQFLLLAKEEGKDPLTLKGSYAGAMGLPQFMPSSYRKWAVDFDGSGHRDIWNNPHDAIGSVAHYFQLHGWRHGDDVVAPASVAPGAQVDKLLADKFNLHYTVGELRKLGVAPQAQLADDVPAVLFSLETAPGVTEYWLGLNNFYAITRYNRSTLYAKAVQEIADQLRARYYATLAQRPDPASVAQ

SEQ ID NO: 80800 - DNA, 1002 bp, Acinetobacter sp. ADP1
  CDS (1)..(1002): transl_table=11
atgttgaatttggtgctaaacaaaccatttaaacaacttctaatcatgagcagtttatttatcaccgcaagctgttcacaagcaaatgattttattacagatcctaattatcaaagctttaaacaaaaaaccatgaatacctatggattgacatccgatcagattgataatgcgatgtctggtgctaaaaatttaccgaatattttaagtattatgacacgccctggcgaaagtaaaccttggtacgattataaagccatgtttctcgcagaaggaaccatccaacgtggcgtaagattcaaaaaccaatatgctgatgtacttaatcgtgcagaacaacaatttggtgttccccaatctattattctgggtattttaggcgtagagactggttatggtgccaacaaaggatcttttatcacacgagacgcgcttgcaaccttggcttttggttatcctcgtcgagcagattatttcagtgatgaattaggcgccctgattgcctggacgtacaaggaaggctatccaaccaacagtattgttggctcttatgcaggtgcaattggctatccacaattcatgccaagcaacattaccaaatttggtgtggattacgatggaagcggacatattgatctcagaaattctgctgaagatgcaattgcatcgattgcaaattatcttgcacaaaatggctggcaacgtaaccaaccagtcggatttccagcccgttatagcggaaatactcctgatgcagtgattgccaaagacttaactcagcctaccccctacggcgtactcaaatctcagggagtcacaccgcttaatcctgtagttaaaattgatgatttggatctggttaatgtaatccaacttcaagaaaattatggtcctatgtactatattacctatccaaattttcaggtaattaccacttacaacagaagtcgaatgtacgctacagcggtatggttattaggcacagaagtcgcaagtagatag

SEQ ID NO: 80801 - protein, 333 aa, Acinetobacter sp. ADP1
MLNLVLNKPFKQLLIMSSLFITASCSQANDFITDPNYQSFKQKTMNTYGLTSDQIDNAMSGAKNLPNILSIMTRPGESKPWYDYKAMFLAEGTIQRGVRFKNQYADVLNRAEQQFGVPQSIILGILGVETGYGANKGSFITRDALATLAFGYPRRADYFSDELGALIAWTYKEGYPTNSIVGSYAGAIGYPQFMPSNITKFGVDYDGSGHIDLRNSAEDAIASIANYLAQNGWQRNQPVGFPARYSGNTPDAVIAKDLTQPTPYGVLKSQGVTPLNPVVKIDDLDLVNVIQLQENYGPMYYITYPNFQVITTYNRSRMYATAVWLLGTEVASR

SEQ ID NO: 80802 - DNA, 1071 bp, Erwinia carotovora subsp. atroseptica SCRI1043
  CDS (1)..(1071): transl_table=11
atgcgtcatttggttcgttttctccctctgctcgttttgctctctgcctgtagcagtcagccagctcctcctcccacagaagcgccttcggggaatcctttcaacggtggtttcctgcttgaacctgcacacaatgtccatccgttgggcggtgattttgcgactaacgccgccactgcgcgatttgtcgataaaatggtgcaggaacatggctttaatcgtcagcaattgcatgatgtgctggtacaggcgaaaagtctggattgggtgatccgtctgatggataaacaggctccgacatcacggccaccttcagggccgaacggtgcctggaaccgttaccgcaatcagtttattacgcctgacaacgtgcagaacggcgtggcgttctggaatcaatatcaggatgcgctacagcgtgcccagaatatttacggcgttcctcctgagatcatcgtcggcattattggcgttgaaacccgctggggcagagtgatggggaaaacgcgcatcattgatgcattggcaacgctggcgtttgattacccacgacgtgccgattactttgcgggcgagctggaaaccttcctgctgatggcacgtaaagaaggcaacgatccactcagcctgcgtggttcttacgcgggtgcgatgggctacgggcagtttatgccttcatccttcaagaattacgccgtggatttcgacggcaacggacacaccaacctatgggatccggtggacgcgattggcagcgtagccaattatttcaaagcgcacggctgggtgaagggcgcgcctgttgcggtgccggcaaacggtcaagcgccgctacttccgaacggttttaatacccgttactcgctcactgaacttcaggccgcagggctaacgccacagcattcgctggcgggatacagtgaagccagcctactgcggctggatatcggaacgggatatcaatactggtacggactgccgaacttctacaccatcacgcgctacaaccacagcacgcactatgcgatggccgtatggcaactcggtgaagccgtaggccgcgcgcgttaa

SEQ ID NO: 80803 - protein, 356 aa, Erwinia carotovora subsp. atroseptica SCRI1043
MRHLVRFLPLLVLLSACSSQPAPPPTEAPSGNPFNGGFLLEPAHNVHPLGGDFATNAATARFVDKMVQEHGFNRQQLHDVLVQAKSLDWVIRLMDKQAPTSRPPSGPNGAWNRYRNQFITPDNVQNGVAFWNQYQDALQRAQNIYGVPPEIIVGIIGVETRWGRVMGKTRIIDALATLAFDYPRRADYFAGELETFLLMARKEGNDPLSLRGSYAGAMGYGQFMPSSFKNYAVDFDGNGHTNLWDPVDAIGSVANYFKAHGWVKGAPVAVPANGQAPLLPNGFNTRYSLTELQAAGLTPQHSLAGYSEASLLRLDIGTGYQYWYGLPNFYTITRYNHSTHYAMAVWQLGEAVGRAR

SEQ ID NO: 80804 - DNA, 1095 bp, Yersinia pseudotuberculosis IP 32953
  CDS (1)..(1095): transl_table=11
atgcgttatttggctgtcattcttcctttgtttacgttgctctcagcttgtagtagccagccgacgcctcctgttgctgcaaccccgtcagatagccctgttcagggcggttttttacttgagccggaacatgcgggccagttgcaaaacggtgattttgcctttaatccagataccacgcgttttgttgacaaaatggtgcgtgagcacggttttgatcgccagcaactgcacgatgtattggctcagacccagcggctggactgggttattcgtttgatggataagcaagcgccgacgtcccgaccaccttccgggccaaacggtgcctggaatcgctatcgcaataaattcattactcctgataatgtgcagaacggtgtggttttctggaatcaatatgaaggtgcgctgcaacgtgcctgggaggtgtacggtgtgccgccggaaattatcgtcgggatcatcggggttgaaacgcgttggggccgggtgatggggaaaacccgaatcatcgatgctttggcgacgctgtcctttgcttacccacggcgtgcaacattctttacgggtgagttggaaaccttcttattaatggcgcgtgctgaggggaaagacccactcagtctgcggggctcctatgcgggggcaatgggctatggtcaatttatgccatcgtcatttaagcgctatgcggttgattttgatggcaacggccacatcaacttatgggatcccgttgatgctatcggcagtgttgccaattacttcaaatcccacggttggacgaaaggtgcgccggtagctgtacctgccaatggacaggctccaaatctcgaaaatggatttaagacccgttatccaatctcgactttagcggcagcagggcttagccccaaggggccgttaggcgattatcaggagaccagtttgctgcgctttgatgtgggtaccggttatcaatattggtacggtttgcctaacttctacacgattacccgctataaccacagtacccattatgcgatggcggtatggcagttaggggaagccgtgggcagagtgcgcaaaggggagtcaatgattacccaatag

SEQ ID NO: 80805 - protein, 364 aa, Yersinia pseudotuberculosis IP 32953
MRYLAVILPLFTLLSACSSQPTPPVAATPSDSPVQGGFLLEPEHAGQLQNGDFAFNPDTTRFVDKMVREHGFDRQQLHDVLAQTQRLDWVIRLMDKQAPTSRPPSGPNGAWNRYRNKFITPDNVQNGVVFWNQYEGALQRAWEVYGVPPEIIVGIIGVETRWGRVMGKTRIIDALATLSFAYPRRATFFTGELETFLLMARAEGKDPLSLRGSYAGAMGYGQFMPSSFKRYAVDFDGNGHINLWDPVDAIGSVANYFKSHGWTKGAPVAVPANGQAPNLENGFKTRYPISTLAAAGLSPKGPLGDYQETSLLRFDVGTGYQYWYGLPNFYTITRYNHSTHYAMAVWQLGEAVGRVRKGESMITQ

SEQ ID NO: 80806 - DNA, 1110 bp, Mannheimia succiniciproducens MBEL55E
  CDS (1)..(1110): transl_table=11
atgaaaataaaatataaatttttagcattaacagcctgcctgatgttagcgggttgctcctcaaacaataataaaagtgcggtcaattctgccgaagatttgagtgcgctacccgccactgcggtttattcaaatgcccggacattaaataattttgatgattacgtgcaatttttaaaacgcaaggccgccgggcaaggcgtttcaagtgcaacgctaacgacacaaaacaatatccgttatatcgacagtgcagttcgtttggatcaaaaacaagcgggcaatgcagctcgtcgtcagggattgccacccctgccgccaaatcccaacggcgtcaccaattatctgacaaaacatttaacccaagccaaagtggacaaagcggaagataactattatgacgtgcaggttccgctacaaaaagcaagtagcgcattcggcgtacagaaagaatttattcttgcgctttggggcatggaaagcagctttggttactatcagggagattatgacgtattgtccgtactggcaaccttagcttttgacggacggcgcgaaaccctgttcagcaaagaatttattaacgcaatgaaaatgctggatgccggtcatttaaatcgcagtaaaatgttgggttcatgggccggtgccatgggacagactcagtttatgccgagttcctacttaaactatgccgccgacggcgataaagacggtacaaaagacatttggagcaacgaatatgacgtattcgcctctatcgccaattatctgcataccgtcggttgggacgatacattgccttggggaatagaagtttctctgacaacccctttaccgctttcacttgccggcacggaaaaagagaaagcgcgttcattgaacgattggcaggctcaaggcgtattaccaaagaatatgtttgatgccgacaaactaaaagctttatccaatgcggatttatggttggttcgtccggataaggaagtaggccggacatttttggtgtcaaacaattaccgtaccattttggactggaaccgttccaactactacgcattgagtgtcggaatgttcgctgatcggattaaacaaacacttggtttttaa

SEQ ID NO: 80807 - protein, 369 aa, Mannheimia succiniciproducens MBEL55E
MKIKYKFLALTACLMLAGCSSNNNKSAVNSAEDLSALPATAVYSNARTLNNFDDYVQFLKRKAAGQGVSSATLTTQNNIRYIDSAVRLDQKQAGNAARRQGLPPLPPNPNGVTNYLTKHLTQAKVDKAEDNYYDVQVPLQKASSAFGVQKEFILALWGMESSFGYYQGDYDVLSVLATLAFDGRRETLFSKEFINAMKMLDAGHLNRSKMLGSWAGAMGQTQFMPSSYLNYAADGDKDGTKDIWSNEYDVFASIANYLHTVGWDDTLPWGIEVSLTTPLPLSLAGTEKEKARSLNDWQAQGVLPKNMFDADKLKALSNADLWLVRPDKEVGRTFLVSNNYRTILDWNRSNYYALSVGMFADRIKQTLGF

SEQ ID NO: 80808 - DNA, 1044 bp, Legionella pneumophila subsp. pneumophila str. Philadelphia 1
  CDS (1)..(1044): transl_table=11
gtgctttgcaacgatacagggtacatgatgcgacaaatcatctggctaggtttcatttcactcttccttttatctttcactacctattccgacacaacttttacaaaacgtaaagacgtacaatcgtttattaacatgatggtaacgaattatcactttaatcgtaatcagttaactacagtaatgaaccaagttaaacttcaaccacaagtcatcgaatctatggaaaagccctatgaaaagaaaaactgggatgtctaccgagaactgtttcttactcagaaaagattaaaaagcggattgcaattttgggctgaaaatcaaaaaacattggaaaaaattcagagaagatatggggtgtctccggagatcattatagctattttaggagtagagacaatgtatggtgagcgtcagggtgaatacagagtcttggatactctggctacactggctttcaactaccccaaacgttctgcattctttactaaagaattaaaggagtttttcctcctgtgccgagaacagcacgtatccccaactcaatacaaagggtcttacgcaggtgccataggaaaaccccaatttatgccaagcagttatcgatattatgcagtggactttaataacaatggtcgaagagatttagtcaatgacaatggtgactctattgccagcatcgccaattatttgcataaacatggttggaacttaaatcaaggcatcgctcaaccggccaaaatctccggatggcgatacaaacaacttcgcatgaaccctaaaacagcaaattaccgatactcacaacttataagctatggagtaaaaccaattacagcgtcacaaaatcatcctcctcgtgcaggagtcattgagttagttacaaggaagggtaaagaatactggattgcctaccccaatttttttgtaattacccgctataattcgagccctcaatatgctctggcggtttacttattatcccagcaattgaagcaacattggtatactagtgccaccaaaaagcacagagcttatgtttaa

SEQ ID NO: 80809 - protein, 347 aa, Legionella pneumophila subsp. pneumophila str. Philadelphia 1
MLCNDTGYMMRQIIWLGFISLFLLSFTTYSDTTFTKRKDVQSFINMMVTNYHFNRNQLTTVMNQVKLQPQVIESMEKPYEKKNWDVYRELFLTQKRLKSGLQFWAENQKTLEKIQRRYGVSPEIIIAILGVETMYGERQGEYRVLDTLATLAFNYPKRSAFFTKELKEFFLLCREQHVSPTQYKGSYAGAIGKPQFMPSSYRYYAVDFNNNGRRDLVNDNGDSIASIANYLHKHGWNLNQGIAQPAKISGWRYKQLRMNPKTANYRYSQLISYGVKPITASQNHPPRAGVIELVTRKGKEYWIAYPNFFVITRYNSSPQYALAVYLLSQQLKQHWYTSATKKHRAYV

SEQ ID NO: 80810 - DNA, 1425 bp, Burkholderia mallei ATCC 23344
  CDS (1)..(1425): transl_table=11
atgtccgcgatatcgtctggtgcgaagttcgccgctaacttaccacatcacgccccccgccgggccggcgcgacgggcgtgtcggttatactgccccgaaatcgtccgtctcgtccgcttcgcttcgacatgatcttccaccagcctgccgcacccgcctcgctcgctttccgtcttcgcttcccgctcgccgcgctgtcgctcgccgcgacgctcttcgcgtcggccgccgtcgcgcaaacgcagcccgccgcagccgtcgtcgcgcaagagccggcgcaatcgcaatcgcaatcgcaatcgcaattgcaattgcagccgcagccgcagccgcagccgcagccgagcgtacagcaggggcaaacattcgaagaagaaatcattccgcagcgctacgcgaacaacgcgaagatcgacgcgttcatcgccgacatggtcgcgcgccacgacttcgatgcgaacgcgctgcatgcgctgttcgcgcgcgtgagctactcggcgaccgccgcgaagctcgtgatgcccgcgccgtcgccagccgtcaagaactggcgcgtctaccagtcgcgctttctcgacgcggtgcgcgtgaacgccggcgtgaaattctggcgcgcgaaccaaggcacgctgcaacgcgcgtccacggaattcggcgtgccgcccgaggtgatcgtcggcatcatcggcgtcgagacgatctacggccgctacatgggcaacttccgcacgctcgacgcgctgacgacgctcgcgttcgactatccgaacacgccgaatcgcgacgcgcggcaggcgacgttccgcaagaatctcgaagatttcctcgtctggacgcgcgacagccagctcgacccgacgggcgtgctcggctcgtacacgggcgcggtcggcatcccgcagttcctgccgagcagcatccgcgattacgcggtcgactacgacggcaatggtcacatcgatctgcgcgcgagccaggccgatgcgatcggcagcgtcgcgaactatctgaagcagcacggctgggaaaccggtcggccggtagtatggaacatcgcgcccgatacgggcagccagggcgtcgcgcaagcggcggcggacggtcgccccgagccgcactgggtgctgtcgcagttgctgcgcgcggggctcgtgctcgacgagccgtccgtgaacatcgcatcggaggcgagcacgcccgtcaccgtggtcgatttgccgacgcccggccgcgcaaccgaatacaagctcggactgcagaatttctacgtgctgacccgctacaaccgcagcttcttctatgcgctcgccgtctatcagctgggtgagcgtgtgaaggcgcagatggaagcgagcggcgcgttgacaccgtcgcccgccgacgcggcaaccggctcacccgccgcacagccgccgtccgaatga

SEQ ID NO: 80811 - protein, 474 aa, Burkholderia mallei ATCC 23344
MSAISSGAKFAANLPHHAPRRAGATGVSVILPRNRPSRPLRFDMIFHQPAAPASLAFRLRFPLAALSLAATLFASAAVAQTQPAAAVVAQEPAQSQSQSQSQLQLQPQPQPQPQPSVQQGQTFEEEIIPQRYANNAKIDAFIADMVARHDFDANALHALFARVSYSATAAKLVMPAPSPAVKNWRVYQSRFLDAVRVNAGVKFWRANQGTLQRASTEFGVPPEVIVGIIGVETIYGRYMGNFRTLDALTTLAFDYPNTPNRDARQATFRKNLEDFLVWTRDSQLDPTGVLGSYTGAVGIPQFLPSSIRDYAVDYDGNGHIDLRASQADAIGSVANYLKQHGWETGRPVVWNIAPDTGSQGVAQAAADGRPEPHWVLSQLLRAGLVLDEPSVNIASEASTPVTVVDLPTPGRATEYKLGLQNFYVLTRYNRSFFYALAVYQLGERVKAQMEASGALTPSPADAATGSPAAQPPSE

SEQ ID NO: 80812 - DNA, 1353 bp, Burkholderia pseudomallei K96243
  CDS (1)..(1353): transl_table=11
gtgtcggttatactgccccgaaatcgtccgtctcgtccgcttcgcttcgacatgatcttccaccagcctgccgcacccgcctcgctcgctttccgtcttcgcttcccgctcgccgcgctgtcgctcgccgcgacgctcttcgcgtcggccgccgtcgcgcaaacgcagcccgccgcagccgtcgtcgcgcaagagccggcgcagccgcaatcgcaatcgcaatcgcaatcgcaattgcagccgcagccgcagccgcagccgcagccgcagccgagcgtacagcaggggcaaacattcgaagaagaaatcattccgcagcgctacgcgaacaacgcgaagatcgacgcgttcatcgccgacatggtcgcgcgccacgacttcgatgcgaacgcgctgcatgcgctgttcgcgcgcgtgagctactcggcgaccgccgcgaagctcgtgatgcccgcgccgtcgccagccgtcaagaactggcgcgtctaccagtcgcgctttctcgacgcggtgcgcgtgaacgccggcgtgaaattctggcgcgcgaaccaaggcacgctgcaacgcgcgtccacggaattcggcgtgccgcccgaggtgatcgtcggcatcatcggcgtcgagacgatctacggccgctacatgggcaacttccgcacgctcgacgcgctgacgacgctcgcgttcgactatccgaacacgccgaatcgcgacgcgcggcaggcgacgtttcgcaagaatctcgaagatttcctcgtctggacgcgcgacagccagctcgacccgacgggcgtgctcggctcgtacacgggcgcggtcggcatcccgcagttcctgccgagcagcatccgcgattacgcggtcgactacgacggcaatggtcacatcgatctgcgcgcgagccaggccgatgcgatcggcagcgtcgcgaactatctgaagcagcacggctgggaaaccggtcggccggtagtatggaacatcgcgcccgatacgggcagccagggcgtcgcgcaagcggcggcggacggtcgccccgagccgcactgggtgctgtcgcagttgctgcgcgcggggctcgtgctcgacgagccgtccgtgaacatcgcatcggaggcgagcacgcccgtcaccgtggtcgatttgccgacgcccggccgcgcaaccgaatacaagctcggactgcagaatttctacgtgctgacccgctacaaccgcagcttcttctatgcgctcgccgtctatcagctgggtgagcgtgtgaaggcgcagatggaagcgagcggcgcgttgacaccgtcgcccgccgacgcggcaaccggctcacccgccgcacagccgccgtccgaatga

SEQ ID NO: 80813 - protein, 450 aa, Burkholderia pseudomallei K96243
MSVILPRNRPSRPLRFDMIFHQPAAPASLAFRLRFPLAALSLAATLFASAAVAQTQPAAAVVAQEPAQPQSQSQSQSQLQPQPQPQPQPQPSVQQGQTFEEEIIPQRYANNAKIDAFIADMVARHDFDANALHALFARVSYSATAAKLVMPAPSPAVKNWRVYQSRFLDAVRVNAGVKFWRANQGTLQRASTEFGVPPEVIVGIIGVETIYGRYMGNFRTLDALTTLAFDYPNTPNRDARQATFRKNLEDFLVWTRDSQLDPTGVLGSYTGAVGIPQFLPSSIRDYAVDYDGNGHIDLRASQADAIGSVANYLKQHGWETGRPVVWNIAPDTGSQGVAQAAADGRPEPHWVLSQLLRAGLVLDEPSVNIASEASTPVTVVDLPTPGRATEYKLGLQNFYVLTRYNRSFFYALAVYQLGERVKAQMEASGALTPSPADAATGSPAAQPPSE

SEQ ID NO: 80814 - DNA, 1122 bp, Methylococcus capsulatus str. Bath
  CDS (1)..(1122): transl_table=11
atgcgtcaccgattttcagtatcccctgcaatattcgtcggactcttcctcctgtcgggctgctcttcccatcccccggcccggcccggtgccatcgcggaccgcgcggccgtgcccgcggtcggggaggcgtcccggcccaccgcagccgaatcagacattccgctcgaaggggggtattcggcgcgaacggtcaccggggattatgccggctacccggcgctcgaccgcttcattgccaggatggcgcagcagcacgggtttccccgtgactatctgaaaggcctgttttcccaggcgcagcgcaaaacctggaccatcaactacatgcgcaaggaatccaggccggggccgcccagtccgggcggatggtcccggtaccgggcgcagttcctggacggtctgcacatcgcccggggtgtcgatttctggcgccggcatgccggcaccttgcgccaggccagcgagcgctatggtgtgccggcggagtacattctcggcatcatgggcgtggagacggtctatggggccaacctcggcagccaccgggtgctggatgccttgacgactctggcgttcgattcgccacggcgggccgattatttcaccgaggagttggagaaattcctcctgatggcgaggcaggagcggatcgatcctgcgcagccgaggggatccttcgccggtgccatgggtctggggcagttcatgcccagcagctttctgaagtgggcggtcgatttcgacggcgacggccggaaagatctctggcagcctgcggacgccatcggcagtgtggccaactatttcgccgcgcacggctggcgcagcggggagggggtcgttataccggcggtcctgacgcccggcgggcgctgcgagctcgaaacgggataccacacccgttattcggtggctgaactggcccgcagcggcatcatgccccgtggcgtcctggatgcggacatgcccgtcagtctgttgcggctgcgtgcgcaggcgggcgatgagtactggttgggcctgccgaatttctatgtgatcacccgttacaacaacagtacctactatgccatggccgtgcacgaactggcgcaggccatcagggggcggtatcactag

SEQ ID NO: 80815 - protein, 373 aa, Methylococcus capsulatus str. Bath
MRHRFSVSPAIFVGLFLLSGCSSHPPARPGAIADRAAVPAVGEASRPTAAESDIPLEGGYSARTVTGDYAGYPALDRFIARMAQQHGFPRDYLKGLFSQAQRKTWTINYMRKESRPGPPSPGGWSRYRAQFLDGLHIARGVDFWRRHAGTLRQASERYGVPAEYILGIMGVETVYGANLGSHRVLDALTTLAFDSPRRADYFTEELEKFLLMARQERIDPAQPRGSFAGAMGLGQFMPSSFLKWAVDFDGDGRKDLWQPADAIGSVANYFAAHGWRSGEGVVIPAVLTPGGRCELETGYHTRYSVAELARSGIMPRGVLDADMPVSLLRLRAQAGDEYWLGLPNFYVITRYNNSTYYAMAVHELAQAIRGRYH

SEQ ID NO: 80816 - DNA, 1014 bp, Azoarcus sp. EbN1
  CDS (1)..(1014): transl_table=11
atgaaacaacgctttatcaccccgctcctcgcgctcgcgctcctctcgggcacagcgctcgccgatgcgtcctatgtccggcgcgaagaggtcagaacgttcgtccgcacgatggaggaaaaacacggcttcgacggcggggaagtgctcgcggcgctcgaccgcgcccggcacgaccccgacgttatccggctgatcagtccgtccgggtcgtccggcctccgctcgtggcaacgctaccgcgcccgctttctcgactcggcacgcatcggtagcggcattgcattctggcaggagcatgcggcgaccttgcaggctgcgtacgaacgctacggcgtacccccggaaatcgtcgtcgcgatcatcggcgtggaaacccactatggccgcaatacgggaaatttcgagacgctgtcggcactcgccacgctggcgttcgactatcccccacgggcgccgctgttcctgcgcgaactcgaaaacctgttcctgctggcacgcgagcagcaacgcgatcttttcagctactacggttcgtatgccggcgcgatcggctacccgcagttcctgcccagcagcatccgcagctacggcgttgatttcgaccacagcggcaccatcgatttcgatctggaaccgaccgatgcgatcggcagtgtcgcacgctacctcgccgagcatggctgggtgcgtgatgaactcgtagcggagccggcgcgcatcgcgtccgaagccgatctgcaggcgctgatcgacgcaggcatcaaacccatgctttcgccggaacagctggctcaggccggcgtgacgagcctcgatggcacgttacgcgcggctccggcgaccctcgtcgaccttgcgacgcccgacactggaaccgaatactggctcggataccagaacttctacacgatcacgcgctacaacaagagcagcttctacgcgatggccgtgttcgaactgtcacaggcattgcgtgagcagcaaaaggctgaaaccgcccgcgtggaatga

SEQ ID NO: 80817 - protein, 337 aa, Azoarcus sp. EbN1
MKQRFITPLLALALLSGTALADASYVRREEVRTFVRTMEEKHGFDGGEVLAALDRARHDPDVIRLISPSGSSGLRSWQRYRARFLDSARIGSGIAFWQEHAATLQAAYERYGVPPEIVVAIIGVETHYGRNTGNFETLSALATLAFDYPPRAPLFLRELENLFLLAREQQRDLFSYYGSYAGAIGYPQFLPSSIRSYGVDFDHSGTIDFDLEPTDAIGSVARYLAEHGWVRDELVAEPARIASEADLQALIDAGIKPMLSPEQLAQAGVTSLDGTLRAAPATLVDLATPDTGTEYWLGYQNFYTITRYNKSSFYAMAVFELSQALREQQKAETARVE

SEQ ID NO: 80818 - DNA, 1092 bp, Neisseria gonorrhoeae FA 1090
  CDS (1)..(1092): transl_table=11
atggaaaagagaaaaatactgccgctggcaatttgtttggcggctttgtctgcctgtacggcgatggaggcccgcacaccccgggcaaatgaagcccaagccccccgcgcggatgaaatgaaaaaagaaagccgccccgcgtttgacgcggcagccgtaccggtatccgacagcgggtttgccgccaatgcaaatgtccgccgttttgtggacgatgaagtcgggaaaggggatttttcccaggcggaatggcaggatttttttgacaaagcggcttacaaggcggacatcgtcaagattatgcaccgaccctccacatcgcgtccgtggtatgtgttccgcacgggaaattcgggcagggcgaaatttcacggcgcgcgcaggttttatgcggaaaaccgcgcggttatcgatgatgtggcgcaaaaatacggcgtgcctgccgagcttatcgtggcgattatcgggattgaaacgaattacggcaaaaatacgggcagtttccgtgtggcggacgcattggcgactttaggctttgattatccccgccgcgccgggtttttccaaaaagaattggtcgagcttttaaagctggcaaaagaagaaggcggtgatgttttcgcctttaagggcagctatgcgggtgcaatgggtatgccgcaatttatgccttcgagctaccggaaatgggcggtggattatgacggggacggacatcgggatatatggggcaacgtcggtgatgtcgcggcatcggttgccaattatatgaagcagcacggttggcgcacgggcggtaaaatgttggtgtcggcgacgttggcgccgggtgcggatgttcaggcaatcattggcgaaaaaaccgccctgacgcggacggtggcggatttgaaggcgtacggcatcatccccggggaaacgctcgcagatgatgaaaaggcggttttgttcaaactggaaaccgcacccggcgtgtttgaatattatttgggcttgaacaatttttatacggtatggcagtacaaccacagccggatgtatgtaacggcggtcagggacattgccaattcgctcggcggcccgggattgtaa

SEQ ID NO: 80819 - protein, 363 aa, Neisseria gonorrhoeae FA 1090
MEKRKILPLAICLAALSACTAMEARTPRANEAQAPRADEMKKESRPAFDAAAVPVSDSGFAANANVRRFVDDEVGKGDFSQAEWQDFFDKAAYKADIVKIMHRPSTSRPWYVFRTGNSGRAKFHGARRFYAENRAVIDDVAQKYGVPAELIVAIIGIETNYGKNTGSFRVADALATLGFDYPRRAGFFQKELVELLKLAKEEGGDVFAFKGSYAGAMGMPQFMPSSYRKWAVDYDGDGHRDIWGNVGDVAASVANYMKQHGWRTGGKMLVSATLAPGADVQAIIGEKTALTRTVADLKAYGIIPGETLADDEKAVLFKLETAPGVFEYYLGLNNFYTVWQYNHSRMYVTAVRDIANSLGGPGL

SEQ ID NO: 80820 - DNA, 1008 bp, Pseudomonas syringae pv. syringae B728a
  CDS (1)..(1008): transl_table=11
atgcaagcaatgcgtaactgggctcgatatgctccggtggtcggtctggtgggcatccttggctcggtgcaagaggcgctggcgggcgactatgatgggtcgccccaggtggcggaattcgtcggtgagctgacccgcgatcatggctttgccggtgagcagttgatgagcctgttccgcgaggtcgagcgcaagcaggccattctcgatgccatttcccgcccggccgaacgggtcaagcagtggaaagagtatcggccgatgttcatcaccgatacgcgcatcgctcgcggtgtcgacttctggcgtcagcatgaggccgccttggcgcgtgccgagcaggaatatggcgtgccggcgcagatcatcgtgtcgatcattggtgtagaaaccttcttcggccgcaataccggtaattaccgggtgatcgatgccctgtcgacgcttggcttcgattacccgccccgcgcccagttcttccgcaaggaactgcgcgagtttctgctgctggcgcgcgagcaacaggtcgatcccctgaccctcaaggggtcgtacgccggggcgatggggctgccgcagttcatgccgagcagtttccgcgcctacgcggtggatttcgacggtgacggtcacatcaatatctggaccgacccggacgatgccatcggcagtgtcgccagctatttcaaacgccatggctgggtggccggtcagccggtggtcagtcgcgccacggcccgcggcgaccgggttgacgagggcttgagtcctgcgcttgatccggtaatgtcggtcggggagttgcgacagctgggctgggcgagtcatgatgcgctgcgcgacgatatgccggtgacggcatttcgtctggaaggcgacaatggtcctgaatactggctgggtttgaacaatttttatgcaatcacccgttataaccgcagtgtgatgtacgccatggccgtatatcagctgtctgaatcgttggttcaagctcgaggcgtcaagtaa

SEQ ID NO: 80821 - protein, 335 aa, Pseudomonas syringae pv. syringae B728a
MQAMRNWARYAPVVGLVGILGSVQEALAGDYDGSPQVAEFVGELTRDHGFAGEQLMSLFREVERKQAILDAISRPAERVKQWKEYRPMFITDTRIARGVDFWRQHEAALARAEQEYGVPAQIIVSIIGVETFFGRNTGNYRVIDALSTLGFDYPPRAQFFRKELREFLLLAREQQVDPLTLKGSYAGAMGLPQFMPSSFRAYAVDFDGDGHINIWTDPDDAIGSVASYFKRHGWVAGQPVVSRATARGDRVDEGLSPALDPVMSVGELRQLGWASHDALRDDMPVTAFRLEGDNGPEYWLGLNNFYAITRYNRSVMYAMAVYQLSESLVQARGVK

SEQ ID NO: 80822 - DNA, 1011 bp, Pseudomonas fluorescens Pf-5
  CDS (1)..(1011): transl_table=11
atgcaagcaatgcgtggctgggccgctcggcaggcgccgtgggtcggtctggtaagcatccttggtgcagcgcagcccgcgttcgccggtgattacgaaggttcgccccaggtggccgaattcgtgggcgaaatgactcgggactatggttttgccggggaacagctgatggctgtgttccgcgaggccgagcgcaagcagtcgattcttgacgccatttcgcggcccgccgagcgggtcaagcagtggaaggaataccggccgatgttcatcaccgacgcgcgcattgcccgcggtgtggatttctggcgccagcatgaagcggtgctggcccgcgccgagcaggaatatggcgtaccggcccaggtaattgtctcgatcatcggcgttgaaacctttttcggtcgaaataccgggaattaccgggtgatcgacgcattgtccaccctggggttcgattatccgccccgtgccgagttcttccgcaaggaactgcgcgagttcctgttgctggcgcgtgaggagcaggtcgatccattgagcctcaagggttcctacgccggagccatgggcctaccgcagttcatgcccagcagctttcgggcttatgcggtggacttcgacggtgacggccacatcaatatctggaccaaccccgatgatgccatcggcagtgtggccagctatttcaaacgccacggctgggtggccggcgaaccggtggtcagtcgcgccgatgtgcgtggcgatcgggtagatgaaggcttgaccaccgggatcgaaccgacgaaaaccgtcggggagttgcgggccctgggctggtcgagtcatgatgcgctgcgcgatgatatgccggtcaccgctttccgtctggaaggtgacaatggcccggaatactggatgggcctgaagaatttttacgcgatcactcgctataaccgcagcgtgatgtacgccatggccgtacatcagttgtctgaacagctggtccaagcacggggcgtcaagtaa

SEQ ID NO: 80823 - protein, 336 aa, Pseudomonas fluorescens Pf-5
MQAMRGWAARQAPWVGLVSILGAAQPAFAGDYEGSPQVAEFVGEMTRDYGFAGEQLMAVFREAERKQSILDAISRPAERVKQWKEYRPMFITDARIARGVDFWRQHEAVLARAEQEYGVPAQVIVSIIGVETFFGRNTGNYRVIDALSTLGFDYPPRAEFFRKELREFLLLAREEQVDPLSLKGSYAGAMGLPQFMPSSFRAYAVDFDGDGHINIWTNPDDAIGSVASYFKRHGWVAGEPVVSRADVRGDRVDEGLTTGIEPTKTVGELRALGWSSHDALRDDMPVTAFRLEGDNGPEYWMGLKNFYAITRYNRSVMYAMAVHQLSEQLVQARGVK

SEQ ID NO: 80824 - DNA, 1008 bp, Pseudomonas syringae pv. phaseolicola 1448A
  CDS (1)..(1008): transl_table=11
atgcaagcaatgcgtaactgggctcgatatgctccggtggtcggtctggtaggcatccttggatcggtgcaagaggcgctggccggccactatgagggttcgccccaggtagcggaattcgttggtgagctgacccgcgatcacggttttgccggtgagcagttgatgagcctgtttcgtgaggtcgagcgcaagcaggccattctcgatgccatttcccgcccggccgaacgggtcaagcagtggaaagagtatcggccgatgttcatcaccgatacgcgcatcgcccgcggtgtcgatttctggcgtcagcacgaggccgcattggcccgcgccgagcaggaatatggtgtaccggcgcagatcatcgtttcgatcattggcgtggaaacctttttcggccgcaacaccggcaattaccgggtgatcgatgcgttgtcgacgctcggtttcgattacccgccacgcgcacagttcttccgcaaggaattgcgtgagtttctgctgctggctcgcgaacaacaggttgaccccttgaccctcaaaggctcgtacgccggggcaatgggcctgccgcagttcatgccgagcagttttcgcgcttatgcagtggatttcgacggcgacggccatatcaacatctggaccgacccggacgatgccatcggcagcgttgccagttatttcaagcgtcatggctgggtagccggtcagccggtagtcagccgcgcgaccgcacgtggcgaccgggttgacgaagggttgagccctgcgcttgatccggtaatgtcggtcggggagttgcgacagctgggctgggcgagtcatgatgcgctgcgcgacgatatgccggtaacggcgttccgtcttgaaggcgacaatggtcctgaatactggctgggtttgaacaatttttatgctatcacccgttataaccgcagtgtgatgtacgccatggccgtgtatcagctgtctgaatcgttggttcaagctcgaggcgtcaagtaa

SEQ ID NO: 80825 - protein, 335 aa, Pseudomonas syringae pv. phaseolicola 1448A
MQAMRNWARYAPVVGLVGILGSVQEALAGHYEGSPQVAEFVGELTRDHGFAGEQLMSLFREVERKQAILDAISRPAERVKQWKEYRPMFITDTRIARGVDFWRQHEAALARAEQEYGVPAQIIVSIIGVETFFGRNTGNYRVIDALSTLGFDYPPRAQFFRKELREFLLLAREQQVDPLTLKGSYAGAMGLPQFMPSSFRAYAVDFDGDGHINIWTDPDDAIGSVASYFKRHGWVAGQPVVSRATARGDRVDEGLSPALDPVMSVGELRQLGWASHDALRDDMPVTAFRLEGDNGPEYWLGLNNFYAITRYNRSVMYAMAVYQLSESLVQARGVK

SEQ ID NO: 80826 - DNA, 1044 bp, Dechloromonas aromatica RCB
  CDS (1)..(1044): transl_table=11
atgatgaatctgaaaaacaccctggccaccttattccttgccacactgaccaccctggccaatgcggcgccgaatgccccgacctttgccgacgacccggccaccatcgaatttgcccgcgatctggagcaacgccacggcttcaatgccgacgaaataatcagccagttcgctcaggcccgccccaacgccaaggtactacagttgatcaagccacccacctcgccactacagcgctcgtgggaacgttaccggccgcggttcctgaatgatcgacggatcgacggcggggtccgcttctggcaggagaacagcgggcaactggccaaagcgcaggcactctatggtgtgccggctgagatcatcgtcgccatcatcggcgtcgaaactgaatatgggcgcaatatgggcggtttccgtgtcttcgaagccttggccacgctggccttcaactacccgccacgggctgagtttttccgtactgaactggagcaattcctgctattagccagggaaaacagtctcgacccactcgccgtcaagggatcctttgccggcgccatcggcattccccaattcatgccgggcagccagcgtcgctacgccgtagattttgatggcgaccagcgtatagatctcggcaacagcgtggacgacgctatcggcagcgttgggcacttccttgagcaacatggctggcaggcgggccaaccaattgccgtcccggcaataaccacgggcactccggatgccgcgctgatccaggcaggcgttcggccaagcctgaaagtggctgaactggccgagaaaggggttcgtgccgaaatcgatcccgaggtaagcgccgcattgatcgacctcgtttcaccggggcgcgaaacggaatactggctggggtttgataacttttacgtgatcacccgctacaaccgctccagcttctacgccatgtcggttttccagctggcagaagaaatccgcagccggatgtgcgccagccaaccggctacagcaacgaatcgcgagaaatattgccgcgcttga

SEQ ID NO: 80827 - protein, 347 aa, Dechloromonas aromatica RCB
MMNLKNTLATLFLATLTTLANAAPNAPTFADDPATIEFARDLEQRHGFNADEIISQFAQARPNAKVLQLIKPPTSPLQRSWERYRPRFLNDRRIDGGVRFWQENSGQLAKAQALYGVPAEIIVAIIGVETEYGRNMGGFRVFEALATLAFNYPPRAEFFRTELEQFLLLARENSLDPLAVKGSFAGAIGIPQFMPGSQRRYAVDFDGDQRIDLGNSVDDAIGSVGHFLEQHGWQAGQPIAVPAITTGTPDAALIQAGVRPSLKVAELAEKGVRAEIDPEVSAALIDLVSPGRETEYWLGFDNFYVITRYNRSSFYAMSVFQLAEEIRSRMCASQPATATNREKYCRA

SEQ ID NO: 80828 - DNA, 1107 bp, Ralstonia eutropha JMP134
  CDS (1)..(1107): transl_table=11
atgaccgacacccagcgttcattgcgccgcccgttgctgggcgctgcgttatccgctgccgcactgggactctgcggcctctccccaagcctcctcgccgccggcaagcgccgcgtgagcgtgcgggaagaagaaatcgagcccgggcgctatcgcgacaatgcacagacccgcgcctttatcgaagacatggtgactcgccacggcttcgaccgcggcacgctggaaggctggttcgggcaggcggtctattccgccaccgtggtgcggctggtcatgccgccaaccacgccagggcgcaaaagctggcgtgcctaccgttcgcgctttatcgaaccgatccgcatcaacgcgggcatgcgcttctggcaggaaaaccgcgacacgctgcggcgcgccgaagccgagttcggcgtgccggcttcggtcatcgtcggcatcatcggcgtggaaaccatctacgggcgcgacatgggcacgttccgcgtcatcgactcgctctcgacgctggctttcgactatccgtccacgcctaaccgcgacgcccgggcgacgctgttccgcaaccagctggcggattacctgatctggtgccgcgacacgcgtaccgacgtcttttcggtgctgggctcctttgccggtgcgatcggcatcccgcagttcatgccgaccagcctgcgcgagtatgcgatcgactatgacggcaacggccgcatcgatctgcgcaacagccccaccgacgccatcggcagcgtcggccgctttctgcagttgcacggctgggaagcaaaccggcccgtggtctggcgcctggccaacgatgaaggcagccgcggcattgcggcggcggcggccgacggcgagccgtggccgacacggacgctgaaccagcttacccgcgcgggattgcgtctcgatgagcccgtcgacctcgcgcgcgaaggcgaaaccggcgtcctggtggtcgacctgcccacccccgatcagcccaccgagtacatgatcggcctgcgcaacttctatgtgctgacccgctacaaccgcagcttcttctacgcgctctcggtgtaccaactgggcgaagccgtcaaggctgcaatgggctga

SEQ ID NO: 80829 - protein, 368 aa, Ralstonia eutropha JMP134
MTDTQRSLRRPLLGAALSAAALGLCGLSPSLLAAGKRRVSVREEEIEPGRYRDNAQTRAFIEDMVTRHGFDRGTLEGWFGQAVYSATVVRLVMPPTTPGRKSWRAYRSRFIEPIRINAGMRFWQENRDTLRRAEAEFGVPASVIVGIIGVETIYGRDMGTFRVIDSLSTLAFDYPSTPNRDARATLFRNQLADYLIWCRDTRTDVFSVLGSFAGAIGIPQFMPTSLREYAIDYDGNGRIDLRNSPTDAIGSVGRFLQLHGWEANRPVVWRLANDEGSRGIAAAAADGEPWPTRTLNQLTRAGLRLDEPVDLAREGETGVLVVDLPTPDQPTEYMIGLRNFYVLTRYNRSFFYALSVYQLGEAVKAAMG

SEQ ID NO: 80830 - DNA, 1323 bp, Pseudomonas fluorescens PfO-1
  CDS (1)..(1323): transl_table=11
atgcccctcagtctttcccgtcgttggcccttccgccaactgatcgctgcctccagcttcgtactgctcgtcgcctgcgcggaaaaacccaccgccgccgacgctcaaccgcttcagaccgcccccgttgccacagccccagcgatcctcccgccggtagtgccgtccggtgacaacctcgacctgcaaccgacccagacctttgccgaatggcaggccggtttccgcaaggaagctctggccgccggcatccgtgccgacctgtttgaccgcgcatttgccaatgtcagcttcgatgccagcgtgattcgcgccgaccgcagccagccggaattcgcccggcccgtctgggaatacctggacggtgccctttcgcccttgcgcgtgcgcaaaggccaggccctgatcagccagtacgccgatatcctgcaaagcatcgagcagcgctatggtgtcgatcgccaggcgctggtgtcggtgtgggggatggaaagcaacttcggccagttccagggcagcaagtcggtgatcaattcgctggccactctggcctatgaaggccgccgcccgggctttgcccatgcgcagttgattgcggcgttgcagatcctgcaacagggcgacatcacgccggaaaaaatgctcggttcctgggctggcgccatgggccagacccagttcatcccgaccacctacaacacccacgccgtggacttcgacggtgacggtcgccgcgacatctggggcagcccggctgacgctctggcatccaccgcgcattacctgcaaagctccggctggcagcgtggccagccgtggggcttcgaagtccagctaccaagcggtttcaactacaccctggccgacggcgcgattcgtaaaagcgttgctgaatggcggcaactgggcgtgatcctgccgaacggaggccaggttccagccggttccgagcaactgtccgctgccctgctgctgccggccggctatcgcggaccggcgttcctgatcctcgacaacttccgggcgatcctcaagtacaacaactcgtcgtcctacgcactggccgtcagcctgttgtccgagcgcttcaacggtgccggcctgatcaatggcacctggccaaaggatgacctgccgctgagccgcactgagcggatcgaactgcaaaacctgctcactgcgcgcaactacgacgccggtgcggcagacgggatcatcggcgccaatacgcgcaaggcgatccgcagtgcgcagcagtcattcggctggccggcggacggttatccgacgcacaaactgctggaaagcctgcgtaaccagtaa

SEQ ID NO: 80831 - protein, 440 aa, Pseudomonas fluorescens PfO-1
MPLSLSRRWPFRQLIAASSFVLLVACAEKPTAADAQPLQTAPVATAPAILPPVVPSGDNLDLQPTQTFAEWQAGFRKEALAAGIRADLFDRAFANVSFDASVIRADRSQPEFARPVWEYLDGALSPLRVRKGQALISQYADILQSIEQRYGVDRQALVSVWGMESNFGQFQGSKSVINSLATLAYEGRRPGFAHAQLIAALQILQQGDITPEKMLGSWAGAMGQTQFIPTTYNTHAVDFDGDGRRDIWGSPADALASTAHYLQSSGWQRGQPWGFEVQLPSGFNYTLADGAIRKSVAEWRQLGVILPNGGQVPAGSEQLSAALLLPAGYRGPAFLILDNFRAILKYNNSSSYALAVSLLSERFNGAGLINGTWPKDDLPLSRTERIELQNLLTARNYDAGAADGIIGANTRKAIRSAQQSFGWPADGYPTHKLLESLRNQ

SEQ ID NO: 80832 - DNA, 1011 bp, Pseudomonas fluorescens PfO-1
  CDS (1)..(1011): transl_table=11
atgcaagtaatgcgtgactgggcgacacgatacgcaccgtggctcggcctggtaggcatccttggcagcgtgcaggaagcgttggccggcgattacgaaggctcgccccaggtggccgaattcgtcggtgaaatgacccgcgactacggtttcgccggcgaacagctgatggccgtgttccgcgaggcccagcgcaaacaggcgattctcgacgccatttccaaacccgccgaacgggtcaagcagtggaaagaataccggccgatgttcatcaccgacgcgcgcatcgcccgcggtgtggatttctggcgtcagcacgaggccacactggcccgcgccgagcaggaatacggcgttccggcccaagtgatcgtgtcgatcatcggcgttgagacctttttcggacgtaataccggtaattaccgggtgatcgatgccttgtccacgctgggtttcgactatcctcctcgtgccgaatttttccgcaaggagctgcgtgagttcctgctgctggcgcgcgaggagcaggtcgacccgctgaccctcaagggttcctacgccggggcaatgggtttgccacagttcatgccgagcagtttccgcgcctacgcggtggatttcgacggtgatggccacatcaacatctggaacaacccggatgatgcgatcggcagcgttgccagctatttcaaacgtcacggctgggtcgccggcgagccggtggtcagtcgcgcggatgtacgcggtgagcaggtggatgaaggcctgaccaccggcatcgagccgacgaaaaccgtcggggagttgcgagcgctgggctggtcgagtcatgatgcgctgcgcgatgacatgccggtcaccgcattccgcctggaaggcgacaatggcccggaatactggatgggcctgaagaatttctacgcgatcacgcgttataaccgcagcgtgatgtacgccatggccgtacatcaactgtctgaacagctggtacaagcacggggcgtcaagtaa

SEQ ID NO: 80833 - protein, 336 aa, Pseudomonas fluorescens PfO-1
MQVMRDWATRYAPWLGLVGILGSVQEALAGDYEGSPQVAEFVGEMTRDYGFAGEQLMAVFREAQRKQAILDAISKPAERVKQWKEYRPMFITDARIARGVDFWRQHEATLARAEQEYGVPAQVIVSIIGVETFFGRNTGNYRVIDALSTLGFDYPPRAEFFRKELREFLLLAREEQVDPLTLKGSYAGAMGLPQFMPSSFRAYAVDFDGDGHINIWNNPDDAIGSVASYFKRHGWVAGEPVVSRADVRGEQVDEGLTTGIEPTKTVGELRALGWSSHDALRDDMPVTAFRLEGDNGPEYWMGLKNFYAITRYNRSVMYAMAVHQLSEQLVQARGVK

SEQ ID NO: 80834 - DNA, 1218 bp, Burkholderia sp. 383
  CDS (1)..(1218): transl_table=11
atgaattccagcaagcctgccgcccttctctccgcgctgttccgtgttcgcgtgccgctcgttgcggccgcggtggtcgcggccctcggcaccgcgcctgccggcgcgcagacgcaacccgcgaagtccgcgggcaagctcgtcgcacaggcccagccgcagcagccgacgccgcaaggccagaccttcgaagaggaaattgttccgcagcgttacgcgaacaacgcgaaggtcgacgcgttcatcgacgagatggtgagccgcaacggcttcgactccaccagcctgcatgcgctgttctcgcgcatcagctattcggcgacggccgtcaagctcgtgaagccggctgcgtcgccgacggtcaagaactggcgcgtctatcgctcgcgcttcatcgaaccgatccgtatcaacgcgggcgtgaaattctggaaggcgaaccaggccacgctgcagcgcgcatccgaacagttcggcgtaccgcccgaagtgatcgtcggcatcatcggcgtcgagacgatctacggccgctacatgggcaatttccgcgtgctcgacgcgctgacgacgctctcgttcgactatccggacacgccgaatcgcgacagccgccaggcgacgttccgcaagaacctcgaggacttcctggtctggacgcgcgacaaccagctcgacccgaccaccgtgctcggctcgtatacgggcgcgatcgggattccgcagttcctgccgagcagcatccgcgaatatgcggtcgacttcgacggcacgggccatgtcgacctgcgcagcagtcctgtcgatgcgatcgggagcgtcgcgaactacctgaagcagcacggctgggaaaccgaccgcccggtggtctggcagatcacgcccgatacgggcagcctggggatcgcccaggccgccgccgacggccagcccgaaccgcactgggcgctgtcgcaactgctgcgcgcgggcatgacgctgaacgagccggcggtcaacatcaccactgaagccggcacgcccgtgacggtggtcgacctgccgtcgccgggacgtgcgaccgaatacatgctcggtctcaagaatttctatgtgctgactcgctacaaccgcagcttcttctacgcgctcaccgtgtaccagcttggcgaggccgtgaaggcacagatggaagcgagcggcgcactccagccggccactgccgacaccgagtcgcagtaa

SEQ ID NO: 80835 - protein, 405 aa, Burkholderia sp. 383
MNSSKPAALLSALFRVRVPLVAAAVVAALGTAPAGAQTQPAKSAGKLVAQAQPQQPTPQGQTFEEEIVPQRYANNAKVDAFIDEMVSRNGFDSTSLHALFSRISYSATAVKLVKPAASPTVKNWRVYRSRFIEPIRINAGVKFWKANQATLQRASEQFGVPPEVIVGIIGVETIYGRYMGNFRVLDALTTLSFDYPDTPNRDSRQATFRKNLEDFLVWTRDNQLDPTTVLGSYTGAIGIPQFLPSSIREYAVDFDGTGHVDLRSSPVDAIGSVANYLKQHGWETDRPVVWQITPDTGSLGIAQAAADGQPEPHWALSQLLRAGMTLNEPAVNITTEAGTPVTVVDLPSPGRATEYMLGLKNFYVLTRYNRSFFYALTVYQLGEAVKAQMEASGALQPATADTESQ

SEQ ID NO: 80836 - DNA, 1371 bp, Burkholderia thailandensis E264
  CDS (1)..(1371): transl_table=11
atgtccgcgatatcgtctggtgcgaagttcgccgctaacttaccacatcgcgccccgcgccgggccggtgcgacgggcgtgtcggttatactgacccgaaatcatccgcctcgtccgcttcgcctcgacatgaccttcaaccagcctgccgcacccgtctcgctcgctttccgtcttcgcttcccgctcgccgcgctgtcgctcgccgcgacgctcttcgcgtcagccgccgtcgcgcaaacgcagcccgccgcgaccatcgtcgcgcaagggcagccgcagccgagcgtgccgcaagggcaaacgttcgaagaggaaatcgttccgcagcgctacgcgaacaatgcgaagatcgacgcgttcatcgccgacatggtcgcgcgccacggcttcgacgcaaacgcgctgcatgcgctgttcgcgcgcgtgagctactcggcgaccgccgcgaagctcgtgatgcccgcgccgtcgcccgccgtcaagaattggcgcgtctaccagtcgcgctttctcgacgcggtgcgcgtgaacgccggcgtgaagttctggcgcgcgaaccagggcacgctgcagcgtgcgtccacggagttcggcgtgccgcccgaggtgatcgtcggcatcatcggcgtcgagacgatctacggccgctacatgggcaacttccgcacgctcgatgcgctgacgacgctcgccttcgactacccgaacacgccgaatcgcgacgcgcggcaggcgacgttccgcaagaatctcgaagactttctcgtctggacgcgcgacagccagctcgacccgacgagcgtgctcggctcgtacacgggcgcggtcggcattccgcagttcctgccgagcagcatccgcgattacgcggtcgattacgacggcaatggccacatcgatctgcgcgcgagcgaggccgacgcgatcggcagcgtcgcgaactacctgaagcagcacggctgggaaaccagccggcctgtggtatggaacatcgcgcccgacacgggcagccagggcgtcgcgcaagcggcggccgacggccggcccgagccgcactgggcgctttcacagttgctgcgcgcgggcctcgtgctcgacgaggcgtccgtcaacatcgcctcggaggcgagcacgcccgtcaccgtgatcgatctgccgacgcccggccgcgcaaccgaatacaagctcggactgcagaacttctatgtgctgacccgctacaaccgcagcttcttctatgcgcttgcggtctaccaactgggcgagcgcgtgaaggcgcaaatggaggcaagcggcgagctgatgtcggcgcccgccgacgccgccgctgcggcacccgcgcccgccgcgcagccgccgtccgaatga

SEQ ID NO: 80837 - protein, 456 aa, Burkholderia thailandensis E264
MSAISSGAKFAANLPHRAPRRAGATGVSVILTRNHPPRPLRLDMTFNQPAAPVSLAFRLRFPLAALSLAATLFASAAVAQTQPAATIVAQGQPQPSVPQGQTFEEEIVPQRYANNAKIDAFIADMVARHGFDANALHALFARVSYSATAAKLVMPAPSPAVKNWRVYQSRFLDAVRVNAGVKFWRANQGTLQRASTEFGVPPEVIVGIIGVETIYGRYMGNFRTLDALTTLAFDYPNTPNRDARQATFRKNLEDFLVWTRDSQLDPTSVLGSYTGAVGIPQFLPSSIRDYAVDYDGNGHIDLRASEADAIGSVANYLKQHGWETSRPVVWNIAPDTGSQGVAQAAADGRPEPHWALSQLLRAGLVLDEASVNIASEASTPVTVIDLPTPGRATEYKLGLQNFYVLTRYNRSFFYALAVYQLGERVKAQMEASGELMSAPADAAAAAPAPAAQPPSE

SEQ ID NO: 80838 - DNA, 1026 bp, Saccharophagus degradans 2-40
  CDS (1)..(1026): transl_table=11
atgttttcgactttaaaaaaagtattctccactaccgctttagcggcagtgattactgcaagcccgctcgcgctagcagattattccgagcacccagaagctaaagcatttattgccaaaatggtaaatgaatacggcttgagcgaaaaagaagtggtgcgcattttaaaagatgccaacaagcagcaatctattttggatgctattgcgcgcccagcggaaaaaaccaaaccttggtttgagtaccgcaatatatttttgggtgaatctcgaataactcaaggcgtagagttttgggccgaaaacgccgatacccttgccaaagccagtaaagagtttggtgtgcccgagcaaattattgtggctattattggtgttgaaacacgctacgggcgccacgctggtagttatcgtgtaatagacgctcttactaccttggggtttgattacccaccgcggtccaccttttttgccaaagagctcgaaaacttcttattgttgaccaccgagcaaaaacaaaacccgctagcgctaaaaggctcttacgcgggggcaatgggctacggccagtttatgccaagcagctatcgcgcttacgcagtagattttgatggcgataaaaaagccgatatttggaacaaccccaaagacgccattggcagcgtggccaactactttcgcgcccacaaatggcaaaccggcgagccggttatggttagggcgcgcattgctgagggctacgacgagtctatattagattcgcgctcacggccgtcgcttacagcaaccgaagtggccgcaaaaggctttacgcctgtcgatgtagaaatacctggcgataccaaggtgatgcccattgcttacgacggcgaaaagggcaaagaatattggctgggttacgataacttttacgttattactcgctacaatcgcagccatatgtacgcgcgcgcagtgtgggagctgagtgaagagattttatatcgccataacagcccagcgcccgcctcggtggccacaccttaa

SEQ ID NO: 80839 - protein, 341 aa, Saccharophagus degradans 2-40
MFSTLKKVFSTTALAAVITASPLALADYSEHPEAKAFIAKMVNEYGLSEKEVVRILKDANKQQSILDAIARPAEKTKPWFEYRNIFLGESRITQGVEFWAENADTLAKASKEFGVPEQIIVAIIGVETRYGRHAGSYRVIDALTTLGFDYPPRSTFFAKELENFLLLTTEQKQNPLALKGSYAGAMGYGQFMPSSYRAYAVDFDGDKKADIWNNPKDAIGSVANYFRAHKWQTGEPVMVRARIAEGYDESILDSRSRPSLTATEVAAKGFTPVDVEIPGDTKVMPIAYDGEKGKEYWLGYDNFYVITRYNRSHMYARAVWELSEEILYRHNSPAPASVATP

SEQ ID NO: 80840 - DNA, 1254 bp, Methylobacillus flagellatus KT
  CDS (1)..(1254): transl_table=11
ttgttgaaattgcgccgttcactagcttttatattggtttgcagcctgttttacagcgcgctgtcgcatgctgacgggcaaagtttcgacgaatggatgcaagacttcaaccgtgatgccctgtcgcaggggatttccgaaacgactttgcaggcggccttggctgatgccgagccgatcgcgcgcgtggtcgaactggaccaggcacagcctgaattcgtgcagaccttcctcaattacctcaatcggcgcgtcacccccaagcagatcgcgcgcgggcaggccttgctgcaggaacaggagcatctgctgcggtctgtggagcagcagtacggcgtgcctgccgccatactgcttgcattctgggggctggaaaccaattacggacagacgctgggcggtttttccacgccccaggcactggcaacgctggcttatgaagggcgccgtcatgcgttcttccgcagccaactgcttgacgccttgcgcatcatcgatgcaggccatatcgaggctggcaacatggtcgggtcatgggctggcgcgatcgggcatatgcagttcatgccctcgaccttcctggcctatgccgaagatggcgatggggacggcagaatcaatgtctggcaatccattcccgatgccatggtttccgccgggcgttatctgcattcgataggctggaggcgtggtgagccagttgccatcgaggtcacgctccctgatgattttgcctggcagtatgccgccctcaaccaaaagcgcagcgtggaacaatggcaggagcagggcgtacaggcggcggaccagcaggcactgcccattggcctcaatgcggcgattgtcttgccgcaaggctggcgcggccctgctttcatggtgttcgacaatttcagcgtggtgatgcaatggaatcgttccaccagctatgcgttgacggtggcgcatcttgccagccgcctgcagggtgggcctgccttgattggcggtataggtgccgagcaggaggcggtgagcattgatgccgtcaagcgcctgcagcagcagttgacggaactgggtttcgataccgggggtagcgatggcttgcctggcccccggacgcaggcagccattaggggataccagttcgcacatgccttgccggcggatggctacgcatcacctagtctgctgcagcatgtggcaactacgcttgccagccaggcagaggacacagaattgatcccgggctttcctggcacccagccttga

SEQ ID NO: 80841 - protein, 417 aa, Methylobacillus flagellatus KT
MLKLRRSLAFILVCSLFYSALSHADGQSFDEWMQDFNRDALSQGISETTLQAALADAEPIARVVELDQAQPEFVQTFLNYLNRRVTPKQIARGQALLQEQEHLLRSVEQQYGVPAAILLAFWGLETNYGQTLGGFSTPQALATLAYEGRRHAFFRSQLLDALRIIDAGHIEAGNMVGSWAGAIGHMQFMPSTFLAYAEDGDGDGRINVWQSIPDAMVSAGRYLHSIGWRRGEPVAIEVTLPDDFAWQYAALNQKRSVEQWQEQGVQAADQQALPIGLNAAIVLPQGWRGPAFMVFDNFSVVMQWNRSTSYALTVAHLASRLQGGPALIGGIGAEQEAVSIDAVKRLQQQLTELGFDTGGSDGLPGPRTQAAIRGYQFAHALPADGYASPSLLQHVATTLASQAEDTELIPGFPGTQP

SEQ ID NO: 80842 - DNA, 1230 bp, Burkholderia xenovorans LB400
  CDS (1)..(1230): transl_table=11
atgaccgtcaagcttgctctgtctgcacgaaaccggctacgcaccagaagcctggccgccgcactgtccgtcgcatcgtgcatgttcatggcaaccagtcccgcgatcgcgcaaagcgtcggcaaaaagccacctgtgctgctcgcgcaaagccagccgcaacccgctgtgccgcaagggcaaacgtttgaagaagagatcatccctcagcgctacgcgaacaatcccaatgtggacgcgttcatcaacgacatgaccgcgcgttacgacttcgacgaggccgcactgcatgcgctctttgccggcgtgagttattcggcaaccgcggtcaagctcgtaacgccgtcaccctcgccgtcggtgaagaactggcgcgtgtatcagtcgcgctttctcgaccaggtccgcatcaatgccggcgtgcgtttctggcgcgcgaaccaggccacgctgcagcgtgcctatgaggaattcggcgtgccgccggaagtgatcgtcggcattatcggcgtggagacgatctatgggcgcttcatgggcaacttccgtgtgctcgacgcgctcaccacgctcagcttcgattatccgaacaccgccaatcgcgcggatcgccaggcaaccttccgcaagaatctcgaagactacctggtgtggacgcgcgactcgcagatcgacccgacctcggtgctgggctcgtacaccggcgcgatcggcattccgcagttcctgccgagcagcatcgtgcaatacgcggtgagctacgacggcaaccggcagatcgacctgcgcacgagccaggcggacgcgattggcagcgtggcgaattatctgcgtcagaacggctgggaaagcggccggccggtggtgtggaagatcggctcggacgccggcagcctgggcgtcgcgcaagcagccgccgacggtcagccggagccgcactggccgctcgatcaattgctgcgcgccggcttgctgctgaacgagcccggcgtggatatcgcgtcggaagcgggcacgccggtgacggtagtggatctgccctcgccgggacgcggcaccgagttcgtgctcggcctgaagaatttctatgtgctgacgcgctataaccgcagtttcttctatgcgctcgcggtctaccaactgggccagcgcgtcaaggcgcagatggaagcaagcgacgccgcaaacgccggcaacggcgcggcagcgccggctggcgcatcgcaatag

SEQ ID NO: 80843 - protein, 409 aa, Burkholderia xenovorans LB400
MTVKLALSARNRLRTRSLAAALSVASCMFMATSPAIAQSVGKKPPVLLAQSQPQPAVPQGQTFEEEIIPQRYANNPNVDAFINDMTARYDFDEAALHALFAGVSYSATAVKLVTPSPSPSVKNWRVYQSRFLDQVRINAGVRFWRANQATLQRAYEEFGVPPEVIVGIIGVETIYGRFMGNFRVLDALTTLSFDYPNTANRADRQATFRKNLEDYLVWTRDSQIDPTSVLGSYTGAIGIPQFLPSSIVQYAVSYDGNRQIDLRTSQADAIGSVANYLRQNGWESGRPVVWKIGSDAGSLGVAQAAADGQPEPHWPLDQLLRAGLLLNEPGVDIASEAGTPVTVVDLPSPGRGTEFVLGLKNFYVLTRYNRSFFYALAVYQLGQRVKAQMEASDAANAGNGAAAPAGASQ

SEQ ID NO: 80844 - DNA, 1227 bp, Ralstonia metallidurans CH34
  CDS (1)..(1227): transl_table=11
atgacgtgccccgcgcttctacgcctgttggctgtcgtgtacggcgcaccgaagtacgccctcgacgaggcgtcgcgtacatcgcatccgctatactcggtgcgacttgcaaaggacaacatgaccgaccaccagcgcaccctgcgccgcccgctgctgggcgccgcactcaccgctgccgcattgggcctgtgcggcatttctcctcggcttctcgccgccggcaagcgccgcgtgagcgtccgggaagaagagatcgaaccgggccgctatcagaatcatccgcaaacccgcgcattcatcgacgagatggtggccaacaacggcttccagcgggccgaactcgagggatggttcagccaggcggtctattccacgacggtcgcacgactgatcatgccgccgaccaccccgggcaagaaaagctggcgggcgtatcggtcacgcttcatcgaaccgatccgcatcaacgccggcgtgcgcttctggcagcagaaccgcgagacgctgcgtcgcgccgaggccgagttcggcgtgccggcatcggtcatcgtcggcatcatcggggtggagacgatctacgggcgcgacatgggcaacttccgcgtcctggactcgctctcgacgctggcgttcgactaccccgacaccccgaaccgtgaggcgcgcaccaagctcttccggaatcagctcgccgactacctgctctggtgccgcgacaccaagaccgacgtattttcggtgctgggctcctatgccggcgcaatcggcattccgcagttcatgcccacgagcctgcgcgagtacgcggtcgactacgacggcgacgggcatatcgacctgcgcaacagcccgaccgatgccattggcagcgtcggccgattcctgcaactgcatggctgggaacagggacgtccggtggtctggcagatcgccaacgacgatggcagccgaggcgttgccgcggctgcggccgacggcgaaccgtggccgacacgcacactcaaccagctcacgcgcgccggacttcgcgtagacgaaccgatcgacgtcacccgcgaaggcgaaacaggcgtgttgattgccgatctcccgacgcccgaccagccgaccgagtacgtgatcggcctgcgcaatttctacgtgctgacgcggtacaaccgaagcttcttctatgcgctgacggtgtatcagcttggggaagccgtgaaggccgccatggcctga

SEQ ID NO: 80845 - protein, 408 aa, Ralstonia metallidurans CH34
MTCPALLRLLAVVYGAPKYALDEASRTSHPLYSVRLAKDNMTDHQRTLRRPLLGAALTAAALGLCGISPRLLAAGKRRVSVREEEIEPGRYQNHPQTRAFIDEMVANNGFQRAELEGWFSQAVYSTTVARLIMPPTTPGKKSWRAYRSRFIEPIRINAGVRFWQQNRETLRRAEAEFGVPASVIVGIIGVETIYGRDMGNFRVLDSLSTLAFDYPDTPNREARTKLFRNQLADYLLWCRDTKTDVFSVLGSYAGAIGIPQFMPTSLREYAVDYDGDGHIDLRNSPTDAIGSVGRFLQLHGWEQGRPVVWQIANDDGSRGVAAAAADGEPWPTRTLNQLTRAGLRVDEPIDVTREGETGVLIADLPTPDQPTEYVIGLRNFYVLTRYNRSFFYALTVYQLGEAVKAAMA

SEQ ID NO: 80846 - DNA, 1065 bp, Shewanella sp. MR-4
  CDS (1)..(1065): transl_table=11
atgcctattcttcgagcttgtttggctccactggcagtgctttgcctcagttcatacctcattggctgctcaaccgcgaacgagccagcaacaacgacaccgccaccaagcgcggccgtgaccacacaggcgccaacacctgtattacccgaggccttaaaggcagagtttattaaaacccaaatggcacaaggctttactcaagccgaagtggaaaatttcttggccaaagccaactacaaccagactgttatcgatgcgatttctcgcccttgggaagctaagccttggcatcagtattatccaattttcctcacagagaaacgcctcaacgcgggcctagccttctggaaaaaacacgaggcgatgattgccaaagctgccactcaataccaagttgagccacaaattattgtggccattattggtatcgaaaccttctatggtcagtacacgggcaattatccggtaatcgacgcgctctacaccttagggttttattacgagccaagagccactttctttcgcaaggaatttggcgagctgatgaagctggtaaaagaagaacacttagatatcaatagcctcaagggttcttacgctggcgccatgggctttggtcagtttattccgtcaagctaccgccactatgccgtggattttgatggcagcggcaaccgtgatttactccagagtccagaggatgccatcggcagtgttgccaattatttccatgaacacggctggcaattgcacgcgcccgttgcgcttcctttagtgaacagcagtcccaatgcgcctaaagccaaagtgtgggccggcgaaaagttgcagtacaaggtttctgatattctctccccaagcttatcgctggccaccgcccgcgatttagatgcctcgcaaaaggccatgcttatcgaactggaacaagtggatagcaaggactactggttagggcttaataacttttatgtgatcacccgttataaccgtagccctttgtattccatggccgtttaccaatttagccaacaactgaagcaacaacatgacgctaagaaataa

SEQ ID NO: 80847 - protein, 354 aa, Shewanella sp. MR-4
MPILRACLAPLAVLCLSSYLIGCSTANEPATTTPPPSAAVTTQAPTPVLPEALKAEFIKTQMAQGFTQAEVENFLAKANYNQTVIDAISRPWEAKPWHQYYPIFLTEKRLNAGLAFWKKHEAMIAKAATQYQVEPQIIVAIIGIETFYGQYTGNYPVIDALYTLGFYYEPRATFFRKEFGELMKLVKEEHLDINSLKGSYAGAMGFGQFIPSSYRHYAVDFDGSGNRDLLQSPEDAIGSVANYFHEHGWQLHAPVALPLVNSSPNAPKAKVWAGEKLQYKVSDILSPSLSLATARDLDASQKAMLIELEQVDSKDYWLGLNNFYVITRYNRSPLYSMAVYQFSQQLKQQHDAKK

SEQ ID NO: 80848 - DNA, 1275 bp, Shewanella sp. MR-4
  CDS (1)..(1275): transl_table=11
atgtcctatcttgccgccagtatcgccgcgtgtgtgagcttaagtgcgtgttcgagcgcgccaacctcgagcggtaatagtcaaaccgcgatcgccgagacgcaagccgccgtgcaagaaatgcagcttagtgacaccattgccgcccatgctgaggcatttcctacctgtgtggctaacctacaggagcgcgcacgtagtgaaggcttatctgaagccaccatcaaggacacagtcgctagtttgcagtttgtgcctaaagtgattgagcttgaccaagctcagcccgagtttagccaaaccttcaataattattttaccaagcgggcgaccgattggcgggtgaatgaaggccgccgtttactgaaaaaacaccgcgcgctgctcgataaattggcgcaggaatacggtgtgccaccacaatatattctgtctttctggggacttgagactaactacggttcctacaaaggcaaaatgtccgtgttagattctcttgctaccttggcctgtgagccgcgtcgcagtggctattttacgactgagctaatgcaagcgcttaagttaaaagaaaaatacggctttgataagagcactatggtgggctcttgggccggcgccatggggcacacccagtttatgccctcggcctatgcaaaatatgccatcgatggggatggcgacggtaaggccgatttgtggaatagcaccgaagatgcactcacctcggcggcgaactttttgcagcacttaggctggcaacgcaatgagcgttgggggcgtgaagtgatattgccgcgcaatttcagctatgaaaaccttggcgctaaacaggcgcagccgctatcccaatgggcggcgcaatccttagtgcaaagtaatggtcagcctttacccgctatcgatatgaaggcggcgctgtatttgccctcgggtcatactggtcccgcgtttttaggctatgaaaatttcaatgtgatcatgcgttggaaccgctctgagttttacgccattaccgttggtcatttggccgatagaattaatggtggcgaaccattaaaagtggcaccgcccgagcagccacgtttgagtcgtgagcaaatcaaacagttacaaaccaagctgaatgaatcaggcttcgatgtcggtaaacccgatggcgtacttgggcgtaactcttcggcggggatccaagcattccagcgcagtaagaatatgattgccgacggtttcccaagccctgaagtctttagcgcattggggatttcactctaa

SEQ ID NO: 80849 - protein, 424 aa, Shewanella sp. MR-4
MSYLAASIAACVSLSACSSAPTSSGNSQTAIAETQAAVQEMQLSDTIAAHAEAFPTCVANLQERARSEGLSEATIKDTVASLQFVPKVIELDQAQPEFSQTFNNYFTKRATDWRVNEGRRLLKKHRALLDKLAQEYGVPPQYILSFWGLETNYGSYKGKMSVLDSLATLACEPRRSGYFTTELMQALKLKEKYGFDKSTMVGSWAGAMGHTQFMPSAYAKYAIDGDGDGKADLWNSTEDALTSAANFLQHLGWQRNERWGREVILPRNFSYENLGAKQAQPLSQWAAQSLVQSNGQPLPAIDMKAALYLPSGHTGPAFLGYENFNVIMRWNRSEFYAITVGHLADRINGGEPLKVAPPEQPRLSREQIKQLQTKLNESGFDVGKPDGVLGRNSSAGIQAFQRSKNMIADGFPSPEVFSALGISL

SEQ ID NO: 80850 - DNA, 1065 bp, Shewanella sp. MR-7
  CDS (1)..(1065): transl_table=11
atgcctattcttcgagcttgtttggctccactggcagtgctttgcctcagttcatacctcattggctgctcgacagcgaacgagccagcaacaacgacaccgccaccaagcgcggtcgtcaccacacaggcgccaacacctgtattgcccgaggccttaaaggcagagtttataaaaacccaaatggcacaaggctttactcaagccgaagtggaaagtttcttagccaaagccaactacaaccaagcggttatcgatgcgatttctcgcccctgggaagctaagccttggcatcagtattatccaattttcctcaccgagaaacgcctcaacgcgggcctagccttctggaaaaaacacgaggcgacgatcgccaaagccgccactcaataccaagtcgagccacaaattattgtggccattattggtatcgaaaccttctatggtcagtactcgggcaattatccggtaatcgacgcgctctataccttagggttttattacgagccaagagccactttctttcgcaaggaatttggcgagctgatgaagctggtaaaagaagaacacttagatatcaatagcctcaagggttcttacgctggcgcaatgggctttggccagtttattccgtcaagctaccgccattatgccgtggattttgatggcagcggcaaccgtgatttactccagagtccagaggatgccattggcagtgttgccaattatttccatgaacacggctggcaattgcacgcgcccgttgcgctccctttagtgaacagcagtgccaatgcgcctaaagccaaagtgtgggccggcgagaagttgcagtacaaggtttctgatattctctctccaagcttatcgctggccaatgcccgtgatttaaatgcctcgcaaaaggccatgctcattgagctggaacaagtggatagcaaggactactggttaggactcaataacttttatgtgatcacccgttataaccgtagccctttgtattccatggccgtttaccaatttagccaacaactgaagcaacaacatgacgctaagaaataa

SEQ ID NO: 80851 - protein, 354 aa, Shewanella sp. MR-7
MPILRACLAPLAVLCLSSYLIGCSTANEPATTTPPPSAVVTTQAPTPVLPEALKAEFIKTQMAQGFTQAEVESFLAKANYNQAVIDAISRPWEAKPWHQYYPIFLTEKRLNAGLAFWKKHEATIAKAATQYQVEPQIIVAIIGIETFYGQYSGNYPVIDALYTLGFYYEPRATFFRKEFGELMKLVKEEHLDINSLKGSYAGAMGFGQFIPSSYRHYAVDFDGSGNRDLLQSPEDAIGSVANYFHEHGWQLHAPVALPLVNSSANAPKAKVWAGEKLQYKVSDILSPSLSLANARDLNASQKAMLIELEQVDSKDYWLGLNNFYVITRYNRSPLYSMAVYQFSQQLKQQHDAKK

SEQ ID NO: 80852 - DNA, 993 bp, Alkalilimnicola ehrlichei MLHE-1
  CDS (1)..(993): transl_table=11
atggaccttaagaaatcgtggctggccgccggctttgtcctgctggcggggctggcggctccggtgcaggccgggttttcggacgatggcctggccgccttcgccgaggaggtcagtcagcgtcacggtctggaccgggcgcaggtgcaggcgttggtggacggcgccgtcttccagcaggagatcatcgatgccatctccagtccggccgaggcacgtccctggcgcgattaccggccgatcttcctgaccgagtcccgcatcgagcagggcgtggagttctgggaccggcacgctgaccaggtggcgcgggcgtcggaggcgttcggggtcgcccccgaggtgctggtggccatcattggggtggagacccgctacggccgccatgccggccgccaccgggtgctggacgccctgaccaccctggccttcggttatcccccgcgcgccgatttcttccgtcgggaactggagcagttcctgttgctggtggacgaggaggggctggacccgacggcgctcaagggctcctacgccggtgccatgggcctgccgcagttcatcgccagcagctaccgccactacgcggtggacttcgacggcagcggccagcgggacctgttcggtaacaaggccgacatcctcggcagtgtggccaactacttcgacgcgcacggctggcgcgccggggagccggtggcggtgcgtgccacggtggccggcgaggccgggtccgagctggccagtgccacccgcgggcccacccggacccggcacaccatggccgagctggccgccgcgggcgtcacacccgagcgcgacgtggcggatgacaccccggtggcgctgctggcgctggagggcgaggacggcccggaatactgggtgaccttccacaacttctacgtcatcacccgctataaccacagcgccctatacggcctggcggtgttccaactggccgaggccatccgggaggcgcgcgacgcatga

SEQ ID NO: 80853 - protein, 330 aa, Alkalilimnicola ehrlichei MLHE-1
MDLKKSWLAAGFVLLAGLAAPVQAGFSDDGLAAFAEEVSQRHGLDRAQVQALVDGAVFQQEIIDAISSPAEARPWRDYRPIFLTESRIEQGVEFWDRHADQVARASEAFGVAPEVLVAIIGVETRYGRHAGRHRVLDALTTLAFGYPPRADFFRRELEQFLLLVDEEGLDPTALKGSYAGAMGLPQFIASSYRHYAVDFDGSGQRDLFGNKADILGSVANYFDAHGWRAGEPVAVRATVAGEAGSELASATRGPTRTRHTMAELAAAGVTPERDVADDTPVALLALEGEDGPEYWVTFHNFYVITRYNHSALYGLAVFQLAEAIREARDA

SEQ ID NO: 80854 - DNA, 1023 bp, Pseudomonas aeruginosa UCBPP-PA14
  CDS (1)..(1023): transl_table=11
gtgaagaacgcaatgcaagtactgcgtacatgggcggccaggggcgtccaatgggtcggcgtagccggcgtcattggcctgtccggggcggcccaggcgggggactacgacggctcgccgcaagtggccgagttcgtcagcgaaatgacccgcgactacggcttcgccggagagcagctgatggggctgttccgcgacgtgaaccgcaagcagtcgatcctcgatgcgatctcgcgcccggccgagcgggtcaagcagtggaaggaataccggccgatcttcatcagcgacgcgcgcatcagtcgtggtgtcgacttctggaacaagcatgccgaagacctggcgcgggcagagaaggaatacggcgtgccggccgagatcatcgtctcgatcatcggcgtggaaaccttcttcggccgcaacaccggcagctaccgggtgatggacgcgctgtccaccctcggcttcgactacccgccgcgggccgacttcttccgcaaggagttgcgcgagttcctcctgctcgcccgcgaacagcaggtcgacccgctcagcctgaccggctcctacgccggcgccatgggcctgccgcaattcatgccgagcagcttccgcgcctacgcggtggacttcgacggcgatggccacatcaatatctggagcgacccgaccgacgccatcggtagcgtcgccagctacttcaagcagcacggctgggtcaccggcgagccggtggtctcggtggccgagatcaacgacgagagcgccgagagcgcggtgaccaggggcgtcgacccgaccatgagcctgggcgagctgcgtgcccgcggctggcgcacccatgatgcgctgcgcgacgaccagaaggtcacggcgatgcgtttcgtcggcgacaagggcatcgagtattgggtcggtttgccgaacttctacgtgatcacccgctataatcgcagcgccatgtatgccatggcggtttatcagctggcgggcgagattgcccgcgcgcgaggtgcccattga

SEQ ID NO: 80855 - protein, 340 aa, Pseudomonas aeruginosa UCBPP-PA14
MKNAMQVLRTWAARGVQWVGVAGVIGLSGAAQAGDYDGSPQVAEFVSEMTRDYGFAGEQLMGLFRDVNRKQSILDAISRPAERVKQWKEYRPIFISDARISRGVDFWNKHAEDLARAEKEYGVPAEIIVSIIGVETFFGRNTGSYRVMDALSTLGFDYPPRADFFRKELREFLLLAREQQVDPLSLTGSYAGAMGLPQFMPSSFRAYAVDFDGDGHINIWSDPTDAIGSVASYFKQHGWVTGEPVVSVAEINDESAESAVTRGVDPTMSLGELRARGWRTHDALRDDQKVTAMRFVGDKGIEYWVGLPNFYVITRYNRSAMYAMAVYQLAGEIARARGAH

SEQ ID NO: 80856 - DNA, 1104 bp, Pseudomonas aeruginosa UCBPP-PA14
  CDS (1)..(1104): transl_table=11
atgcgccgtaccgccctcgccctgcccctgttccttctggtttcagcatgcagcagcgaaccgacgccaccaccgaaacccgccgccaaaccccaggcccgcaccgtcattaccccccgccccgtacgccagtcggtgcaaccgatactgccgctgcgcggcgattacgcgaacaatccggcggcacagcgcttcatcgacaggatggtcagccagcacggcttcaaccgccagcaactgcacgacctgttcgcccagacccagcgcctggactgggtgatccgcctgatggaccggcaagctccgacctataccccacccagcggaccgaacggcgcctggctgcgctaccggaagaagttcgtcacgccaggcaacgtacagaacggcgtgctgttctgggaccaatacgaaaccgacctgcaacgggcatcgcgcgtctacggcgtgccgccggagatcatcgtcggcatcatcggcgtggaaacccgctgggggcgggtgatgggcaagacgcggatcatcgatgcgctgtccaccctgtccttctcctaccctcgccgcgcggagttcttcagcggcgagctggaacaattcctcctccaggcgcgcaaggaaggcaccgacccgctggccctgcgcggttcctatgccggcgccatgggctacggccagttcatgccgtcttcattcaccaagtacgcagtggacttcgacggcgatgggcatatcgacctgtggaatccgcgtgacgcgatcggcagcgtcgccaactatttcaagcagcacggctgggtcaacggcgatcgcgtggcggttcccgccagcggccgggcgccctcgctggaggatggcttcaagacgctgtacccgctggacgtgctcgcttccgccggactacgcccgcagggtccgctcggcgggcaccggcaagccagcctgctgcgcctggacatgggcaggaactaccagtactggtacggcttgccgaacttctacgtgatcacccgctacaaccacagcacccactacgcgatggctgtctgggaactgggcaaggaggtcgaccgggtacgtcaccgctccgtcgtcaggcaggattag

SEQ ID NO: 80857 - protein, 367 aa, Pseudomonas aeruginosa UCBPP-PA14
MRRTALALPLFLLVSACSSEPTPPPKPAAKPQARTVITPRPVRQSVQPILPLRGDYANNPAAQRFIDRMVSQHGFNRQQLHDLFAQTQRLDWVIRLMDRQAPTYTPPSGPNGAWLRYRKKFVTPGNVQNGVLFWDQYETDLQRASRVYGVPPEIIVGIIGVETRWGRVMGKTRIIDALSTLSFSYPRRAEFFSGELEQFLLQARKEGTDPLALRGSYAGAMGYGQFMPSSFTKYAVDFDGDGHIDLWNPRDAIGSVANYFKQHGWVNGDRVAVPASGRAPSLEDGFKTLYPLDVLASAGLRPQGPLGGHRQASLLRLDMGRNYQYWYGLPNFYVITRYNHSTHYAMAVWELGKEVDRVRHRSVVRQD

SEQ ID NO: 80858 - DNA, 1065 bp, Shewanella sp. ANA-3
  CDS (1)..(1065): transl_table=11
atgcctattcttcgagcttgtttggctccactggcagtactttgcctcagttcatatctccttggttgctcgacggcaaacgagcctgcggcccccacaccgcagccaagtgcggcggtgaccacacaggcgccaacgccagtattacccgaggccttaaaggctgagtttattaaaacccaaatggcacaaggctttacccaagccgaagttgaaagttttttagcaaaggccaactacaaccaagccgttatcgatgctatttctcgcccttgggaagccaagccttggcatcagtattatccgattttcctcaccgagaaacgcctcaatgcaggtctagccttctggaaaaaacacgaggcaacgattgccaaggccgcgacaaagtaccaagtcgagccacaaattattgtggccattattggtatcgaaaccttctatggtcagtacacaggtaattatccggtaatcgatgcgctctataccttagggttttattacgagccaagagccactttctttcgcaaggaatttggcgagctgatgaagctggtaaaagaagaacacttagatatcaatagcctcaagggttcctacgccggagccatgggctttggtcagtttattccttcaagctaccgccactatgccgtggattttgatggcagcggtaaccgtgatttactccagagtccagaggatgccattggcagtgttgccaattatttccatgaacacggctggcagttgcatgcacccgttgcgctccctttagtgaatagcagtgccaatgcgcctaaagccaaagtgtgggctggtgagaagttgcagtacaaggtctctgatattctcagcccaagcttatcgctggccaccgcccgcgatttagatgcctcgcaaaaggccatgctcatcgagctcgaacaagtgggtagcaaggactactggctaggactcaataacttttatgtgatcacccgttataaccgtagccctttgtattccatggccgtttatcaatttagccaacaactgaagcaacaacatgacgctaaaaaataa

SEQ ID NO: 80859 - protein, 354 aa, Shewanella sp. ANA-3
MPILRACLAPLAVLCLSSYLLGCSTANEPAAPTPQPSAAVTTQAPTPVLPEALKAEFIKTQMAQGFTQAEVESFLAKANYNQAVIDAISRPWEAKPWHQYYPIFLTEKRLNAGLAFWKKHEATIAKAATKYQVEPQIIVAIIGIETFYGQYTGNYPVIDALYTLGFYYEPRATFFRKEFGELMKLVKEEHLDINSLKGSYAGAMGFGQFIPSSYRHYAVDFDGSGNRDLLQSPEDAIGSVANYFHEHGWQLHAPVALPLVNSSANAPKAKVWAGEKLQYKVSDILSPSLSLATARDLDASQKAMLIELEQVGSKDYWLGLNNFYVITRYNRSPLYSMAVYQFSQQLKQQHDAKK

SEQ ID NO: 80860 - DNA, 1293 bp, Shewanella sp. ANA-3
  CDS (1)..(1293): transl_table=11
ttgatcaaactgaaaggaatgtcctatcttgccgccagcatcgccgcgtgtgtgagcttaagtgcgtgttcgagcgcgccaacatcgagcggtaatagtcaaaccgcgatcgccgagacgcaggccgccgtgcaagaaatgccgctcagtgacaccatcgccgcccatgctgcggcgtttccgacctgtgtggctaacctacaggagcgcgcacgtaccgaaggcttatccgaagccactatccaagacacagtcgccagtttgcagtttgtgcctaaagtgattgagcttgaccaagcccagcccgagtttagccaaaccttcaacaactattttaccaagcgggcgaccgattggcgggtgaatgaaggccgccgtttactgaaaaaacaccgcgcgctgctcgataaattggcgcaggaatacggtgtaccgccacaatatattctgtctttctgggggcttgagactaactacggttcctacaaaggcaaaatgtccgtgttagattcccttgctaccttggcctgtgagccgcgtcgtagtggctattttacgactgaactgatgcaagcgcttaagttaaaagaaaaatacggctttgataagagcactatggtgggctcttgggctggcgccatggggcacacccagtttatgccctcggcctatgctaaatatgccatcgatggtgatggcgacggtaaggccgatttgtggaatagcaccgaagatgcactcacctcggcggcgaactttttgcaacacttaggctggcaacgcaatgagcgttgggggcgtgaagtgatattgccgcgcaatttcaactatgaaaaccttggtgccaaacaggcgcagccgctatcccaatgggcggcgcaatccgtagtgcaaagtaatggattgcctttacccgctatcaatatgaaggcggcgctgtatttgccctcgggtcatactggccccgcgtttttaggctatgagaacttcaatgtgatcatgcgttggaaccgctctgagttttacgccattaccgtcggtcatttggccgatagaattaatggcggcgaaccactaaaagtggcaccgcccgagcagccacgtttgagtcgtgagcaaatcaaacagttacaaaccaagctgaatgaatcaggcttcgatgtcggaaaaccagacggcgtacttgggcgtaactcttcggcggggatccaagcattccagcgcagtaagaatatgattgccgacggtttcccaagccctgaagtctttagcgctctggggatttcactctaa

SEQ ID NO: 80861 - protein, 430 aa, Shewanella sp. ANA-3
MIKLKGMSYLAASIAACVSLSACSSAPTSSGNSQTAIAETQAAVQEMPLSDTIAAHAAAFPTCVANLQERARTEGLSEATIQDTVASLQFVPKVIELDQAQPEFSQTFNNYFTKRATDWRVNEGRRLLKKHRALLDKLAQEYGVPPQYILSFWGLETNYGSYKGKMSVLDSLATLACEPRRSGYFTTELMQALKLKEKYGFDKSTMVGSWAGAMGHTQFMPSAYAKYAIDGDGDGKADLWNSTEDALTSAANFLQHLGWQRNERWGREVILPRNFNYENLGAKQAQPLSQWAAQSVVQSNGLPLPAINMKAALYLPSGHTGPAFLGYENFNVIMRWNRSEFYAITVGHLADRINGGEPLKVAPPEQPRLSREQIKQLQTKLNESGFDVGKPDGVLGRNSSAGIQAFQRSKNMIADGFPSPEVFSALGISL

SEQ ID NO: 80862 - DNA, 1011 bp, Azoarcus sp. BH72
  CDS (1)..(1011): transl_table=11
atgaagcttcgccccacgctcttcgcggccttggtcgcccttggtgccgccgtcgcccacgccgccccgcctgttcgccccgagatacgcaacttcgcagccgaaatggcgcaacgtcacggcttcgatcaggagaccgtggagcgcaccttggcggaggcgcggtatgaggcccgcgtgatcaatctgatacagccccccaccaaacccggcacacggtcctggcagcgttaccggagccggtttctggaccgtacccggattgcgggtggcctcgccttctgggaagaaaacaacgccgcgcttgaagccgcctcggcccgcttcggcgtaccgccggaaatcatcgtagccgtgatcggtgtcgaaaccatctacggccgccagaccggcaacttccagaccttgtcggccctgagcacgctggcgttcgactatccgccccgcgccgatctcttccgtcgcgaactcgagcacctgttcctgctcgcgcgcgaacagggccgcccccctggcagctacaccggctcgtacgcaggcgccctcggctatccgcagttcctgccgagcagcgtccgcgcctatgcggtggatttcgacggtgatggaagggtggatttcgacacagcaccggacgatgcgattggcagcgtggccaactacctgcacgtccacggttggattgcgcaggccccggtcgccgagcgcgcgcgcttcaacggtgtggtcgaagcagcaccgctggtggcggccggcatcgagccggtcttgagccccgatacgctggcgaacgcgggcgtcaccacgctggacggctcgtctgccgccgccccggccacgctggtggatctggagacgcctggggaaccgacggagtactggctgggctaccgcaacttctatgtgatcacccgctacaaccgcagcagtttctatgcgatgtcggtgttcgaactggctgaaaccctgcgccgggagcgcttgcagcgcaccgcgctgcagcgcggctag

SEQ ID NO: 80863 - protein, 336 aa, Azoarcus sp. BH72
MKLRPTLFAALVALGAAVAHAAPPVRPEIRNFAAEMAQRHGFDQETVERTLAEARYEARVINLIQPPTKPGTRSWQRYRSRFLDRTRIAGGLAFWEENNAALEAASARFGVPPEIIVAVIGVETIYGRQTGNFQTLSALSTLAFDYPPRADLFRRELEHLFLLAREQGRPPGSYTGSYAGALGYPQFLPSSVRAYAVDFDGDGRVDFDTAPDDAIGSVANYLHVHGWIAQAPVAERARFNGVVEAAPLVAAGIEPVLSPDTLANAGVTTLDGSSAAAPATLVDLETPGEPTEYWLGYRNFYVITRYNRSSFYAMSVFELAETLRRERLQRTALQRG

SEQ ID NO: 80864 - DNA, 1092 bp, Neisseria meningitidis FAM18
  CDS (1)..(1092): transl_table=11
atgaaaaagagaaaaatactgccgctggcaatttgtttggcggctttgtctgcctgtacggcgatggaggcacgcccgccccgggtaaatgaagcccaagccccccgcgcggatgaaatgaaaaaagaaagccgccccgcgtttgacgcggcagccgtaccggtatccgacagcgggtttgccgccaatgcaaatgtccgccgttttgtggacgatgaagtcgggaaaggggatttttcccgggcggaatggcaggatttttttgacaaagcggcttacaaggcggacatcgtcaagattatgcaccgaccctccacatcgcgtccgtggtatgtgttccgcacgggaaattcgggcaaggcgaaatttcgcggcgcgcgccggttttatgcggaaaaccgcgcgcttatcgatgatgtggcgcaaaaatacggcgtgcctgccgaacttatcgtggcggttatcgggattgaaacgaattacggcaaaaatacgggcagtttccgtgtggcggacgcattggcgaccttaggctttgattacccccgccgcgccgggtttttccaaaaagaattggtcgagcttttaaagctggcaaaagaagaaggcggcgatgttttcgcctttaaaggcagctatgcgggcgcaatggggatgccgcaatttatgccttcgagctaccggaaatgggcggtggattatgacggggacggacatcgggacatatggggcaacatcggcgatgtcgcggcatcggttgccaattatatgaagcagcacggttggcgcacgggcgggaaaatactggtgtctgcaacattggcgccgggtgcggatgttcaggcaatcattggcgaaaaaaccgccctgacgcggacggtggcggatttgaaggcgtacggcatcatccccggcgaagagcttgccgatgatgaaaaggcggttttgttcaaactggaaaccgcacccggcgtgtttgaatattatttgggcttgaacaatttttatacggtatggcagtacaatcacagtcggatgtatgtaacggcggtcagggacattgccaattcgcttggcggcccgggattgtaa

SEQ ID NO: 80865 - protein, 363 aa, Neisseria meningitidis FAM18
MKKRKILPLAICLAALSACTAMEARPPRVNEAQAPRADEMKKESRPAFDAAAVPVSDSGFAANANVRRFVDDEVGKGDFSRAEWQDFFDKAAYKADIVKIMHRPSTSRPWYVFRTGNSGKAKFRGARRFYAENRALIDDVAQKYGVPAELIVAVIGIETNYGKNTGSFRVADALATLGFDYPRRAGFFQKELVELLKLAKEEGGDVFAFKGSYAGAMGMPQFMPSSYRKWAVDYDGDGHRDIWGNIGDVAASVANYMKQHGWRTGGKILVSATLAPGADVQAIIGEKTALTRTVADLKAYGIIPGEELADDEKAVLFKLETAPGVFEYYLGLNNFYTVWQYNHSRMYVTAVRDIANSLGGPGL

SEQ ID NO: 80866 - DNA, 1089 bp, Actinobacillus pleuropneumoniae serovar 1 str. 4074
  CDS (1)..(1089): transl_table=11
atgaaattacgatttttaacgattccggtaatgtttagcttattccttgccggatgttcaaataaaaatagtacgtatccggagcttccgatggacgctcaatacactaaagcgcgtacgctcaataattttaatgattacgtacattttcttaagcaaaaggctgccggtgccggtgtgtcggataacgtattaaatacccaaaaatttattcgatataacgccagatccattcagttggatcaagctcaggcagctcgtaagcgtgatccgaatacgactccgccaccgccgaatccaaacggtgtcactaactatttaagtaaggtgctcactcaaaataaagtgaatttggccgctgaatattggtatgaatttaatacgcaattaactcatgccagtaacaaatataatgttcagaaagaatatattttagcgttgtgggggatggagagcagttttggtcgttaccaaggcgattttgacgtattgtccgtgttagctacacttgcttttgacggacgccgtgaaaaattatttacccaagaattcgtcaatgcgatgaaaatgttagatgacggcacgattaatcgttatgaaatgctaggttcttgggcgggggcaatggggcaaactcagtttatgccgaccgcctatttgaattacgcggcggacggcaacggtgacggcaaaaaagatatttggaatacggaagccgatgcttttgcctctatcgcttcttatctttcaacggtaggttgggatgatgaagtgccttggggcgtagaggtaaaacttaccagcccgattgatctgtctttctccggcattgaagcaaacaaagccaaaaccctcggagaatggcagtcttggggtgtttatctggcgtatccgaccgctcgagaaaccgcaaaattaagtgcgttaaacggcaataaattatggttggttcggccggataaagaagccggacgagctttcctcgtatcaaataatttccgtaccttaatggactggaacaaatcgaataatttcggcatcagcatcggtaagtttgcggatcgcattttagaaagcgtggggcggtaa

SEQ ID NO: 80867 - protein, 362 aa, Actinobacillus pleuropneumoniae serovar 1 str. 4074
MKLRFLTIPVMFSLFLAGCSNKNSTYPELPMDAQYTKARTLNNFNDYVHFLKQKAAGAGVSDNVLNTQKFIRYNARSIQLDQAQAARKRDPNTTPPPPNPNGVTNYLSKVLTQNKVNLAAEYWYEFNTQLTHASNKYNVQKEYILALWGMESSFGRYQGDFDVLSVLATLAFDGRREKLFTQEFVNAMKMLDDGTINRYEMLGSWAGAMGQTQFMPTAYLNYAADGNGDGKKDIWNTEADAFASIASYLSTVGWDDEVPWGVEVKLTSPIDLSFSGIEANKAKTLGEWQSWGVYLAYPTARETAKLSALNGNKLWLVRPDKEAGRAFLVSNNFRTLMDWNKSNNFGISIGKFADRILESVGR

SEQ ID NO: 80868 - DNA, 1224 bp, Burkholderia vietnamiensis G4
  CDS (1)..(1224): transl_table=11
atgaattccagcaagcccgccgcccttctctccacgctgttgcacgttcgcgctccactcgtcgccgctgcgctcgccgccacggccgcggtctcgcccgcgcacgcgcagacgcagccgacgaagcccgccggcatgctcgtcgcgcaggcccaaccgcagcagccggcgccgcaaggccagaccttcgaagaagaaatcgttccgcagcgctacgcgaacaacgcgaaggtcgatgcattcatcgacgagatggtgagccgcaacggcttcgacgccgcgagcctgcatgcgctgttctcgcgcgtcagctattcggcgaccgccgtgaagctcgtgaagcccgcgcccacgccgtcggtgaagaattggcgcgtttatcgttcgcgcttcatcgagccgatccgcatcaatgccggcgtgaaattctggaaggcgaaccgtgcgacgctgcagcgcgcgtcgcaagagttcggcgtgccgcccgaagtgatcgtcggcatcatcggcgtcgaaacgatctacgggcgctacatgggcaacttccgcgtgctcgatgcgctgacgacgctcacgttcgattatcccgacacgccgaatcgcgacagccgccaggcgacgttccgcaagaacctcgaggacttcctcgtctggacgcgcgacagccagctcgacccgaccaccgtgctcggctcgtacacgggcgcgatcggcattccgcagttcctgccgagcagcatccgcgaatacgcggtcgactacgacggcggcggccacgtcgatctgcgcagtagtcctgccgacgcgatcggaagcgtcgcgaactacctgaagcagcacggctgggaaaccgatcgcccggtggtgtggcggatcacgccggacaccggcagcctcggcatcgcgcaagccgcggccgacggtcagcccgaaccgcactgggcgctgtcgcagttgctgcgggccggcatgacgctcaacgagccgaccgtcaacatcacgaccgaagccggtacgccggtcaccgtggtcgacctgccgtcgccgggacacgcgaccgagtacatgctcgggctgaagaacttctacgtgctgacgcgctacaaccgcagcttcttctacgcgctcagcgtgtatcagctcggcgaagcggtgaaggcgcaaatggaagcgagcggcgcactgccgctgccgcccgccgacacggacccgtctgcgcaataa

SEQ ID NO: 80869 - protein, 407 aa, Burkholderia vietnamiensis G4
MNSSKPAALLSTLLHVRAPLVAAALAATAAVSPAHAQTQPTKPAGMLVAQAQPQQPAPQGQTFEEEIVPQRYANNAKVDAFIDEMVSRNGFDAASLHALFSRVSYSATAVKLVKPAPTPSVKNWRVYRSRFIEPIRINAGVKFWKANRATLQRASQEFGVPPEVIVGIIGVETIYGRYMGNFRVLDALTTLTFDYPDTPNRDSRQATFRKNLEDFLVWTRDSQLDPTTVLGSYTGAIGIPQFLPSSIREYAVDYDGGGHVDLRSSPADAIGSVANYLKQHGWETDRPVVWRITPDTGSLGIAQAAADGQPEPHWALSQLLRAGMTLNEPTVNITTEAGTPVTVVDLPSPGHATEYMLGLKNFYVLTRYNRSFFYALSVYQLGEAVKAQMEASGALPLPPADTDPSAQ

SEQ ID NO: 80870 - DNA, 1113 bp, Xylella fastidiosa Dixon
  CDS (1)..(1113): transl_table=11
atgattaagcgcatagcaacctcaatactgactctcggcctcgttgcctgtgcatcgcaaccctcatccaagcggctagtcagtacaacgacaacagaaccaacgaaaaagatagatccctcaaaagtggaagaaacaccactgaatctgtcgcctgtcccattcgaaatcgcgcgtaacaatttcatacgtgatactgcaaccaagtacaacttggacccgatatggatcgaaaaaaccctagcacaagcccaatttaaagacgcaatagtagcggccatgtcgcgcccagccgagcaagtcaaaccgtggaacgaataccgatcaatgttcatcgctcaggcaagaattgacagtggacgtcaattcttagcctctcacaagatacaactcaaaaaagtcgaagctgctaccggcgtaccagcagaactcatcgtcgcaattattggtgtcgaaagcagctatggtactagccccgggaaataccgcgtactggacgcgctatacacactcgcctttaaatacccgcgcagcggcgacccaaacaaactcaaacgcgaagtacaacgggaattattttttcgcgatgaactcgcccaactattcgcactcagtaaagaagaaaacctggatatcaccacattgactggcagttacgccggagcaatgggcatgggacagttcatgccctccagctatcgtcaatatgcagtagacggcgatggggacggcaaacgcaacctattcaccaacgaggatgacgtattcgcttcgatcgccaactacttcctccgaaaaggaggctgggtacgtggcgctctggtcgcagtaccagccaccctcgcttcgggttaccaagaattcgacccacccgactggatcccgcgttacaccctgaccgaattagccgcacgtggctaccatacctatgttcccgtcacagccggtatcaccgccaccccgatcagtctggacaacaccaccagtaaagaatactggctgtgcttccagaactactacgcgattacccgctacaacccctccaaaatgtacgccatggccgtgttccaactgtccgaatccattgccggccgcacactcccccaaacatga

SEQ ID NO: 80871 - protein, 370 aa, Xylella fastidiosa Dixon
MIKRIATSILTLGLVACASQPSSKRLVSTTTTEPTKKIDPSKVEETPLNLSPVPFEIARNNFIRDTATKYNLDPIWIEKTLAQAQFKDAIVAAMSRPAEQVKPWNEYRSMFIAQARIDSGRQFLASHKIQLKKVEAATGVPAELIVAIIGVESSYGTSPGKYRVLDALYTLAFKYPRSGDPNKLKREVQRELFFRDELAQLFALSKEENLDITTLTGSYAGAMGMGQFMPSSYRQYAVDGDGDGKRNLFTNEDDVFASIANYFLRKGGWVRGALVAVPATLASGYQEFDPPDWIPRYTLTELAARGYHTYVPVTAGITATPISLDNTTSKEYWLCFQNYYAITRYNPSKMYAMAVFQLSESIAGRTLPQT

SEQ ID NO: 80872 - DNA, 1113 bp, Xylella fastidiosa Ann-1
  CDS (1)..(1113): transl_table=11
atgattaagcgcatagcaacctcaatactgactctcggcctcgttgcctgtgcatcgcaaccctcatccaagcggctagtcagtacaacgacaacagaaccaacgaaaaagatagatccctcaaaagtggaagaaacaccactggatctgtcgcctgtcccattcgaaatcgcgcgtaacaatttcataagtgatactgcaaccaagtacaacttggacccgatatggatcgaaaaaaccctagcacaagctcaatttaaagacgcaatagtagcggccatgtcgcgcccagccgagcaagtcaaaccgtggaacgaataccgatcaatgttcatcgctcaggcaagaattgacggtggacgtcaattcttagcctctcacaagatacaactcaaaaaagtcgaagctgctaccggcgtaccagcagaactcatcgtcgcaattattggtgtcgaaagcagctatggtactagccccgggaaataccgcgtactggacgcgctatacacactcgcctttaaatacccgcgtagcggcgacccaaacaagctcaaacgcgaagtacaacgcgaattattttttcgcgatgaactcgcccaactattcgcactcagtaaagaagaaaacctggatatcaccacattgactggcagctacgccggagcaatgggcatgggacagttcatgccctccagctatcgtcaatatgcagtagacggcgatggggacggcaaacgcaacctattcaccaacgaggatgacgtattcgcttcgatcgccaactacttcctccgaaaaggaggctgggtacgtggcgctctggtcgcagtaccagccaccctcgcttcgggttaccaagaattcgacccacccgactggatcccgcgttacaccctgaccgaattagccgcacgtggctaccatacctatatgcccgtcacagccggtatcaccgccaccccgatcagtctggacaacaccaccagtaaagaatactggctgtgcttccagaactactacgcgattacccgctacaacccctccaaaatgtacgccatggccgtgttccaactgtccgaatccattgccggccgcacactccccaaaacatga

SEQ ID NO: 80873 - protein, 370 aa, Xylella fastidiosa Ann-1
MIKRIATSILTLGLVACASQPSSKRLVSTTTTEPTKKIDPSKVEETPLDLSPVPFEIARNNFISDTATKYNLDPIWIEKTLAQAQFKDAIVAAMSRPAEQVKPWNEYRSMFIAQARIDGGRQFLASHKIQLKKVEAATGVPAELIVAIIGVESSYGTSPGKYRVLDALYTLAFKYPRSGDPNKLKREVQRELFFRDELAQLFALSKEENLDITTLTGSYAGAMGMGQFMPSSYRQYAVDGDGDGKRNLFTNEDDVFASIANYFLRKGGWVRGALVAVPATLASGYQEFDPPDWIPRYTLTELAARGYHTYMPVTAGITATPISLDNTTSKEYWLCFQNYYAITRYNPSKMYAMAVFQLSESIAGRTLPKT

SEQ ID NO: 80874 - DNA, 1404 bp, Oceanicola batsensis HTCC2597
  CDS (1)..(1404): transl_table=11
atgcggacagtcctcgccgtgacatgcgtgtcactcgtcgccctttcctccggtccggcccgcaccgcagagcccgttccgacatcgctgcgccccgtgtcccgccccgccccggcggcgccggcgccggcgccgagcgaggcccgcgtgatcgccgcgctcgccgtcaaggcgttggcgccgcagcccgccaccgcgccgatgcgcaccctgcggcccaggatccggcccgccgtcctcgtcaccgccgcccccgacagcgccgagaccatccaggaggcgaaccccgccggcttcaccgcctggatcggggcgttccgctcccgcgcgctggcgcagggaatcgacgcagccaccttcgatcgcaccttcgcgcgggtgcgctacctccccgacgtgatcaggctcgaccgcaagcaatcggaattcaccaagaccaccggcgaatacctggccagcgccgtctcggacacgcgtgtcgagaccgggcgcgagaaggcgcaggcgcaaggcgccacgctgagggcgatcgaggcgcggtacggcgtcgaccggaacgtggtcgcggcggtctgggggatggagacgaactatggcggctatcgcggccggacgcatatcccttcggctctggcgacgctggcctatgacgggcggcgcggcgccttcttcgagaaacagctgatcgcggcgctgaggatcctgcagaacggcgacaccacgcccgagaacatggtcggcagctgggccggtgccatgggccacacccagttcatgccgacctcctatgccgcctatgcggtggatttcaccggggacgggcggcgcgacatctgggccggggatccgacggatgcgctggcctcgaccgccgcctacctgtcccggatgggctggcagcgcggcatgccctggggggccgaggtgacgctgccggcgggcttcgacttcacccatgcctcgggtccgaagaaactgccctcggactgggcccggctcggtgtgcgcccggcggcgggcggtacgctggcggatcacggccccgcccgcctcctgctgccagcgggcgccaggggggtggccttcctggtcttcaagaacttcgacgtgatcaagcggtacaacaattccgacgcctatgcgctcggcgtcgggcatctcggcgaccgcatcgggggcgcgggcccgctgcgcggcggctggccggacggagagcgggccctgaaacgcgcggaacggcaggagttgcagagccttctgacccgcgccggctattccaccggcgggatcgacggcaagatcgggccgaacaccgtcagggcgatccgcggctatcagcagcgggtcggcatggccccggacggccacccatcggtcgccctgctgacgcgcctgcggcggtag

SEQ ID NO: 80875 - protein, 467 aa, Oceanicola batsensis HTCC2597
MRTVLAVTCVSLVALSSGPARTAEPVPTSLRPVSRPAPAAPAPAPSEARVIAALAVKALAPQPATAPMRTLRPRIRPAVLVTAAPDSAETIQEANPAGFTAWIGAFRSRALAQGIDAATFDRTFARVRYLPDVIRLDRKQSEFTKTTGEYLASAVSDTRVETGREKAQAQGATLRAIEARYGVDRNVVAAVWGMETNYGGYRGRTHIPSALATLAYDGRRGAFFEKQLIAALRILQNGDTTPENMVGSWAGAMGHTQFMPTSYAAYAVDFTGDGRRDIWAGDPTDALASTAAYLSRMGWQRGMPWGAEVTLPAGFDFTHASGPKKLPSDWARLGVRPAAGGTLADHGPARLLLPAGARGVAFLVFKNFDVIKRYNNSDAYALGVGHLGDRIGGAGPLRGGWPDGERALKRAERQELQSLLTRAGYSTGGIDGKIGPNTVRAIRGYQQRVGMAPDGHPSVALLTRLRR

SEQ ID NO: 80876 - DNA, 1179 bp, Oceanospirillum sp. MED92
  CDS (1)..(1179): transl_table=11
atgaagcgtagttcagttgtatcggttttagtaactaccggacttttacttatgggttgtacagcaaccgctgaaaaagaagtggcctcgtcatctgctaaaccgcaggtcaaaacagacaaggctgacacttcagttgctcagaagaaagccgcaatgcctgctgcatcaaagcggatgactcaagaggaactactggcttcagtgaggggcggttcttatctggattatcctgaagccaaagtgtttatcgaagagatgaaagcagaaggctttgatgaagcctatttgagaaaagtgcttggcgaagcaaagcgccagacttcaattctgaaagcgatttcccgtccggcagaacgacgtctgacctggggggggtaccgtaagatttttattgagcctaagcgtatcaagcaaggcgttaagttttggcaggacaatcaagagagtcttgctaaagcggaacaaaaatacggtgttccagctgaaatcattgtgtcgattatcggtgtggaaacccgctatggtcggattatgggtagctatcgtgtcttagatgccttggcaacactgggttttgattatcctcgccgtagtaagttctttctcgggcagctgaaagagtacctgcatctcgtcaaagaggagaaggtcgattttacttctctaaaaggctcctatgctggagcgatgggctttggacagtttattccttcaagctatcgtaattttgccatcgattttgatcaggatggtaagcgtgatatctggagcaataaaacggatgcgattggtagcgtggccaattactttgctgaacataaatggaaacccgggcagcctgtcatcagtggagtttctttcactaaggccgctgatgaagcttggtacagcgttggtcgcaagggtttgattccgcaaaatacgctcgctgaatgggtcgatcgtggtgtagaaccgcaactgaacttatccccggaagagaaagcgatcctgatgcaaatggagatcggtgatgataagcaatactggttaggtctgcataacttctatgttataactcgttacaaccacagtaagttgtatgccatggctgtttatcgcttaagtcaacagatcaaagacgcttatgagaaagcgactgttaaatcagtggccatgcagactaagagtaactaa

SEQ ID NO: 80877 - protein, 392 aa, Oceanospirillum sp. MED92
MKRSSVVSVLVTTGLLLMGCTATAEKEVASSSAKPQVKTDKADTSVAQKKAAMPAASKRMTQEELLASVRGGSYLDYPEAKVFIEEMKAEGFDEAYLRKVLGEAKRQTSILKAISRPAERRLTWGGYRKIFIEPKRIKQGVKFWQDNQESLAKAEQKYGVPAEIIVSIIGVETRYGRIMGSYRVLDALATLGFDYPRRSKFFLGQLKEYLHLVKEEKVDFTSLKGSYAGAMGFGQFIPSSYRNFAIDFDQDGKRDIWSNKTDAIGSVANYFAEHKWKPGQPVISGVSFTKAADEAWYSVGRKGLIPQNTLAEWVDRGVEPQLNLSPEEKAILMQMEIGDDKQYWLGLHNFYVITRYNHSKLYAMAVYRLSQQIKDAYEKATVKSVAMQTKSN

SEQ ID NO: 80878 - DNA, 1041 bp, marine gamma proteobacterium HTCC2207
  CDS (1)..(1041): transl_table=11
ttgaaaaaatatcttgcaacagccctactctctctcgcgagcctgacggcactgcctctggcgagcctcagtcacgcggactattcgacccatccagaagccgccgactttatcgatcttatggtagacaagcatgagtttgcccgagaggatattgttagctggttgagcgtagccaaacatcaagaatccatagtcaaggccatgagtcgccctgcggaaaaggtcaaaccctggtacgagtaccgcaaacactttatctctgatcgccgtatcaagggcggggtaaagttttggcaagagcatcaagaaattctggagcaggcggagcgtgattttggcgtagaccaagccattattgtcagcattatcggtgtcgaaaccaattacggcagcaataccggcagttataaagtggttgatgccctgaccaccctagcctttgactattacacctacaccaataagcgggaatcgagaaagcgcttttttaccgccgagctggaaaacctctttttactctcccgtgagcaaaatcagaatcccgtcgaactcaccggttcctatgccggagccatgggctggggacagtttatgccaagcagttatcgcgcctatgcggtggacttcgatgacgatcagtttgccgatatctggaacaatccgatagacgctattggcagcgtcgccagctacttttccgcccatcactggagacagggcgaaacagtcgcggtgcgcgccaatatcagcagcgatccagcagaggatacactcaacaaactccaccgcccgaaactctcactggcagaactgggtacccagggatataacattatcgagcaactgccacctgagaccaaagccctgccgatgcgctttagtgccaaatatggcaacgagtactggcttggtatgcacaatttttacgttatcagtcgctataacccgcgcaccaaatacgccatggctgtctaccagctgagtgaattaattcgtcaagaaaaatgcgcagtaacagatgcttgctcgcagcgctaa

SEQ ID NO: 80879 - protein, 346 aa, marine gamma proteobacterium HTCC2207
MKKYLATALLSLASLTALPLASLSHADYSTHPEAADFIDLMVDKHEFAREDIVSWLSVAKHQESIVKAMSRPAEKVKPWYEYRKHFISDRRIKGGVKFWQEHQEILEQAERDFGVDQAIIVSIIGVETNYGSNTGSYKVVDALTTLAFDYYTYTNKRESRKRFFTAELENLFLLSREQNQNPVELTGSYAGAMGWGQFMPSSYRAYAVDFDDDQFADIWNNPIDAIGSVASYFSAHHWRQGETVAVRANISSDPAEDTLNKLHRPKLSLAELGTQGYNIIEQLPPETKALPMRFSAKYGNEYWLGMHNFYVISRYNPRTKYAMAVYQLSELIRQEKCAVTDACSQR

SEQ ID NO: 80880 - DNA, 990 bp, delta proteobacterium MLMS-1
  CDS (1)..(990): transl_table=11
atgagcaggttgctgctgctgaccctgctgctgtgtctggcgcttggccggccggtggccgtggccggagaggttattgagctggaatcggccgcttaccagcagttgctgaccgaactggtggaagaacacggttttgcgcgggaggagctggtggagctctttaccggggtcaccatcaaccagcgcctcctggagttgatggacacccagtgggaggcccagccctatcatcgttatgtccaacggttgctgacctggtggaacgtcggtaatgggcggctgctgctcaggcgccacgccgaactgttggcgcaaatcgaggccgagttcggggtggagcgggagatcatcgtcgccatctgggggattgaaagcaattacggccagaccgaaggggcctttgaggtctttgaggtgctcaataccattttcgccgcctatccccgccgggccgagttttaccgccggcagctgatcgactttctgctgctctgccgggaaaacgggcttgatccccgcacggtgcggggctcttccggcggggccttgggtcaggcccagttcatcccctccagctttcgggcctatgccgttgattacgatggttccggccagcgcgatctctggcactccatccccgacgtgctggccagcatcgccaactacctgcgccatttcggctggcaaaaaggggccccacgctatgccgaactgggggatgagctgcatgacccccgcctgcttgaggccacccgcgccggacgggccggggtcctgccccgggccgagatcgaagcggtccagggagtagagctgccgccggtggccgatgatcggtcactgcgcattgtcggcctgcaacaggccgacggcaccacccgctacctggcagcctatcccaatttccaggccatcacccattggaacaattcctaccgttacgccatggcggtgatcgaactggcggagcagtttaatgctcaataa

SEQ ID NO: 80881 - protein, 329 aa, delta proteobacterium MLMS-1
MSRLLLLTLLLCLALGRPVAVAGEVIELESAAYQQLLTELVEEHGFAREELVELFTGVTINQRLLELMDTQWEAQPYHRYVQRLLTWWNVGNGRLLLRRHAELLAQIEAEFGVEREIIVAIWGIESNYGQTEGAFEVFEVLNTIFAAYPRRAEFYRRQLIDFLLLCRENGLDPRTVRGSSGGALGQAQFIPSSFRAYAVDYDGSGQRDLWHSIPDVLASIANYLRHFGWQKGAPRYAELGDELHDPRLLEATRAGRAGVLPRAEIEAVQGVELPPVADDRSLRIVGLQQADGTTRYLAAYPNFQAITHWNNSYRYAMAVIELAEQFNAQ

SEQ ID NO: 80882 - DNA, 987 bp, delta proteobacterium MLMS-1
  CDS (1)..(987): transl_table=11
atgaaggcaggcaaaaccaccatggccctggtcaccgtttttttattgctgctgggggccaaccaggccgccgcccagcaggctccctttgaccaatggcttgaagaactgcgaaccgaggctttggaacggggcatccgggccgagatcctggatgccgctttaagcgatatcgaacccatcgaacgggtgattgaacttgaccgccagcaaccggaattcaccctgaccttccaggagtaccgcgaccgggtggtgccccgctcacggatccaacggggccgcaaactgctggccgaacaccgggagttgcttaccgaaatcggccagcattacggggtgcagccccgctttatcgtcgccctctgggggattgaaaccgatttcgggaggatcaccggcggctttccggtaattcccgccatggccaccctggcccatgacggccgccgcagcaactacttccggggcgagttattaaacgctctgcagatcctcgacgaaggccatatcacccccgaagaaatgaagggctcctgggccggggccatgggccagagccagttcatgccatcaagttttatcaatttcgcagtggactacgacggcgatggccgccgggatatctggcacaccaccgaagatgtcttcgcctcggcggccaattatctcgcccaatcaggctggcgcgacgaccagacctggggccggcaggtacgtttgccaaacgatttcaaccatgacctggccggaatggagaaccgtaagcggatcggccagtggcaggagttgggggtgcgccgccccgatggctccgatctgcccacccgccaactgccggcctcaatcattatccccgatggagaaaaccagccggaactggcttatatggtgtatgaaaattttcgcaccaccctgaagtggaaccgttccaattattttgcgctggcggtgggcctgctctccgacgccatcgccgaacgctga

SEQ ID NO: 80883 - protein, 328 aa, delta proteobacterium MLMS-1
MKAGKTTMALVTVFLLLLGANQAAAQQAPFDQWLEELRTEALERGIRAEILDAALSDIEPIERVIELDRQQPEFTLTFQEYRDRVVPRSRIQRGRKLLAEHRELLTEIGQHYGVQPRFIVALWGIETDFGRITGGFPVIPAMATLAHDGRRSNYFRGELLNALQILDEGHITPEEMKGSWAGAMGQSQFMPSSFINFAVDYDGDGRRDIWHTTEDVFASAANYLAQSGWRDDQTWGRQVRLPNDFNHDLAGMENRKRIGQWQELGVRRPDGSDLPTRQLPASIIIPDGENQPELAYMVYENFRTTLKWNRSNYFALAVGLLSDAIAER

SEQ ID NO: 80884 - DNA, 1017 bp, Rickettsiella grylli
  CDS (1)..(1017): transl_table=11
atgagaaaaaacaaaagctcacccattaatttaaatacgttattgttattattgacactttctctggcttcctgtacggcttatgcaaacaaacctgaagtacaatcgtttattgatacgatggtgaaaaaatataattttgatcgtcaacaacttcaacagctttttaatacgatcaaaccacatcgctccattataacttcatttattacaccgaaagaacgtttaacctggtccgaatatcaatctatttttgtcacgaccaaacgcgcacaaatgggcgtcaatttttggaatgcacatgctaaaatattagctgaggcagaaaaacgatatggtgtccccgcatccattattgttgctattcttggtgttgaaacacgatatggtgaggtcacggggaaataccgtgtcattgattcattaagtaccttaagtttcaatacgacccgccgatcccatttttttaaacaagaacttacgcaatttttattactgagtcgagaaaatccggtcatcaatcctcagcttacaaaaggttcctatgccggtgctattggaaaggtacaatttatgcccagtaattaccgccatctttccgtggatgccacgcataaaggctatagcgatctcatccataatacagatgatgcgatactcagcattgccaattatttaaaattttttggttggatacgaaaaaatccgattgcggttccagcgcgattttctcgtagaacaccattccatctgcccccattgaataacaatatgacagtcaaggatttttcaaagtatcacatttaccccaaaaaagcggtcaattcgcatctgaaagcttttctgattgtacttcctctcaaaaaagggaacgagtactggttgggattcaataactttcaaacgattaagcactataacgcgagttcgctttatgccatggccgtttttcaattaagtcatttaattcaccatcttcgccaacacgagtatcgatcttatgcccataaaaaataa

SEQ ID NO: 80885 - protein, 338 aa, Rickettsiella grylli
MRKNKSSPINLNTLLLLLTLSLASCTAYANKPEVQSFIDTMVKKYNFDRQQLQQLFNTIKPHRSIITSFITPKERLTWSEYQSIFVTTKRAQMGVNFWNAHAKILAEAEKRYGVPASIIVAILGVETRYGEVTGKYRVIDSLSTLSFNTTRRSHFFKQELTQFLLLSRENPVINPQLTKGSYAGAIGKVQFMPSNYRHLSVDATHKGYSDLIHNTDDAILSIANYLKFFGWIRKNPIAVPARFSRRTPFHLPPLNNNMTVKDFSKYHIYPKKAVNSHLKAFLIVLPLKKGNEYWLGFNNFQTIKHYNASSLYAMAVFQLSHLIHHLRQHEYRSYAHKK

SEQ ID NO: 80886 - DNA, 969 bp, Oceanobacter sp. RED65
  CDS (1)..(969): transl_table=11
gtgttatccgccagtttcattcttctctttagtagctttagtgccgatgcagagcgttataccgagcacccaaagtacgagccattcattcaagaaatggtgagtgagcacgactataacgagcaagatctgcgagctatcttgtcgcaagccgaaaaaaaacaaggcattttggatgctatttctcgccctgctgaacgaaccaaagcatggtatgaatatcgtgagatttttctaaaacctaatcgtatcaatttaggtgtaaagttccttcaggatcacaaggaaacttttgataaagtagaagtgcaatatggtgttcctcgtgagctaattgctgccatcattggtgtagaaacatattacggcagaattacgggtagttaccgagtgattgatgcgttatccacattggcgtttgattatcccaaacgttcgcttttttatagagagttgaaaaactttttacttatggttcgtgagaatgatttagaggcgactgaattaatgggatcatacgcgggtgccatgggcttgggtcagttcattccgtcaagctatattagttacgcaagagactatgatggtgatggtaaaaaagatatttggaataatgtagacgatgccattgctagcgtagcctactacttcaagcgttatcattggcaaacgggtgagcctattgcctctgaagtgacgctcaataattcagaagccgacaagtacgcaaatgagaccttgagtttaggtggcgactttgacgtctggaaacaacgcggcgttaacgtgcctaaggatgtttctagtcgagaagcggcattgtttcgatatgagacagagaatggtcagcaatattggttggcgtataaaaacttttatgtgatcactcgctacaatcgctcgcgtttgtatgcgcgtgcggtttatgaattaagccaagaaattaaaaacgcctacggaaaaagctaa

SEQ ID NO: 80887 - protein, 322 aa, Oceanobacter sp. RED65
MLSASFILLFSSFSADAERYTEHPKYEPFIQEMVSEHDYNEQDLRAILSQAEKKQGILDAISRPAERTKAWYEYREIFLKPNRINLGVKFLQDHKETFDKVEVQYGVPRELIAAIIGVETYYGRITGSYRVIDALSTLAFDYPKRSLFYRELKNFLLMVRENDLEATELMGSYAGAMGLGQFIPSSYISYARDYDGDGKKDIWNNVDDAIASVAYYFKRYHWQTGEPIASEVTLNNSEADKYANETLSLGGDFDVWKQRGVNVPKDVSSREAALFRYETENGQQYWLAYKNFYVITRYNRSRLYARAVYELSQEIKNAYGKS

SEQ ID NO: 80888 - DNA, 987 bp, marine gamma proteobacterium HTCC2143
  CDS (1)..(987): transl_table=11
atgtttaggaaaatagcagttggtgcgaaggtattgttggttgcagtttgttttggtcagtatgctattgctgatgataattatgcggagcatcccatggcgctggcatttgtagaaaaaatggtttcgacgcacaatttcgatcggagttatatggaagccgctatggctagtgccacgcgcaagcagtcaattttggatgcaatcgctcgacctgccgaaaagacaaaaacctggggccagtatcgcaagatttttgtcaccgaaaagcgtactaagcttgggcgtgaatttatgaaaacgtatgctgatacactggccagagctgagcgagaatttggcgtaccaacggaaattattgccgcaatcataggtgttgaaacccgctatggtcgccaaaagggcaattatcgagtactggacgcgttggccacgttgagttttgattatccccgccgaagcaagtttttcagtggccagcttgaagaatattttttgctggtgcaagagcaaaattttgatgccgaaaccgtgaaaggatcttatgccggtgcgatgggttacggtcaatttatcccgagtagctaccgccattacgccatcgactttgacggtgatggtgtcgctgatattgttaataatcctgtagatgccattggcagtgttgccaattattttaagtcgcacggctgggttcctgatgggacggtgacggtgacggctaccgtgactgcagatcacaaggtcgatatggcaaaccagaaattgcggccaaaactgacggttgctgaattaaatgaccacggttttatcccctcgtccaagatagcaaatgaccagcctgcaacagcgatgcgtctagtcggcgacagtggtgaggaatactggattggtttgcataatttttatgtgattactcgatacaaccatagcaagctctatgcgatggcggtttatcaactaagcaatgaattgcgagctcaatag

SEQ ID NO: 80889 - protein, 328 aa, marine gamma proteobacterium HTCC2143
MFRKIAVGAKVLLVAVCFGQYAIADDNYAEHPMALAFVEKMVSTHNFDRSYMEAAMASATRKQSILDAIARPAEKTKTWGQYRKIFVTEKRTKLGREFMKTYADTLARAEREFGVPTEIIAAIIGVETRYGRQKGNYRVLDALATLSFDYPRRSKFFSGQLEEYFLLVQEQNFDAETVKGSYAGAMGYGQFIPSSYRHYAIDFDGDGVADIVNNPVDAIGSVANYFKSHGWVPDGTVTVTATVTADHKVDMANQKLRPKLTVAELNDHGFIPSSKIANDQPATAMRLVGDSGEEYWIGLHNFYVITRYNHSKLYAMAVYQLSNELRAQ

SEQ ID NO: 80890 - DNA, 987 bp, marine gamma proteobacterium HTCC2080
  CDS (1)..(987): transl_table=11
atgacgcgtcctgcgcacatggttttttggatcatgtttgggttgatactacccactatgagcttcgggggagagtactccgagcggactgaacgtgatgaggtcctggccaatgttgttgaacagggtgttgatcgcacgtgggcggctgcgctgctggatcaggccgagcgcaagcaaagtattttggatgcgatttcaagaccggcagaaaaaactaagccttggtatgagtaccgtaaaatatttttaacggataagcgtgctcgagagggtgtggcatttgcacagcaaaacgcggagaccctcgcaaaagtcagtgatcaaacaggcgtgccggcatcagtcattacagcgattattggagttgaaaccttctacgggcgtattaccgggagttacagagttattgatgctttggcgacactcgcgtttgactaccccaagcgctcgccgttttttacccgtgagctccaaaattttctcgtgttggcttacgaaagcgggaaagatccaatagcgctaaagggttcctatgcaggtgcgatgggttatggtcaattcatgccatcgagttaccgggcttatgctgttgattatgatggtgatggcgttgccgacatctggactaatgcagacgacgcgatagccagcgttgccaactactttctccgacatggttggcaacccggcgctcctgttattgtgccagccaattacgacggcgataattccgagatgttcgccggtgggctaaagccagagaagacggttggagaacttgctgaggggggctttgcaccgcgaagtgctaccgatatttctcttgtcgccacgccgttacgcctcgagggtgctgaaggttatgagtattggctgtgtcttgaaaatttttatgtgattacccgctataaccacagtgcaatgtatgcgttgagcgtctggcagctgagtcaagagattgagagcttagcggcaggtgcctaa

SEQ ID NO: 80891 - protein, 328 aa, marine gamma proteobacterium HTCC2080
MTRPAHMVFWIMFGLILPTMSFGGEYSERTERDEVLANVVEQGVDRTWAAALLDQAERKQSILDAISRPAEKTKPWYEYRKIFLTDKRAREGVAFAQQNAETLAKVSDQTGVPASVITAIIGVETFYGRITGSYRVIDALATLAFDYPKRSPFFTRELQNFLVLAYESGKDPIALKGSYAGAMGYGQFMPSSYRAYAVDYDGDGVADIWTNADDAIASVANYFLRHGWQPGAPVIVPANYDGDNSEMFAGGLKPEKTVGELAEGGFAPRSATDISLVATPLRLEGAEGYEYWLCLENFYVITRYNHSAMYALSVWQLSQEIESLAAGA

SEQ ID NO: 80892 - DNA, 1011 bp, Pseudomonas putida GB-1
  CDS (1)..(1011): transl_table=11
atgcaagcagtgcgtaactgggctgcccgttgtgcgccgtggatcggtgcggtgggcctgttcggcgctgtacagctggcccatgccggtgattacgagggctcgccgcaggtaaccgagttcgttggcgaaatgagccgcgactatggttttgcccctgagcaactgatgggcgtgttccgtgaggtacagcgcaagcagtcgatcctcgacgccatttcgcgcccggccgaacgggtaaaaccgtggaaggactaccggccgatgttcctcaccgatgcgcgcattgcccgcggtgtagatttctggcgccagcatgaggcggtattggcgcgtgccgagcaggaatacggcgtaccggcgcagtacattgtcgcgatcatcggcgtggaaaccttcttcggccgcaataccggcaactaccgcgtgatcgacgccctgtcgaccttgggcttcgactacccgccacgggccgaattcttccgcaaggagctgcgcgagttcctgctgctggcgcgtgaggaacagctcgaccccttgacgctcaagggctcgtacgccggcgccatgggcttgccgcagttcatgccaagcagttttcgcaactacgcggtggacttcgacggcgacggtcatatcaatatctggaacaacccggacgatgccatcggcagcgtggccagctacttcaagcgccacggctgggtggctggtgagggtgtggtcagccgtgcctggatcgaaggtgagcgcgcagacgaaggcttgactacaggcatcgagccggtgaaaacggtaggggagttgcgcgggcttggctggtcggttcatgattcgctgcgcgatgatctgccggttaccgccttccgtctcgagggcgacaacggccccgagtactggatgggcctgaagaacttctatgcgatcactcgctacaaccgcagcgtgatgtatgccatggcggtgcatcagctcgcggaacagctggttcaagtacggggcgtcaagtaa

SEQ ID NO: 80893 - protein, 336 aa, Pseudomonas putida GB-1
MQAVRNWAARCAPWIGAVGLFGAVQLAHAGDYEGSPQVTEFVGEMSRDYGFAPEQLMGVFREVQRKQSILDAISRPAERVKPWKDYRPMFLTDARIARGVDFWRQHEAVLARAEQEYGVPAQYIVAIIGVETFFGRNTGNYRVIDALSTLGFDYPPRAEFFRKELREFLLLAREEQLDPLTLKGSYAGAMGLPQFMPSSFRNYAVDFDGDGHINIWNNPDDAIGSVASYFKRHGWVAGEGVVSRAWIEGERADEGLTTGIEPVKTVGELRGLGWSVHDSLRDDLPVTAFRLEGDNGPEYWMGLKNFYAITRYNRSVMYAMAVHQLAEQLVQVRGVK

SEQ ID NO: 80894 - DNA, 1317 bp, Pseudomonas putida GB-1
  CDS (1)..(1317): transl_table=11
atgctcttccgtcttctcccccgttgggaaacccgccagctgatcgcggcctccagcttcatcctgcttgtggcctgcgcggaaaaacccaccgccgccgacgcactgccgctggcccctgcccaacccgctccagtggtgactgtgcccggcacaacgcctgacgtcagcactgaaatccagcctctgcaaaccttcgcccagtggcaggcaggcttccgccagcaagccctgcaagccggcatctcgccgagcaccttcgaccgagccttcctcggcgtcacccccgatatggacgtgatcaaggccgaccgcagccagccggagttcacccgcccggtatgggaatacctcgaaggcgccctatcgcccctgcgcgtgcgcaacggcaagaagctgctggagcagaacgccgaactgctgacccgcctcgaacaacgctatggcgtcgaccgccaggtgctggtcgcggtgtggggcatggaaagcaactttggccagttccagggcaacaagtcggtgatccgctcgctggccaccctggcctatgagggccgccgcccgcagttcgcccaggaccagctcatcgccgcgctacagatcattcagcatggcgacatccagcccgaggccatgcgcggttcgtgggccggcgccatgggccagacccagttcatcccgaccacctacaacacccatgccgtggacttcgacggtgatggccgccgcgacatctggaacagcacaccggacgccctagcctcgaccgcgcattacctgcaaagctcgggctggaagcgtggtcagccgtggggcttcgaggtacaggtgccggctggtttcgacttctggcaggctgatggcgcgctgcgcaaaccggtgagcgaatggctggcgatgggcgtgaaactgccagcaggcacccagctgccggccggtagcaaccagctgtctgccgccctgctgctgccggctggcgcgcgcgggccggcgttcctggtactggacaacttccgcgccattctcaagtacaacaactcgtcgtcctacgcgctggcagtgagcctgttgggtgaccgctttagcggctggggcttcattgccggcgcttggccgaaggaagacttgccgctcagccgcagcgagcgcatggagttgcagaacctgctgaacagccgtgggcatgatgcgggcaatgccgatggcattatcggcgccaacacccgcaaggcaatccgtaatgcccagcaggggctggggtggccggcggatggatacccgacccacaagctgctcgagagcttgcgccagcagtga

SEQ ID NO: 80895 - protein, 438 aa, Pseudomonas putida GB-1
MLFRLLPRWETRQLIAASSFILLVACAEKPTAADALPLAPAQPAPVVTVPGTTPDVSTEIQPLQTFAQWQAGFRQQALQAGISPSTFDRAFLGVTPDMDVIKADRSQPEFTRPVWEYLEGALSPLRVRNGKKLLEQNAELLTRLEQRYGVDRQVLVAVWGMESNFGQFQGNKSVIRSLATLAYEGRRPQFAQDQLIAALQIIQHGDIQPEAMRGSWAGAMGQTQFIPTTYNTHAVDFDGDGRRDIWNSTPDALASTAHYLQSSGWKRGQPWGFEVQVPAGFDFWQADGALRKPVSEWLAMGVKLPAGTQLPAGSNQLSAALLLPAGARGPAFLVLDNFRAILKYNNSSSYALAVSLLGDRFSGWGFIAGAWPKEDLPLSRSERMELQNLLNSRGHDAGNADGIIGANTRKAIRNAQQGLGWPADGYPTHKLLESLRQQ

SEQ ID NO: 80896 - DNA, 1131 bp, Actinobacillus actinomycetemcomitans
  CDS (1)..(1131): transl_table=11
atgatgaaattaaactgtattttaaaaatatccggaatttccaccgcactttttctagcgggttgttcctcaaattcaagtgcgccgacgcaatcctctgagcaggcgaattctgttacggctgtgaatcccactgcggtgtacagtaagccccgcactttggataacttcaacgattatgtgaatttcttaaaaggtaaagcagcggcagaaggcgtttctgccgacgtattgaatgcacaaaataatattaattatattcaaaaatccgtggatttggacgatcagcaagcgggcagaattcgcaagcgtgatccaaatgccccgccgatcatcaatccgaacggcacgaccaattacttaaatcgtgtattaaccaagaataaagtagacacggcagaagcacgttattgggaacaattgccgcagcttgaaaatgcttcaaagaaattcagcgtaccgaaaaattatctgttagccttgtggggcatggagagtagctttggctattatcagggcaattacgatgtgttatccaccttagccactcttgcttttgacggacgccgtgaagccttattcagcaaagaattcatcgccgccatgaaaatgctacagcgcgatcatattcaacgctataaaatgctgggttcatgggcaggcgccatgggacagacccaattcatgccaagctcttacctcagctacgccgcagatggcaacaatgatggcgagaaaaatatctggaccgatcattatgatgttttcgcctccatcgctaattatttacacaccgtcggctggaacgaaaacctgccatggggtgtagaagttgcactaacccaaccgttagacatggcgcttgctggcacagaggaaaataaaaaacgttctttaagcgactggcaaaatatgggtgtcaccctaaaataccaaactccacaaacacaacaaaaactgaccgcactttccggcgcacaagacttatggctggtaaggccggatcgtgaattagggcgtgcatttttggtctctaataattacagaaccttgctacattggaataaatccaactattttgctgtgagtattggaatgtttgctgataggattgagcaaagagtcaaatag

SEQ ID NO: 80897 - protein, 376 aa, Actinobacillus actinomycetemcomitans
MMKLNCILKISGISTALFLAGCSSNSSAPTQSSEQANSVTAVNPTAVYSKPRTLDNFNDYVNFLKGKAAAEGVSADVLNAQNNINYIQKSVDLDDQQAGRIRKRDPNAPPIINPNGTTNYLNRVLTKNKVDTAEARYWEQLPQLENASKKFSVPKNYLLALWGMESSFGYYQGNYDVLSTLATLAFDGRREALFSKEFIAAMKMLQRDHIQRYKMLGSWAGAMGQTQFMPSSYLSYAADGNNDGEKNIWTDHYDVFASIANYLHTVGWNENLPWGVEVALTQPLDMALAGTEENKKRSLSDWQNMGVTLKYQTPQTQQKLTALSGAQDLWLVRPDRELGRAFLVSNNYRTLLHWNKSNYFAVSIGMFADRIEQRVK

SEQ ID NO: 80898 - DNA, 1062 bp, Piscirickettsia salmonis
  CDS (1)..(1062): transl_table=11
atgagacgatcttattggctagggttacttatatttttaaatggtttttttattaccactcacgcggcatctaatacgcttgctgtttctgcatctaccaactctaaatctgctgaatatattcagcgtgctgatgtaaagtcttatattaatgatttagtaaaacaatatggttttagcaaagcacagcttgagcggtggtttcatcatgctaaagctaatcagcgtgctctggaaatattacagcgtccggcagaaaaagtgtggacatggcagcagtatcgtagttggctggtgtcgacaaaacgagcgaaagaaggcgctgagttttggcaaagtaatcggcagacattaaggcgagcagagcgtatgtatggtgtgccaccacaggttattttagccattattggtgtagagagctcttatggaaaaaatgtcggtggttttccaacctttaatgtactaacaacgttagcgtttgattataagcggcgcagtgagttttttaagcgtgaattgactgaatttttgctgcttatgcgtgatcagaaaatgaatccgatgcaagttcaaggctcttatgctggagcgctaggactaccgcagtttatgccaagtagctatcgttattatgcggtagacttttctggtgatggccataaaaatttatttagcaacgatgctgatgtgatcggtagtattggaaattattttaaacgtcatggttggccaggtaatcaaccaattgcagtgaaagcaaaaatatccggtgatcaatttaatgctattattaaaatgggtattgaaccaaaatatacagtcactgagttggctaagtttggtattgagtctcaggaaaaagttgatcctagtttaaaggcagcgcttattgagttagatggtaaaaatggtcctgagtattggctggcttttcaggatttttatgccatcacacgctataatcacagtcaaaaatatgcaatggcggtgtatgatttgagtcaagacattgctcattatcgtcgtttagcactgaaagaaagccactcaaaaggctcttaa

SEQ ID NO: 80899 - protein, 353 aa, Piscirickettsia salmonis
MRRSYWLGLLIFLNGFFITTHAASNTLAVSASTNSKSAEYIQRADVKSYINDLVKQYGFSKAQLERWFHHAKANQRALEILQRPAEKVWTWQQYRSWLVSTKRAKEGAEFWQSNRQTLRRAERMYGVPPQVILAIIGVESSYGKNVGGFPTFNVLTTLAFDYKRRSEFFKRELTEFLLLMRDQKMNPMQVQGSYAGALGLPQFMPSSYRYYAVDFSGDGHKNLFSNDADVIGSIGNYFKRHGWPGNQPIAVKAKISGDQFNAIIKMGIEPKYTVTELAKFGIESQEKVDPSLKAALIELDGKNGPEYWLAFQDFYAITRYNHSQKYAMAVYDLSQDIAHYRRLALKESHSKGS

SEQ ID NO: 80900 - DNA, 23 bp, Artificial sequence
  primer
atgttcaagcgtcgttatgtaac

SEQ ID NO: 80901 - DNA, 22 bp, Artificial sequence
  primer
ttactgtactcgcgccagcgcc

SEQ ID NO: 80902 - protein, 321 aa, Artificial sequence
  consensus sequence
  Variant (2)..(56): Xaa in position 2 to 56 is any amino acid
  Variant (57)..(70): Xaa in position 57 to 70 is any or no amino acid
  Variant (72)..(80): Xaa in position 72 to 80 is any amino acid
  Variant (81)..(81): Xaa in position 81 is any or no amino acid
  Variant (83)..(89): Xaa in position 83 to 89 is any amino acid
  Variant (92)..(95): Xaa in position 92 to 95 is any amino acid
  Variant (97)..(100): Xaa in position 97 to 100 is any amino acid
  Variant (102)..(102): Xaa in position 102 is any amino acid
  Variant (105)..(106): Xaa in position 105 to 106 is any amino acid
  Variant (108)..(110): Xaa in position 108 to 110 is any amino acid
  Variant (112)..(118): Xaa in position 112 to 118 is any amino acid
  Variant (120)..(120): Xaa in position 120 is any amino acid
  Variant (123)..(123): Xaa in position 123 is any amino acid
  Variant (125)..(127): Xaa in position 125 to 127 is any amino acid
  Variant (128)..(140): Xaa in position 128 to 140 is any or no amino acid
  Variant (142)..(144): Xaa in position 142 to 144 is any amino acid
  Variant (146)..(147): Xaa in position 146 to 147 is any amino acid
  Variant (148)..(148): Xaa in position 148 is any or no amino acid
  Variant (150)..(166): Xaa in position 150 to 166 is any amino acid
  Variant (167)..(168): Xaa in position 167 to 168 is any or no amino acid
  Variant (171)..(171): Xaa in position 171 is any amino acid
  Variant (175)..(175): Xaa in position 175 is any amino acid
  Variant (177)..(178): Xaa in position 177 to 178 is any amino acid
  Variant (181)..(181): Xaa in position 181 is any amino acid
  Variant (185)..(187): Xaa in position 185 to 187 is any amino acid
  Variant (192)..(192): Xaa in position 192 is any amino acid
  Variant (195)..(195): Xaa in position 195 is any amino acid
  Variant (197)..(204): Xaa in position 197 to 204 is any amino acid
  Variant (205)..(206): Xaa in position 205 to 206 is any or no amino acid
  Variant (208)..(210): Xaa in position 208 to 210 is any amino acid
  Variant (212)..(212): Xaa in position 212 is any amino acid
  Variant (214)..(214): Xaa in position 214 is any amino acid
  Variant (216)..(219): Xaa in position 216 to 219 is any amino acid
  Variant (221)..(221): Xaa in position 221 is any amino acid
  Variant (223)..(287): Xaa in position 223 to 287 is any amino acid
  Variant (288)..(300): Xaa in position 288 to 300 is any or no amino acid
  Variant (303)..(307): Xaa in position 303 to 307 is any amino acid
  Variant (310)..(310): Xaa in position 310 is any amino acid
  Variant (312)..(313): Xaa in position 312 to 313 is any amino acid
  Variant (316)..(317): Xaa in position 316 to 317 is any amino acid
  Variant (319)..(320): Xaa in position 319 to 320 is any amino acid
FXXXXXXXXXXXXXXXXXXXXXXXXXXXXXXXXXXXXXXXXXXXXXXXXXXXXXXXXXXXXXXXXXXXXXGXXXXXXXXXXLXXXXXXXGVXXXXIXXXXGXETXXGXXXGXXXXXXXLXTLXFXXXXXXXXXXXXXXXXRXXXFXXXLXXXXXXXXXXXXXXXXXXXGSXAGAXGXXQFXPSSXXXYAVDXDGXGXXXXXXXXXXDXXXSXAXYXXXXGXWXXXXXXXXXXXXXXXXXXXXXXXXXXXXXXXXXXXXXXXXXXXXXXXXXXXXXXXXXXXXXXXXXXXXXXXXXXXXXXNFXXXXXYNXSXXYAXXVXXL

SEQ ID NO: 80903 - protein, 38 aa, Artificial sequence
  protein pattern
  Variant (3)..(3): Xaa in position 3 is Phe, Trp or Tyr
  Variant (7)..(7): Xaa in position 7 is Ile, Leu or Met
  Variant (9)..(10): Xaa in position 9 to 10 is any amino acid
  Variant (13)..(13): Xaa in position 13 is Ile, Leu or Met
  Variant (15)..(15): Xaa in position 15 is Gly, Ser or Thr
  Variant (16)..(16): Xaa in position 16 is Ala, Ser or Thr
  Variant (17)..(20): Xaa in position 17 to 20 is any amino acid
  Variant (22)..(22): Xaa in position 22 is any amino acid
  Variant (24)..(24): Xaa in position 24 is any amino acid
  Variant (25)..(25): Xaa in position 25 is Asp, Asn, Ser or Thr
  Variant (26)..(26): Xaa in position 26 is any amino acid
  Variant (27)..(27): Xaa in position 27 is Asp, Asn or Ser
  Variant (28)..(30): Xaa in position 28 to 30 is any amino acid
  Variant (31)..(31): Xaa in position 31 is Asp or Asn
  Variant (32)..(32): Xaa in position 32 is Phe, Ile, Leu or Val
  Variant (33)..(34): Xaa in position 33 to 34 is any amino acid
  Variant (35)..(35): Xaa in position 35 is Ala, Asp, Gly, Asn, Pro, Ser or Thr
  Variant (36)..(37): Xaa in position 36 to 37 is any amino acid
  Variant (38)..(38): Xaa in position 38 is Ala, Asp or Thr
GSXAGAXGXXQFXPXXXXXXAXDXXXXXXXXXXXXXXX

SEQ ID NO: 80904 - protein, 46 aa, Artificial sequence
  protein pattern
  Variant (2)..(3): Xaa in position 2 to 3 is any amino acid
  Variant (4)..(5): Xaa in position 4 to 5 is any or no amino acid
  Variant (8)..(9): Xaa in position 8 to 9 is any amino acid
  Variant (10)..(10): Xaa in position 10 is Ala, Asp, Glu, Asn, Gln or Ser
  Variant (11)..(11): Xaa in position 11 is any amino acid
  Variant (12)..(12): Xaa in position 12 is Ile, Leu or Val
  Variant (13)..(13): Xaa in position 13 is Ala, Leu or Val
  Variant (14)..(14): Xaa in position 14 is Ala, Gly or Ser
  Variant (15)..(15): Xaa in position 15 is Phe, Ile, Leu or Val
  Variant (16)..(16): Xaa in position 16 is any amino acid
  Variant (18)..(18): Xaa in position 18 is Ile, Leu, Met or Val
  Variant (20)..(20): Xaa in position 20 is Ser or Thr
  Variant (21)..(21): Xaa in position 21 is any amino acid
  Variant (22)..(22): Xaa in position 22 is Phe, Trp or Tyr
  Variant (24)..(26): Xaa in position 24 to 26 is any amino acid
  Variant (28)..(32): Xaa in position 28 to 32 is any amino acid
  Variant (33)..(33): Xaa in position 33 is Asp, Glu, Asn or Ser
  Variant (34)..(34): Xaa in position 34 is Ala, Ser or Val
  Variant (36)..(36): Xaa in position 36 is any amino acid
  Variant (38)..(38): Xaa in position 38 is Ile or Leu
  Variant (39)..(45): Xaa in position 39 to 45 is any amino acid
  Variant (46)..(46): Xaa in position 46 is Ala, Asp, Gly, Pro, Ser or Thr
AXXXXGVXXXXXXXXXGXEXXXGXXXGXXXXXXXLXTXXXXXXXXX

SEQ ID NO: 80905 - protein, 22 aa, Artificial sequence
  protein pattern
  Variant (2)..(2): Xaa in position 2 is Phe or Tyr
  Variant (3)..(3): Xaa in position 3 is any amino acid
  Variant (4)..(4): Xaa in position 4 is Ala, Thr or Val
  Variant (5)..(5): Xaa in position 5 is Ile, Leu or Val
  Variant (6)..(7): Xaa in position 6 to 7 is any amino acid
  Variant (8)..(8): Xaa in position 8 is Trp or Tyr
  Variant (10)..(10): Xaa in position 10 is any amino acid
  Variant (11)..(11): Xaa in position 11 is Arg or Ser
  Variant (12)..(13): Xaa in position 12 to 13 is any amino acid
  Variant (16)..(16): Xaa in position 16 is any amino acid
  Variant (17)..(17): Xaa in position 17 is Ala, Gly, Ser or Thr
  Variant (19)..(20): Xaa in position 19 to 20 is any amino acid
  Variant (22)..(22): Xaa in position 22 is Ala, Gly or Ser
NXXXXXXXNXXXXYAXXVXXLX

SEQ ID NO: 80906 - DNA, 777 bp, Escherichia coli
  CDS (1)..(777): transl_table=11
atgcctcgttttgcagctaatttatccatgatgttcaccgaagtgccttttattgaacgcttcgccgcagcgcgaaaagccgggttcgatgctgtggaatttctgtttccctataactactccaccctgcaaatccaaaagcaactggagcaaaaccatctgacactggcgctgttcaataccgctcccggagatattaatgcgggggaatggggattatccgcccttcccggacgtgagcacgaagcacacgcagacatcgacctggcactggaatatgcattggcgctcaattgtgaacaagtccatgtgatggcaggcgtcgtgcccgctggcgaagatgctgaacggtaccgggcagtatttatcgataatatccgctacgctgccgaccgctttgcgccacacggcaagcgaatattagttgaagcactcagccccggcgttaagcctcattatctcttctccagccagtatcaggcactggctattgttgaagaggttgcgcgagataacgtgtttattcaactagatacttttcatgcgcaaaaagtagatggcaacctgacgcatttaatccgcgactacgccgggaaatatgcgcacgtacaaattgccggactacctgatcgacatgaaccggacgatggagaaatcaactatccgtggctgttccgcctgttcgatgaggtgggatatcagggctggatcggttgtgaatataaacctcgtggcctcaccgaagaagggcttggctggtttgacgcctggcgctaa

SEQ ID NO: 80907 - protein, 258 aa, Escherichia coli
MPRFAANLSMMFTEVPFIERFAAARKAGFDAVEFLFPYNYSTLQIQKQLEQNHLTLALFNTAPGDINAGEWGLSALPGREHEAHADIDLALEYALALNCEQVHVMAGVVPAGEDAERYRAVFIDNIRYAADRFAPHGKRILVEALSPGVKPHYLFSSQYQALAIVEEVARDNVFIQLDTFHAQKVDGNLTHLIRDYAGKYAHVQIAGLPDRHEPDDGEINYPWLFRLFDEVGYQGWIGCEYKPRGLTEEGLGWFDAWR

SEQ ID NO: 80908 - DNA, 783 bp, Bombyx mori
  CDS (1)..(783)
atgaaattctgtgctaatctgtcttttatgtttgctgaagcttcttccatttgggaacgatatgctttggctaaagacgctggatttaaggctgtagaatcgggtttccctttgggttttagcttagaacaagtaagaaatgcaaaacaaagcgccggcttacaacaaatcgcgattaacttaaaaacaggagacacgaccaaaggtgaagttggcgtaacttctgttccgggtaaagaagacgaatttaaaacaaatttgaatacgacaatcgaatatgcgaaggccttggacgcgaaaaaaattcacataatggctggtaaagtggaaaatccaactccgaaacattgggagacgtttgagaaaaatttgctatatgctgttgacgtcctaaaaggagagaatatccaaggactaatcgaaccaatcaaccagtattctatgcccaaatatttcttgagtgattatggaagagctgtggacattattaaacgtattgacagtccaaatttgagattgatgttggacatttttcatcttcagcaaatcgctggcgacattactcataatattacgaaattattgccatacattggacatgtgcaaatagctcaggttccgaatcgtaacgagccggacacgcccggagagataaactacaaatatgttctagaacacttggctaagagcggatacgatgaatgggttggactcgaatataaagccatcggaaacacgaaggatggtttgacttggatcaacaattatggttacagtctttga

SEQ ID NO: 80909 - protein, 260 aa, Bombyx mori
MKFCANLSFMFAEASSIWERYALAKDAGFKAVESGFPLGFSLEQVRNAKQSAGLQQIAINLKTGDTTKGEVGVTSVPGKEDEFKTNLNTTIEYAKALDAKKIHIMAGKVENPTPKHWETFEKNLLYAVDVLKGENIQGLIEPINQYSMPKYFLSDYGRAVDIIKRIDSPNLRLMLDIFHLQQIAGDITHNITKLLPYIGHVQIAQVPNRNEPDTPGEINYKYVLEHLAKSGYDEWVGLEYKAIGNTKDGLTWINNYGYSL

SEQ ID NO: 80910 - DNA, 798 bp, Mesorhizobium loti MAFF303099
  CDS (1)..(798): transl_table=11
atgccgcgtttttccgccaatctgtccatgctctttgccgagcatgatttcctcgaccgctttgatgcagccgcccgcgcggggttcaagggcgtcgaatatatcggcccttacgatcatgcgccggaggtggtggccgcgaggctgaagaagaacggcctgacacaggtgctgttcaacctgccggccggcgactggggcaagggcgagcgcggcattgccgtgctgccggaccgcgtgccggaattccgccagggcatcgccaaggccatcacctacgcacaggcgctcggctgccagcaggtcaattgcctggccggcatcgcgcccgccggcgtcgaccgcaaggtgctcgaggatgttttcgccgaaaacctcgccttcgcggcggagaagctggaacgggtcggaatccggctgctgatcgagccgatcaacacgcgcgacattccaggcttcttcctgaactactcggaccaggcactggcgctgatcgaccgcgtcggctcgaaaaacctgttcctgcaatacgacatctatcacatgcagatcatggagggggatctcgcccgtaaaatcgaggccaacctcggccgcatcgcgcatatccagcttgcggacaatcccggccgtcacgagccggggacgggcgagatcaactatcccttcctctacgatcacatcgaccgcatcggctatgccggctggatcggggccgaatacaagccgaaagccggcaccgaggcagggctgggctggttcagggacctgactgggcaagggagcgctgcggcttag

SEQ ID NO: 80911 - protein, 265 aa, Mesorhizobium loti MAFF303099
MPRFSANLSMLFAEHDFLDRFDAAARAGFKGVEYIGPYDHAPEVVAARLKKNGLTQVLFNLPAGDWGKGERGIAVLPDRVPEFRQGIAKAITYAQALGCQQVNCLAGIAPAGVDRKVLEDVFAENLAFAAEKLERVGIRLLIEPINTRDIPGFFLNYSDQALALIDRVGSKNLFLQYDIYHMQIMEGDLARKIEANLGRIAHIQLADNPGRHEPGTGEINYPFLYDHIDRIGYAGWIGAEYKPKAGTEAGLGWFRDLTGQGSAAA

SEQ ID NO: 80912 - DNA, 783 bp, Pasteurella multocida subsp. multocida str. Pm70
  CDS (1)..(783): transl_table=11
atgccaaaatttgctgcaaatttaaccatgatgtttactgaagtgccttttttagatcgttttgaagcggcgtcgaaagcgggctttaaatatgtggaatatttatggccttatgactatcccgcctcagtgttaaaagaaaaactggtgcaatatgggctgaagcaagtgttatttaatacggctgcgggaaatattgatcaaggggagtggggcgtgtcagcgattccgggacgcgaacaagacagtcatcgtgatattgatttagccctggaatatgcgttagcactcgattgcccgaatgttcatattatggcagcggttgtaccagaaggtgcggatcgcgagctgtataaacgtacctttgtgcagaatcttcgttacgcggcagaaaaattcaaaccgcatggtattaagattctactcgaagccttaagtccacaagtgaaaccaaattatttgctaaaaagtcaatttgatacattagacattgtgaatttagttgatcgggataatgtctttatccagcttgattattttcatgcccaaaatgtcgatggcaagttgtcacagctgacagatttgttgaaagacaaagtggcacatattcaaattgcctcggtaccagatcgtcatgagccgaatgaaggagaaattaactacacttatttatttgataagttagatcaaatgggctatcgcggctttattggctgtgaatataagccaaaaatcgaaactgtcgtcggattagattggtttgcgccttataaagacgcgtaa

SEQ ID NO: 80913 - protein, 260 aa, Pasteurella multocida subsp. multocida str. Pm70
MPKFAANLTMMFTEVPFLDRFEAASKAGFKYVEYLWPYDYPASVLKEKLVQYGLKQVLFNTAAGNIDQGEWGVSAIPGREQDSHRDIDLALEYALALDCPNVHIMAAVVPEGADRELYKRTFVQNLRYAAEKFKPHGIKILLEALSPQVKPNYLLKSQFDTLDIVNLVDRDNVFIQLDYFHAQNVDGKLSQLTDLLKDKVAHIQIASVPDRHEPNEGEINYTYLFDKLDQMGYRGFIGCEYKPKIETVVGLDWFAPYKDA

SEQ ID NO: 80914 - DNA, 798 bp, Pseudomonas aeruginosa PAO1
  CDS (1)..(798): transl_table=11
atgccccgcttcgccgccaacctcagcatgctctacccccgccacgacttcctcgaacgcttcgccgccgccgcggcggacggcttcgagggcgtggagtacctgttcccctatgcctaccctgcggccgaactgaaggcccggctggacgaccacggcctgcgccaggtgctgttcaatgccgcacccggcgactgggacaagggcgagcgcggcctggccagcctgccggggcgcgaggccgaattccgccgcgccatcgcccaggccatcgactatgcccaggtcctcggcaaccgccacatccatgtcatggccggactgctgccggccggcgccgaccgcatccgccaccgcgagacctacctcgacaacctcgcccatgccgcccgcgaggccgccggcgccgggctgacggtgctcatagagccgatcaacaaccgcgacatgccgggcttcttcctcacccgccaggacgacgcccaggccatctgccgcgaggtcggcgcggacaacctgcaggtacagttcgactgctaccactgccagatcgtcgagggcgacctggccaccaccctgcgtcgcgacatcggcaatatcggccacgtccagatcgccggggtacccgaccgccacgagccggatgacgacaacgaagtgaactacccctacctgttcgagctactcgaccggctcggctaccagggctggatcggctgcgagtaccgtccgcgcggcgacacctcggcaggcctggaatggctgcggcgctggcgcgctactcgacgcgacggatga

SEQ ID NO: 80915 - protein, 265 aa, Pseudomonas aeruginosa PAO1
MPRFAANLSMLYPRHDFLERFAAAAADGFEGVEYLFPYAYPAAELKARLDDHGLRQVLFNAAPGDWDKGERGLASLPGREAEFRRAIAQAIDYAQVLGNRHIHVMAGLLPAGADRIRHRETYLDNLAHAAREAAGAGLTVLIEPINNRDMPGFFLTRQDDAQAICREVGADNLQVQFDCYHCQIVEGDLATTLRRDIGNIGHVQIAGVPDRHEPDDDNEVNYPYLFELLDRLGYQGWIGCEYRPRGDTSAGLEWLRRWRATRRDG

SEQ ID NO: 80916 - DNA, 777 bp, Escherichia coli O157:H7 EDL933
  CDS (1)..(777): transl_table=11
atgttacgtttctctgctaatttatcgatgttatttggtgaatatgattttctcgcccgttttgagaaagctgcgcagtgtggttttcgcggcgttgaatttatgtttccttatgactacgacattgaagaattaaaacaggtgctggcgagtaataaactcgaacatacgctgcacaatttaccggcgggtgactgggcggcgggggagcgcggtattgcctgtattcctggccgtgaagaagagtttcgggatggcgtagcagcagcgattcgttatgcccgtgcgctgggtaataaaaatattaactgtctggtcggtaaaacgccggctggtttcagcagtgaacagattcacgcaacgcttgtagaaaacctgcgttatgccgcgaatatgctgatgaaagaagatattttattactgattgaacctattaaccattttgatattcctggtttccatctcaccggaactcggcaggcgctgaaattgattgatgatgttggttgctgcaatttgaaaattcagtatgacatttatcacatgcagcggatggaaggtgaattaaccaacactatgacgcaatgggctgataaaattggtcacctgcaaattgccgataatccgcatcgcggcgaaccggggaccggagaaattaattatgattatctctttaaggtaatcgaaaattctgactacaacggttgggttgggtgtgaatataaaccccaaaccaccacggaagccggtttacgctggatggatccgtaccgttaa

SEQ ID NO: 80917 - protein, 258 aa, Escherichia coli O157:H7 EDL933
MLRFSANLSMLFGEYDFLARFEKAAQCGFRGVEFMFPYDYDIEELKQVLASNKLEHTLHNLPAGDWAAGERGIACIPGREEEFRDGVAAAIRYARALGNKNINCLVGKTPAGFSSEQIHATLVENLRYAANMLMKEDILLLIEPINHFDIPGFHLTGTRQALKLIDDVGCCNLKIQYDIYHMQRMEGELTNTMTQWADKIGHLQIADNPHRGEPGTGEINYDYLFKVIENSDYNGWVGCEYKPQTTTEAGLRWMDPYR

SEQ ID NO: 80918 - DNA, 777 bp, Sinorhizobium meliloti 1021
  CDS (1)..(777): transl_table=11
atgcccgtttttgccgccaatctgacgatgatgttcaccgagttgccgttcctcgaccgcttcgacgcggccgccgacgccgggttcgcagccgtcgagtatctttttccctacgaggtgccgccggaagcgatcgccgaacggcttgcccgcaacagtctcgagcaggcactgttcaacctgccgccgggcgattgggcagccggcgaacgcggcatcgccgccctgcccggccgcttcgatgcgttgaaatcggatgtcgacaaggcgctcgactacgcggccgcgaccggcgccaagcgcctgcacctgatggcaggtcttgctgatccgcgcgaccgcgaggccgcatcctgctaccgccgctcggtcgcctgtaccgccgagcgcctggccgacgagggcatcgatctcctcatcgaaccgatcaacggccgcaacatgccgggatatttcctcaacgatttcgggaccgccgagcggctcatcgccgagctcgcgctccccaacctcaagctgcaattcgacatctatcaccggcagatcctgcacggcgacgtcgcaatggcactccgccaccttatgccggtcaccggccatatccagatcgccagcgtgccctcgcggcacgagccggatggcgaggagttgaactatcactacctctttgaagaaatcgaccggctcggctatggcggcttcgtcggctgcgaatacaacccgcgcggccagacgctcgacggcctcggctggttcaaaccctttcgacggagctga

SEQ ID NO: 80919 - protein, 258 aa, Sinorhizobium meliloti 1021
MPVFAANLTMMFTELPFLDRFDAAADAGFAAVEYLFPYEVPPEAIAERLARNSLEQALFNLPPGDWAAGERGIAALPGRFDALKSDVDKALDYAAATGAKRLHLMAGLADPRDREAASCYRRSVACTAERLADEGIDLLIEPINGRNMPGYFLNDFGTAERLIAELALPNLKLQFDIYHRQILHGDVAMALRHLMPVTGHIQIASVPSRHEPDGEELNYHYLFEEIDRLGYGGFVGCEYNPRGQTLDGLGWFKPFRRS

SEQ ID NO: 80920 - DNA, 816 bp, Sinorhizobium meliloti 1021
  CDS (1)..(816): transl_table=11
atgccgagatttgctgcgaacctgacgatgctgttcaacgaggcgccgtttctcgaccgtttcgcactggccgccagggcgggtttcgaaggcgttgaatatctctttccctacgagttcgataagacggcgctgcgcggcgaactcgaccgccacggcctgacgcaagtgctgcacaacctgccggccggcgactgggccggcggcgaacggggcatcgcgatcctgccggatcggatcgacgaattccgcaagggggtcgcaacggccatcgactatgcgactgcgctcggctgccgccaggtcaattgcctcgtggggattgccccggacggtgtacccgacagcgtgctgcgcacgaccctcgtcgccaatctgaagcttgcggcggccgaactcggcaagtgcggcatccgccttctgatcgaaccgatcaaccgcttcgatatccccggcttttatctcaacacggtcgggcaggcgtcgtcgatcatcgaggaggtcgggagcgataacctcttcatccagtacgacctctaccaccagcagcgcaccgagggcgaactcgtcggcacctacaggcgctaccgcgaaaagatcgcgcacatacagcttgccgacaatcccggacgcaacgagccggggaccggcgagatcaactaccccttcgtcttcgacgcattggaagccggcggctacgacggctggatcgggtgcgaatacaagccgctgacgaccacggcggagggacttgggtggctcggcaccgagcgccagcgcaaacaatccgcagacatcatccaaatcaggagctaa

SEQ ID NO: 80921 - protein, 271 aa, Sinorhizobium meliloti 1021
MPRFAANLTMLFNEAPFLDRFALAARAGFEGVEYLFPYEFDKTALRGELDRHGLTQVLHNLPAGDWAGGERGIAILPDRIDEFRKGVATAIDYATALGCRQVNCLVGIAPDGVPDSVLRTTLVANLKLAAAELGKCGIRLLIEPINRFDIPGFYLNTVGQASSIIEEVGSDNLFIQYDLYHQQRTEGELVGTYRRYREKIAHIQLADNPGRNEPGTGEINYPFVFDALEAGGYDGWIGCEYKPLTTTAEGLGWLGTERQRKQSADIIQIRS

SEQ ID NO: 80922 - DNA, 777 bp, Salmonella typhimurium LT2
  CDS (1)..(777): transl_table=11
atgccgcgttttgccgccaatttgtcgatgatgtttaccgaagcgccgtttatcgagcgttttgccgccgctgctgaagccggttttcaggccgttgagtttctgttcccctatgactttgccgccagcgagattaaagcccagctatcgcgtcataatctgacgctggcgctgtttaatacttcggcgggcgataccgcggcgggcgaatggggacgtgccgcgctaccggggcgcgaacacgacgcgcgcgccgatatcgatctggctctggaatacgctctggcgctggaatgcgagcaggttcacatcatggcgggcgtcgtgccggatggcgctgatggcgcacgttatcgcgccacgtttatcgataatttgcgttatgccgccgaccggtttgccgcccacgataaacgtattttgatcgaagcgctgagtcccggcgttaaacccggctacctcttttccagccaatatcaggcgctgggcatcgcagaagaggttgaccgcccgaatgtgttcatccagctcgacactttccacgcgcaaaaagtggatggcaatttgagtcacctgattcgcgagtatgcgggccgctatgcccatgtacaaatcgcctcgctaccggacagacatgaaccggatgatggcgagatcaactacccatggctgttccggctgttcgatgacgtaggttatcgcggctggataggctgcgaataccaaccacggaataccactcaggacgggcttggctggtttaacgcctggcgctaa

SEQ ID NO: 80923 - protein, 258 aa, Salmonella typhimurium LT2
MPRFAANLSMMFTEAPFIERFAAAAEAGFQAVEFLFPYDFAASEIKAQLSRHNLTLALFNTSAGDTAAGEWGRAALPGREHDARADIDLALEYALALECEQVHIMAGVVPDGADGARYRATFIDNLRYAADRFAAHDKRILIEALSPGVKPGYLFSSQYQALGIAEEVDRPNVFIQLDTFHAQKVDGNLSHLIREYAGRYAHVQIASLPDRHEPDDGEINYPWLFRLFDDVGYRGWIGCEYQPRNTTQDGLGWFNAWR

SEQ ID NO: 80924 - DNA, 789 bp, Ralstonia solanacearum GMI1000
  CDS (1)..(789): transl_table=11
atgccacgctttgccgccaacctgacgatgatgtacccggaacatgcgttcctcgaccgcttcaccgccgccgcgcgcgatgggttcgaaggcgtggaattcctgttcccttacgactacgacaagaccgagctgcgaacgcggctggacgacaacggcctcgcacaggcgctgttcaacgcaccgccgggcgactgggcgggcggcgagcgcggcatcgcctcgctgcccggccgcgaagacgaattcaagcgcggcatcgccaccgcgctcgactacgcacaggcgctcggcaatacgcgcgtgcacgtcgtggccggcctgatcggcccgcacgacgatcgtgcccgccaccacgccacctacgtgcagaacctcgcccatgcggcgcgcgaggcggccagcgccggcatcaccatcgtgctggagccgatcaacacgcgcgacatgccgggcttcttcctcacgcaccaggcccaggcgcacgcggtctgccgggaagtcggcgcgcccaacctgaaggtgcagttcgacctgtatcacgcgcagatcatggagggcgacctgtcggtcaagctgcgcgagtacctcgacggcatcggccacgtgcagatcgcgggcgtccccgatcgccacgagccggacgagggcgagctgaactatccgcacctcttcgcgctgatggatgcgctcggctaccgcggctgggtcggctgcgaataccggccgcgcgccggcaccagcgaagggctgggatggttcaagcgctggcgcgcgcaccagcgctga

SEQ ID NO: 80925 - protein, 262 aa, Ralstonia solanacearum GMI1000
MPRFAANLTMMYPEHAFLDRFTAAARDGFEGVEFLFPYDYDKTELRTRLDDNGLAQALFNAPPGDWAGGERGIASLPGREDEFKRGIATALDYAQALGNTRVHVVAGLIGPHDDRARHHATYVQNLAHAAREAASAGITIVLEPINTRDMPGFFLTHQAQAHAVCREVGAPNLKVQFDLYHAQIMEGDLSVKLREYLDGIGHVQIAGVPDRHEPDEGELNYPHLFALMDALGYRGWVGCEYRPRAGTSEGLGWFKRWRAHQR

SEQ ID NO: 80926 - DNA, 777 bp, Corynebacterium glutamicum ATCC 13032
  CDS (1)..(777): transl_table=11
atgacttttaaactcgcagcatgcgcagagatgatctaccaggacctgcctttcgaggagagggtcaagacgatctctgatcagggattcctcgtggaaatttgggactggtccacaaaagacatcgatgcgctcgtggcaacaggcgcggaattttcctccatgacgggctacctgcgcggggatctgattactgaacagggccgcgcggagctcttggcaaccgcttcggagtccttggcggtggcggaaaagctcaactgcccccggctgaatctgcatggaactggccttggaccgcagggactacctgttactcccattgaagtggttaccccagaaatgtggctctacgctgctgaaacgctccgccagatcgctgagctgggggagcgcgcaggcaaggttttcgtgctggaaaacctcaacctcgcagtcgatcaccccggcactccttttgccaaggccactgacactttggcgctggtcaaggctgtcaatcacccgaatctgcgcctcaacctggatttgtaccacgcccagattggcgaaggaaacctcattgagctgctccgtgaggcgcagccattcatcggcgaaatccaggttgccgatgtccccggccgcatggaacccggcaccggcgagatcaactaccagggcgtcgcgaaagctctcgccgcgatgggctacgacggcgtcatcggcatggaggcgtgggcatcgggcgactccagcgacgcgctgcaggcgttgaagtcagcgttcacggtctaa

SEQ ID NO: 80927 - protein, 258 aa, Corynebacterium glutamicum ATCC 13032
MTFKLAACAEMIYQDLPFEERVKTISDQGFLVEIWDWSTKDIDALVATGAEFSSMTGYLRGDLITEQGRAELLATASESLAVAEKLNCPRLNLHGTGLGPQGLPVTPIEVVTPEMWLYAAETLRQIAELGERAGKVFVLENLNLAVDHPGTPFAKATDTLALVKAVNHPNLRLNLDLYHAQIGEGNLIELLREAQPFIGEIQVADVPGRMEPGTGEINYQGVAKALAAMGYDGVIGMEAWASGDSSDALQALKSAFTV

SEQ ID NO: 80928 - DNA, 753 bp, Corynebacterium glutamicum ATCC 13032
  CDS (1)..(753): transl_table=11
ttgtctcgatttgctgccaacctgtcattgacttttactgagctagatttcctggatcgttttgatgccgcttcgaagcatgctttcagtgccgtggagtttcagtacccttacgatttcgatgttcaagagattaaacagcgtgctgattccgcaggtctgcccattgaactgttcaatgccccacctggggatacttttggtcttgcggcactggcttcccctgaagactttcaacaatccatcgagcaggccatcacgtacgccacagtgttgaagccaaagaagatgcatgtcatggctggcatcgcggacgtaacctcagaaaccacggcgcgctatgtggagaatattcgctgggctgcgcagcaactagacaagctcgacgttgtcgttgttattgaaccaattaatcactattcggttcccggttatttcctgcacactttagagcaggcgtattggcttatcgacagcattgcccaccccaatgtgaagatcttattcgatactttccaccttcagcagattcatggcaatctcacccgccgcctgcgcgaggttcatggcgcaggtcttttgggacacgtgcaagtggcctcagttcctgatcgacacgaacctggcactggcgaagtcaatgcggcgtatatcttccaactcctaagcgaactgggatatgacggtgtcatcgctggcgaataccaccctgctggtgaaactacagccggtttgggctggttggagctctag

SEQ ID NO: 80929 - protein, 250 aa, Corynebacterium glutamicum ATCC 13032
MSRFAANLSLTFTELDFLDRFDAASKHAFSAVEFQYPYDFDVQEIKQRADSAGLPIELFNAPPGDTFGLAALASPEDFQQSIEQAITYATVLKPKKMHVMAGIADVTSETTARYVENIRWAAQQLDKLDVVVVIEPINHYSVPGYFLHTLEQAYWLIDSIAHPNVKILFDTFHLQQIHGNLTRRLREVHGAGLLGHVQVASVPDRHEPGTGEVNAAYIFQLLSELGYDGVIAGEYHPAGETTAGLGWLEL

SEQ ID NO: 80930 - DNA, 786 bp, Brucella suis 1330
  CDS (1)..(786): transl_table=11
atgccgcgttttgctgccaatctgtcgacgatgtttaacgaggtgccattcctcgaacgttttagactggctgccgaagcaggttttggcggcgtcgagtttctgtttccttatgacttcgacgctgatgtcattgccagggaattgaagcagcacaatctcacgcaggttcttttcaacatgcctcccggcgattgggctgcgggcgaacgcggcatggcagctattccgggtcgcgaacaggaattccgcgacaatgtcgatatcgccctgcattatgcattggcgctggattgcaggacgcttcacgccatgtccggcatcacggaagggctggaccggaaagcctgcgaggaaacctttatcgaaaacttccgctatgcggcagacaagcttgctccgcacggcatcacggtgctggtcgagcccctcaatacgcgcaatatgcccggctatttcatcgtgcatcaactggaagccgttggcctcgtaaagagggtcaaccgccccaatgtcgccgtgcagctcgatctctatcatgcccagatcatggatggcgacctgacccgcctgatcgagaaaatgaacggtgcattcagccatgttcaaattgcatccgttcccgaccggcatgagccggatgaaggcgaattgaactatccatatcttttctcggtcctggagagtgtcggctatcggggatgggtgggatgcgaatataatccgcggggcaaaacggaaagcggcctcgcctggtttgccccataccgggatcaaagcgcatga

SEQ ID NO: 80931 - protein, 261 aa, Brucella suis 1330
MPRFAANLSTMFNEVPFLERFRLAAEAGFGGVEFLFPYDFDADVIARELKQHNLTQVLFNMPPGDWAAGERGMAAIPGREQEFRDNVDIALHYALALDCRTLHAMSGITEGLDRKACEETFIENFRYAADKLAPHGITVLVEPLNTRNMPGYFIVHQLEAVGLVKRVNRPNVAVQLDLYHAQIMDGDLTRLIEKMNGAFSHVQIASVPDRHEPDEGELNYPYLFSVLESVGYRGWVGCEYNPRGKTESGLAWFAPYRDQSA

SEQ ID NO: 80932 - DNA, 768 bp, Corynebacterium efficiens YS-314
  CDS (1)..(768): transl_table=11
ttgcccatgccgaaattcgccgcgaatctctccctgctcttcacggagctgcccttccccgagcggttcgccgctgcggccaacaccgggctcttcgaggccgtggagttccagttcccctacgaccatgacctgaaaacgctcacccagaccgcacaacaggccggtctgcccgtcgcactcatcaacgccccgccgggtgacaccttcggccaggcggccctgaactccaccgatttcgagtcatccatcaccgaggctctccgctacgccaccgcactcggcgccgagaagctacacgtcatggcaggcatcacggaaccatcccccgacgccaccgccctgtaccgccgcaacatcaccaccgctgcccgcatggccgcagaacgtggcgtgctcatcgtggtcgaacccatcaaccaccacacggttcccggctacttcctgcacgacctggatcaggcccttggactcatccagaacatccccaatgtgaagatcctcttcgacatcttccacatccagcagatccacggcgatctcacccgccggctcaccgcgctgcaccagcaggatctcctgggccacctccaggtggccgcggtgccctcccgccacgaacccggcaccggcgaggtggatgacgcccgcctctttgagcttatcgacgccctcccctggcccggtttcgtcggcgccgaataccatcccgcggacaccaccgttgagggactcggctggctacagccatgggtgacgtaccattag

SEQ ID NO: 80933 - protein, 255 aa, Corynebacterium efficiens YS-314
MPMPKFAANLSLLFTELPFPERFAAAANTGLFEAVEFQFPYDHDLKTLTQTAQQAGLPVALINAPPGDTFGQAALNSTDFESSITEALRYATALGAEKLHVMAGITEPSPDATALYRRNITTAARMAAERGVLIVVEPINHHTVPGYFLHDLDQALGLIQNIPNVKILFDIFHIQQIHGDLTRRLTALHQQDLLGHLQVAAVPSRHEPGTGEVDDARLFELIDALPWPGFVGAEYHPADTTVEGLGWLQPWVTYH

SEQ ID NO: 80934 - DNA, 783 bp, Pseudomonas putida KT2440
  CDS (1)..(783): transl_table=11
atgcctcgcttcgctgccaacctgtccatgctgttcaccgaacaggacttcctggcccgcttcaaggctgccgccgatgctggtttcagcggcgtcgaatacctgttcccgtacgacttcagcgctgccgacatcaagcagcagctggaggccaacggcctgacccaggtgctgttcaacctgccggccggcgactgggccaaaggtgagcgcggtatcacctgccaccccgaccgcatcgaagagttccgtgccggtgtcgacaaggccatcgagtacgccaaggtgctgggcaatactcaggtcaacgccctggccggcatccgcccacaaggcccggactgcgccaccgtgcgtaagaccttcgtcgagaacctgcgctacgccgctgacaagctcaagggcgccgggatccgcctggtcatggaaatgatcaacacccgcgacatccccggcttctacctgaacaccacccagcaggccctggaaatccaggccgaagtgggcagcgacaacctgttcctgcaatacgacatctaccacatgcagatcatggaaggtgacctggctcgcaccatggaagccaacctgaagctgatcaaccacatccagctggccgacaacccaggccgcaatgaaccaggcaccggcgagatcaactaccgcttcctgttcgaacacctggaccgcattggctaccagggctgggtgggcgcggagtacaagccgctgaccaccaccgaagcgggcctgggctggctgaaaacccacaacgcaatctga

SEQ ID NO: 80935 - protein, 260 aa, Pseudomonas putida KT2440
MPRFAANLSMLFTEQDFLARFKAAADAGFSGVEYLFPYDFSAADIKQQLEANGLTQVLFNLPAGDWAKGERGITCHPDRIEEFRAGVDKAIEYAKVLGNTQVNALAGIRPQGPDCATVRKTFVENLRYAADKLKGAGIRLVMEMINTRDIPGFYLNTTQQALEIQAEVGSDNLFLQYDIYHMQIMEGDLARTMEANLKLINHIQLADNPGRNEPGTGEINYRFLFEHLDRIGYQGWVGAEYKPLTTTEAGLGWLKTHNAI

SEQ ID NO: 80936 - DNA, 777 bp, Escherichia coli CFT073
  CDS (1)..(777): transl_table=11
atgcctcgttttgcagctaatttatccatgatgttcaccgaagtgccttttattgaacgcttcgccgcagcgcgaaaagccgggttcgatgctgtggagtttctgtttccctatgactactccccccagcaaatccagcagcaactggtgcaaaaccacctgacgctggcgctgttcaataccgctcccggagatattaatgcgggagaatggggattatccgcccttcccggacgtgagcacgaagcacgcgcagacatcgacctggcactggaatatgcattggcgctcaattgtgaacaagtccatgtgatgtcaggcgtcgtgcccgctggcgaagatgctgaacggtaccgggcagtatttattgataatctccgctacgctgccgaccgctttgcgccacacggcaagcgaatattggttgaagcactcagccccggcgttaagcctcattatctcttctccagccagtatcaggcactggctattgttgaagaggttgcgcgagataacgtgtttattcaactagatactttccatgcacaaaaagtagatggcaacctgacacatttaatccgcgactacgccgggaaatatgcgcacgtacaaattgccggactacctgatcgacatgaaccggacgatggagaaatcaactatccgtggctgttccgcctgttcgatgaagtgggatatcagggctggatcggttgtgaatacaaacctcgtggcctcaccgaagaagggcttggctggtttgacgcctggcgctaa

SEQ ID NO: 80937 - protein, 258 aa, Escherichia coli CFT073
MPRFAANLSMMFTEVPFIERFAAARKAGFDAVEFLFPYDYSPQQIQQQLVQNHLTLALFNTAPGDINAGEWGLSALPGREHEARADIDLALEYALALNCEQVHVMSGVVPAGEDAERYRAVFIDNLRYAADRFAPHGKRILVEALSPGVKPHYLFSSQYQALAIVEEVARDNVFIQLDTFHAQKVDGNLTHLIRDYAGKYAHVQIAGLPDRHEPDDGEINYPWLFRLFDEVGYQGWIGCEYKPRGLTEEGLGWFDAWR

SEQ ID NO: 80938 - DNA, 783 bp, Bradyrhizobium japonicum USDA 110
  CDS (1)..(783): transl_table=11
atgccccgtttcgccgccaatctctcgatgatgttcaccgacgtgccgttcctcgatcgcttcgaggccgccgcccaggtcggcttcacggccgtcgagtttctctttccttatgagcatccggccgaggcggtcggcgagcggctcaagcgcaacggtctgacccaggcgctgttcaacctgccgcccggcgactggaatgcgggcgagaagggttttgctgcgctcccggcgcgcttcgccgatctcaaggcgagcctcgagaccgcgctgccttacgccaaggccaccggcgtcaagcgcctgcacctgatggccggccttgccaaccgcggcgagcgcgtcgcgatcgaggcgttctacaagtcggtggcgtgggcggcggagttcttcgcgccgcatggcatcgacatcgtgctcgagccgatcaatgcccgcaacgtgcccggctacttcctcaacgatttcggcttcgcgcgcgacctgatccaggagttgcggctcccgaacctcaagctccagttcgacatctatcactgccagatcatccatggcgacgtcaccatgcgcttgcgcgagatgatgccgatcatcggccacatccagatcgccagcattccatcgcgcaacgagcccgacggcgaggagctgaactatcccttcctgttcgaagagctcgaccggctcggctatgccggcttcgtcggctgcgaatacaatccgcgcggcaagaccaccgacgggctcgcctggttcaagccctatgcgggagtgaagccgtga

SEQ ID NO: 80939 - protein, 260 aa, Bradyrhizobium japonicum USDA 110
MPRFAANLSMMFTDVPFLDRFEAAAQVGFTAVEFLFPYEHPAEAVGERLKRNGLTQALFNLPPGDWNAGEKGFAALPARFADLKASLETALPYAKATGVKRLHLMAGLANRGERVAIEAFYKSVAWAAEFFAPHGIDIVLEPINARNVPGYFLNDFGFARDLIQELRLPNLKLQFDIYHCQIIHGDVTMRLREMMPIIGHIQIASIPSRNEPDGEELNYPFLFEELDRLGYAGFVGCEYNPRGKTTDGLAWFKPYAGVKP

SEQ ID NO: 80940 - DNA, 786 bp, Bradyrhizobium japonicum USDA 110
  CDS (1)..(786): transl_table=11
atgccgaagtttgccgccaacctcaccatgctcttcaacgagatgccgttcctcgaccgcttcgccgcggcgaaagcggcgggctttgccggggtcgaatatctcttcccctatgatttcgacaaggcgcagctccgagagcagctcgaggcccacgggctgacgcaggtgctgcacaatctaccggccggcaattgggccgggggcgagcgcggcatcgcgatcctgccggatcgcaccgccgaattccgcgacggcgtgttccgcgccatcgattatgccaaggcgctcgattgcgaccagctcaactgcctcgtcggcatcgcgcccgccgatgccgatccgcgcgagctcaacgagaccctggtcggcaatctacgctttgccgcctcgacgctggcgcgggagaacatcaggctgctggtcgagccgatcaacacgctcgacattcccggcttccatctcaacggcaccgagcaggcggtgcagctcatctctgaggtgcggtcgaacaatttgttcatccagtacgacgtctaccacatgcagatcatggagggcgatctcgcccgcaccatgcaggaatatctcccgcagatcgcccacatccagctcgccgacaatcccggccgtcacgagccgggcaccggcgagatcaactaccccttcctgttccgccacctcgacgcgatcggctatcgcggctggatcggctgcgaatacaagccgcgcaccacgacgctggaaggcctgtcctggcacgcggcgcagacattcgagacctga

SEQ ID NO: 80941 - protein, 261 aa, Bradyrhizobium japonicum USDA 110
MPKFAANLTMLFNEMPFLDRFAAAKAAGFAGVEYLFPYDFDKAQLREQLEAHGLTQVLHNLPAGNWAGGERGIAILPDRTAEFRDGVFRAIDYAKALDCDQLNCLVGIAPADADPRELNETLVGNLRFAASTLARENIRLLVEPINTLDIPGFHLNGTEQAVQLISEVRSNNLFIQYDVYHMQIMEGDLARTMQEYLPQIAHIQLADNPGRHEPGTGEINYPFLFRHLDAIGYRGWIGCEYKPRTTTLEGLSWHAAQTFET

SEQ ID NO: 80942 - DNA, 789 bp, Pseudomonas syringae pv. tomato str. DC3000
  CDS (1)..(789): transl_table=11
atgagcttcacgccgttcaaactggccgtcagtgccgaaatggtctttctcgatctgccattcactgagcgcgtcaaacgcatccatgcgctgggtttcagcgccgagatctggggctggacgagcaaggacattgccgcactcgctgcaaccggcgcggacttcacctcaatgaccggctacatccggggcaacttgaccgaccccgaagacagccggcaactactcgacagtgcgcgggaatcactggccatcgccgcacaactcaattgcccaagcctcaacctgcatggcactggcctggacgatcagggcttgccggtcaaacccgtggcccacgctaacgggcgcatgtggttgagtgcctgcaagaccctggaaaaaatcgctcgcctgggcgaagacgccggtcgtgtgtttctgctggaaaacctcaatactgaagtggaccatcctggaacgccattcgctcgcgccgacgataccctggcgctgatcgaggccgtcgacagcccttatctgaagatgaatctggacctttaccatgcgcagattggcgaaggaaacctgatcgaactgatccagcgtgcgggcagttccatcggcgaaatccaggtcgctgacgttcccgggcgcatggaaccgggcaccggtgaaatccattacccggccattgccaaagcgctgtttggcttgggatacagcggtgtcgtcgggctcgaaggctgggccagcggagatagcgaagcagcactcgaacgctttcggcaagccttcacgctggattga

SEQ ID NO: 80943 - protein, 262 aa, Pseudomonas syringae pv. tomato str. DC3000
MSFTPFKLAVSAEMVFLDLPFTERVKRIHALGFSAEIWGWTSKDIAALAATGADFTSMTGYIRGNLTDPEDSRQLLDSARESLAIAAQLNCPSLNLHGTGLDDQGLPVKPVAHANGRMWLSACKTLEKIARLGEDAGRVFLLENLNTEVDHPGTPFARADDTLALIEAVDSPYLKMNLDLYHAQIGEGNLIELIQRAGSSIGEIQVADVPGRMEPGTGEIHYPAIAKALFGLGYSGVVGLEGWASGDSEAALERFRQAFTLD

SEQ ID NO: 80944 - DNA, 786 bp, Pseudomonas syringae pv. tomato str. DC3000
  CDS (1)..(786): transl_table=11
atgcctcgttttgccgccaacctcagcatgctatacccgcagcatgattttcttgagcgctttgccgcagccgccgccgatggtttcggcgcggtcgagtacctgtttccttacgcctacacgccgcaggaactcaaacaacgcctgagcgacaacggtctggtgcaggcgctgttcaacgccccgccgggcgactgggataactgcgagcgcgggatcgccacgctgccgggccgcgaagcggactttcgcagcggcatcgaacgtgcgctggaatatgcgcaggtgctgggcaacgaccgtgtgcacgtgatggccggtctgctgcccagcgaagctttgcgtgagcgccatcaagcggtttatctggaaaacctggcgtttgcggccgagcaggcgaagtcagctggcgtcacgattctgatcgaaccgatcaacacccgcgacatgccgggcttctttctcaaccgtcaggatcaggcgcaggccatctgcaagcaggtgggtgcagataacctgaaggtgcaatttgactgctatcactgtcagatcgtcgaaggcgacctgaccagcaaactgcgccgcgactttgcgggtattggccacattcagattgcaggggtaccggatcgccatgaaccgaacctgggcgagctgaattacgaacacctgttcaacgttatcgacgagctgggctataccggctggataggctgtgaataccgccccaaaggcgacaccagcgaagggttgtcgtggttgcgggcgttgcaggcgaagggctga

SEQ ID NO: 80945 - protein, 261 aa, Pseudomonas syringae pv. tomato str. DC3000
MPRFAANLSMLYPQHDFLERFAAAAADGFGAVEYLFPYAYTPQELKQRLSDNGLVQALFNAPPGDWDNCERGIATLPGREADFRSGIERALEYAQVLGNDRVHVMAGLLPSEALRERHQAVYLENLAFAAEQAKSAGVTILIEPINTRDMPGFFLNRQDQAQAICKQVGADNLKVQFDCYHCQIVEGDLTSKLRRDFAGIGHIQIAGVPDRHEPNLGELNYEHLFNVIDELGYTGWIGCEYRPKGDTSEGLSWLRALQAKG

SEQ ID NO: 80946 - DNA, 777 bp, Salmonella enterica subsp. enterica serovar Typhi Ty2
  CDS (1)..(777): transl_table=11
atgccgcgttttgccgccgatttgtcgatgatgtttaccgaagtgccgtttatcgagcgttttgccgctgctgccgaagccggttttcaggccgttgagtttctgttcccctacggctttgccgccagcgagattaaagcccagctatcgcgtcatgatctgacgctggcgctgtttaatacttcggcgggtgataccgcggcgggcgagtggggacgtgccgcgctaccggggcgcgaacacgacgcgcgcgccgatattgatctggctctggaatacgctctggcgctggaatgcgagcaggttcacatcatggcgggcgtcgtgccggatggcgctgatggcgcacgttatcgcgccacgtttatcgataatttgcgttatgccgccggccggtttgccgcccacgataaacgtattttgatcgaagcgctgagtcccggcgttaaacccggctacctcttttccagccaatatcaggcgctgggcatcgcagaagaggttgaccgcccaaatgtattcatccagctcgacactttccacgcgcaaaaagtggatggcaatttgagtcacctgattcgcgagtacgcgggccgctatgcccatgtacaaatcgcctcgctaccggacagacatgaaccggatgatggcgagatcaactacccgtggctgttccggctgttcgatgacgtaggttattgcggctggataggctgcgaataccaaccacggaataccactcaggaggggcttggctggtttaacgcctggcgctaa

SEQ ID NO: 80947 - protein, 258 aa, Salmonella enterica subsp. enterica serovar Typhi Ty2
MPRFAADLSMMFTEVPFIERFAAAAEAGFQAVEFLFPYGFAASEIKAQLSRHDLTLALFNTSAGDTAAGEWGRAALPGREHDARADIDLALEYALALECEQVHIMAGVVPDGADGARYRATFIDNLRYAAGRFAAHDKRILIEALSPGVKPGYLFSSQYQALGIAEEVDRPNVFIQLDTFHAQKVDGNLSHLIREYAGRYAHVQIASLPDRHEPDDGEINYPWLFRLFDDVGYCGWIGCEYQPRNTTQEGLGWFNAWR

SEQ ID NO: 80948 - DNA, 858 bp, Streptomyces avermitilis MA-4680
  CDS (1)..(858): transl_table=11
atgccgggtcttgaacggggcaccgccgcggagcagcgcttcaacgtcaatctgtcgatcctcttcacggaactcccgctcctggagcgccccgcggccgccgccgcggcgggcttcaccgcggtcgagctgtggtggccctgggtcgactcccccacccccgaccagtccgagctcgacgccctgaagaaggcgatcgaggaggcgggcgtccagctgacgggcctgaacttctacgcgggccggctgccgggcccggaccgcggcgccctgtcgatccccggcgaggagtcggagcggttccgcgccaacatcgacgtggccgccgacttcgcccgctcgctcggctgcacggcgctcaacgccctgtacggcaaccgggtggagggcgtggacccggccgagcaggacgcgctcgccctggagaacctggtcctcgcggcccgggccgccgaccggatcggcgcgatcctgctgatcgagaccctcaaccagccggagtcgccgcgctatccgttggtgagcgccccggccggcatcgggatcgtcgaccaggtcaacgaggcgaccggtctcggcaacgccaggttcctgatggacctgtaccacctgtccatgaacggcgaggacctgccgcgggtgatcgccgcgtacgcggcgaagaccggccatgtgcagatcgccgacaaccccggccgcggcgccccgggcacgggcacgctgccgctgaaggagctgctcgggcaactccgcaaggccgggtacgagggctgggtcggcctggagtacaagccgggcgaccgtccgagcgccgaggccttcgactggctgccggccgaggcccgcgccgcccgctga

SEQ ID NO: 80949 - protein, 285 aa, Streptomyces avermitilis MA-4680
MPGLERGTAAEQRFNVNLSILFTELPLLERPAAAAAAGFTAVELWWPWVDSPTPDQSELDALKKAIEEAGVQLTGLNFYAGRLPGPDRGALSIPGEESERFRANIDVAADFARSLGCTALNALYGNRVEGVDPAEQDALALENLVLAARAADRIGAILLIETLNQPESPRYPLVSAPAGIGIVDQVNEATGLGNARFLMDLYHLSMNGEDLPRVIAAYAAKTGHVQIADNPGRGAPGTGTLPLKELLGQLRKAGYEGWVGLEYKPGDRPSAEAFDWLPAEARAAR

SEQ ID NO: 80950 - DNA, 762 bp, Escherichia coli
  CDS (1)..(762): transl_table=11
atgccaaaattcgctgcaaatttatccatgctgtttaccgaactgccgttcctggaacgctttgccgccgctgcccgggcgggatttgaagccgttgagtttctgtttccctatgagtatgccgccggggaaatcagacagcgcctgcaggagaaccagctgcagctggtgctgttcaataccccacccggcgacgtcaacgccggagaatgggggctcgccgccatccccgggagaagcgcggaggcccgacgcgatattgagctggcgctggagtatgcctgccagctcggttgcccgcaggtgcatatcatggccggcgtggtgccgccgggagcggatcgcgcagcctgcgaggccgtgcttatcgataatctgcgctacgcggcggagtgctttgcccgccacgacaagcggatactcatcgaagcgctgaatccgcagaccaaaccgggctatctctaccacagtcaatatcagacgctggcgatggtgaaacgggtcgacaggccgaacctggcggtgcagttagatctgtttcacgcgcagaaggtggacggcaatttaagccatcttattaccgaatatgccggccagtatcgccatattcagattgcctccctgcccgaccgtcatgaaccggatgagggcgaaaggcactgttgcaaagttagcgatgaggcagccttttgtcttattcaaaggccttacatttcaaaaactctgcttaccaggcgcatttcgcccaggggatcaccataa

SEQ ID NO: 80951 - protein, 253 aa, Escherichia coli
MPKFAANLSMLFTELPFLERFAAAARAGFEAVEFLFPYEYAAGEIRQRLQENQLQLVLFNTPPGDVNAGEWGLAAIPGRSAEARRDIELALEYACQLGCPQVHIMAGVVPPGADRAACEAVLIDNLRYAAECFARHDKRILIEALNPQTKPGYLYHSQYQTLAMVKRVDRPNLAVQLDLFHAQKVDGNLSHLITEYAGQYRHIQIASLPDRHEPDEGERHCCKVSDEAAFCLIQRPYISKTLLTRRISPRGSP

SEQ ID NO: 80952 - DNA, 807 bp, Bordetella parapertussis 12822
  CDS (1)..(807): transl_table=11
atgaaactggccgccaacctgacactgctgtaccccggcctgccgctggccgcgcgcatggccgccgcgcgcgaagacggcttcgcgggagtggagatcctgtttccgtacgaccagccgcccgcgcaattggcggcgcagctgcgcgagcacggcctggccctggcgctggtcaacacgccgctgggcgcggccggcgaaaaaggcctggcctgcgtgcccgggcgcgaagccgatttcggggccgcgctggaccaggcgctggcgctgtgccgcgccaccggctgccgcatcgtgcacgccatggcgggcatgccgccggcgcccgccggcatggacgaatgccgcgccacgctgatcggcaacctgcagcgagccgcgccgcgcgccgcccaggccggcgtcacgctgaccctggagccgctcaaccgcgccgacatgccgggctatttctattacctgcccgagcaggccgccgacatcatccgcgcggtcgaccatccgaacgtcggcctgcagttcgacatctatcacaacctgcgcgaagggctggacccgcacgccgagctgcgccgcgtgctgccgctggtgcgccacgtgcagttcgccggccccgacgggcgccacgaacccgatccggccagcccgccggtggccgccaccctgcgcctgctggcgcaaagcggctatggcggctggatgggctgcgagtacacgccgcgcggcctggccagcgccggcctgaaggcctggcgcggcgcctacgacgccgcctgcggcagcggaggtgcggcatgcgcgtcctga

SEQ ID NO: 80953 - protein, 268 aa, Bordetella parapertussis 12822
MKLAANLTLLYPGLPLAARMAAAREDGFAGVEILFPYDQPPAQLAAQLREHGLALALVNTPLGAAGEKGLACVPGREADFGAALDQALALCRATGCRIVHAMAGMPPAPAGMDECRATLIGNLQRAAPRAAQAGVTLTLEPLNRADMPGYFYYLPEQAADIIRAVDHPNVGLQFDIYHNLREGLDPHAELRRVLPLVRHVQFAGPDGRHEPDPASPPVAATLRLLAQSGYGGWMGCEYTPRGLASAGLKAWRGAYDAACGSGGAACAS

SEQ ID NO: 80954 - DNA, 807 bp, Bordetella bronchiseptica RB50
  CDS (1)..(807): transl_table=11
atgaaactggccgccaacctgacactgctgtaccccggcctgccgctggccgcgcgcatggccgccgcgcgcgaagacggcttcgcgggagtggagatcctgtttccgtacgaccagccgcccgcgcaattggcggcgcagctgcgcgagcacggcctggccctggcgctggtcaacacgccgctgggcgcggccggcgaaaaaggcctggcctgcgtgcccgggcgcgaagccgatttcggggccgcgctggaccaggcgctggcgctgtgccgcgccaccggctgccgcatcgtgcacgccatggcgggcatgccgccggcgcccgccggcatggacgaatgccgcgccacgctgatcggcaacctgcagcgagccgcgccgcgcgccgcccaggccggcgtcacgctgaccctggagccgctcaaccgcgccgacatgccgggctatttctattacctgcccgagcaggccgccgacatcatccgcgcggtcgaccatccgaacgtcggcctgcagttcgacatctatcacaacctgcgcgaagggctggacccgcacgccgagctgcgccgcgtgctgccgctggtgcgccacgtgcagttcgccggccccgacgggcgccacgaacccgatccggccagcccgccggtggccgccaccctacgcctgctggcgcaaagcggctatggcggctgggtgggctgcgagtacacgccgcgcggcctggccagcgccggcctgaaggcctggcgcggcgcctacgacgccgcctgcggcagcggaggtgcggcatgcgcgtcctga

SEQ ID NO: 80955 - protein, 268 aa, Bordetella bronchiseptica RB50
MKLAANLTLLYPGLPLAARMAAAREDGFAGVEILFPYDQPPAQLAAQLREHGLALALVNTPLGAAGEKGLACVPGREADFGAALDQALALCRATGCRIVHAMAGMPPAPAGMDECRATLIGNLQRAAPRAAQAGVTLTLEPLNRADMPGYFYYLPEQAADIIRAVDHPNVGLQFDIYHNLREGLDPHAELRRVLPLVRHVQFAGPDGRHEPDPASPPVAATLRLLAQSGYGGWVGCEYTPRGLASAGLKAWRGAYDAACGSGGAACAS

SEQ ID NO: 80956 - DNA, 780 bp, Photorhabdus luminescens subsp. laumondii TTO1
  CDS (1)..(780): transl_table=11
atggctaaattcgcggcaaacttgagcatgatgttcaatgatgtacctttcacagaacgttttgcccgtgcagccaaagctggatttaaaggcgttgaatatctgtttccttatgaagtcgcagcggaagagcttgctgccctattaaaacagcatcaattaacccaagctctattcaacatgcccgccggagactgggcggcgggagaaagaggaatagcctctatgcctggccgtgaaaaagaatttgccgccggtgtgcaaaccgcgctgaaatatgcactggcgctgaactgcaagcaagttcatgcgatggcaggaaagctgcatgaacacttcacaccagaacaacaacgtgagtgttatatcagaaacattcgatatgccgctgatgtgatggcagaacataacatcaacgtattaattgaaccaattaatacgcgtgatatgccgggttactttctgacaactcagcatcaagctgaaacattactcaaagaaattgaccgtcaaaatgtttttatccagctagatctttatcattgccagattatggaaggggatttgctacgcaccattgaacgtctatgggacaaattcagtcacatccagattgcctcggtgcccgaacgccacgaacccgatagcggcgaagtgaactatccgtggctatttaacaaactggatgaaatgggctatcaagggtggttgggctgtgaatatcaccctgcgggttacaccgaagagggtctggattggttgaccaaagcacagaaataa

SEQ ID NO: 80957 - protein, 259 aa, Photorhabdus luminescens subsp. laumondii TTO1
MAKFAANLSMMFNDVPFTERFARAAKAGFKGVEYLFPYEVAAEELAALLKQHQLTQALFNMPAGDWAAGERGIASMPGREKEFAAGVQTALKYALALNCKQVHAMAGKLHEHFTPEQQRECYIRNIRYAADVMAEHNINVLIEPINTRDMPGYFLTTQHQAETLLKEIDRQNVFIQLDLYHCQIMEGDLLRTIERLWDKFSHIQIASVPERHEPDSGEVNYPWLFNKLDEMGYQGWLGCEYHPAGYTEEGLDWLTKAQK

SEQ ID NO: 80958 - DNA, 780 bp, Rhodopseudomonas palustris CGA009
  CDS (1)..(780): transl_table=11
atgccgcgcttcgcagccaatctcagcctgatgttcaccgagcacgcctttctcgaccgctttgatgcggcgcggggggcgggatttgatgcggtcgagtttctgtttccctacgaggtcgagcccagcgccatcgccgaacggttgcagcgcaaccgcctgacccaggtgctgtttaacctgccgccgggcgattgggccgccggcgagaagggatttgcggcgttgccggacaagttcgacgagttgcagcgcagcctgcactcggcgctgccttatgcgctcgcgaccggggtgaagcggctacatctgctggcgggcaatgccgaccgccgcgacgcggcggcggcgctggcgtttcggcggtccttggcggttgccgcgcatttcttcgcgccgcacggcatcgacgtgctgatcgagccactaaaccggcgcgacgcgcccggctatttcctcgacgatgtcgattacgctcacgctctcgttcgcgagatggccattgccaatctgaagctgcaattcgacgtctatcactgccagatcctgcatggcgacgtcaccacccggctgcgcgagatgctgccgatgatcggccatgttcagatcgccagcgtgccgtcccggcacgaaccggacggcgaggagctcaactatccgtttctattcgacgagctcgaccggctcggttacgccggctttgtcggcgccgagtatcgtccgcgcggcaagaccgaggacggcctcggctggttcaaaccgtaccgcgccggaacctga

SEQ ID NO: 80959 - protein, 259 aa, Rhodopseudomonas palustris CGA009
MPRFAANLSLMFTEHAFLDRFDAARGAGFDAVEFLFPYEVEPSAIAERLQRNRLTQVLFNLPPGDWAAGEKGFAALPDKFDELQRSLHSALPYALATGVKRLHLLAGNADRRDAAAALAFRRSLAVAAHFFAPHGIDVLIEPLNRRDAPGYFLDDVDYAHALVREMAIANLKLQFDVYHCQILHGDVTTRLREMLPMIGHVQIASVPSRHEPDGEELNYPFLFDELDRLGYAGFVGAEYRPRGKTEDGLGWFKPYRAGT

SEQ ID NO: 80960 - DNA, 795 bp, Nasonia vitripennis
  CDS (1)..(795)
atggcctacaaattctgctgtaatttgtcctttatgtttcaaagagaagcgacatcgatactcgatcggtatcaattggccaaagatgcaggcttcaaggctgtggaaagtggatttcctcttggattcagcgtgcaacaggttgcagaagccaggaagaccgccggcatccagcaagtcctcataaacgtgtatacaggggatacgagtaaaggagaactgggatttgctgctctcccagggaaagaggaagagttcagaagaagcatcgaaaccaccatagaatatgccaaagctttggattgcaaaatgattcacgttatggctggcaaagtggtggatgcaacgtcagtcaacgatgccacatatgagaagaatctgaggtacgctgtagatagatttgcatccgagcagatagttgccctcatagaaccaattaattccatcaccgtcccaaattactacatgaacgatttcagtaaagccttagccctcgtacaaaagatcaacagtccaaacttgaagttgctcgtcgatattttccacctacagcagactcagggaaggataacaaactccatcgaaagctactatcccttcataggccacattcaaattgcacaagtgccaaacagaaacgagccagactctgctggagaaatagattatcggtatgtgcttgctgtactggaaaaagctggctacaataagtacattggcctggaatataagccacaagctgctaccggggaaggtctgtccaagtggttgaaccgctttggatgcactctgtga

SEQ ID NO: 80961 - protein, 264 aa, Nasonia vitripennis
MAYKFCCNLSFMFQREATSILDRYQLAKDAGFKAVESGFPLGFSVQQVAEARKTAGIQQVLINVYTGDTSKGELGFAALPGKEEEFRRSIETTIEYAKALDCKMIHVMAGKVVDATSVNDATYEKNLRYAVDRFASEQIVALIEPINSITVPNYYMNDFSKALALVQKINSPNLKLLVDIFHLQQTQGRITNSIESYYPFIGHIQIAQVPNRNEPDSAGEIDYRYVLAVLEKAGYNKYIGLEYKPQAATGEGLSKWLNRFGCTL

SEQ ID NO: 80962 - DNA, 804 bp, Anopheles gambiae str. PEST
  CDS (1)..(804)
atgactgcgcttaagttttgtgcgaatttgaattttatgttcctggaagcgagttccttcctgggtcgctaccgtgctgcaaaggcggcgggcttccagggcgttgaaggaccatttccacccgccgaaatcaatccggaatcgctaaaaaccgtcctggaggagacaggattgaggcaaatcctactgaacattgcgctgggagacgcgcagggtggtcagtttgggtgtgccgccctgcctggatgggagtcggagtttctcgccaatgtcgaacgcaccgtcgaatacgccaaggctgtcggttgcgggaaaatacacataatggcaggtaagctggagggtccggcaacggaagcacacgatcgtacctatcttgccaatcttcgactcgctgctccgatcttggaacggaacaatattatcggtgttattgaacccattaacaagtatgcggtgcctgggtactatctttcctgttacgataaggctgttcagaccatcacctccgtcggcagtccgaatttgaagctgatgttcgatatctaccacgcccagcatatacgcgggaacatcacgaacagcatccgtgagctggcgtcccacatcggacacgtgcagttggcacaggtaccgggccgaaacgaaccggacagtgatggtgaattgaactttcgccacgtgctacaagtgctggacagcgagggccagtacgcggacggctgggttgggtgtgagtatcgcccgctgaccagtacggtcgaaggactccgctggttgcgtgactttggctattggcagtga

SEQ ID NO: 80963 - protein, 267 aa, Anopheles gambiae str. PEST
MTALKFCANLNFMFLEASSFLGRYRAAKAAGFQGVEGPFPPAEINPESLKTVLEETGLRQILLNIALGDAQGGQFGCAALPGWESEFLANVERTVEYAKAVGCGKIHIMAGKLEGPATEAHDRTYLANLRLAAPILERNNIIGVIEPINKYAVPGYYLSCYDKAVQTITSVGSPNLKLMFDIYHAQHIRGNITNSIRELASHIGHVQLAQVPGRNEPDSDGELNFRHVLQVLDSEGQYADGWVGCEYRPLTSTVEGLRWLRDFGYWQ

SEQ ID NO: 80964 - DNA, 798 bp, Acinetobacter sp. ADP1
  CDS (1)..(798): transl_table=11
atgatgagtcagcttgcagtcaatctgtccatgatatttacagagtcacctttaattgaacgctttgcattagcgcatcagtatggatttcagcatgttgaaatccagtttccgtatgagctctctattgaggagatccagactcaattggctcaatacaatttgagtttatgtctgatcaatgttcccgcaggcgacctgatgcaaggtggtgatggtctggctggcataccaggtcaagaacaggcttttgcacaagcattacaacaagccgttgagtatgccactgcgttaaatgttccacgggtgaatattctcgctggcaaacaaccggttgatacagacctgctgccttgcttgaatacactagccagtaatctcaaatttgcatgtgagcgtttgactgaacacggtattgagcccgtttttgagatgatcaatggtacagatatgccacgcttcttggttcagaacattgctcaggcgcaagaaatgctagaagctgtaaggcaccctgctctcaagatgcaatatgattgttaccatatggccatgatgggcgaagatgtgctcgcaggcttaaaagaaaatatcggtcagatcggacatattcaatttgcagactgtcctggacgtcacgaaccagatactgcgcaaatccactttaatgaaatttttcaatggatacagcaaagcacttatcaaggttatattgcggctgaatatcgacctcaatccagctcagcgcaatcttttgcgtggaaaaacaaatatttcgcaaatgatgtaaatagctag

SEQ ID NO: 80965 - protein, 265 aa, Acinetobacter sp. ADP1
MMSQLAVNLSMIFTESPLIERFALAHQYGFQHVEIQFPYELSIEEIQTQLAQYNLSLCLINVPAGDLMQGGDGLAGIPGQEQAFAQALQQAVEYATALNVPRVNILAGKQPVDTDLLPCLNTLASNLKFACERLTEHGIEPVFEMINGTDMPRFLVQNIAQAQEMLEAVRHPALKMQYDCYHMAMMGEDVLAGLKENIGQIGHIQFADCPGRHEPDTAQIHFNEIFQWIQQSTYQGYIAAEYRPQSSSAQSFAWKNKYFANDVNS

SEQ ID NO: 80966 - DNA, 789 bp, Erwinia carotovora subsp. atroseptica SCRI1043
  CDS (1)..(789): transl_table=11
atgcctaagtttgctgccaatctttctatgctgtttacagacgttccgtttctcgatcgctttaaagccgctgccgatgcgggttttacctcggtcgagtacctgtttccttatgaatatccggcaccgctgctggcggaaaagctgagggagaatggcctgaagcaggtgttgttcaatactgcgcccggcaacatcgccgcgggtgaatggggcgtgtctgccctgcccgaccgcattgaagatgctcgtcgggacatcgataacgccttggaatatgcactggcgctgaattgtccttcagtactggtgatgggaggcgtcgttccgcccggtgaagaccgtgacgcctatcagcaaaccttcatcgataacctgcgctacgcggctgataaattcgcgccgcatggcatcaatatcatgattgaagcactgagtgcgaaggtgaaaccgaattacctgttcgccagtcagtatcaggcgctggaattagccaatctgatcgaccggccgaatatctatattcaggtggacttctttcacgcacaaattgtcgatggcaacctgacgcaaattattcacgatttagatggccgcatcggacatattcaaattgcttcggttccggcacggcatgaacccgatgaaggagaaattaattatccattcatctttgccgaattggatcgcgtgaattattccggctggattggctgtgaatataacccgcgtggtaaaaccgaagacggattgggctgggctgaaccctggctggagaaaaaacactaa

SEQ ID NO: 80967 - protein, 262 aa, Erwinia carotovora subsp. atroseptica SCRI1043
MPKFAANLSMLFTDVPFLDRFKAAADAGFTSVEYLFPYEYPAPLLAEKLRENGLKQVLFNTAPGNIAAGEWGVSALPDRIEDARRDIDNALEYALALNCPSVLVMGGVVPPGEDRDAYQQTFIDNLRYAADKFAPHGINIMIEALSAKVKPNYLFASQYQALELANLIDRPNIYIQVDFFHAQIVDGNLTQIIHDLDGRIGHIQIASVPARHEPDEGEINYPFIFAELDRVNYSGWIGCEYNPRGKTEDGLGWAEPWLEKKH

SEQ ID NO: 80968 - DNA, 795 bp, Yersinia pseudotuberculosis IP 32953
  CDS (1)..(795): transl_table=11
atgctcaaattcgcagccaatctaacgtggttatttaccgaggtgccatttttacagcgctttgctttggccgctaaggctgggttcccggcagtagagtgccttttcccctatcaggaacagatcgccgatgtgcaacaagcacaaaaagcgagcggcattccggtagttttgatcaatgcccctgcgggagaatgggaaaatggccagcggggactcgcctcactgcccgatgctggcgagccgtttcgccacagtgtgcggctggcgcgtgaatatgccgtggcattgggatgtaaacagattcatatcatggctggcaatagagaagagagtatcactttcgatgagcaatatgcgttactgattgaacgattacgttatgctgcagactatttaatggctgacaatatcagggtgcttattgaacctttaaataatgacaatatgccgggttattttatttcatcatttccgctggcggaaaaaataattcaccagtgtgagagaaagaatatttttttacagtttgatgtttaccattgccaaaaaatacacggcaacctatgggccaacctacaacattactggccgttaatttcacatatacagatagcctcggtacctgaacggcatgaaccgaataaaggcgaggtcaactacccttggttattccaacaactggtaataaaaaattatccaggctggattggatgtgaatatcaacccgaaaatgaaacattctcagggttggggtggttgggaaaaaataaaaatatcaaggcgttttcatag

SEQ ID NO: 80969 - protein, 264 aa, Yersinia pseudotuberculosis IP 32953
MLKFAANLTWLFTEVPFLQRFALAAKAGFPAVECLFPYQEQIADVQQAQKASGIPVVLINAPAGEWENGQRGLASLPDAGEPFRHSVRLAREYAVALGCKQIHIMAGNREESITFDEQYALLIERLRYAADYLMADNIRVLIEPLNNDNMPGYFISSFPLAEKIIHQCERKNIFLQFDVYHCQKIHGNLWANLQHYWPLISHIQIASVPERHEPNKGEVNYPWLFQQLVIKNYPGWIGCEYQPENETFSGLGWLGKNKNIKAFS

SEQ ID NO: 80970 - DNA, 798 bp, Mannheimia succiniciproducens MBEL55E
  CDS (1)..(798): transl_table=11
ttgaaaacagaggaaaataaaatgcctaaatttgcagcaaacttaaccatgatgtttaacgaggtaccttttttagatcgttttgaagcggcggctaaagcgggatttaaatatatcgaatttctttggccttatgattatccggccgaacagattaaagccaaactggatcaatacggtttaaaacaaattctgtttaactcattacccggcgatattgctgccggcgaatggggtgtgtccgccattcccggcagagaagccgaaagccatcaacatattgatttggctttggaatatgccttggtattgcaatgtccgaccgtattaattatgggcggcgttgtcccgccgggtcagagccgcgccaaatacaaacagacttttattgataatctgcgttatgcgtcggaaaaatttaaaccgcataatatcaatattgtactggaagcgttaagcccgcaagtaaaagaaaattatctaatgaaaacccaggacgacgccctagaaattattgagctggtcaatcgggacaatgtgttcctacagcttgattattaccacgctcaaaatgtggaaggcaatcttgcgcgtttaaccgatcgggtagcgcctgtgatgaaacatattcaaatcgcatccgttccggatcgtcacgaacccgatgaaggagaaatcaactatcaatatatctttgataagcttgatgctatcggctatgacggttatgtaggatgcgaatataaaccgcgaaccgaaaccacagccggtttagcctggtttgaaaaatacaaataa

SEQ ID NO: 80971 - protein, 265 aa, Mannheimia succiniciproducens MBEL55E
MKTEENKMPKFAANLTMMFNEVPFLDRFEAAAKAGFKYIEFLWPYDYPAEQIKAKLDQYGLKQILFNSLPGDIAAGEWGVSAIPGREAESHQHIDLALEYALVLQCPTVLIMGGVVPPGQSRAKYKQTFIDNLRYASEKFKPHNINIVLEALSPQVKENYLMKTQDDALEIIELVNRDNVFLQLDYYHAQNVEGNLARLTDRVAPVMKHIQIASVPDRHEPDEGEINYQYIFDKLDAIGYDGYVGCEYKPRTETTAGLAWFEKYK

SEQ ID NO: 80972 - DNA, 777 bp, Burkholderia mallei ATCC 23344
  CDS (1)..(777): transl_table=11
atgccgcgcttcgccgccaatctcacgatgatgtacaacgagcacgcgttcctcgagcgcttcgccgccgcggcacgcgacggcttcaaggcggtcgagtacctgttcccgtacgagttccccgccgccgagctcaaggcgcgcctcgacgcgcacgacctcgtgcaggcgctgttcaacgcgccgcccggcgactgggcggcgggcgagcgcggaatcgcgtcgctgccgggccgcgaggacgagttcaggcgcgcgatcgacaccgcgctcgactacgcgcgcgtgatcggcaacgacacgctccacgtgatggcgggcctgatcgcgccgacgcaggatcgcgcgcggcatcgcgacgtgtatctgcgcaacctcgcgcacgcggccgaagcggcgcgcgcgcagaacgtgacgatcgtgatcgagccgatcaacccgcgcgacatgccgggcttcttcctgaaccgccaggacgacgcgcaggcgatctgccgcgaagtcggcgcgccgaacctgctggtgcagttcgactgctatcactgccagatcgtcgaaggcgatctggcgatgaaattgaagcgcgacatcgcgggcatcggccacatccagatcgcgggcgtgccgcagcgtcacgagccggacgtcggcgaaatccactatccgtacctgttcgagctgatcgacgtgctcggctacgacggctggatcggctgcgagtatcggccgaaggccggcacctccgagggcctcggctggctcgcaccgtatctgtaa

SEQ ID NO: 80973 - protein, 258 aa, Burkholderia mallei ATCC 23344
MPRFAANLTMMYNEHAFLERFAAAARDGFKAVEYLFPYEFPAAELKARLDAHDLVQALFNAPPGDWAAGERGIASLPGREDEFRRAIDTALDYARVIGNDTLHVMAGLIAPTQDRARHRDVYLRNLAHAAEAARAQNVTIVIEPINPRDMPGFFLNRQDDAQAICREVGAPNLLVQFDCYHCQIVEGDLAMKLKRDIAGIGHIQIAGVPQRHEPDVGEIHYPYLFELIDVLGYDGWIGCEYRPKAGTSEGLGWLAPYL

SEQ ID NO: 80974 - DNA, 789 bp, Burkholderia pseudomallei K96243
  CDS (1)..(789): transl_table=11
atgccgaaattcgccgccaacctgacgatgctgttcaacgaagtcccgtttctcgaccgtttcgccgcagcggccgaagcgggcttcagcgccgtcgagttcctgtttccctatccgtacgcgaaggacgagctcgccgagcggctcgacgcgaatcgcctgcgcctcgtgctgcacaacctgcccgcgggccactgggatcagggcgagcgcggaatcgcgtgcctgcccgatcgcatcggcgaattccaggacggcgtcggccgcgcgatcgactatgcgcgcgcgctgaaggtgccgcagctgaattgcctcgtcggcatcgcgcccgcgagcgtcgggcgcgacacggcgctcgcgacgatcgtcgagaacctgcgcttcgccgccgccgagctgaagaaggcgggcctgcgcctgctcgtcgagccatgcaacgcgtacgacatccccggcttcgcgctgaaccgctccgccgaggcgctcgacgtgatccgcgcggtcggcgccgacaacctcttcctgcagtacgacatctatcacatgcagcgcatggagggcgagctcgcggcgacgatccgccggcacatcggcgcgatcgcgcatgtccagatcgcggacaacccgggccggcacgaaccgggcacgggcgagatccattacgcgttcctgttcgatctgctcgacgagctcggctacgacggctatgtcggctgcgaatacaagccgcgcacgacgacggccgagggcctcggctggctgcggcggatcgcgcgcgtcgccgcgtga

SEQ ID NO: 80975 - protein, 262 aa, Burkholderia pseudomallei K96243
MPKFAANLTMLFNEVPFLDRFAAAAEAGFSAVEFLFPYPYAKDELAERLDANRLRLVLHNLPAGHWDQGERGIACLPDRIGEFQDGVGRAIDYARALKVPQLNCLVGIAPASVGRDTALATIVENLRFAAAELKKAGLRLLVEPCNAYDIPGFALNRSAEALDVIRAVGADNLFLQYDIYHMQRMEGELAATIRRHIGAIAHVQIADNPGRHEPGTGEIHYAFLFDLLDELGYDGYVGCEYKPRTTTAEGLGWLRRIARVAA

SEQ ID NO: 80976 - DNA, 843 bp, Azoarcus sp. EbN1
  CDS (1)..(843): transl_table=11
atgccccgattcgctgcgaacctgacgatgctgttcgacgagctcgacttcctcgaccgcttcggcgcggcggcgcaggctggcttcaggggcgtcgagttccaatttccgtatgcgctgccgaaggaggcgatcgccgagcggctcgaccgcgccggtctcgtgcaagtgctgcacaacctgcctgcgggcgactgggagcacggcgagcgcggcatcgcgtgtcaccccgagcgcatcggcgagttccaggacggagtcggatgcgcgatcgagtacgcgcaggcgctcggttccaagcagctcaactgcctcgccgggatcgcgccgcacggagtcgatcccgacacgctgcacaagactttcgtcgccaacctgcgctttgccgcaggcaagctgggcgaagccggcatccgcctgctgatcgagccggtcaacacctgggacatcccgggcttctatctgaaccgtaccgcgcaggcggctgaactcatcgaagcggtcgactcggacaacctcttcatccagtacgacatctaccacgcgcaacgcatggaaggcgagctcggcaacacgatcgcgcgctttctgccgaagatcgcgcacatgcagctcgcggatacgccggggcgcaacgagcccggcacgggcgaaatcaatttcgcctggctgttcgcccacatcgaccgcctcggctacgacggctggatcggttgcgaataccgccccgccgcgggcaccacgaacggactcggctggatcgacgcgttggtgggccgcgaacgtccaagaccgatgaagacgacaaccggcctctcccgaccggcaaggaaagcacgatga

SEQ ID NO: 80977 - protein, 280 aa, Azoarcus sp. EbN1
MPRFAANLTMLFDELDFLDRFGAAAQAGFRGVEFQFPYALPKEAIAERLDRAGLVQVLHNLPAGDWEHGERGIACHPERIGEFQDGVGCAIEYAQALGSKQLNCLAGIAPHGVDPDTLHKTFVANLRFAAGKLGEAGIRLLIEPVNTWDIPGFYLNRTAQAAELIEAVDSDNLFIQYDIYHAQRMEGELGNTIARFLPKIAHMQLADTPGRNEPGTGEINFAWLFAHIDRLGYDGWIGCEYRPAAGTTNGLGWIDALVGRERPRPMKTTTGLSRPARKAR

SEQ ID NO: 80978 - DNA, 756 bp, Silicibacter pomeroyi DSS-3
  CDS (1)..(756): transl_table=11
atgaccgccttttctgccaatcttggatttctttgggtcgaccggcccctaccggacgcgatccgtgcagcgaaggcggccgggttcgatgcggtcgagtgtcactggccctacgaaacccgtgccgaggacgtgaaggcggcgctggacgaaacaggcttgccaatgctcggcctgaacacgatccgtggcaacccgggcgaaaacggccttgccgcgttgccgggccgtgaggacgaggcacacgccgccattgatcaggcgatccgctatgccgatgcggtgggcgcgggtgcggttcatgtcatggccggttttgccgccggcccgcaggcgcgtgccatgttcgagcgtaatctcgattacgcgacatcgcgaaccgaccgcacgatcctgatcgaaccgctaaacaggcacgacgcgccggggtacttcctgcagaccaccgggcaagcacaagagatcatcaaatccgtcagcgcgcccaacctgaagctgatgttcgattgctaccatgtaggccggaccgaaggggacatactgacccgcctcaccgagcttttgccgttgatcggccatatccaattcgcatcggttcccgatcggggcgcaccggatcatggcgagttgaattatgccgagatattttcgcatatatcaaaactcggatggacgacgccgcttggggctgaattcaagcctcgcgagacagacgagatcacgcgctggctcacctcgtttcgatcgggtggttag

SEQ ID NO: 80979 - protein, 251 aa, Silicibacter pomeroyi DSS-3
MTAFSANLGFLWVDRPLPDAIRAAKAAGFDAVECHWPYETRAEDVKAALDETGLPMLGLNTIRGNPGENGLAALPGREDEAHAAIDQAIRYADAVGAGAVHVMAGFAAGPQARAMFERNLDYATSRTDRTILIEPLNRHDAPGYFLQTTGQAQEIIKSVSAPNLKLMFDCYHVGRTEGDILTRLTELLPLIGHIQFASVPDRGAPDHGELNYAEIFSHISKLGWTTPLGAEFKPRETDEITRWLTSFRSGG

SEQ ID NO: 80980 - DNA, 786 bp, Pseudomonas syringae pv. syringae B728a
  CDS (1)..(786): transl_table=11
atgcctcgttttgccgccaacctcagcatgctgtacccgcagcatgattttcttgagcgctttgccgcagccgctgccgacggtttcggcgcggtcgagtacctgtttccttatgcttacacgccgcaggagctcaagcagcgcctgagcgacaacggtctggtgcaggcgctgttcaacgctccaccgggcgactgggacgcgtgcgagcgaggcattgccaccctgccgggccgtgaagcggaatttcgcagcggtatcgagcgggcactggaatatgcgcaggtgctgggcaatgaccgtgtgcatgtcatggccggtctattgcctaacgaagggttgcgtgagcgtcatcaggcggtctatctggagaacctggcgttcgcggctgagcaagccaagagcgcaggcgtcacgatcctgatcgagccgatcaacacccgcgacatgccgggcttcttcctcaaccgccaggatcaggcgcaggacatctgcaagctggtgggcgccgacaacctgaaagtgcagttcgactgctaccactgccagatcgtcgaaggcgacctgacgaccaagctgcgtcgtgactttgcaggcatcggccacatccagatcgccggggtgccggatcgcaacgaaccggacctgggcgaactgaactacgagcacctgttcaacgtcatcgacgaactgggctacagcggctggatcggttgcgaatatcgcccgaaaggcgataccagcgaaggtctggcatggttgcgcgcgttgcaggccaagggctga

SEQ ID NO: 80981 - protein, 261 aa, Pseudomonas syringae pv. syringae B728a
MPRFAANLSMLYPQHDFLERFAAAAADGFGAVEYLFPYAYTPQELKQRLSDNGLVQALFNAPPGDWDACERGIATLPGREAEFRSGIERALEYAQVLGNDRVHVMAGLLPNEGLRERHQAVYLENLAFAAEQAKSAGVTILIEPINTRDMPGFFLNRQDQAQDICKLVGADNLKVQFDCYHCQIVEGDLTTKLRRDFAGIGHIQIAGVPDRNEPDLGELNYEHLFNVIDELGYSGWIGCEYRPKGDTSEGLAWLRALQAKG

SEQ ID NO: 80982 - DNA, 783 bp, Pseudomonas fluorescens Pf-5
  CDS (1)..(783): transl_table=11
atgccgcgctttgctgccaacctgtccatgctgttcaccgaacaggacttcctcgcccgcttcaaggcggccgccgatgccggcttcagcggcgtcgaatatctgttcccctacgaattcagctctgccgaaattaaggcgcaacttgacgcccacggcctgagccaggtgctgttcaacctgccggccggcgactgggccaagggtgaacgcggtatcgcctgcctgcccgaccgggtcgaggagttccgcgccggggtcgacctggccattgcctacgcccaggtcctgggcaatacccagatcaactgcctggcaggcatccgcccacagggcgccgatgaagccctggtggaaaagaccttggtcgccaacctcaagtacgccgccgacaagctccaggccgtgggcatcaagctggtgatggaagccatcaacacccgcgacattcccggcttctacctcaacaataccgcccaggcgctgtcgattcgcgagcaggtgggcagcgacaacctgtacctgcagtacgacatctaccacatgcagatcatggagggagacctggcgcggaccatggccaaccacctgggccagatcaaccacatccagctggcggacaaccccgggcgcaacgagccgggcaccggcgagatcaactaccgcttcctcttcgagcacctggaccgcatcggctaccagggctgggtcggttgcgagtacaagccgctgaccaccactgaagccggccttggctggctgaaaacccacaacgcaatctga

SEQ ID NO: 80983 - protein, 260 aa, Pseudomonas fluorescens Pf-5
MPRFAANLSMLFTEQDFLARFKAAADAGFSGVEYLFPYEFSSAEIKAQLDAHGLSQVLFNLPAGDWAKGERGIACLPDRVEEFRAGVDLAIAYAQVLGNTQINCLAGIRPQGADEALVEKTLVANLKYAADKLQAVGIKLVMEAINTRDIPGFYLNNTAQALSIREQVGSDNLYLQYDIYHMQIMEGDLARTMANHLGQINHIQLADNPGRNEPGTGEINYRFLFEHLDRIGYQGWVGCEYKPLTTTEAGLGWLKTHNAI

SEQ ID NO: 80984 - DNA, 783 bp, Pseudomonas fluorescens Pf-5
  CDS (1)..(783): transl_table=11
atgcctcgttttgctgccaacctcagcatgctctacccggaacatgactttctcgaacgtttcgccgccgcggcggccgacggcttcacggccgtggaatatctgtttccctacgactacagcccccaggagctgaaacagcgcctggacgaccacggcctgcaacaggccttgttcaacgctccgcccggcgactgggcggcgggggagcggggcatcgtttccctgcccgggcgcgagcaggaattccgccagggtttcgacaaggccctggaatacgccgcggtgctgggcaactcgcgggtccacgtgatggccggcctgctgccgtccgagaacgatcgcccgcggcaccacggcgtctacctggagaacctggcccacgccacggcccaggcggccaaggtcggggtcacggtgctgctggagccgatcaacacccgggacatgccgggcttcttcctcaaccgccaggaccaggcccaggccatctgcaaggaagtcggcgcggccaacctcaaggtgcagttcgactgctatcactgccagatcgtcgaaggcgacctggcggtgaagctgcgtcgggacctggcgggcatcggccatatccagatcgccggggtgccggaccgccacgagccggacctgggcgaactgaactatccctacctgttccagctgatggacgaccttggctacgacggctgggtcggttgtgaataccgcccgcgcggcaacacctccgccggcctgcagtggctgcgggactggcaggcgcgctaa

SEQ ID NO: 80985 - protein, 260 aa, Pseudomonas fluorescens Pf-5
MPRFAANLSMLYPEHDFLERFAAAAADGFTAVEYLFPYDYSPQELKQRLDDHGLQQALFNAPPGDWAAGERGIVSLPGREQEFRQGFDKALEYAAVLGNSRVHVMAGLLPSENDRPRHHGVYLENLAHATAQAAKVGVTVLLEPINTRDMPGFFLNRQDQAQAICKEVGAANLKVQFDCYHCQIVEGDLAVKLRRDLAGIGHIQIAGVPDRHEPDLGELNYPYLFQLMDDLGYDGWVGCEYRPRGNTSAGLQWLRDWQAR

SEQ ID NO: 80986 - DNA, 774 bp, Dechloromonas aromatica RCB
  CDS (1)..(774): transl_table=11
atgccaaagttcgccgccaatctcagttttctgttcaccgacctgcccttccatgatcgttttcagcgggcagccgccaccgggtttcaaggcgtcgaatatctctttccctacgattggcccgcgcacgaggtggccgactggctgaaggcggcggacgtcgagcaggtattgttcaatttgccgcccggtgactgggcggccggcgagcgcggcctggcctgtctgccgcaccgccagggggagttcgcggaaggggtcgagctggcgttgaattacgccatactgctcgactgcgagcgcgtgcattgcatggcagggttaaggccgggcgggatttcggaggcggaactggcagcgacctatatcgccaacctgcaatttgctgccgaccgatttgccactgtcggggcgacggtgatgatcgagccgatcaacagtcgcatcgacatgccgggctattggctggacgacgtcaacaaggccctgcgcctgatcgaatccatcggccgcagcaatgtgaaactgcagctcgacctttaccacgcccagatcattcagggcgacctggcacggacgattgaagaaaacatcgagcacatcggccatgtccagattgctgataatcccggtcgccatgagccgggcaccggcgagatcaattatcccttcctgttcaacttgctcgaccggctaggttacgccggctgggtgggctgcgaatacaagccgctgacgacgaccgaggccggtcttggctggttgcccaaatga

SEQ ID NO: 80987 - protein, 257 aa, Dechloromonas aromatica RCB
MPKFAANLSFLFTDLPFHDRFQRAAATGFQGVEYLFPYDWPAHEVADWLKAADVEQVLFNLPPGDWAAGERGLACLPHRQGEFAEGVELALNYAILLDCERVHCMAGLRPGGISEAELAATYIANLQFAADRFATVGATVMIEPINSRIDMPGYWLDDVNKALRLIESIGRSNVKLQLDLYHAQIIQGDLARTIEENIEHIGHVQIADNPGRHEPGTGEINYPFLFNLLDRLGYAGWVGCEYKPLTTTEAGLGWLPK

SEQ ID NO: 80988 - DNA, 783 bp, Ralstonia eutropha JMP134
  CDS (1)..(783): transl_table=11
atgccgcgtttcgccgccaacctttcgatgatgtacacggagcacgacttcctggaccgcttcgccgctgccgcggcggacggcttccaggccgtcgagtacctgttcccgtacgagtacccggccgccgaactgcgtgcgcgactcgacgccagcggcctcgtgcaggcgctgttcaatgcgccgccgggcgactgggccgcaggcgagcgcggcattgccgccctgcccggccgcgaagccgagttccgcgatgccttcggccgcgcgctcgaatacgccggcgtgatcggcaatgaccgtgtccacgtgatggccggcctgattcccgccgataccgacctcgcgcgctgtcgtgccacctatctggaaaacctggcctacgccgcgaaggccgctgccgcccaaggcatcaccgtgctgatcgagccgatcaacacacgcgacatgcccggctatttcctgaaccgccaggacgacggccaggccatctgcaaggaagtcggcgccgcgaacctgaaggtgcagttcgactgctaccactgccagatcgtcgaaggcgatgtcacgaagaaactgcagcgcgacttcggcggcatcggccatatccagatcgccggcgtgccggagcgccacgagccggacatcggcgaactgaactacccctacctgttcgatgcgatcgacagcctcggctaccagggctggatcggctgcgaataccggccgcgcgccggcacctcggccggcctgggctggatcaagccgtacctgaagcgctga

SEQ ID NO: 80989 - protein, 260 aa, Ralstonia eutropha JMP134
MPRFAANLSMMYTEHDFLDRFAAAAADGFQAVEYLFPYEYPAAELRARLDASGLVQALFNAPPGDWAAGERGIAALPGREAEFRDAFGRALEYAGVIGNDRVHVMAGLIPADTDLARCRATYLENLAYAAKAAAAQGITVLIEPINTRDMPGYFLNRQDDGQAICKEVGAANLKVQFDCYHCQIVEGDVTKKLQRDFGGIGHIQIAGVPERHEPDIGELNYPYLFDAIDSLGYQGWIGCEYRPRAGTSAGLGWIKPYLKR

SEQ ID NO: 80990 - DNA, 783 bp, Pseudomonas fluorescens PfO-1
  CDS (1)..(783): transl_table=11
atgccgcgtttcgcagccaacctgtccatgctgttcaccgaacaggatttccttgcccgtttcgacgccgccgccaaggctggcttcagcggtgtcgagtacctgttcccgtacgatttcagctccgccgaaatcaaggccagactcgacgccaacggtctgacccaagtgctgttcaacctgccggccggtgactgggccaagggcgagcgcggtatcgcgtgcctgccggaccgggtcgaagagttccgcgccggggtcgatctggccatcgcttacgcacaggtgctgggcaacacccaggtcaactgcctggccggtatccgtccgcagggcgtggacgatgccaccgttgaaaagaccttcgtcgccaacctcaagtacgccgccgacaagctgcaagccgtcggcatcaaactggtgatggaagcgatcaacacccgcgacatcccgggtttctacctgaacaacacggcgcaagccctgtcgattcgcgagcaggtcggcagcgccaatctgttcctgcaatacgacatctatcacatgcaaatcatggaaggcgatctggcccgcaccctgcaatcgcacctggccgagatcaaccatgtgcagctcgccgacaacccgggccgcaacgagccgggcactggcgaaatcaactaccgcttcctgttcgaacacctcgatcgcatcggttatcagggctgggtcggctgcgagtacaaaccgctgaccaccactgaagcgggcctcggctggctgaagacccacaacgcgatctga

SEQ ID NO: 80991 - protein, 260 aa, Pseudomonas fluorescens PfO-1
MPRFAANLSMLFTEQDFLARFDAAAKAGFSGVEYLFPYDFSSAEIKARLDANGLTQVLFNLPAGDWAKGERGIACLPDRVEEFRAGVDLAIAYAQVLGNTQVNCLAGIRPQGVDDATVEKTFVANLKYAADKLQAVGIKLVMEAINTRDIPGFYLNNTAQALSIREQVGSANLFLQYDIYHMQIMEGDLARTLQSHLAEINHVQLADNPGRNEPGTGEINYRFLFEHLDRIGYQGWVGCEYKPLTTTEAGLGWLKTHNAI

SEQ ID NO: 80992 - DNA, 777 bp, Burkholderia sp. 383
  CDS (1)..(777): transl_table=11
atgccacgcttcgccgccaacctctcgatgatgtacaccgagcacgcgttcctcgaacgcttcgccgctgccgcctacgacggcttcaaggccgtcgagtacctgtttccgtacgacttcgccgccgaggacatccgtgcgcgcctcgacgcgcacgacctcgagcaggcactgttcaacgcgccgcccggcgactgggccgcgggcgaacgcggcaccgcttcgctgccgggccgcgaggacgagttccggcgcggcatcgaccaggcgctcgactatgcgcgcgtactcggcaacaagaagctgcacgtgatggccggcatggtgccgccgggcgccgaccgcgcacgccatcgcgacacctacgtggcgaacctgcgccatgcgacgcaggccgctgccgcgcacggcatcacgatcctgatcgagccgatcaaccagcgcgacatgcccggctatttcctgagccgccaggacgacgcgcaggcgatctgcgcggaagtcggcgtgccgaacctgaaggtgcagttcgactgctaccactgccagatcgtcgaaggcgacctcgcgatgaagctcaagcgcgatttcgcggggatcggccatatccagatcgcgggcgtgcccgagcgccacgagccggatatcggcgaactcaactacccgtatctgttcgcgctgatcgatgcgctcggctacgacggctggatcggctgcgagtaccgcccgaaggccggcacgtcggaaggcctcggctggctcaagccgtacctgtaa

SEQ ID NO: 80993 - protein, 258 aa, Burkholderia sp. 383
MPRFAANLSMMYTEHAFLERFAAAAYDGFKAVEYLFPYDFAAEDIRARLDAHDLEQALFNAPPGDWAAGERGTASLPGREDEFRRGIDQALDYARVLGNKKLHVMAGMVPPGADRARHRDTYVANLRHATQAAAAHGITILIEPINQRDMPGYFLSRQDDAQAICAEVGVPNLKVQFDCYHCQIVEGDLAMKLKRDFAGIGHIQIAGVPERHEPDIGELNYPYLFALIDALGYDGWIGCEYRPKAGTSEGLGWLKPYL

SEQ ID NO: 80994 - DNA, 795 bp, Rhodospirillum rubrum ATCC 11170
  CDS (1)..(795): transl_table=11
atgccacgcttcgcggccaatctttccacgctctttaccgaccgcccgctcgaggagcggttcgccgccgccgcggcctgcggctttcggggggtggagctgcagtttccctataccttggccccggaacggctgggcgatctggcggcgatgaaccggcttgatgtcgtgctcttcaacgccccgccgggcgattgggcggccggcgagcgcggccttgccgccctgccgggccgccagagcgagttccgcgacagcctggaggtcgtgctgccctatgtggaactggccggctgcgagcgcgtccacgtgatggccggggtggtcgccgaggacgactggcccgtcgccctggaaacctatgtcgaaaatctggcctatgccgccgatctgttcgccgagcgcggtgtgaaggtgctgatcgaggcggtcaataccgaggacatgccgggctatttcctgtcgcgtcccgatgacgccttgcaggtcatcgaagaggtcggccacaagaacctgcatgtgctttacgatttttatcacgcccagatcgttcagggcgggctgacggattttctggaatccaacatcgagcgcatcgcccatgtccaggtcgccggggttcccggacggcgcgaacccgatgccaatggcgagatcaactggccctatctgttcaatctgctcgatgcccacggcttccccggttgggtcggctgcgagtacaccccgcgcgccggcaccgaggccggcctgcgctgggcgcgggatttcgggatcagcgctccggcggcgtga

SEQ ID NO: 80995 - protein, 264 aa, Rhodospirillum rubrum ATCC 11170
MPRFAANLSTLFTDRPLEERFAAAAACGFRGVELQFPYTLAPERLGDLAAMNRLDVVLFNAPPGDWAAGERGLAALPGRQSEFRDSLEVVLPYVELAGCERVHVMAGVVAEDDWPVALETYVENLAYAADLFAERGVKVLIEAVNTEDMPGYFLSRPDDALQVIEEVGHKNLHVLYDFYHAQIVQGGLTDFLESNIERIAHVQVAGVPGRREPDANGEINWPYLFNLLDAHGFPGWVGCEYTPRAGTEAGLRWARDFGISAPAA

SEQ ID NO: 80996 - DNA, 810 bp, Burkholderia thailandensis E264
  CDS (1)..(810): transl_table=11
atgccacgcttcgccgccaacctcacgatgatgtacaacgagcacgcgtttctcgaccgcttcgccgccgcggcacgcgacggcttcaaggcggtcgagtacctgttcccgtacgacttccccgccgccgagctgaagtcgcgcctggacgcgcacggcctcgtgcaggcgctcttcaacgcgccgcccggcgactgggcggcgggcgagcgcgggatcgcgtcgctgccgggccgcgaggacgaattcaggcgcgcgatcgacaccgcgctcgactacgcgcgcgtgatcggcaacgacaagctccacgtgatggcgggcctgatcgcgccggcgcaggatcgcgcgcggcatcgcgacgtgtatctgcgcaacctcgcgcacgcggccgaagcggcgcgcgcgcagaacgtgacgatcgtcatcgagccgatcaacccgcgcgacatgccgggcttcttcctgaaccgccaggacgacgcacaggcgatctgccgcgaagtcggcgcgccgaacctgttggtgcagttcgactgctatcactgccagatcgtcgaaggcgacctggcgatgaaattgaagcgcgacatcgcgggcatcggccacatccagatcgcgggcgtgccggagcgtcacgaaccggacgtcggcgaaatccactatccgtacctgttcgagctgatcgacgcgctcggctacgacggctggatcggctgcgagtatcggccgaaggccggcacctccgagggcctcggctggctcgcgccgtacctgtcatctcccgcattctcacgaggcacattgcgatga

SEQ ID NO: 80997 - protein, 269 aa, Burkholderia thailandensis E264
MPRFAANLTMMYNEHAFLDRFAAAARDGFKAVEYLFPYDFPAAELKSRLDAHGLVQALFNAPPGDWAAGERGIASLPGREDEFRRAIDTALDYARVIGNDKLHVMAGLIAPAQDRARHRDVYLRNLAHAAEAARAQNVTIVIEPINPRDMPGFFLNRQDDAQAICREVGAPNLLVQFDCYHCQIVEGDLAMKLKRDIAGIGHIQIAGVPERHEPDVGEIHYPYLFELIDALGYDGWIGCEYRPKAGTSEGLGWLAPYLSSPAFSRGTLR

SEQ ID NO: 80998 - DNA, 789 bp, Desulfitobacterium hafniense Y51
  CDS (1)..(789): transl_table=11
atgcatgtaaagaaagaccggcttgttgccaacttatcctttctctttaatgatctgccgatgatggagcgtttcaaggcgaccaaagaggctggacttaaacgggtggagtttatgttcccttatgatttggaccttgccgagctcaaacaggagttggccgcccacgaactagagatggttctctttaacctccccgccggagactggggagccggtgagcggggtatcgcccttgaccccagccgtcaggaggagtttaaagaaggagtagcgcaagctgtcgccctcgctcaggctcttcatgtcaaacaaatcaattgcctggtggggaaggtccgtgaggatcaatccccggaggaacagcgggctaccctgatcgccaatgtccgctatgccgccaagcagttgcagcaaattggcgtcaagctgctcctcgaacccctgaatcgctttgatgccccgggattctatcttaataccacggaagatgtcctgaaggtcatcgacgaagcaggcagtgaaaatgttttcctccagtatgatgtttatcacgccgcccgggaaggagaggatctcctacagatcctgcgggaaaagctgcctcatatcgctcacattcaagtagccgataaccccggacgccatcagccgggtacaggggagatcgattaccacgctttctttaaggtcttaacagaggtcggctatccttatgccgtctctatggaatatgttcctcagccggatacggtggcttctttggagtggattaaagcgtttgagtag

SEQ ID NO: 80999 - protein, 262 aa, Desulfitobacterium hafniense Y51
MHVKKDRLVANLSFLFNDLPMMERFKATKEAGLKRVEFMFPYDLDLAELKQELAAHELEMVLFNLPAGDWGAGERGIALDPSRQEEFKEGVAQAVALAQALHVKQINCLVGKVREDQSPEEQRATLIANVRYAAKQLQQIGVKLLLEPLNRFDAPGFYLNTTEDVLKVIDEAGSENVFLQYDVYHAAREGEDLLQILREKLPHIAHIQVADNPGRHQPGTGEIDYHAFFKVLTEVGYPYAVSMEYVPQPDTVASLEWIKAFE

SEQ ID NO: 81000 - DNA, 810 bp, Burkholderia xenovorans LB400
  CDS (1)..(810): transl_table=11
atgccgaaatttgcagcgaatctcaccatgctgttcaacgaagtcccgtttctcgaccgctttgcggccgccgcggacgcgggctttcacgccgtcgagttcctgtttccgtacccgtaccagatcgtcgagttgagcgaacgtctgcagcagaaccgcctgaaactggtgctgcacaacctgcccgcgggcaactgggaagccggcgagcgcggcatcgcgtgtctgccggatcgggtgggcgagttccaggaaggcgtcggccgcgcgatcgaatacgcgagcgcgctgaaggtgccgcaactgaactgcctcgtcggcattccgacggccggcgtcgatgcggacaaggcgcgctcgaccatcgtcgagaacctgcgcttcgccgcgggcgagttgcaaaaagccggcatcaggctgctggtcgaaccgtgcaattcctacgacattccgggcttcgcgctcaatcgttctgctgaaggcctcgacgtgatccgcgcagtcggttcggacaatctgttcctgcagtacgacatctatcacatgcaacggatggaaggcgaactcgcggcgaccatcacgaagaacctgccgcggatcgcgcacatccagctcgccgacaatccgggccgcaacgaaccgggcacgggcgaaatcaactacccgttcctgttcgagctgctcgactcgcttggctacgacggctacgtcggttgcgaatacaaaccgcgcacgaccacggccgccggtctcggctggattcagagcgtggccgggcaaacccgcggcgcagcccacgccgccgcctga

SEQ ID NO: 81001 - protein, 269 aa, Burkholderia xenovorans LB400
MPKFAANLTMLFNEVPFLDRFAAAADAGFHAVEFLFPYPYQIVELSERLQQNRLKLVLHNLPAGNWEAGERGIACLPDRVGEFQEGVGRAIEYASALKVPQLNCLVGIPTAGVDADKARSTIVENLRFAAGELQKAGIRLLVEPCNSYDIPGFALNRSAEGLDVIRAVGSDNLFLQYDIYHMQRMEGELAATITKNLPRIAHIQLADNPGRNEPGTGEINYPFLFELLDSLGYDGYVGCEYKPRTTTAAGLGWIQSVAGQTRGAAHAAA

SEQ ID NO: 81002 - DNA, 783 bp, Ralstonia metallidurans CH34
  CDS (1)..(783): transl_table=11
atgccgcgcttcgccgcgaacctttcaatgatgtacacggagcacgactttctggaccgctttgccgccgccgcaaaggacgggttccaggccgtggagtacctgttcccgtacgaccatccggccgccgagatccgcaagcggctcgacgacaacggcctgacccaggccctgttcaacgcgccgcccggtgactggggcgcgggcgagcgtggcatcgccgccctgcccggccgcgagaccgagttccgcactgagttcgcgaaggccctcgaatacgctgccgtgctcggcaacgaccgcgtgcacgtgatggcaggcatcgtgccggccgacgccgaccacgcccgctgccgctccatctatctcgagaacctggcctatgcctctgcctcggccgcgtcgcatggcatcacggtgctgatcgagccgatcaacacccgcgacatgccgggctatttcctgaaccgccaggacgaaggccagaccatttgccgccaggtgggcgcggccaatctcaaggtccagttcgattgctatcactgccagatcgtcgagggtgatatcgcgaagaaactcgaacgcgacttcgctgggattggccatatccagatcgccggcgtgcccgaacgccacgaacccgatatcggcgaactgaactacccgtacctcttcgacgtcatcgaccggctcggatacacgggctggatcggctgcgaataccgcccgcgtggcggcacgtcggaaggtctgggctggatcaagccctggctgaagcgctga

SEQ ID NO: 81003 - protein, 260 aa, Ralstonia metallidurans CH34
MPRFAANLSMMYTEHDFLDRFAAAAKDGFQAVEYLFPYDHPAAEIRKRLDDNGLTQALFNAPPGDWGAGERGIAALPGRETEFRTEFAKALEYAAVLGNDRVHVMAGIVPADADHARCRSIYLENLAYASASAASHGITVLIEPINTRDMPGYFLNRQDEGQTICRQVGAANLKVQFDCYHCQIVEGDIAKKLERDFAGIGHIQIAGVPERHEPDIGELNYPYLFDVIDRLGYTGWIGCEYRPRGGTSEGLGWIKPWLKR

SEQ ID NO: 81004 - DNA, 768 bp, Silicibacter sp. TM1040
  CDS (1)..(768): transl_table=11
atgcctaagttcgcggccaatctatccatgctctttgcggagcttccttaccttgaccgattctcggctgccgcggctgctgggttcgaggcggtggaagttctctttccttatgagtttgccgccaaagaaacgcagcgtgcgcttcttgccaatgggctggagcttttgttgatcaatgccccgccgcccaattacaccggtggcgatccgggctatgctgccgttcccgaacaggcggagcgctttcagcgcgatattcgtcgggtactgcgctatgccgacatgttgaaagcgggacgtatccacatcatggcggggccagccaaaggggaggccgcgcggcggacctttgtgcagaacctgcaggcagcggcggagtctgcgccgcagcagcaattcacgatcgaaccgcttaacagcggagatttcccgggctatttcctcgacgattacaaccttgcgatcgacattctcgatgaggttgggcgcgacaatgtcaccctgcagttcgacgcttatcacgcccaacttatccacggagatgcgctcaaggtctgggagacttttgggagccgcgcgagccatgtgcaatttgcagcagctccgtcacgctgcgagccggggcgcggaccggtggattttgatgcgttgtttcaggcgatcgatgacagcggctatagtggttgggtcagcgcggaatacaccccgagcaccccaagaaccgaagacagcctgcgctggatgaaggccctgcagaccgcttga

SEQ ID NO: 81005 - protein, 255 aa, Silicibacter sp. TM1040
MPKFAANLSMLFAELPYLDRFSAAAAAGFEAVEVLFPYEFAAKETQRALLANGLELLLINAPPPNYTGGDPGYAAVPEQAERFQRDIRRVLRYADMLKAGRIHIMAGPAKGEAARRTFVQNLQAAAESAPQQQFTIEPLNSGDFPGYFLDDYNLAIDILDEVGRDNVTLQFDAYHAQLIHGDALKVWETFGSRASHVQFAAAPSRCEPGRGPVDFDALFQAIDDSGYSGWVSAEYTPSTPRTEDSLRWMKALQTA

SEQ ID NO: 81006 - DNA, 813 bp, Rubrobacter xylanophilus DSM 9941
  CDS (1)..(813): transl_table=11
gtgaggttctgcgcgaacgtctccatcttgttcggggaggtgccgtttctcgagcggttcgggagggcgagggaggcgggcttctcggcggtggagttctggtggccttccggggaggagcttgcggaggtggagtcggcggtacgggaggcggggctcgaggtggcgctcttcaacttcgacgccggggacatgcccggcggggacagggggctcctgagcgacccggaccgggtggagcggttccgggagaacgtgccggtggcgctggagctcgcggggaggctcgggtgcaggaggctgaacgcgctcgtggggcaccggctcgaggggatggggttagaggagcagctcgcgctggcgcgcgagagcgttgcttgggccgcggagagggcggcggagcggggggcggaggtcatgatcgaggcggtcaacaccttcgagaacgggccgtacctgctcagcaggacggaggaggcggcggcgttcgtccggagcgtgggccgggagaacgtccggctgcagtacgacgtctaccacatgcagcggatggagggtaacctcacggagaacctgcggcggcacaggggcttgatcgggcacgtgcaggtcgcggactcgccgggccgcggggagccggggaccggggagatcaactaccgctacgtgctcggggtgctggaggggctgggctacggcggctacgtgggcctggagtacaggccgaccacggagacgaccggggagagcctggcctggctgccgcgggagctgcgcggcggcgacgtgagggtagaggagctcgaactctag

SEQ ID NO: 81007 - protein, 270 aa, Rubrobacter xylanophilus DSM 9941
MRFCANVSILFGEVPFLERFGRAREAGFSAVEFWWPSGEELAEVESAVREAGLEVALFNFDAGDMPGGDRGLLSDPDRVERFRENVPVALELAGRLGCRRLNALVGHRLEGMGLEEQLALARESVAWAAERAAERGAEVMIEAVNTFENGPYLLSRTEEAAAFVRSVGRENVRLQYDVYHMQRMEGNLTENLRRHRGLIGHVQVADSPGRGEPGTGEINYRYVLGVLEGLGYGGYVGLEYRPTTETTGESLAWLPRELRGGDVRVEELEL

SEQ ID NO: 81008 - DNA, 768 bp, Mesorhizobium sp. BNC1
  CDS (1)..(768): transl_table=11
atgttgtacagcgaatggccctttctcgagaggtttgccatggccgcagcggacggttttcaagccgtcgaatatctgcgcccttatgacgagacccccgaggcgatatgcgagcagcttgaacgccacgacctcgtccaggcacttttcaacctgcccgccggggactgggcagcgggcgaacgcggaatcgcctgcatgccggaccgcgtcgaggagttcaaggcaggcgtcgaggttgcgatccgttatgcgcaggcgttgaagtgcagcaaaatcaattgcctcgccgggattgccccgacagatgccagtgctgcggttctcgaggtaacgctgatcagcaatctctcccatgccgcggcgaggctgcgagatgtcgggatcgatctgctgatcgagccgatcaatttgcgggacattcctggcttttttgtatcaacgaccgatcatgccgagcgcatcatcgacgccgtcggggccgataatctgttcatccagtatgacctctaccacacgcagatcatgcagggtgacctgatctgcggctatgagcggcttagggagcgcatcgggcatatccaactggccgacacccccggccgacacgagcccggcactggggagatcaacttcgcaaacgtcctgcccgccctcgattcgctgggatatggcggattcgtcggctgcgaatacaagcccctcgccggaacgcgcgaaggccttatctggatgaagccatacctgcagggaggagttggagaatga

SEQ ID NO: 81009 - protein, 255 aa, Mesorhizobium sp. BNC1
MLYSEWPFLERFAMAAADGFQAVEYLRPYDETPEAICEQLERHDLVQALFNLPAGDWAAGERGIACMPDRVEEFKAGVEVAIRYAQALKCSKINCLAGIAPTDASAAVLEVTLISNLSHAAARLRDVGIDLLIEPINLRDIPGFFVSTTDHAERIIDAVGADNLFIQYDLYHTQIMQGDLICGYERLRERIGHIQLADTPGRHEPGTGEINFANVLPALDSLGYGGFVGCEYKPLAGTREGLIWMKPYLQGGVGE

SEQ ID NO: 81010 - DNA, 822 bp, Rhodococcus sp. RHA1
  CDS (1)..(822): transl_table=11
atggataccttggcctacaccctgaactgctcgatcctgctcaccgacgtcccactcctgcagcgcccacaggctgcccgggatgccggattcgacgccgtcgaattctggtggcccttcgacaccgccgtgccgcgggacagcgacgtcgacgcgttcgtggccgcgatcgagaacgccggagtgcagctcaccgggttgaacttcgcggcgggcaacatgccggcgggggaccgcggactgctgtccgacccggcgcaggtctcggcgttccgcgacaacatcgacatcaccgtcggaatcggagaacggctgggcaccaaagctttcaacgccctgtatggtaatcgtatcgacgggacggatccgaagattcaagacggcacggccaccgagaacctcgcccaggccggcaaggcggcagatcgcatcggtgccgtcgtactcgtcgaaccggtcagcggcacgccggcgtacccgctgaagagcgcggccgacgcgatcgccgtgatcgaccgggtgaaggcggaacacggtgtcgattcgctccggctcctcgcggacctctaccacctcgaggtcaacggcgacgacgtcggcgccgcgatcgacacgtacgcggaccgcatcgggcacgtgcagatcgcggatgctcccggtcgcggagaacccggcaccggaacactcgacatcgacggctacctgaagaggctcgccggacacggctaccgcggatatgtggggctcgagtacaagtccacccgaccggacaccttcgactggttgccccgcgaacagcgcgcgtcccgcgccggccactga

SEQ ID NO: 81011 - protein, 273 aa, Rhodococcus sp. RHA1
MDTLAYTLNCSILLTDVPLLQRPQAARDAGFDAVEFWWPFDTAVPRDSDVDAFVAAIENAGVQLTGLNFAAGNMPAGDRGLLSDPAQVSAFRDNIDITVGIGERLGTKAFNALYGNRIDGTDPKIQDGTATENLAQAGKAADRIGAVVLVEPVSGTPAYPLKSAADAIAVIDRVKAEHGVDSLRLLADLYHLEVNGDDVGAAIDTYADRIGHVQIADAPGRGEPGTGTLDIDGYLKRLAGHGYRGYVGLEYKSTRPDTFDWLPREQRASRAGH

SEQ ID NO: 81012 - DNA, 777 bp, Haemophilus somnus 129PT
  CDS (1)..(777): transl_table=11
atgcccaaatttgctgcaaatttaaccatgatgtttaacgaagtcccttttttagaccgttttgaagcagctgctactgctggttttaaatatgtggaatacctttggccctatgattatccagcagatatgctaaaggaaaaattagataagtatggtttacaacaagttctatttaatacttcagcaggcaatgtagacgccggcgaatggggtgtctctgcgattccgggtcgtgaagcggatagccaccgtgacatcgatcttgctcttgaatatgctcttgcgttaggttgtccacacgttcatgtgatggcggcagttgtaccgcaaggcgaagatcgagaagcctataaacagactttcatcaaaaatgtgcaatatgcggcagataaatttaaaccgcacggtattaaagtcttattagaagcactcagcccggaagtcaaacctaactacctgctgaaaagtcaattcgacacgctagaaattgttgaatccgtcaaccgagataacgtctttgtacagttggattatttccacgcacaaaacgtagatggcaacttgtctcgcttaaccgacaaactcaacggcaaatttgcccatatccaaattgcctccgtgccgaatcgccatgagcctgatgaaggtgaaataaattaccaatatctctttgataaattggatcaaattggctatcaaggttttattggctgtgaatataaaccacgctctgacaccttagcaggtttagattggtttaaaccttacaaataa

SEQ ID NO: 81013 - protein, 258 aa, Haemophilus somnus 129PT
MPKFAANLTMMFNEVPFLDRFEAAATAGFKYVEYLWPYDYPADMLKEKLDKYGLQQVLFNTSAGNVDAGEWGVSAIPGREADSHRDIDLALEYALALGCPHVHVMAAVVPQGEDREAYKQTFIKNVQYAADKFKPHGIKVLLEALSPEVKPNYLLKSQFDTLEIVESVNRDNVFVQLDYFHAQNVDGNLSRLTDKLNGKFAHIQIASVPNRHEPDEGEINYQYLFDKLDQIGYQGFIGCEYKPRSDTLAGLDWFKPYK

SEQ ID NO: 81014 - DNA, 777 bp, Rhizobium leguminosarum bv. viciae 3841
  CDS (1)..(777): transl_table=11
atgccggttttcgccgccaacctgacgatgatgttcaacgaatggtcgttcctcgatcgcttcgacgccgcagccgatgccggctttgccgccgtcgaatacctttttccctatgaagccgctccggaggcgatcgccgaacggcttgcccgcaacaatctgcagcaggccttgttcaacctgccgccgggcgactgggcagcaggcgaacgtggcatcgccgctcttcccggacggttcgatgcgctgaaagccgatgtcgagcgggcactggactatgcggcggcaacgggcgtcagacggttacacctgatggcaggcatcgccgaccgtcatgacgaagacgccgcctcttcttatcggcgctccgtcacctatgccgccgggcggcttgcggaaaagggcatcgatctgctgctcgagccgatcaacgggcgaaacatgccgggatatttcctcaacgacttcggcgtggccgagcggctgattgccgaatgcggcctgccgaacctgaagctgcagttcgacatctatcaccggcagatcatccgtggcgacgtcactatggcgttgcgacgtctgctgccgatcaccggccatatccagatcgccagcgtgccgtcacgcaatgagcctgagggggaggaactgaactatccctatctgttcggcgaaatcgaccgcctggcttatgacggtttcgtcggctgcgaatacatcccgcgcggccacacactggacggtcttggctggttcaaaccttttgcacggagctag

SEQ ID NO: 81015 - protein, 258 aa, Rhizobium leguminosarum bv. viciae 3841
MPVFAANLTMMFNEWSFLDRFDAAADAGFAAVEYLFPYEAAPEAIAERLARNNLQQALFNLPPGDWAAGERGIAALPGRFDALKADVERALDYAAATGVRRLHLMAGIADRHDEDAASSYRRSVTYAAGRLAEKGIDLLLEPINGRNMPGYFLNDFGVAERLIAECGLPNLKLQFDIYHRQIIRGDVTMALRRLLPITGHIQIASVPSRNEPEGEELNYPYLFGEIDRLAYDGFVGCEYIPRGHTLDGLGWFKPFARS

SEQ ID NO: 81016 - DNA, 795 bp, Rhizobium leguminosarum bv. viciae 3841
  CDS (1)..(795): transl_table=11
gtgccgaaattttccgccaatctttccttcctttatcaggatctgccctttctcgaccgcttcacggcagccgcaaaggacggcttcggcgccctcgaatatctcggcccctacgccgaacccaaggagaaagtcgccgaggcgctgaaggcgagcggcctgaaacaggcgctcttcaacgtgccatcaggagactgggccggcggcgagcgcggcatcgcctgcctgccggaccgcgtagaggagttccgcaacgggatcgcgcaggcgctcgattatgccgcagcgctcgattgccggcaggtgaatgtcatctccggcctggtgccgaaggatgcggaccttcaaacgctggaaacggtgctggtcgacaatctgaaatatgctgcaaagcgttgtgccgacgccggtgtcaggctgctggtcgagccgatcaacctgcgcgatattcccggcttcttcctgtcgaccaccgctgatgccgaacgcattctcgaccgggtcggctcggacaatctctacatccagtatgatttctaccacatgcagatcatgcaaggcgacctgatccccaccttcatccggctgaaggagaagatcgcccatgtgcagatcgccgacaatcccggccggggcgaacccggcaccggcgagatcaattacagcttcatcctctccgagctcgatcgcctcggctacgacggctgggtcggctgcgagtacaagccgaaatccggcaccagcgaaggcctcggctggatgaaaccctatctgaactcagcgaggacagcatga

SEQ ID NO: 81017 - protein, 264 aa, Rhizobium leguminosarum bv. viciae 3841
MPKFSANLSFLYQDLPFLDRFTAAAKDGFGALEYLGPYAEPKEKVAEALKASGLKQALFNVPSGDWAGGERGIACLPDRVEEFRNGIAQALDYAAALDCRQVNVISGLVPKDADLQTLETVLVDNLKYAAKRCADAGVRLLVEPINLRDIPGFFLSTTADAERILDRVGSDNLYIQYDFYHMQIMQGDLIPTFIRLKEKIAHVQIADNPGRGEPGTGEINYSFILSELDRLGYDGWVGCEYKPKSGTSEGLGWMKPYLNSARTA

SEQ ID NO: 81018 - DNA, 798 bp, Pseudomonas aeruginosa UCBPP-PA14
  CDS (1)..(798): transl_table=11
atgccccgcttcgccgccaacctcagcatgctctacccccgccacgacttcctcgatcgcttcgccgctgccgcggcggacggctacgagggcgtggagtacctgttcccctatgcctatcctgcggccgaactgaaggcccggctggacgaccacggcttgcgccaggtgctgttcaatgccgcacccggcgactgggacaagggcgagcgcggcctggccagcctgccggggcgcgaggccgaattccgccgcgccatcgcccaggccatcgactatgcccaggtcctcggcaaccgccacatccatgtcatggccggactgctgccggccggcgccgaccgcatccgccaccgcgagacctacctcgacaacctcgcccatgccgcccgcgaagccgccggcgccaggctgacggtgctcatagagccgatcaacaaccgcgacatgccgggcttcttcctcacccgccaggacgacgcccaggccatctgccgcgaggtcggcgcggacaacctgcaggtacagttcgactgctaccactgccagatcgtcgagggcgacctggccaccaccctgcgtcgcgacatcggcaatatcggccacgtccagatcgccggggtacccgaccgccacgagccggatgacgacaacgaagtgaactacccctacctgttcgagctactcgaccggctcggctaccagggctggatcggctgcgagtaccgtccgcgcggcgacacctcggcaggcctggaatggctgcggcgctggcgcgctactcgacgcgacggatga

SEQ ID NO: 81019 - protein, 265 aa, Pseudomonas aeruginosa UCBPP-PA14
MPRFAANLSMLYPRHDFLDRFAAAAADGYEGVEYLFPYAYPAAELKARLDDHGLRQVLFNAAPGDWDKGERGLASLPGREAEFRRAIAQAIDYAQVLGNRHIHVMAGLLPAGADRIRHRETYLDNLAHAAREAAGARLTVLIEPINNRDMPGFFLTRQDDAQAICREVGADNLQVQFDCYHCQIVEGDLATTLRRDIGNIGHVQIAGVPDRHEPDDDNEVNYPYLFELLDRLGYQGWIGCEYRPRGDTSAGLEWLRRWRATRRDG
